United States Patent Application Publication US 2007/0083945 A1 - sequence listing, part 16

SEQ ID NO: 104289 - DNA, 434 bp, Glycine max
  unsure (1)..(434): unsure at all n locations
ggtcttataccactgtcaaaacattaagggctgaggagtatttcgagttctacaaaaaagaaacatctctttgaaattccgatcacgccaatgcgaccgaggttcagtgaatgccgcanaaacaacctcaaggttattaaaagataacttttacaatgtctcattctctacggtctttttcaaaggaagcgtaaaaacaccctattacagtacccaacacataagagacactaagaagaacttaaactagctaggagaaggcttatacgtcaaggttacctcaaagaaactctgaaataaaggattgagggattttctccaccgaatcttcgaggaggattctgaggattccgctctgattaaagtgttcctcttggtgtgggggttcaacggaaagtaacggcggctcacgatggccaccgatggtcttgggt

SEQ ID NO: 104290 - DNA, 462 bp, Glycine max
  unsure (1)..(462): unsure at all n locations
agcttgtgttcataagctatggtagtgttngtgtgtgttatagtttttgcttggttggcgggtatgcacatggaagttaaattatacttgtgtctttaagctatggtagtgcatccttttgtatatagttgcggccttgtgggttatgtatatggtagcagctacatgtacatgatatgaggttaatggcagttcttagtataactctttgatgacacaactttgtttctgtaatgctgcatatatggtggatttacaaatttggataagtgacaatgcaacctatacataacaggtcatacgaagctctagtagttatggtagttagttgtaacaatgtgtagaaattaagtgcattaattggtatcaatcaattaagatgtataaattagatgaataccaatcatgtgatcatgttntatggttggtggttttcttccatatgtggtatagtacttaaaa

SEQ ID NO: 104291 - DNA, 521 bp, Glycine max
  unsure (1)..(521): unsure at all n locations
agaacttagaaaaaatanaaacaagcttgttcgctcattgttcgcgtgtaagatatccaatcgacaaggcttgaagtagaggagaccttcaatcctataacgcaacatgacggacaaaagtgggcagttaacttgaatggccattattgtcaatgcggaaggtattatgcgcttcactatccatgttcacacattattgcagcttgtggttacgtgagcatgaactactaccaatatatagatgttgtttacacaaatgagcacatcttanaagcatactccgcacagtcttggcctcttgggaatgaagcgaaaatttctccttttgatgatgcatggacacttatccttgaccaaactacaattcgtgagaaaggtcgggcaaaatcaacaaggataaggaatgaaatggattggctcgaaccatctgaccaccgatnaaaatgtagtaaatgtggagcagaagggcacaatangcgccgatgtccaatacaatatgactgtgggagtaattcatttaa

SEQ ID NO: 104292 - DNA, 474 bp, Glycine max
  unsure (1)..(474): unsure at all n locations
agcttgcaatggctcaacagatggcacactgtatctctcatttgaataatgataggaaaactcgccaaacgatgcaacatatctatttggcctataatgaaatcaagtaattaaatcaaaatatatatgtcaaagtaattaaatccttggtaatttatttgatatccctctttatatcaagtaattaaatcaaaatatttatgtcaatttatattcattaattagcttattgactaatattattaaatatttttattcaatcaactagctagcttaataaattttattatttcagctcttatgagtttcaactaatttataagtttaattttcaactaacttgtaaatttgttttgacaaatattctcgtatcaactattntctattnttatctctgtatgacctagagtcaaagtaactaccaatatttagtcaaaaaatagagtgcagtgaaaatgacaacataatattatt

SEQ ID NO: 104293 - DNA, 398 bp, Glycine max
  unsure (1)..(398): unsure at all n locations
tgtaagaagggcattttaacatcaaattgatgcatctcttatccaaagngcgcagctaaggagatgatgatcctaactatattcattnttgccactggaacgaatgtctcctcataatcaatctcataggtttgggtgtatccctttgcaaccaaccttgtcttataccagtccaatgtgccatcagccagatatttaactgtatatacccacctacaacccactgcctttntgtcttttggtctctctacaatctcccaagtctcattcctttccaatgcactcatttcttcgttcatggctcanacccagttctcatcctttaaggcttcttgtactgatgtagggattatgatagaatcaatagctgaaataaaactctggtgctatagagaaag

SEQ ID NO: 104294 - DNA, 473 bp, Glycine max
  unsure (1)..(473): unsure at all n locations
agctngnananatggcttcatgatgatgaatttgattgttcaggggtntngatgatnacaaagatgatgacaaaaatcccatgagaatgacttcaagattgagtcaagatcaatttcagaatcaagagaatgattcaagagaagtttcaagattcaaggttctcaagaatcaggaatcaagaattattaatatccagattcaagactcacgattcaagaatatagaataggctcaatcaagataagtacaaaaaagtttttcaaaacagtgagtagcacatgaagtcttcacanaagcttttaccaaagagtttttactctctggtaatcgattaccagtttactgtaatcgattaccagtggcaagttttgttntcataaagttttcaactgaatctacaatgttccaatcaatttcaaaatgggttaatcaattacaatatattggtaatcgattaccagtgtgtttgaac

SEQ ID NO: 104295 - DNA, 375 bp, Glycine max
  unsure (1)..(375): unsure at all n locations
cccatgagccagtagttccatttaaccaatgcaattntcttttgatcaaggccaccaccccatatgaacctcctctggattagccccgaatggtattcccaaataagagataagcagaggcatgattctgcaattcagataactggcagcctgccatctccattgtcagattggcccaagaccacaaagctgctcttcccataattcatcttaagtccttgctgcacctgagatcttgntgcatcttcaacacacatacaaacactcacactcacacacacacatacacaaccactcaggcactcacactctcatattaacacacacacacactcactctcacacactcgctcagaaataaacacacacatactc

SEQ ID NO: 104296 - DNA, 435 bp, Glycine max
agcttgtaattatttttcaattaaaagacaatgtttattagcttctttatcaagaagagcaaaacaaacgttacttaattgtgtaatccacatctccaagataaaccttgcattccaaataatgattgagtaaaggaaaagtaagccaatggagtagagtattgtagcttgaacttgggtttaagggtgttgagtaaagtataatgattcagacttaacttttagtttcaatggacatatgtagactagaattctctagcataaggtgctaaggtaatctttggctaacacattattataaagagatatttttctttaaaataaatattagcaacatattctttggccaacacattatttgtaattgaaatatattagaaaaaatatataataaatcctacttttatttacaaaactcgttattttataacaaat

SEQ ID NO: 104297 - DNA, 427 bp, Glycine max
  unsure (1)..(427): unsure at all n locations
tgtttatagagccattgatagcggtgacgattgttggaagaagcagtttgagcatggngtagcacctgatgtggttaccatctgcgaaggtgccagggtgttacgtgctgcgcttgttgctgaacttctagggtcagcaccttcagaagaagaagaagaagagtagaagaagaaagctaagggaaggaacctctgtatttctcattcattcatgattcatgttggtattacatattcctatttatactgaattctatacaactaattntgtgattntgtgcttttctagaatattcagaattcaagaattgattattcttgtcccctanaggccaacattgaatcttccattctgcaaaagcgctcctgcactacccctgcttcaaacganatcattgaggtaagcaggccttacaattctcctctt

SEQ ID NO: 104298 - DNA, 453 bp, Glycine max
  unsure (1)..(453): unsure at all n locations
agcttatatagcttccataacatgcttaatgtgttcgacaattaaattttagttccaaatgtatttcaatgtgtggaatctttcctcaatttaaggataagcaggaatatttatgacataagttctaataagtaatagcactgtaggataagttattggcttgtattttagatgtcattagattatgatntttcgagaattctagcttcttctatggaataataatacatttcaacctatctttttntttttggggccggcatggcgagaatcagcatttcagcttgaatataatttactcaatggctgaatttggaagttctcatgcgtgggacccgataatggaattatttgcttgatttaaggataggtagaaaaaaaatcaaactgcctacatatttttccacgaggattgccattgccataattctttgaagttagaaatgatattat

SEQ ID NO: 104299 - DNA, 269 bp, Glycine max
  unsure (1)..(269): unsure at all n locations
gcatatgttctactgattccatatttccggctaggataaggcacgagtggatgtctgttgactatatatggaaatccctgacgttatcagagaggaaaatattatggcatccgaatcacactcacatctgaatgggatagatccgagaccatctacatcttgctcttcacactaccttcacacaatggatacaaacatggatcctagcgtcaatctaactcgccaagtgcaagataatngaactttttacagcgtgtacgcataatcaa

SEQ ID NO: 104300 - DNA, 458 bp, Glycine max
  unsure (1)..(458): unsure at all n locations
agctggaggattatggggtatccatcacatgtggtactaaggggcggncgggcgatggtgcaaaacaattctccacatccacaaatcacatataaacccaccatcccctgttgcccaccttcaactgagctcacgtactcccacgtagcccttatcctcgttcctctcaacgccgggtccccatcaatcctcccaagcttccacaacatccacgtaattccacatccaatcatcatgaactcacaaaaccaagaaaaacagagcaaaggcagaaaactctgcccaaaacacaaaccaaaaacacagcttttcacatccaaaaaccccagtaacattctcttcgttccaattcgttaaccgttggatcgactcanaacttttactggaagtctctagcacataagtctaaatcttgaccgttgggatctactagcaaatgtccagaaccccatgtgtac

SEQ ID NO: 104301 - DNA, 434 bp, Glycine max
  unsure (1)..(434): unsure at all n locations
tacacgaaatacanaggctgaagcattatgctctcacgaaaagaagcgtttcacacacaccagaagacatatcgtagatcgcaacggtcaaatcatggaaatctgtcccatgaatctctagaccaaatgtcgagaagatccaacggttaacgaaagcaggagagcacttttaccgagacagttgtggacaacttccttgagaagcttcattaagaggtttcctcgagaagcttcctcgtgaggcttctttgagaagttttcttgagaggcttctttgagaagttaacgctttaactaccaacacccttccaataactaaactcatctccttgaaataaaacacggatgaaataacacaacaaatataattaaacatcacatataattactaataatantttaaagnggtacatgatctatgcatacaaaatact

SEQ ID NO: 104302 - DNA, 380 bp, Glycine max
  unsure (1)..(380): unsure at all n locations
tttctttatggntaacattgtctctagaacatttccattggatttattgatgaaatctatacattttcaggtgaaaaagaagctaagttctgaatcgcaaaaagtagaagttgggctaagcgcatgtccaccgctaagcgcaacttcagcgtgcttcacgcanaggagaaattggcagagcattagcatcaaagtcacgcgctaagcacgagattagtgtgctaagcgcagcatgtgcgttcagccaggctaagcgcaagactggcgctaaacccaatctcacttacccgcactaagcgtgaaggtggcgctaagcgcagcgtcgcgatttcagaccctatntaaagcctgtcttggtgcataattagggtacaagtttt

SEQ ID NO: 104303 - DNA, 197 bp, Glycine max
aattaatttaaaatatttagctcttttttagtggctttttcctctccttaaatttttaatattcggtaattcttatttctataaataattacataaatattatctattttaattttatattctctggtttaaaaaataattcaagttaaggattttctttttgacatatgtcaactataaatttttttatcaacatc

SEQ ID NO: 104304 - DNA, 324 bp, Glycine max
  unsure (1)..(324): unsure at all n locations
ttctcagggcatttgccgctattcctgtctttctctaactaaaggcttaattaattactctacttgtttctgtacttagaaaataaaatagtacctatagtttaaaatattttattntaatctctgtcgtccatatatagccttcatatatcatatttggttatagaatctctaaaatacatgtggtgtagaaagaaaaaaaaaattgggattataattttgaattgtgtgtattttggtgggccatagatgtgttgaaggagtttgcttccaagaaatgtggtaaacttgggaaattgctcaaggagacgggtagtcatggga

SEQ ID NO: 104305 - DNA, 393 bp, Glycine max
  unsure (1)..(393): unsure at all n locations
tattcataaaattagagtttatctcttttatattagtgagagtgattctcctaaattcttgagtgattcaagaacaccctggctgtatcaaaggactttcacaacctttgggtgttgccctcgtcagaaagagagattatttccttcctttcatcttcaccttgtctttcaaccacaatttcagaaaattccattcagcccaaaaatatctcgtggccataattcccgttttacgcattcaaattaagtgattcttgagcctaaattgaatttcaaaacgagacctttcacctcgttttggaatcacctcatttggagtcctgtagcttgagttattgccatttctatatttntgtcagccactacttaacctatggtttatcatctcattct

SEQ ID NO: 104306 - DNA, 392 bp, Glycine max
  unsure (1)..(392): unsure at all n locations
agatgataacaaaggtgatgaaccaaaatctcaaaagatccaagaacaactcaagtgaatcaaagaacatctcaagtaaatcaagaacaagtccagagttcaagaatcaaagaatcaagactcaagatctcaagaatcaagatcaagattcaagaatcaagattcaagaatgaagaaaagactcantcaagataagtattaaaaagttttttcaaaactctgaatagcacatgagtttttgacaaaacctttaccaaagagtttttactctttggtaatcgattaccatattggtggaatcgattaccagtagcaaaatggagttgaaaaagntttcaaactgaatntacaacgttccacatattttcaaaaggctggaatcgattaccagt

SEQ ID NO: 104307 - DNA, 306 bp, Glycine max
  unsure (1)..(306): unsure at all n locations
tggcacatgctcattccacaattggtagntggggctataccagacatcttgccaaacaaagtcagggtaacgataactcgcccgtgctttttcttccatgctatatggagcaaaggcattgatcccgtcctggttgattacctggaaaatgaagcccgcattatactgtgcccgttggagatgtattttcccctactttcttngacatcatgattcacttgattgtgcatctcggcagaaaaatcaaatgttgtgggcctgtntatctacggtggatgtaacccggtgagcaatacatgaagatct

SEQ ID NO: 104308 - DNA, 397 bp, Glycine max
  unsure (1)..(397): unsure at all n locations
atcctgactcaccatanaccttgacccggtgtgagaatgtcaatccttaccctcggaagcgaaaaaaaagagaaggaaaatttccaatcaaaggaaaaaaggaaagaaggaagatttccaatcaaagagaaaggaaaaaaggaaagaaggaagatttccaatcaaagagaaagctaaaaaagaaaagaagggaaaatcacaatcaaagagtgtgagaaaagcaaaagaaaagaaagataattcccaatcaaagaatgggagaaagtaaaaaaggaagaagaagaaggaaagaaagctcctgatcagggatcgaagganaacagaagaaatgtgcagaaaggtctttggaccggacaatatctgaacaatacagaattgtcaccaaatgaacaaaaag

SEQ ID NO: 104309 - DNA, 372 bp, Glycine max
  unsure (1)..(372): unsure at all n locations
tgtcttcacaaataatcatcacacagcttatttactaacaaaactacccctcatatctcccaaaaccccatacccacgaaaatcaagagggaaagaagtccacccaaacctgaattttcgaagtcccactcgtagccacgcacttcacgactccgaaaatgctctcctttcgcgatttggagcagaaatgagcaccaaggttgaagcttttgtgggcaacaatggtggatgggagaaaagaagaaaaggctgcgtgagagagagagagagaaaaggcttctgaatttctgctttggctgagtgaggagagagaanagctttttggttttaataaaaggggtttccccttttccattantttattcaagctct

SEQ ID NO: 104310 - DNA, 334 bp, Glycine max
  unsure (1)..(334): unsure at all n locations
gccaccattttttatagtagaatactggtaatgtgtctactatcattgnncattttgtttccgtcattgaggtttcacttgagctgccaggtctctccacctttgggcgtattcttttgaaagattcgtgccccctttttgcacatgttttggagttgcattctatccgaaccattatactaacactggctaacgaagggcaccactaggtccttccaagaatggactncggaaggtccaaagtagtgtaccaggtaacaactaccccagtaaactttcttggaggaatgatcacaattnctcatctttgcgatgccccatcttngatatacat

SEQ ID NO: 104311 - DNA, 362 bp, Glycine max
tgcaatatatcgagacgctcgaaattgaaaacggaacctctaacaaaagtcaaatgacaataactcttgacttggatgtacgattgagatccgttatatatcaaggcgctcgtaaatgaaaaccggagctctgtacaaatcaaacgacagtaaattttgactcggttgtccgattgagccttgccatatatcagagccgctcgaaattgaaaacggatgctctaagaaaagtccaacgacaataacttttgtttcggagtgtcgattaggctcgcattatatcgagacgctcggaattgaaaattgaagctttgagacaaatccaacgactattaacttttgatacggatgtccgattgtgt

SEQ ID NO: 104312 - DNA, 471 bp, Glycine max
  unsure (1)..(471): unsure at all n locations
agcttgctgtataattacacgtaagactcacatatatgaaaattctccacttaggaatacgaaagtcactgcaatgacatcanaatttttctcactttatctgctgcataataatcacaggaagatcagctaagttgcagttatatttgtttattgaatgggtttcctcaaactttcccttgaacaggcctgcgacatttggagaaccttcagctttaaccgtgatgcaatcatcatttaccaccagcttagtccaaaactgacgcttgccatcanttttctcataataatcagatgttttggtttggctaccacgaagaatagattgaggaacctccatgtagagtgtccatgaccaagcccgagaatgccatgtgggattagaaattagctgtagatatgggaccttgcatacctgcaggtatcaaaaacttaacaaaatgtccattntacaaccaacttcggaaagag

SEQ ID NO: 104313 - DNA, 428 bp, Glycine max
atagtagctacctgcttctgccatcttcaatagtttctctcttcacccttttcatctattactacctacttatagttaagaaaaaaaaaacccacaaaaatcaaatatacatattcttttgtttttatgctacaggattttataaacaaaacgatttctctgctttctatttttggataaataattctagggacttgcttaatttatcaatcaagctctcgtgcaagctattttaacttacagctaggttggttgaaaaattgtgcatgcaggtatgttccacgtggcgagaggtgtcgcggtcggatctgctgtggcagcggctcacgagacgcatatggcgacgcacctatcgactgagggccacgtggcagctggagtacatgtattggcatcggacggccaggaacttctcgacagggagacac

SEQ ID NO: 104314 - DNA, 472 bp, Glycine max
  unsure (1)..(472): unsure at all n locations
ngcttctatatangctgaacgctgttatcaattaacacatgttgagntntaatcagacaattagagtgtatctcttctatcttagtgagagcgattctcctaaattcttgagtgattcaagaacaccctggctgtatcaaaggactttcacaacctttgtgtgttggcctcgctggaaagagagattctttcctttctatcatctccacccttgttctttcaaaccacaatttccagaaaatccacctctggccaaaattatctcgtgaccataactcccatttcacacactcaaattaagtgattcttgagcctaaattgaatttcaaaacgagacctttcacctcgttttggaatcacctcatttggagccctgtagcttcccgtattgccatttctatatttctgtccagccaccacttaacctacngtttaccattccattcattcattttatgccagaaaccacctt

SEQ ID NO: 104315 - DNA, 503 bp, Glycine max
  unsure (1)..(503): unsure at all n locations
tatgcgcctatntccttacaaacgttctcttgcaccagacatttaaccgagaaaatgcacccatatacaatcaaggcagcttcgttacctagattatttacacgtacctccaaggtgtatttgttacttacatcacacacatctncttggctaaattcacatacatgcatactcaaagcattttggggcaccaaaaattgcacatgtgcacatcttggcatttctaatacctatacatacgcaaacttcatgatgaatctcgactatctacacaataaggtgctacatttcatgctcctttctcaagtttttgctacctaaagccgcatgcaaattcaagcatattttcctttgctgactaaaattgtattcaaattaaaaggtactatttttgtaatatgtnttcttcacataacatgcaacatatttatatatattttctgtgagacattntgactaccaaaaattatatatacatacattcaagtattttgctatttata

SEQ ID NO: 104316 - DNA, 412 bp, Glycine max
tctccacagagtccattgcctccctcggctcatatatgatcagccgctgacgtgcttcacttttggggacttctagctatcacccatggtggaagaattcgaataaagtctaagatgtcctctatgtggaaggaaaccatacctcttctcagggttctatccctcattatctagaatttataaaatagtcctaatctcggcacaggatttagaccgcctaaagcaagtccaaaataggtgggtcagggtaccgacaaaatgtttggaggcaaatgctataatcttggcaggtagaagcgaatgggccctgctcatagacgttctcgcactgtttgtctttggaagaatcctctttccaatatggatgggttggtggacctacagcgatcgagctgttcttgctatataacca

SEQ ID NO: 104317 - DNA, 463 bp, Glycine max
  unsure (1)..(463): unsure at all n locations
agctngtcttctaccaatctatatatcataaatggtgggcaattgcatgcttctttaattgtcatataactctgtccatatgctggttgntcaatctttttatgtttaagaatgtgagcaagaaaagaattcacggaattatgctgcagaattgtcattattattagttgtcacttatttcattccttatgaaatattctgtcgcatgctttctaatttgatcattntgntatcatactgaaatgggccattcagtactgatgcccaatggatccatgtaactttttcttctttcctgaaaattntgcttctagtctagtcatgttcatgcgtatcagattatttggatttggaaaattaagtgtatttcatgtattctactgctttcaaattcagaaaaaagatgtcatagtttatccttttgaaaatgaagtctaagaaaaaactatgattcatgttgatg

SEQ ID NO: 104318 - DNA, 384 bp, Glycine max
  unsure (1)..(384): unsure at all n locations
cattattgataaaaagaatgatgaggtaaaagatgagaggagtcaatggagagaaaaaccaataattgttgtaaggaaagaagttaaagacaatgaaaaagaaatagagggagaaaaacaaaaagaaaaatttgaaaaaaataaagaagaggaaaagagtaagagtgaaaaagcaagagaaaagagatcaaaaacagattcagatgaaggaaaggaagtgccataccctttggtaccttccaagaaatataaggaatgccacctggcgagattcctagacattttcaggaaacttgagataacaatgccctttggagaanatctacaacagatgccactctactccaaattttaaaagacatgtngacnangaagcacaagtac

SEQ ID NO: 104319 - DNA, 197 bp, Glycine max
tcctttaaatctggggaagtgtgtttatcatccttaaaaaattattattattagtccattatatttttgaacagctgcttgtagtctttatatgatcatcatgttcatggtttcataatttgtgacgctttttagtcaccacaaattattttttttaaaattatttctagcgattgtaaaccacccaaatatctgac

SEQ ID NO: 104320 - DNA, 345 bp, Glycine max
  unsure (1)..(345): unsure at all n locations
ttacggtgccagcctctttgggatccttatatatcctgcgtcatatctgggggtgctgaccatgtcatgatgcccacattcgacaggatatttctacacaagcttaggctgtatacatgtgcgttctcatttaatgacatgagccatgcaagcatgntttgataattactcacttgcacacggtcagcatagacatgaataacatcactatcttgcgcccatgatactgatggtacattgtcagcatcaacacgaatgatatgactatcttaccgccatgatacctattgtacatggtcagcatcctcacaaatgacacgtgtatcataccattatgatacttgt

SEQ ID NO: 104321 - DNA, 328 bp, Glycine max
  unsure (1)..(328): unsure at all n locations
tattttttgtactatctggcaattcctatacctatatatatatatatatatatatatatatacccctcaccaactaaggtgaggatctttttggtgatatttcatactcaacatttcaataattctaagagtctaacgtctaccattttaatcatggaatctaaaataagccttatagatgcaaacatccaagatattaccattcatgataatttaatcatttgaaatacactaactgcagataacacaaaccttattacaattgctntatctgtatatccttcccgtcggtcactaaatgaattccgcaccatactcattggctaca

SEQ ID NO: 104322 - DNA, 506 bp, Glycine max
  unsure (1)..(506): unsure at all n locations
cgaggtacttacccgttgaagatcgaagaacgatgaagaacgaatgaagaacatcgaagaacggtcgaaacctttgtgaaattcctcacggaaaacgttacggaaaccgttcggaagcgtctcggcttagattttcttcacggaaaanaattntccaagcaaattccaaagagagagaagtgcctcagggggctgaaccttttccttctcacttccctccctatntatagcanaacaggggagatgcttgccgctcagctcgcccaggcgagcagggttgcttcctccagaagcaacagccttctggaggaatcttctggaggacccaagtggatctggttgctatttgcacccccatttttactaagtacacccccctctgctntntttggtgattcttttttcgtaaaggtacggaaacttacgaatttcgtaacaatactttgtttctttccgtaatggtatggaaccttacgggatacataatcatnccctttttgacttac

SEQ ID NO: 104323 - DNA, 370 bp, Glycine max
ataaaacttaaattgacggggggcatttaacgcgaaaccactcggttaacatgcttggggaaaaataagtcaccagcttaacgcaattagggcgcccctagcgagtcatgataaaaaattgtggtctacataattggcttagcgagatagacactcgctcagcctagagcaaaatttcttcacacatgcgcttagcgagtagctgctcacttagccttattcaaaccgcattgaatagcgaatgagactcgcttagcccaataaccaccacaacgaattgcgcttagctgagaataagtgggcttagtgcgaggcagccaatagaaatttgtctaaggtacctaggcttagcgagacaacactcgcttag

SEQ ID NO: 104324 - DNA, 447 bp, Glycine max
  unsure (1)..(447): unsure at all n locations
ctcgcccagacgagctcagctcgcccaggcgagcanggttgcttccttcagaagcaacagccttctggatgaatcttctggagggcccaagtgggtctggttgctatttgcacccccatttttactaagtacacccccctgccttttttttggtgattcttttttcgtaaagttacggaaacttataatttcgtacgatagttgtttcttttcgtaatggtacggaaccttgtggaatacataatcatcccctttttgacttacgaaatgttacggaacctcactaattgtgcaacgatgcttccatttgatttccggtgtgtcacggaactttaaggattgtgcatcaatattttcttttgttttccggcacgtcccggaatttcacaaatngcctaatgatgggtgccaagcaccttacaaggaccanacanaagtcgcatgtca

SEQ ID NO: 104325 - DNA, 409 bp, Glycine max
  unsure (1)..(409): unsure at all n locations
aatcgatgcactctataatttaaaggtttttagaattaattgtctcccacaatatttctatcttgctccattatttttcatctgagttatgggtttaactaaaaaatcttgttagttctatcgctcctaatctgaatacattgtaaatttagattttcgttatcgataataataattcttgttatgaatgtcaattaaaaaaaaatgaccactatctttccttcccttcctcctttacttttctcaacaactcacctattcttatcctcaaattcttagaaattaaacttaagccccatggacataagtgctcgaggatggaatataaaatcacacatctcatgctatttttatatgtgatcaantaagctttccaacatgatatcggtggcagttgatgttttggaga

SEQ ID NO: 104326 - DNA, 428 bp, Glycine max
  unsure (1)..(428): unsure at all n locations
tacatagggaatttctctctctacatgaactatatcgcaaataccaacggtgggcatattcaaaaatgaattcttaagtcgatgtccaaatatcatgacgatccaatggtttaacagtttaagaatatagtttactgagacaagcttggtgtatgctggataaagatgattttgtgagaggatgaaggaagagagagcaaacatagggtactctgagcctattaattactctatttttttatttatcaaaaggaactttattgtactatntcattaaataaataaccaatcaaacatcattntattttctacacatcatttattctattacttttaaactataaactctatttaataacaaaatattttctcactattaattctaaaacttataattttaaataaatatttgattatttacgaaaaca

SEQ ID NO: 104327 - DNA, 420 bp, Glycine max
  unsure (1)..(420): unsure at all n locations
gtgcgatgatgacttagatgatgacaaacagccacagaatgatttcaagattcagtcaccaagttcaagatcaggttaatttcagtttcatgagaagaagtcacgaagattctagaatcaggagaagtttgatttccagattcaagtgaagaagaattccagattcangaagagaaatcaagaagacttcacaggggaagtatggaatagatntttcaaaaacaaacatagcacaattttgtttttcaaaagagtttttctcaaaatcttctaagttaccagaagttatactctctgatgatcgattaccagtggaaaagtttgatttcaaaagcttttaactggaattggtaacattccaattgtnttttaaatggtggtatcgattacaatatatgggtcatcgataccaatgtatct

SEQ ID NO: 104328 - DNA, 487 bp, Glycine max
  unsure (1)..(487): unsure at all n locations
agcaccagagctgcagctaaacanatttggcagacatgacttaagtgtaccttctttatctgggtggagaaacactacctatgatgggctattgtttccctatatatgtacaacattgactatgttattgttaacggagaaaatttgttgaatggggaatgcacaacgtcggctttcaaaatctgggttggttttggataggtccatttgcgttgaattgtttgacttgtatgggaagtgttcaattatatgggaactcggttgttgaaccttgaattacaaaccataataagcttgaacccagtgcagagaatgacactcaacccaaattttgctcaattggcttgtgacgacaatctcaattgggtaaatagcttacatcagcttttgaaaaattcaattttgaatgggccacctagcatacaaacacaaaacaaattctctttgtgattactatacaaagatacatgaaccctctattacattt

SEQ ID NO: 104329 - DNA, 477 bp, Glycine max
  unsure (1)..(477): unsure at all n locations
acacataattgttgaggtacgtgggcttccttataactctctngngcctgttagaattaccattgtcatctgctatggngtccttgctatcatgtagatgtgcataccattcaaagaaaaaagcaaaagggataaggaatatggtggctgttgtctgtctatagaagacaaagatgaaattgttcatgccatggtcaaatgcagcttgagagcagaaacatggctgataggtaattagtaccttgtgatcataaagataaaatgtctctagtgttcatgttttgttagttcactagaattataatctagtaactaagcaaaaataagttgatgcatgtgttgngtccattctgctctttttttctttctttttgacaagtaggaatcgtgattcttcctgtgtccaatgtgcaatagtntccttgaaggggtgggtgaataaaaataaatcatgttacctgtctgtaccttgttatg

SEQ ID NO: 104330 - DNA, 200 bp, Glycine max
  unsure (1)..(200): unsure at all n locations
agcttacagaggaagcttctatggtttgatgttttcttacanaganggccccanacctgacagtgcctaagatggatggaacttgccctgggcatagagtttcacagaggccacccttatcgcatctgagacacgaggtgctcatgaatctacttgtacccttagggactgactctgtgagctaccctttcatgccatgt

SEQ ID NO: 104331 - DNA, 473 bp, Glycine max
  unsure (1)..(473): unsure at all n locations
ttaccagtgggacactactcttaaaacanaaatgacatacaacctactgccataaatacaaacatcaatgttaatgtagagcaagcttatgcgcatatttccctacgaacgatcacttgcacaagacatcctattaactaagagcaatgcacccatatacaatcaaggcagcttcgttacctaaattatgtacatgtactctcaaggtgtatttgttacttacatcacacacatctccttggctaaatttacatacatgcatactcagagcattntggggtaccaaaaattgcacatgtgcacatcttggtatttctaatacctatacatacacacacttcacgatgaatattgactatctacacaataaagtgctacatttcatgctcttttcaagttattgctacctaaagccgcatgcgaactcaagtatatttgtctttgctgctaaaactgtataaaaggatatactc

SEQ ID NO: 104332 - DNA, 470 bp, Glycine max
  unsure (1)..(470): unsure at all n locations
agcttccatcaagtggtaatcagagcacaagatcttcaagtaggtgctccttaaacctccattaattttttgctttaccttctcttccattggtgnttcttcatttttttctccatgtatctcctcacatgtcttgtgctaaatgtttttaacatgattctttagagtttccaccgattaaacttgctatagaagcttgatttgaatttctatggttcaaatttcttgttctttgtcttgaaccatgaattgtgttgagtttaggttcctttgagttttgtcttgctattttttgtggctgaaacctaaatcataaaattcttacaaaaatattaaagtagaagaaaacctcaaaaatctagagtgactcgttcacctattgtagttttgtcatagaagtcatgtctagtcatgaaacttgtcacataagatttcttatgttgtgctgaattttattttcttgtttcttt

SEQ ID NO: 104333 - DNA, 452 bp, Glycine max
  unsure (1)..(452): unsure at all n locations
tgatcgcggctctagccaagctatcttggaanaagtgcatcaacaacttttcatccctagaatatgcccccatcttgcgacagtacattntgagatggttcttangacaagtcatccctttgtacctgtcgaaatgaggtaccttgaattttgggaagatgacgacgtctggtactaagcaaagatccgccatgtctgtgaacgaatagtcgtcaaagccttcaacagctctcaatctctcttcgatgagatcgagtttccttctttcttccactgtcgggggcggtccttctgtggacaagaatattagctgtgctgggaggtttcgaggttctcccgtgaggttgggctgaggcagtgtgttgggtgccggcccctcgacggngaaccgggggtagaaatcgatgtctccttgggcatactctctatgatcctcgtgaacatcgtccgac

SEQ ID NO: 104334 - DNA, 481 bp, Glycine max
  unsure (1)..(481): unsure at all n locations
agcttacttgtgaagcttctatggaggctggatctttaagtttcaatgatgattttccaccatggagatgcagcggaaggcaaaggagaagaggagaggggaggcactatccataagggaataagacatggaagaaagagcttcaccaccaagaatgtgccttggataagaagcttgctaacccatggaagctcctaatatctcccacactttttggggtgggccattcttggatggccttgattttctcagggtcgaattggaccccatttctaccaactacaaatcctaagaaaactatactatctacacaaaaggtacacttctctatatttgcatagagggtgtttttaataaggactgaaagaacttgcctaagatgtcctaagtgatcatctaggctcttactgtacactanaatatcatcaaaataaacaactacaaatctacctagtaaatcccttaagacataatgcataag

SEQ ID NO: 104335 - DNA, 444 bp, Glycine max
  unsure (1)..(444): unsure at all n locations
tatgctgcanatattacaatagacctcctcaacctcagcatgcaaatcaaccacagcagaacaattatgacctctccaacaacagatacaaccctggatggaggaatcaccctaatctcagatggtctagccctcagcaacaacaacagcagcctgctccttccttccaaaatgctgctggcccaagcagaccatacattcctccaccaatccaacaacagcaacagccccagaaacagtcaacagttgaaggcccctcacaaccttccctcgaagaacttgtgaggcanatgactatgcagaacatgcagtttcaacaagagaccagagcctncattcagagcttaaccaatcggatgggacaatnggctacacaattgaatcaacaacagtcccagaattctgacaagctgccttcccaagctgtccaaaattccaaaaaat

SEQ ID NO: 104336 - DNA, 457 bp, Glycine max
agcttatgctgcaaacatttataatataccttctattgctaaccaacccaacataataatatgacctttcagcaatagatacaatccagggtggaggaatcatccatatctgagatggacaagtccttcacaaaaacaacagcctgtccctccttttcagaatgtcgctggtccaagcaagccatatgttcctcctccatgtagcaacaacaacagcagctgcattcacaacaaagacaaccagcaactgaggctcctcctcaaccttccttagaagagttagtgaggcaaatgaccatccaaaatatgcaatttcagcaagagacaagagccttcatttagagtctgacaaatcagatgggacagatggctactcagatgaatcaagctcagtcccaaaattctgacaaattgccttcacaaactgtgcaaaatctgaaaaatgtgagtgccatca

SEQ ID NO: 104337 - DNA, 365 bp, Glycine max
ctctcacaagacctataggtgattctaggatctctatcagacattatgctagatggcacaccatgtaatctgaccatttcactaatatacagggaggtcatcttctctaaggaacacctaacattgatggggataaagtgtgtggatttggtcaatctgtcaacaacaacccaaatagaatcaaaacctttgggggtcatacaacgaaattcatggagatattgtcccacttctattgcggtattgattgaggccgtacccgaatcaaataaacattaaaaatgcagtatctacgaagtgatcctaggtcatttcccaatgagtaatgatcaaccaaacgttcataacacatagtaatataacag

SEQ ID NO: 104338 - DNA, 423 bp, Glycine max
  unsure (1)..(423): unsure at all n locations
gcatgcctaggcaggtgcagggtcaggcactgcagaagcacgaggaggactagcagttgccagttgtaggtgcactatcgccccctctacaagagacatcgtccctggggtccatctccgctcacctgtggaggttagagcttcaaatgcacaggtacatgcagcatgtgactagccaacaggcagctaatcacagggtcaggtgaagctaaacaggaccttctatcggtacactatgcactagcagagtcagaacaccagtcctttcctgtggcctacccccgagcaattcggggccacatttgcctggcctgaagatgcgcccgattttgagacagggacaggacccgtangggcccctagggacgatgagggagctcangaggatgatgatatggctaatgtgctggatttcttcacttg

SEQ ID NO: 104339 - DNA, 390 bp, Glycine max
  unsure (1)..(390): unsure at all n locations
atatctacccctggattcaagctatccccaagatcatgttttngatcatatacaacttgctgatacctaaactntgactcanaaaacatgattgtgtttccatattctaaatagctctccttctagtagttatatttctgattgcaaaatctatgtcatggagaagcttccactataggcttatgcttcacacttgtgttatgcttttgaatatgtcatgtcttaataagaaaacttaaagcaacccttattagctaagttcaataactttgattttgattcataatggtttgccatcattaaaacatatagttcctagaacgactntgtctcaacaatgggctactcggttgactattcaagtagttgtggataccttatggcacacaa

SEQ ID NO: 104340 - DNA, 450 bp, Glycine max
  unsure (1)..(450): unsure at all n locations
agcnntttaaccgttatttaagtcattntcttacctaataaatgataaaatgaatttcaaccgatcatttgtgttgtaatctccgttaatcattgttaaaacaaaatctaatcgatcgttcacgctataatcccggttaaaccaaaaaaagaaaaataattattaaataatccaaatatcttgaanaaaataataataaaataatcaagaaaaatcaatcgaacgtttntctttgaaagtttccttgaatgaattgactaataaccaaagtgaaactaaagctaaaatcaactcacaaatcaagctttgtccgcaaaaatcactaaagaccattttaaggtccaatgccttaaacgatcgtctttgcttttatcggttaacatggaccattcaaaagcataaaatcaacatgtaactttaccgcttttgcaagaactacgtaggtctgat

SEQ ID NO: 104341 - DNA, 340 bp, Glycine max
  unsure (1)..(340): unsure at all n locations
actctactatgttacattagntcctattctatcctaacacggttggtttaccagcacaacgctaaagctgataaggcaatgtgtgatataactgaagatattcaatatgccactgcataggtaaatacataagcttttttttttttgaaaataacaatgggtcttagatattcatatatggcctttctcatacaacaatctctttctgcaatagctaccatgatcccgatcaataattgtttgtcactccatcacagagattgtcgcttgaaattggtgatgatgacgcgcaatcacacgatcctgcatctacacaattgtcatacacagagatgactaa

SEQ ID NO: 104342 - DNA, 483 bp, Glycine max
  unsure (1)..(483): unsure at all n locations
gatcctctgagtcacctgcggatgcagctatgcacggaaatgtattattaaantgtgatgctctaataaacaccatttnctagntaaccatgcattaggtaccatgttcaattattttggtnttaagtgaaacgggtttatgatcccaacatggttggctcggggtgcctaacacatgaaactaagaatgtagtgggaagtttcacgcttccccttttttggtttttgtttgtagaggaaaacgcaaggatgaagcaacatganaacaaatggtatgcaattttgcagatcaaaaagttttgtgaacgcatatgcatgatgatgccatgactcatgcaaaatgtgaggctggaatatgataacggacaaatgcaagatatgtccattatgatgttatgaagagatgcttatgcgatgcatgatatgaatgcattttacggacacgagagcccgganaattatctcttcttacttgtgcatttg

SEQ ID NO: 104343 - DNA, 398 bp, Glycine max
  unsure (1)..(398): unsure at all n locations
agaggatcaataacaatgcctatnaggtggacctcccagaagagtatggagtcagcaccacttttaacatttctgatttaactccttttgcaggtggagctgatattgaggaggaggaactaacagatttgaggtcaaatcctcttcaaggggaaagggatgatgcaatccttcctatgaagggaccaatcactagaaccatgagcaagaggctccaagaagattgngctagagctgctgaagaaggccctagggttctcatgaaccttatggtagatttctgagcccatgggccaaggttggatccaattatcnttgtacatattagactangatgtcattatatttggtccttgtatatagggctccatattgtangtagggtaccctagaaatat

SEQ ID NO: 104344 - DNA, 427 bp, Glycine max
  unsure (1)..(427): unsure at all n locations
aaataaatcaaaagaattgaagtttggtttctcactgacttactcttaattggcttaccaaccaatatgaaagctaagctcttagtcctttctcttaacatatacaaggtgttttgagaattgttcccactttccaagaatatacattatgctttntatagaaagtgtgaatggatgcatgtangattcgtatcctatttcttcnaagcttttggtatttataggccttcttcaacaagtgttcattgtctttaaacaaatagctcatgtttgaagtttgtggtcgttagagccattaatgtttgcattaaatgcacatacttcttcatgctggaaaatctctcttgttagctttcgtgtagaacacttcatcaagaaactatttcctttgcgttagagtaagtctgtcacagtagagcacgtcttt

SEQ ID NO: 104345 - DNA, 378 bp, Glycine max
  unsure (1)..(378): unsure at all n locations
ctcattggcatatatgttccctgctagcagagctgaaaagaggaatgcaccaattggattccccagcgacatgaagctgctcaacacgcccaagtgcttcaaaccaaaaagctcggaaacaagtgggagcatcacagaaacttgcacaccatagcagacaccaagaaatgcaatggcaggataaagggttccattgatagcataggcaaacagaaggtatgcaatgagcataacagtctgcgtgcacgtcatccagactgtccttgnggatagttttgtcctgaaaagagtcgaaagcatgaattacattcggttgaatcaattaaacgaagagaaagctgctagtctaatgaaattcagttcaaggagaggttaaac

SEQ ID NO: 104346 - DNA, 433 bp, Glycine max
  unsure (1)..(433): unsure at all n locations
aagcttgangattatggngtacccatcacatgtggtactatgtggcggtcgggccatggtgcacaacaaggtttccacattcacaatgcgcgcataaacccaccattcccttgtggccaacttcaactggacttacgtacttccacctagcccatattcttggttctcttaacaacgggtccccattaatcctccaagtttcacacattcaagcaaacaacttcaaaaacacaagctatccagccaacaaacagaagagagcagaaactttgtcacacatcaacaaaatcacagtttctcacgaaagacacagaacaatccttcgaccaattcgtaccgtggatcgactcaaatttactggagttataggcatagctacatttgccgtgggattactacaaatcaaactatttgactaacttcacagcacaac

SEQ ID NO: 104347 - DNA, 455 bp, Glycine max
  unsure (1)..(455): unsure at all n locations
acactacaatgttagagctggatgagtctttcgcataaatgaaaatagaaaatattggtaagtctgctgctgcaactagtcaagatgagtttgtgtccaactgtcataccctaatttcgtccggggacctttgcttgatgacatgcgaccattctttggtcctcgtgaggtgcttggcacccatcattaagcgatttgtgaaattccaggacatgccgaanaaccaaaaaaatattgatgcagaatccgtaagtttccgtgacacaccggagatcaaatggaagcatcggtgcataattaagtgagggttcgtaacattccgtaagttaaaaaggggatgattatgtaatccgcaagggtccgtaacattacggaaagaaaacaagtatcgttacgaaattcgtaagtttcgtactttacgaaaaagaataccaaaaacagcaaagggatgtcta

SEQ ID NO: 104348 - DNA, 457 bp, Glycine max
  unsure (1)..(457): unsure at all n locations
agattaatgggttttttacttgtgctttcagtattttggtctagncttactaattctgtagccttgagattacatggntatatatttcttatcaagctattgttcaaaataaaaaaatggtgttccaatttgcatggccctggntttcttttctcttcgattatatgcatatatatgtgtgtgtgtgtgtgcgcgtgtgtgtgcatatatatatatatatatatatatatatatatatatcaacaatatttcaaatagtagaagtcataaaataatatattgaatacacttatagaaattattaagttatagaaattattgcttaatagtggttacttntgctacattntatattaattggtgtagaagttactttaattgaaaataatatagctcgatttaatntatacgtgttttgtgccatgtannatataatacttatgtatatgtgaatgat

SEQ ID NO: 104349 - DNA, 443 bp, Glycine max
atgattgatatcattattgggacctgtaggattctatttgggcaatattggatgagggaaagagaggttttcgaaatctgcactctatgcaaaattttgctggtgaaatgtgcaacagatatttgcataagtgcagaaaaatgttatgtttttgctggttgtggaaagagtagtacataatgagttctggacgttttctattagatccccacggccaaaatgtagacttatgttctagagacttccagtaaaattttcgagtcgattcaacggttaacgaattggaacgaagaaaatgttactggagtattttgatgtgaaaagctgtgatttttggttttgttctgggcagagttatctgcccttgccctgatttgcttggttttgtagtttgtgatgatggatggtgaattcttggatgttggggaacttgaaaggattga

SEQ ID NO: 104350 - DNA, 467 bp, Glycine max
  unsure (1)..(467): unsure at all n locations
gaatcgattacataagacttgtaatctatttctataaggnttaaatgttttataatagtctttagaaatttgaatttaaatttcaaagtctgtaatcgattacagcttgtgtgtattcgattactaaaacttaaaattcaaatttcaagtctgaagagtcacaactctttaaaaataactgtgtaatcgattacaccattttggtaatcgattactagcaagaaattntcaaaaataactcccaacaatcacatctattcaaatgaatttgaacggccatcaaaggcctatatataggtgacatgggacacgaaatttcttagagtttttgctacacaaagagtctcatcctctcaaaaactaaattctcttatcctctaaaatattccttggccaagcactngcaaattcaataaagaatcttgaatgatcttcaattgttatatctttctcttaaaagagagaat

SEQ ID NO: 104351 - DNA, 544 bp, Glycine max
  unsure (1)..(544): unsure at all n locations
gcttagaccagggcattcanaatctaggtatctaatacccatcaatttagtggattttcaaggtttgagaagtgaaaatgagaatgaggtaattctggagtaaaatctcatctcanataagtctaacattaatttaaactttctcaaactggttntacggcgaaaactccaccgattcaaaatttgacccctcaacacctaatttaccctagaaatggctcttgctttcacctttgtcactcatttttctcatttgctctgcccaagcttacctacaagtcctaattgacattctaaactagaatcaactcactttagactccaatttacactaaccccaaatttagcttctctaaccctcaaaatctcacactttcctacctacaacattgtcattctcacatttaaccctaaattaactttccccatcatctctaccagttntctatcaacaatttcagcacacaaacatcacanagcatcatcatanaacccctaaacagaatgggtagctntactcacatcaacatgtcaagtttagcat

SEQ ID NO: 104352 - DNA, 466 bp, Glycine max
  unsure (1)..(466): unsure at all n locations
gcttatcaactcccacagacaactctaaatatgttttggtgtgtcgagaaaggtanggttggcagtagcttggcgaagatgaagtcaccatcgatttggaccaaaaactaagaatggccatcatgacatttcaatggtaaggcatgttaacatgattatcaaatctcttttgatatattattttggtttgaatggttgaacacatcnttatcagataccttgtttttatatattattcaatttgtaggttttgataagcattaatacgccttttttattttatgtatcccatttttgcgtatccaatactttttccacacaaaaaacgaaaaacataataagcttctacaaaattattgtttcattaaaattaattatagacaagagtcaactagctagatactcgggaatagttatcaaaattatactagtcatacataatcaatagagggcaatgacacaatag

SEQ ID NO: 104353 - DNA, 456 bp, Glycine max
  unsure (1)..(456): unsure at all n locations
aataagcttagaagtgatctaatatggcatctcaataaattggcttcaacacaaagtgagcttgataaattgaagcaagacaatgaaagacttgtttcaagttataaagccaccgggtgtgtttgggtttctacatctcttaatattcattattacaaatctttgcaagatgagtttgaacagtttaaaaaggatcactataaagaactacgaaactgcanactgagctttcctatcttaaagatcattttagaaaaatgaataaaggaaagagtgatcttaatcacttactctgtgtgcaaaagaaaattgacctttctaagaaaaccaagtttgcatcctccgaaaaggtgaacccacatagagtctccaaaaaagaanaacatagtgcatcataagcctaaagcaaagacttgacattattgcatgaaaagaggacacacatcttataaacac

SEQ ID NO: 104354 - DNA, 495 bp, Glycine max
  unsure (1)..(495): unsure at all n locations
ttaagtcacctgcggcatgcaagcttcttaattgcgctatgaggattgttgttttatgtgnncattgcttctatcagaactatattattgcatgcttgtggctcgatcacccatatgtgtgtactgataggggctttaacatggaaagatgtattgtctccttataacttgatagagcaggattaggttatcgtatttctggacacggagtgcggtaatttagtttttatatgctatgatcataaagctgttcagttaagctaagtccaataagagacatctgtgaacgaagtttaattagaattaggctaaactcatgagacatcggtgtttagtacttgagccttcagcatagaacacaaacacatctttaattagagaaacatccttaattgcatcagtttgctcagtaagaggacccaacacctttagatatatggtttcacacttgctcacatttattgcttngtaattagaatagaacatacttttact

SEQ ID NO: 104355 - DNA, 400 bp, Glycine max
  unsure (1)..(400): unsure at all n locations
gactccntggagtatgacatctgatagatgtgttgtctaatcgacataactagaattttctttgatcttgttattaatatgcaatctaatctagagccattctaggacttcctttgtgttccaccttggcttgaggtgttgtccttttgctatattttgttttcttgaatctcatgaataatgtccatacattacttttggttagctctcattccatattatggtttcttcgacttggtcttgagcttaaatgtcgcctacaataacgattggaagaggaaattggtgcgttgcttgaaagaatatttntgagtcttggaggtaaaccatcctatgagcaccatcggatttgaaacaaccaaagcctcaacaaatnttgagtgagacacttgagaaaaca

SEQ ID NO: 104356 - DNA, 458 bp, Glycine max
  unsure (1)..(458): unsure at all n locations
agcttgaanatcctntacagcatagatcctttggtatgcactcttcctagttctctttgaacaaccaagtggatgtacgctccacttgaactgatccacaagagatgtaccctttcttgttctcagtatcacaacccaagtagatgtacgctctacttgtaccacaaaggatgtacgctccaatgtgttaagacaaagaatttttaagcggttagtccctagaatctttgtaagggtaaaaaaaagatatctcaggaggttagtcttttgaaatcttttgtttaaagggaaagggaagaatcataagaattctcaggcggttagtccttngaatcttttgtcaagagggagaagggagaatcaaaagaattctcaggcggntagtcctttgaatcttttggcaagagggagaagggatgaaaagataacacactttttgttttctgcagaatttccac

SEQ ID NO: 104357 - DNA, 403 bp, Glycine max
  unsure (1)..(403): unsure at all n locations
gtctctctgnctcttggntctagntctattcattttggagaataaatctagctttcttcggtttctactacaatttcatttgctattgaataatggaagactaagtctccaccgttgttatttttgaggataagcacaactctctttgagggtttattattactattgaattctagtcagcttttcctcttcaccaattactatgtatttgttgctattaatccatgcatgcttagtgcttgattaattgtctctacgctttaattacgttcatgcttaatgatcagttttgttcatgattaaatggtgtatgtgttgcttaatcacataatgacagccttatgttaaatctcgcttaataattcaatttaaggctggattaagtggttgaactgataaagga

SEQ ID NO: 104358 - DNA, 442 bp, Glycine max
  unsure (1)..(442): unsure at all n locations
gcttatagntattggagggagaatatttctttcctaatcaaatgtacctttcaagtaacgaagaattctttttgcggcttttagatgaggagaggtaggagcctccataaagcgacacacaactcccaccgcatatagaatatcgggccttgtattggttagataccttaaactccccacaagactcttgaagatcgtggagtctaccttctcttcttcatcaaactgtgataacttcaagccaccttccataggtgtgttcacgggattgcaatcaagcatattaaatttcttcaacacttcttttgtgtacctttcttgtgagacaaagataccattctccgtttgcttcacttccattcccaagtaatatgacatgagtcccatatctgtcatatcaaattcacgagacatggactncttgaagtcttcaaacaaattt

SEQ ID NO: 104359 - DNA, 342 bp, Glycine max
  unsure (1)..(342): unsure at all n locations
ttgtggaaccttcacccgacgaagacactgataaaaacttatcttctcctttntggacaaagtatgacaaactatgggcaagtaaattttcttcccatcagaccttggatgcaactatgatcgtatccccatatcaactagatcttgacgggtattcaagccatccttcgccttgccttgaatgttaaagagcgtcccaatcacactgtcacaaacattnttcttcacatgcataacatcaatacaatgtctaacgtctagatcagaccaatacagaagatcaaagaaaatggacctcttctttcatatgcaactcttacttntatccttcttttgggtctt

SEQ ID NO: 104360 - DNA, 417 bp, Glycine max
  unsure (1)..(417): unsure at all n locations
acatgcttatggctaggaatccaaaatttggttttagaggtagaaaaacatgaaaattaagatttgcttgtgagagtttttgctcgaatttgggctgccccatgtttgatactttacataaaggtagcgtggaaaacaccttgcaatagtgtgtatacataggtaaatataaggagtatganaatcctagcaaagtgtgaattattgtcttcctaaatgaatgtatgatagtgtggaatgccttttttgaatgcgaatatgtgcaggatgtgattagctttccaatatgcatataaataaatatgagtgaaacagtaaaaatttgtatggtgtacttcaaatgtatgtaagtagtttgtgatagcagatgtttaggatataaattaggtggtaaagttgacgcaacactttgagcat

SEQ ID NO: 104361 - DNA, 516 bp, Glycine max
  unsure (1)..(516): unsure at all n locations
catgtgctactcaatgtgtttgaaaactttctagtacttatcatgattgagtcttttcttgagtcttgaatcttgattntgaatattcttgattcttgattcttgaaacttgattcttgaatcttgaaatcaaatttctcttgattcttgaattgttcttgaaattctgataccaggggacagatgtcgtaccggatgtcacgacatcacgcttcagaacatgcagattatatgtgtccgtatgaacagattaaacaagtaaataacacaagagaattgtttacccagttcggtgcaacctcacctacatctggnggctaccaagccagggaggaaatccactctcaatagtgttagttcaaggtctaacagcccctgtttacaaccttctcacctaaccactacccgtgcgatctctacctaagagccactcttagatatgagaacctnncgctcactcctctcactcacacttccctgtgttacaattaagtcaaagacacaccagagatcaac

SEQ ID NO: 104362 - DNA, 278 bp, Glycine max
gcgccattcactatggaataagccatggaaggaggagctttaccaccaagagagtgccttggataagaagcttaaagaggaagcttcaatggagaaaaataatgagaaagggggagttggggcacgaaatggaaggagaaaaaaaaggagagaagttgaactttgacgtgtgtctcacaggtttcacattcatcaaagttacaacaagtgttacacatgtttttatttatagcctagtgtcataccctaatttcgtccggggacctttgctcgatgac

SEQ ID NO: 104363 - DNA, 335 bp, Glycine max
acttatcatgaatggagcttttcttgaatcttgaaatcttgactttgaataattcttgattcttgattcttgaaacctgaatcttgaatcttgaaatcaaatttctcttgattcttgaattgttcttgaaattctgatcccagggacagatgtcgtaccggatgtcacgacatcacgcttcagaacatgccgattatatgtgtccgtatgaacagattaaacaagtaaataacacaagagaattgtttacccagttcggtgcaacctcacctacatctgggggctaccaagccacggaggaaatccactctcaatagtgttagttcaaggtctaa

SEQ ID NO: 104364 - DNA, 365 bp, Glycine max
tactcacctcgcgggcgctgaggaacggtagcgacttctatgctgaagctgggggagtgtgcgtgtgcaaatgcgtttctgtgatgacatcttcctgaagcgaagccacgtgtgaagaagaatccatggcgctttctctctctctctctcagcaagactccaactcaaccgctgcacaacctttgcttcttctactgtcacacatttattatctccatttcatattatgccccaagatccttacatgtgcgatattgccacaacatgcctagggatatatgtgatgcgcaaacctcgaacgattaatgtgggtgataaatcaattctcttctcagctgctaaataaactttaacaagcgatccac

SEQ ID NO: 104365 - DNA, 357 bp, Glycine max
ctatataacagcaccaaggatctatttttatgtctctctgtctctcggttttagatcttttcattttggagaataattctagctttcttcgctttctactacaatttcatttgctattgattaatggaagactaactctccagcgttgttttctcttgaggatcaagcacaactctctttgaggttttattattactattgaattctaatcagtttttcctcttcaccaattactatgtatttgttgctattaatccatgcatgcttagtgcttgattaattgactctacgcttaatttacgttcatgcttaatgatcagctttgttcatgattaattggtgtatgtgttgcttaat

SEQ ID NO: 104366 - DNA, 401 bp, Glycine max
  unsure (1)..(401): unsure at all n locations
ggaccttgaaactcagcttctatataagctgaaccatnttatcaataaacacaagttgagttttattcagaaaattagagtttatctctttattcttagtgagagtgattctcctaaattcttgagtgattcaagaacaccctggctgtatcaaaggactttcacaacctttgtgtgttgccctcgccggaaagagtgattctttccttcctttcatcttcaaccttgttctttcaaaccacaattccagaaaatccacttctgcccagaattatctcgtggccataactcccattttacgcactcaaattaagtgattcttgagcctaaattgaatttcaaaacgagacctctcacctcgttttggaatcacctcatttagagccctgtagcttgagtta

SEQ ID NO: 104367 - DNA, 206 bp, Glycine max
tttactaatcctctcagtattttctgaaaacgaagtgacactgacatcttacattagtaatgacattttttgacatctttaacagctttcaatattttggttgtcctctctttagtcagaacgatctcgaatcgcttgttaaaactctatgcgattgtttagagatgaaaatgaagtgaacgtatcaaatatgtatatctattgtt

SEQ ID NO: 104368 - DNA, 358 bp, Glycine max
  unsure (1)..(358): unsure at all n locations
tcanagcaaggcaagacctaacctgggcttgtttgtcttcccactgataggggaattggatgcccgagacccgcaaatatgaatggagccatgttcgatccgcataccttgtattataaggaacacattgtttgacactgtctcgcactggttatgaggtgatgacaccgccaagccttaatttgacccaacacactctcttagcccctaagaggccatcggatgcggcgatgcatctaattaatctcatgtgctgtcgaccctgttgcctacatatacgaagtgacattctaaactggagaacagacactccatactgctatttacgctaaccacatagaggacggattttaccctc

SEQ ID NO: 104369 - DNA, 356 bp, Glycine max
gcgtgaagacatgacgcttagcgcattggttgcgcttaacgggtggacaactgaaaaaattatctaagtcttttctatccatttcttcacatgagcttaaaaaaaaacccttgttcactactaaacaagctacaaaattaatcacaatcacaagcaattattcctaactacatgctagagataagaatgataaagagaaaagggaaagaaaagtcaggttgcctcccagtaagcgctcttttaacgtcattagcttgacgcatcatcctgttatctgggtccaacaaggttccaacttccaaaaccttcttctctagcctctttttctccatcacattcaccttcaaacaaacatt

SEQ ID NO: 104370 - DNA, 375 bp, Glycine max
  unsure (1)..(375): unsure at all n locations
cgcttcagtntaataggaagcaccaatataaatatgttgatgcctactatagatatatagcattgaccatacatgaaactagcgagagagaatacaaactgttgataatatgtcactccataagtagtgatgctgtgtaaaccactacaacaagaaagcactttaaattatagtattaagtagaaatttctatggttgtgttgatcatgctcgccctcactttaaattggcaattggattgtgccacattgaagcttttcacagatctgccatcactggtggtgacttgaaaagagagggattgcccattgaggtatgaatttctctgccaattttgcccccaatttcttgacatgggggtttcaccctgttttt

SEQ ID NO: 104371 - DNA, 379 bp, Glycine max
  unsure (1)..(379): unsure at all n locations
tgacactacaatgttagagcgggatgagtcttttgcttaaatgaaaatagaaaatattggtaagtctgctgctgcaactagtcaagatgagtttgtgtccaactgtcataccctaatttcgtccggggacctttgcttgaagacatgcgaccattctttggtcctcgtgaggtgcttggcacccatcatttancgatttgtgaaattccaggacatgccgaaaaaccaaaaaaatattgatgcagaatccgtaagttttcgtgacacaccggagatcaaatggaagcatcgttgcataattaagtgaggttccgtaacattccgtaagttaaaaggggatgattatgtaatccgcaaggttccgtaacattactgaaag

SEQ ID NO: 104372 - DNA, 397 bp, Glycine max
  unsure (1)..(397): unsure at all n locations
aggacctataaaactcagcttatatgcaagcatagagatggagcagnngttatgtccattatcaatcttttagtacttgcctctttcctattttaatttaattaagacttaaatgacttcatttttttaaaccttaatttttgtctcacatattcgcacactccctcccctgtgataatacatacactccttctgaggcgatgaacactccccctctctttcattagaattgctcctctctttcacttcctttatgacctccgattcaatatcaatagcatgcttcgattttccttacttgtttggtctctttgtctaacattagtgttttttcatcaagggctcaaacacaatatgtttgtgctcttattttgtgatttatgcatattaaaataaa

SEQ ID NO: 104373 - DNA, 373 bp, Glycine max
taattatgatgaagatcttaatattaatattagagtggtgcctaaaaaattaattcctaagtacaggttcagacaaaaagaagtcaagcttaataagaaaactattggtatcgagaaatatttaaacatttttaccaaaatttaagttgcaatctcaatgagatgggtcatgtgcttcacaaataaggtgaaataatgcttagctcattttcttcttcttcttttttctttttggaagaaaaagtcaaaccaaaatacttaatacttaaaaatattcttaaatgaaactagcttttctatagttaaaaaataaataaaaaaacgtatattatttttataaaaaaaactgagtaaaaaatttatatttttaaaa

SEQ ID NO: 104374 - DNA, 235 bp, Glycine max
tttatggcgtgaaagcagaacctaaacagccttttgatttagaacctcatgctttctatcttaacaatagtttgtactctgtccaaacatttgggctgctttctactatttttgctatccatacgcagtgaattggcataggctagtacaaacttctcttatattactctcatcataaaattcacatatgtgatgctgaatacctaatttaattcttttgcataagacacatttt

SEQ ID NO: 104375 - DNA, 389 bp, Glycine max
  unsure (1)..(389): unsure at all n locations
nggactagaagaggtataatattaatgactctacaatgttacattatattttattttatcctaacatgtttggtttaccagcacaacgctaaagctgataaggcaatgtgtgatataactgaagatattcaatatgccactgtaaagttaaatacataggcttttttttttttgaaaataacaatggttcttagatattcatatatgtcttttctcatacaacaatctctttctgcaatagctaccatgatcccgatcaataattgtttgtcactccatcaaagagattgtcgtttgaagttggggatgatgacccgcaatcacacgatcctgcatctacacaattgtcatccacagagatgacaaaaccgattgactaaaaaaaaact

SEQ ID NO: 104376 - DNA, 381 bp, Glycine max
  unsure (1)..(381): unsure at all n locations
tcanacttgcaacanaggagttgagcaggtaaaaaatattcgtcttcaaactcttagaggtgactttgagcgtttgtttatggaggagtccgagtcaatttctgattatttttctcgagtattggccgtagtcaattaacttaaaagaaatggtgaagatgttgatgaggtgaaggtcatggaaaaaatacttcgaactttaaatccaagttttgacttcattgttaccaacattgaagaaaacaaggatttaaagaccatgactattgagcaactcatgggttccttacaagcatacgaagaaaaacaaaagagaaaaattaaacaaaaggaggctacggagcaactactacaactcaacgtaaaggaagcaaactatgc

SEQ ID NO: 104377 - DNA, 331 bp, Glycine max
tcagcttttgtacaacaactgtaactcttttttgattctcttatatcgccccaagctgtggatgactctcactactgcttgccagttgatccacttgaactcaagtttttatggctgactcatactctatggttggacatggcactgcatgaattgaccagagttcttatatttggtagcctctggaaatattaagcccttgtgagcggcctgttggaagtccaccctgtccttattgaatgattaccaggtggatttccattgccttgcgattgtgggaccttgctggaaactgaaaatgcccttgtggaaccttcccttggaattcctg

SEQ ID NO: 104378 - DNA, 401 bp, Glycine max
  unsure (1)..(401): unsure at all n locations
ggacacttaaatactcagctttgagaaattcgaatggtcataactnttacacggatgtccgatacaggcgaatcacatatcgagacgctcaaaattgaacaacggaagctcttgcgaaattcaaatggtcataacttttaactcagacgtccggttcaggtgcatcacatatagaggcgctcgaaaaggaacaacggaatctcttgagaaattcaaatggtcataacttttcacactgaggtccgattcaggattataatatatcaagacgctcgaaattgaacaacagaagctcttaagaagttcaaatggtcataacttttaactcggatctccgattcaggcgtatcacatatagaggcgcttgaaattgaacaacggaagctctcgagaaattcaaa

SEQ ID NO: 104379 - DNA, 388 bp, Glycine max
gctcgaccttaatctcgctcttggcctgacagcactactcctcttttaatcatgctatgcgctcgcgactggtccttctcttaccttcgcagctcgagttcactattgctaccccatagagctccgtgaaaattattccggccatactcttccttgcgagccctcttggtctcttgttcaaaggctcttgcggtaattgcattcttttcccgtaacccggcacactccttccgaatgtgtgtagcggccaacttgaacttctccttggcaagtttcgcctttcctaactcgcttttgagagcttggacttcttcctcctctttcggtgcttcaaaactctctttgctgacgacttttaacttggcgagccaatctaaacctcctatat

SEQ ID NO: 104380 - DNA, 382 bp, Glycine max
  unsure (1)..(382): unsure at all n locations
tggacaagnactgtctcacacataagaggtttatgtacttttgctacccataaacttctcttgggcctgttagaattacgcaatgccatctgctatggctgacatggtatcatggctatgtgcgtaccattcaaagacaaaaagcaaaagggagaaagaatttggagggtgttgtctggctatagaagacaaagatgatattgtccttgccatggtcaaatgcaacttgcaaagcaaaacataggtgatattcaatcagtaccttgtgatcataaagataaaatagctctatcgtccatgttttgataattcactacaaattattatctatctaactgaacaaaatcatgtgaagcatgcgtcgaggccattctgtattttt

SEQ ID NO: 104381 - DNA, 376 bp, Glycine max
tgttgctaatgctggacagatactcttatgaaacctgttttttggagagcggagatctcttatatggactgtatggtcattttttgacgcggactctcttcaataactaagctttattacatgctcaaattcatgtagttgtggactcaataattgcttatagcatgagaatgatgaagagattgaataactatttgatgattcaccctgtaccttcgttaatttttcactgtggtgcaacaacctaattaataaaataaaaaaaaatagagcttatcaactcctttcacacttcacaggaaaaagagcctgaaacttgtgtaccacaaacaagttctagtcattcccaaggtttcatttgttatttgttagtcct

SEQ ID NO: 104382 - DNA, 378 bp, Glycine max
  unsure (1)..(378): unsure at all n locations
tccttttaatgcatcgcacctatgactaagctccatgtgtacgcaagcttntgacggcagtcgccgggatgtatggtggcagatcgatctcccgattgaaataggaccccacgtgtgccaaattaccttccaagtaatggacataaatcctacctacaactacttattaggccgggcttggatacattcagttggggtggtcccgtcaacactgcaccagaagttaaaattcgtggtggagggacaactgattatagtttcagaggaagaagacatacttgtaagccatccatcttctacaccttatgttgaggctgcaaaggagtcattataaacatccttccaggcatcggaagttgtgagcaatgcttatgtgga

SEQ ID NO: 104383 - DNA, 369 bp, Glycine max
  unsure (1)..(369): unsure at all n locations
gacactataaacaactcaagcttgatcctgtataggagacttgtatgcatatcatctttatacgcataattcttcattccaaggacgacatgtacatacataatatgtcaaaactttgtctactatcctttctccaattagaaaaaaaagaaaaaagctttctgttatatatggtccttaatttgnggaaacaaaacattgctctagagcagctcttttccagacgttcacttgcactgggaaaaatattacaaaaaaagtcagctctaaaacatgatgttagaattatgcttttaaagtgcttggcgtctatgtgataaccatttccagaatatttattgtttagacatcacagtagattggaaaaaa

SEQ ID NO: 104384 - DNA, 400 bp, Glycine max
  unsure (1)..(400): unsure at all n locations
aactcaagcttgtcccagcgtctatgcgagacggagaccaacatgctatctgntttaccctaatngcgaccggcgacctttgcttgatgacatgcgaccattctttggtccttgtgaggtgctaggcacccctcattacgcgatttatgaaattccaggacatgccgaaaaaccaaaaaatgttgatgcacaatccgtaagtttttcgtgacacaccggagatcaaatggaagcatcggtgcataattaagagaggttccgtaacattccctaagtcaaaaaggggatgattatgtaatccgcaacgttccgtaacattactgaaagaaaacaagaatcgttaccaaatttcgaagtttccgtaactctacgaaaaaagaatcaccaaaaaacagcagag

SEQ ID NO: 104385 - DNA, 378 bp, Glycine max
tgatcaaaacaaacatataatcattccagtccactcttttcatacaatttctcattcagatcaatcacaaccactgcatttcatatcaaacaaaccactaaaacatgattcaatcatttcactgttcaaacaagcttttgtacaagcaatcaacactaaaataactggaatttaaatgactgaaacataaagcaactaaataactaataactaaattgttcatgatttgcaaaaattaaaacaaaccagaatttaaacatacttctcatcctgtggctgatcttcatttaaatccagcactggagctgctggtacatcctgaagaatgggctgctctagctctatggctggggctaatggcatggtgtcctcaaatat

SEQ ID NO: 104386 - DNA, 371 bp, Glycine max
  unsure (1)..(371): unsure at all n locations
agctgntatatattgtccccatagatttttatgtttgctggatcactcttttcactggacaaggatgtatggtaatatcaaagtttgaatgccttttagcttaatttcaatggttcaaagttgtcctcatggatctcatatatggcactgcaaataatatttaattttctgaacatgaatttctggagcactaaaatgatatgtcatatgtgtatacattactgataagcctgttcttgttccatgtcaatctataattattcttttctgtataaggccatttaattaaactgtctacaaaaaaagaacttttctgatactaactgaagtttgctccatcttcaagaaatcatccgcaaaatgcttctatt

SEQ ID NO: 104387 - DNA, 399 bp, Glycine max
ggaccttaaaactcagcttaacattcaattgtgagcgtctcgtgatattactgttctcaatcagacatccgaggaaaaatttattgtcgcttggattggctcagagattcaacattcaattacgagcgcctccatatattacgggactcattcagacatccgagtaaaaagatattgtagtttgaattagcttaaagcttcaacaatcaatttcgagtgtctcgctttatcgcgagactcaatcagacatccgagtaaaaagttattgtcgtttgaataggctcagagcttccacattcaatttcgagcgtctcaatatattacgggcctcaataagacatccgagtaaaaagttattgtcgattgaattggctcatagcttcagcattcaatttcgag

SEQ ID NO: 104388 - DNA, 371 bp, Glycine max
agaaaatataagtaaagtcaacaaatttctcatgtattaccatattctaaacagagaaggaaaagtttgatagatgctttctggttccgttattaacaataaatatttatttcatataaaactaaacatttattttattagctacaaataaattaaaatatacctctctaatttagaagaaaaactatgagataaattatttgaattaaaaacgtcatctgtatgtttcttaatataactttggtcaggtcggggtatgttagattaagatgagaaactcgtaactcactttcctttgttaacgccatcgaatctgaaatcttattgaatatcaatattttcttgctaattttttactgcaaattaatcag

SEQ ID NO: 104389 - DNA, 375 bp, Glycine max
  unsure (1)..(375): unsure at all n locations
ntatctctaccactctgcaggtctacccagcctccatatttggaaatgagaattctggcccatagttgattgtggttagcagctagatcccaaatccatctccccatcaaagctgtgcattgaatttggccagatcctttatccccaaacctccatcactctttggaagacagatcacttcccattttacccaaaggattctcttgagctgttggtttcccccccacatgaagtttctttgaagagattccagcttatctaccactcttttggggatcttgaaaaaagataagagataaatagggagggcattcaagacagacttgatcaatgtaaccctaccacccattgataaattcttctgattccacttgg

SEQ ID NO: 104390 - DNA, 386 bp, Glycine max
tatgcgcttatttacttacgaacgatttttttcacaatacattctattaactaagaagaatgcacccatatacaatcaaagcagcttcgttacctagattatttacatgtactttcaacgtgtatttgttacttacatcacacacaattaccttggctaaatttacatacatgcatactcaaaagcattttggggtaccaaaaattgcacatgtgcacatcttggtatttctaatacctatacatgcacaaacttcatgatgaatcttgactatctacacaataaggtgctacatttcatgttcttttcaagattttgctacctaaagccgcatgcatattcaagtatattttcctttgctgactaaaattgtattcaaattaaaa

SEQ ID NO: 104391 - DNA, 377 bp, Glycine max
  unsure (1)..(377): unsure at all n locations
ggataatataatgatacttatgttctgcataattttctatcngcaacactgattccatagcagtgataattcttaactagttttgtaccgccacaatatacacttacactgtgacctgagtctaaaactagaaattatgttttaatacaatgacagcttttaatggttgtccctctatcattgaagataaaaacttatgtgcattgactaaaattattgcatctttttcctgttgtatccttaattattattagagaagcatacttgagcacaatgaacttatatctattcattggtcggtagaggcgttaaactttatttatcactctctctctatggttgagtaaacgatacaatttcactttaactaggatgtc

SEQ ID NO: 104392 - DNA, 359 bp, Glycine max
acacttagaatactcagcttgctgaatagctaagagccccccgttagctgggaatttttattcaacattctcagcttgaaacacaaattcttaaacatagatggaggctaagcctttatgaaaatatcaacaagttgcctggaagacgaaacagggagaagctttatgagaccacgttgcactttctcgcgaacaatatggcaatctaagtcaatatgtttaatgtgctcgtgaaaaacctggttagaagctatctagatagttgagttattatcacaataaaagaagaaccgattgaacaaaccaaatgggaaaatgtttgaagaaatacttgagccactgcattttgcaagttgttg

SEQ ID NO: 104393 - DNA, 389 bp, Glycine max
  unsure (1)..(389): unsure at all n locations
cttatagctgactcattatccacaaaaagcttcactccatcactctccttgattnttaattcctcgaataatgtgtccaaccagacagcttggcaagcactcattgcagctgcaacatactcagcttcacatgttgataaagccactatggattgcttcttagaacaccacgatattggtgctgcaccatacatgaatatgtaacctgtagtactctttctgtcatctctgtctcctccccaatctgcatcagtatatcccactaattcctctgagttgctgttatctttatttggaaatagaattccagtattgatggtcccttttatgaaccttagaatcctcttatcagctatgagatgaggaattctgggtcttttcgtatatct

SEQ ID NO: 104394 - DNA, 386 bp, Glycine max
  unsure (1)..(386): unsure at all n locations
ngcattnggaattgcgaaagccccactccatcattatgattagttcctgacatctcaaacaaacaaatcaaacgtaataagacaattatagttgttgtttgaatacctcacccactcaagtgtatcacacaattatggcttttctctaatgaaacactcttgccttttaccactctaattccccttgagttcttaggcaattcaagagattatggccacaacaaagaacaattcaccaatatgtgtaaggtaaggctatagagacaaggaaaaggttaaccaagaaaaaggctaacaatgtttttaggcacaaatgaaggaaataaaattcagaatttaggaattcaagtaacaatccttcatgcaaccaatatattaccttaaag

SEQ ID NO: 104395 - DNA, 393 bp, Glycine max
actcaagcttctggtgggacatcttgacttgctttccaatctgacattcaccacagattctgccttcttctattttcagattgggaatgcctctaacagcacctttgtcaatgattttcttcatgcctcttaagtgcagatgtccaaatctttgatgccatattctgacttcatcttctttggaggatagacatgtggaggagtagctggtttcttggggtgtccataggtaacaattgtcctttgatctgctgcccttcattagaacttcactcttctcatttgtcaccaagcattctgactttgtgaagtttacattgaatccttcatcacacagctgactgatgctgatcaagtttgcagtcagtcccttcaccagcagtactttgttca

SEQ ID NO: 104396 - DNA, 304 bp, Glycine max
acttttaattagaaatcggacactactggcacattcctttaatttatatatatatatatatatataaaatacccaacttcgagtgcaggtcaactaatttccataccattctatttttacttcctatgtcatttttcacaatttgatttttccactactagaacaagcatgaactgaaactaaaagataagttttgcagatgattgtttccctaagtagatttttaattatatagtccatttcatcttgtaagaagtactaactaattaatgacaagtatgttggacaaatgacctcaattatc

SEQ ID NO: 104397 - DNA, 393 bp, Glycine max
tgtgtctcactttcacaactcgaagcagaatatattgttgttggaagttgtttgactcaaagcttctagatgaagcaacaactattagactttggagtaaaccttgatcacattcctctaaaataagacaacacaagtgctatcaacctaacaaaaaaccatgtcatgcattctatgactaagcacatagaaataaggcctcattttcttagagatcatgtgttaaaaggtgactactgcttttgagtttcttgatagtcagcatcaactaccagactttttcactaatactcttgctagagataggttccttctcattagaaatgaactaggcatattggatgcatctagcataagataaaattgttgtttgcatagcgtatgattcatatt

SEQ ID NO: 104398 - DNA, 378 bp, Glycine max
  unsure (1)..(378): unsure at all n locations
tccattcaaattttcttatgctaggtggattgggcctttcaaaaatgacctttattctcttagggttcatgggaacttcttgatcactatctaaaaaaattaagaagagtattgcaataaaacatacatttttctatattttcatgttgattattcctaccaaaaagtatgacaaacctaaagtgtcccatatgagtacctaagtctgtattaaaaataaaaataagaacaaacctacctaatgagtccctatgtacacaaatcatgaagatgttgggtgcacaagtgattttacaaaagagggttgcaccactcaaaacattcatcataccacctattntagggatttggggcctaataatacctattttgggcacc

SEQ ID NO: 104399 - DNA, 350 bp, Glycine max
tgacatgaggaagtgttgaagggtgaaacttcctgcttctattgttgaccacagagtggtacctggagatatgtcgcgggggtcaggagaccttggggacgtcaagtggggtgctattgcccaaaaccaagcttgaccaatcccgacccaccccgggcatagtcggtcagtgagaacctgtgatgtacctaaacaggcgagctcctggcagtcaacagataaaaggaacaaagaccacaaagcaagggggcttgtggtggctggccagctgtgaattttgtgtgatatgtggattatggcctctggtaatcgattaccaagggttggtaatcgattacaaggcttaaaat

SEQ ID NO: 104400 - DNA, 378 bp, Glycine max
  unsure (1)..(378): unsure at all n locations
cgcacaaattatttaatcctttcaaaatactaattttgtgtggggacagtccaaaaaacgtaataaaactaaagtcatgctatcacttaatgtccaaattagatggaaataactaaagcatatgaaaggaaaatggttcaaaaatgttgatcggttctcgaaaagtttatgaaccaaaaccataattgccgaaaaattcaaggatgaaaatcataatttacccctatattattactattaattaaattaaaatataaaatgttattattagttagaatatttaaattatgattaattactataattaaatatttcataattaattggtaaataaactaaagagtgattntttcacatacacatttttttccccaacac

SEQ ID NO: 104401 - DNA, 378 bp, Glycine max
  unsure (1)..(378): unsure at all n locations
tctcggctcatgctgngaacgcctctagctcaacactcgtgcagcctaacgcacccacccagagggaagctccccaagttccaactccgaacacgcctcgaccggccggtaattccaacacgacaaggaacttctctccaaggccattgccagaattcaccccgctcccgatgacgtatgaagatcttctaccatccctcatcgccaatcatttggccgcggtaactcccggaagggtcctcgaaccccctttcccgaggtggtatgaccctaatgcaacttgcaagtaccatgggggtgccccggggcattccatcgaaaaatgcttggcccttaaatacaaggtccaacatctaatggatgccggatggctgactt

SEQ ID NO: 104402 - DNA, 378 bp, Glycine max
gctcagcaatgaaaattctttacaagaaagtgtatatggctgaggtcttggcctaggactgaaatcacaagcatcagaattaagcacgacaaaaaaaactcacaaattggtgaagtacaagttatcctttcatttgtcataattcacaaattcacgaaagctcatttgttcacttgcccaagactcaatcgggcaagctaatagcatgacgtttggtagtcaaaggtggaaagacaaacagaggaatgttattcagaggagcaggtaccattttcgccaaaaaatgaggtcatcatataacatgagtggaacattgagaccaattaagatggacctgagccctcttttcttttgctttacgcaaattctttaattctt

SEQ ID NO: 104403 - DNA, 366 bp, Glycine max
  unsure (1)..(366): unsure at all n locations
cgtaaaatggctagacacgatacatgtcatggtntggtttggttcaaggataaaagggatgccccacattatttccatgacacaaatgcaaaaatgatgatttggaaattttatgcacaactggacatgcatgcacctatgtggacgctcaagtgtcaaatttttatggtcatgtgatgctaaggctcacgattcatttcctctattttaaatcaacccaatgtttccaaaatatgttcttttatcaatttgtgcattcattcgagtccattttgggcgtctgggagaatcttcacagcattcacccttcaggtgtatacacattttttcaaaaactagttatgatcagtggaatttttccaaaga

SEQ ID NO: 104404 - DNA, 122 bp, Glycine max
  unsure (1)..(122): unsure at all n locations
cngttagtggcatctagagacttattttcttttgatattcgctctttaaaagtggcactatttacgaaagagccatctccttcttctctaacatatctcttggggatactgtatcatgatct

SEQ ID NO: 104405 - DNA, 387 bp, Glycine max
  unsure (1)..(387): unsure at all n locations
ntaccataaactngacttanatccaatgttctttgtcctaccaaatcattgttgactttaaacaaatcaacaagatttgttggaagattgttcactgactaaagtatgatcatctaatagtcggatatatcacttaacacttttagttttttctctcaaggtatataaggcgttttgaaagctttgtatctttacaagaatttacaaaaagtttcacaagaaataatgaaagaatgattcacataggtgattcgtgtcttgtttcttcaaagcttattctatatataaccttcatctctaagtatctcaacagttgaattttttactttgttcttcgcttgatgtcttgagtatgttggagcatttaatacttacattaaatatacc

SEQ ID NO: 104406 - DNA, 396 bp, Glycine max
actccagcttattctgatgatgccaaagattcgagtcaagagtctttattcaagtgtagattcaagagaagactcatgatatgcaagaatctcaagaaaagcatcaagataaatataataagaatttttcaaagaaaagatagaattgcacaatttttctaatagaatttttcaaagaaaaaccttttgctggagtttttactctctggtaatcgattatcataaggccgtaatcgattaccagaagcccaaaacagttttataactgatttacaaagtagtaatcgattaccatgggcatgtaatcgattaccaatgtttttgaacattgaatttcaaatttcaagagtcacaacttgtgataaaacattttcaaacttgtgtaatcgattacac

SEQ ID NO: 104407 - DNA, 391 bp, Glycine max
actacgcttctttccttccccacacattcttgccagagtcttacaattctggcgcaccatgcttggctcaccctcacccttggccttggaaccataaaagacaaagtggttctctttgtgctcgaaactgaggccatgaaagccttcatggacaaaattggccaccatagatatcacttggtgatgtcaacaagaggctcataaagggcctcaatggatgggaaatggcaatgttcaagttcacaatagggtgcataaccttctatgtctatgctgttaggcaacttggaagctttggcttttcctgtgctgaggatctaaaaaccattcttcagtctgtggtggagcttaaggattgcttggatcacactgtcatgctttccatgccaaa

SEQ ID NO: 104408 - DNA, 376 bp, Glycine max
  unsure (1)..(376): unsure at all n locations
tgccacctancttgcacaggcgagctatgttgctttttccacaatcaaccgccttttggaggaattttctggaaggcccaaatgggcctggctgctatttgcacccccatttttactaagaacaccccctacctttttttggcgattctttttctgtaacgttacgaaactttatgaatatcgtaacgacgctttgtttctttccgtatcggtacgataccttacagactacgtaatcaacccctctttggtttcctggatgtcacgaaactttacggattgcgcactaacacttccttttaatatctggcatgtcataaaacttcacggaatgtgctacaatgcttttttattacttcccgcatgtcacgaaact

SEQ ID NO: 104409 - DNA, 375 bp, Glycine max
tcgaccaaatgtggcagccctaataatgtactggttatagttacgagcaacacaacaaataccatgggaaactgttctttcttctttttctttttcatttctttctctttttcacagtaattaagttcagaaggaaaattatcactatagagtcctgaatggccagttcacaactctattcggagtcatttctttctgatcactcataacctctaaactattttgctctttcaaaaagaaaagtatgccagccattactttaggtcgtcacgcgaaaaataataaaataaaatgcggtcggtgaactctctttcaaataaagtttgttaacgctttcttttccaataacaagattaaacataagtgcattcatca

SEQ ID NO: 104410 - DNA, 377 bp, Glycine max
  unsure (1)..(377): unsure at all n locations
cgtagtgaggcttggctacaaaaattcattggtttttctatgattcaaagatttagattccaagagagcacaaatcctagacttatccaaatgatcttttccatacaagtagctttctcactatcttttcctattacnttgcttctgaccttattataacaacacaatttttttttctttcctttttttttaacatacaacttatttgttgtgtgtgttgatgctttacccttttctttacatccctattaacttcactcccccaaatttggggtaaatttgccttgaaccatatgctctcctaaaatctaagcaaggtatctggagataattatttaagttcaaggttcaaatttttgacaatatcattcaactca

SEQ ID NO: 104411 - DNA, 378 bp, Glycine max
  unsure (1)..(378): unsure at all n locations
ncataagcgcgggtctgggagacgaacgtcaagaggtttccatataccaagatgatgttccaagtacattggatttggtacgaccatgccctcctgatttccagctatgaaattggcgagtggaggaacgccccgacattttcgcaacgagcattatgtaaacctttacgggtgtaatagctctacatttgggcctacgctttagagttattcttttgttaaagctttgtgtcttttgttttttgaatttataatacaaggatctttcttcatctgttcctacctctctacccattctcatccatttgcatgtttacttctttatttttgaaaccggagatccaatgaccagtccccctaaagtactaatacctgtga

SEQ ID NO: 104412 - DNA, 299 bp, Glycine max
taaaaaatgcatgaacgagactgatactttatggtggggtggtttggaccaaaacacatatttgaccctaatctatttggtgacagattttctatatacgtactaacaactattctgaaagaagatagctcttaatatacgcgggataggagcaggtagatccgttattgaatgctgccatatttggcacaggatacaaccggaatttatacgatccaactcgccattggatataattaagatacgagaagtggtgaagaccagatctttatagagttcttacacaataagtatttctg

SEQ ID NO: 104413 - DNA, 373 bp, Glycine max
  unsure (1)..(373): unsure at all n locations
ctactgagtacacatggataggaatnggctctcctctttaactagagnctatagatgaaatatatgcattgcctgctgggtgctggctactgatttcttacccttgttagtctaagctaagaaacacatggctccaaggagcacttgattttttttttcttctgggtgacgaatgactgagatcttacccttgctttgccagttcagctaagactgcttagttggattaaagcaactctgatttccatccaggttggttgtgacttgtgactaaaatctgaacttaatcaaaaaaagttgctttctggttggcaggtgtaactttaatagcaaacgggcttccttgtgagtaacctactttttttaaactaaa

SEQ ID NO: 104414 - DNA, 371 bp, Glycine max
cgtttatttcttcaaccgaccaatgttgcctccacctttcttcagcatgctcactcgtgagatcttgagataattcacgtttcctttcatcaattattctcttcatagcaagattaccagccttgtcaaccagagccgccaaatcagcaccaacgaatcctgatgtagccctggctattttccgtagatcaaataaaccctcaagtctaaaatcgcaagtgagcacagaaaggatctcctccctggcagattcatcgggattgccaatgataatctcacgatcaaaccggccgggccttcttatggcagggtcaacagcatcaggcctattagtagcttcaattacaagaacatatccaggatgatgatca

SEQ ID NO: 104415 - DNA, 402 bp, Glycine max
acactatgagaaactcaagccttgtatgccaaattcaccgtgtaggaatttgaagtatctactaaccaaatccaatgatcttccccttcattgccaacatttgcaccctccaacaccctcaaaaaatcctccactaccctatttccccattcaaaccactcccttctccaaaaaaaattctcatacccactttccatcacttctccaaagaaaatcccatacccactaaccatccctccattctcccatattcccaatcacctctcctttttgttttgaatttgtgaaaattcttgcgaacaaattttgaagaggcatatcacccacccatctatcctcccaaaatccaatatttttactatcacaaccctccacccaataaactcgtcgaaccacttgttt

SEQ ID NO: 104416 - DNA, 395 bp, Glycine max
  unsure (1)..(395): unsure at all n locations
ctccagcttgcacagcaagtaactaaatntgtttttggtacaaaatgaagtaactcactctctaactaactaacttccactaatatatatggttactactaagaaggagggatgggcctcaattgggccaactaattgttcgacggtcggcaagtgcatcggatcgtgcaagtagtataaaatggtaagtgaataccgagtatcgaactctcagggaacttgttttacctggtaaagctgtggttcagtaaataagtgcctttggatgaaagtttggtgcgtggtatggacaagtatgcaactaaactattcaacagtaaagcacgtgagtagtggtgtgtgaagacagataaagaacgtgtcggtcttcttactggatgaatgatgttattaaa

SEQ ID NO: 104417 - DNA, 378 bp, Glycine max
actcatgatcactgaagatgcaatatgagctctaatattgttatgtatatggacaactatgtacgaacctctatggaaaagggaaaaaaatgaaagttaataaataaaaacagagggaacaaaggccttattatataccagattgcttcttttcttcaacttttagtttaactacaacatttatataatgaccaacacaacctaataagctttgccctaaaaagaatataaagagatgcttttatatttgcggaaaaatgtaaatatctttgtcttcacaaaagcattatataatcaccttacttattatacataatatggattggattgtaagttcaataagtttgcactacatatggaatcactttgaccatgtag

SEQ ID NO: 104418 - DNA, 400 bp, Glycine max
  unsure (1)..(400): unsure at all n locations
actaaganaaccctgtatgntcaatgacggaagtatttgagtgtttttgtaaaagatggacaatggatattcaanattataagaaataagctgaaagcaacataatattcttaaaataaaaacagtggatggtggcaggaataaggttacagtacactagtctatggccccacaaaatctaattttattcccacgaacaaaaggattcgttttcgtacaagcgaaaggaagaagagaagcgtgtcctgtaccttatcagcagcagcatctttgcccttgtctgccttggtcttctcagcctgttgcttctgtttctccaacctctccctctcccatttctgcacacaaacacaaagtagtacttcaacgttaagaagatggatctcgagatccgacccga

SEQ ID NO: 104419 - DNA, 338 bp, Glycine max
attccatgggcttcccatcccaattctgtacttggatcatgaaacgtgcttctatcacctttcttaatgtgacagtcactggatacactcatggctcctctaaatggcatctgggttctacacaacgggaccctctctccccttatctgttactgcttagcctggagtactttctcagaaatatcagcagccctcacgatgatgccaatattaaatatcattccacctgcgcaagtttgcagatatctcatttggctctagcagatgatatcatgctcatatctataagaaatatcccctctgtgtcaactatggtggccaagccttagcacttttgt

SEQ ID NO: 104420 - DNA, 381 bp, Glycine max
  unsure (1)..(381): unsure at all n locations
tcgattntcttaatttacaactatgacatgaaagatatctgattnaaaacactaatacctcagtgcctattatgaaagcatgaaaagacaatttcttattataaaaaaatgttagtcagatcctggccaaatttcctcatcaggcgtacctagggttcgaaaaatctatagacatttgacaaacatatgattataaaaaaacattcataatatgaaaatgttaaagtagaggtcccaaatttattcaaacctgtcataatttcagggcattatttattgtagtgttctaacaaaaaaaaaagcggaaaaaacatctcttttattcataattgatatcaagaactagtacagttccttgtttttcagattactgaaattcat

SEQ ID NO: 104421 - DNA, 362 bp, Glycine max
  unsure (1)..(362): unsure at all n locations
cgacgtgagaaagtgtggaatagtcagtctttctacttttattcgtngaccacagattggtacctacagatatgtcgcgggggtcaggagaccttgtggacgtcaagtggggtgctattgcccacaaccaagcttgaccaatcccgacccaacccgggcatattcagtcagtgagaacctgtgaagtacctaaacaggcgagctcctggtagttaaccgataaaagaacaaagaccacaaagcaaggtggcttgtgtggtggctggccagctatggatcttgagtgataattggaatatggcctctggtaatcgattaccatgggtatgtaatcgattacaaggcttaaaaatgaaaacaag

SEQ ID NO: 104422 - DNA, 370 bp, Glycine max
  unsure (1)..(370): unsure at all n locations
ntgtggccatgtaaacactaaagcttagggtttgttttcccattcagattgaaccagttttattgcaatgaaataacaaataattgaaagcaataacataaagtccagttttatcgaaatgagataacaaataaaaactaaaagcaataacaacaaaataagacgaaatcatagtgtttcaggccatcctggccatgcaacactgcctcctcaagtgaagaaatccagcacatcagccatatcatcatcctcctaagctcccttgtcgtccccaggagcctctacaggacttgcccttgtcttaaaatcaagctcatctccaagccaggcaattgtggccccgaactgctcgggggtaggccacggaaaa

SEQ ID NO: 104423 - DNA, 385 bp, Glycine max
tgtacagttatgtctcgtatcgatttatttacaaatgttgtcatttacacaatcgcttttagacaatgattggtttattcaggagtctctactttaatcgattaccatgtgatataatcgattacttctctttctataagtgtttcaaaagtaaacaataaaactttaatcgattactttgagtatctaatgaattaccttgttcttgaattgtttccaggttttgggaagaacactttaatcaattaaaaagataatctaatcaattacttcattgaattaattgattaccttgtagatttaatcaatcacaggtggttataactgttttctctataaataaacagcttgtgttctcttcaaaaacaacgaaataagcttttgg

SEQ ID NO: 104424 - DNA, 322 bp, Glycine max
cagttcattgtcaaatatttgctccctccaacaccctgaataaatgcttcgataccctatatgcgcgttctaaccactcccttctgcgaaaaagagtctcataccccctttccatcactttttcagagaaaatcccatacgcactaaccatccctccattctcccatattagcgatcacctcttctttgtgttgtgaatttgtgaaaaatcttgcgaacaaactttgaagaggcatatcacccacccatttattctcacaatatccgatatttgtactattagaacccttcacccaataaactcgccgaaccactttgtttt

SEQ ID NO: 104425 - DNA, 381 bp, Glycine max
  unsure (1)..(381): unsure at all n locations
gaaatagncattaggacggatgaagatcaaataattgtttttctaaactcgccaaccctctaagaaaatcgtaaaaataaaaaacctacacgtcacatttttttgtttgatttgattctcggatcatcttataaaaattgaattaaatccaataatacaacatatcataattatattgatttttcctgagataattaataataattattaaataacttattatttctcatttgttttgtgtataacgaaaatgtatatttttctttcatatattccaaaaatgtattaatatttttaaaaactatattaaatataagataagacacaaattattattatgtcaaaaaatattattaataatattttatatttaatggtaaa

SEQ ID NO: 104426 - DNA, 382 bp, Glycine max
gataccaactgaagttcttgaaacacactataatgtggttgaatattgtgaacgataaaaatttagtcttttgaaaactattaaaagcttttctcaaatagatatcaatgaatgaagggtttcgtccaaggggttcaaaatcacaattgtgcttagaaaatccagttcacaaaacttggatatagagtgtatagaagtagtcaagaaaatacaaagattttatactggttcaccctaactcttgggctatgtcaagttcatcttcaaactttgaagggttccactaatcaaatccttgattacaaccaagtattctctataccacttccagctacaacaagtactctttaggccattcctagcactacacttaatctcccta

SEQ ID NO: 104427 - DNA, 291 bp, Glycine max
ttctcaccctaattgtgcctacgtttctaattggaatcccacactaataactcaccctatccaaatatgagggtcttaacttaccttcattgtgtaaagaacttttgctacgttattatctcacatcagttgggaaattgcacccaataggggtttatgagggatgaaaaaattcatcttcaacttcggcttaaattaagtagaaccacctgtgttagaacattgtgagtccaaagtgaatcagtgcgtatgattgactgaacatccttaatcacttctacaaggctgatt

SEQ ID NO: 104428 - DNA, 378 bp, Glycine max
  unsure (1)..(378): unsure at all n locations
tanggatgaagcaatcacctcacttgtgctagctgtgttgcttctggaggaagaaagaagaagaaaaaagatgaaaaatcaaggtcgaggtgtgtcataccctaatttcgtccggggacctttgctcgatgacgtgcgaccattctttggtcctcgtgaggtgcttggcacccatcattangcaatttgtgaaattccaggacatgccgaaaaaccaaaaaaatgttgatgcacaatccgtaagtttccgtgacacatcggaaatcaaatggaagcatcgttgcataattaagtgaggttccgtaacattccgtaagtcaaaaaaggggatgattatgtaatccgcaagggtccgtaacattacggaaaaaaaacaag

SEQ ID NO: 104429 - DNA, 378 bp, Glycine max
ttgctaatttagttttttccggcgaaatgatcgaagtgggttctaaaagaggaaaattcgatcatcctgctctgataaataagaagcctgcggcacatgacaagaatgagaaggagggaggaacccatgttgtgactgctattcctacatggccaaacttcccaccagctcaacaatatcaatactccgccaatatcagcccttctcattacccaccaccctatcaaccaagaacactcaatcatccacaaaggccacccctaaatcagccggaaagctcgcctgccgcacattcaataccaaacaccacccttaacacaaaccaagacaccaaccggggaagaaattttccagaaaggaagcctgtagaattcaccc

SEQ ID NO: 104430 - DNA, 339 bp, Glycine max
ttgaaatcgaaatgagattgaacgtgttatctggtatataaagaacattgtgttaggttatattgggtgagagctgaactgttcctgagtgagtggcatgaacatattggccgttcgaaagtttcactgtgattggattgattcctctatgggagtgaaggttatgcaaggagcaggttacatgatctgtggcccctgaatctaatatccacggggtggaaagtgcacttggagaaagtgacatacctgagtctattgggtattaactgtgcacgatgaaattgaagccacctgtttgggttgagttgatgccctgttccccgcgaatggctcctggat

SEQ ID NO: 104431 - DNA, 400 bp, Glycine max
tgacactataaaactcagcttctaaccactccaagacgccgttaggaagaaggtcattatggcactgcaccgcttctaccacaaatctctgtccttcgttgagctgatgaaactgaaacatgaagaatcatcatcggcctcttgggcatcgcccatcacattccaaatgtgaaagcatcaatgcaataccagcgtttatggcctctccttctacttcatatgcttcctatggtgcctccttttcttgtacatcaagcttcaccttgttcatggcactggaggacatgacaattgttttattttcatacattgcaatcatatctgctcatgcccatggtgtttgaaacgataaccaacttataactatacttattattacttatcaataaccatgctttgt

SEQ ID NO: 104432 - DNA, 375 bp, Glycine max
  unsure (1)..(375): unsure at all n locations
ntagttgaacagaataatccaaaaatgtcaaagaattgggtgttgaaaaagcataacaagactttctgtgattggtttaaagatacaatctttgcagatgagaatgcttcagaaacattaagaaagctagcagatgggcctaaaagaaatgttataacttggcaaggatacgacataaacaagtattcattttacacaaaagcacaagatgacaaatgtacaatgcagaacagcggggttaccctaagggctgaatctcaacactttgcaagtgtcaatgacgccaatccctgtgtagcttccatcccttactttgggttcattgatgaaatttgggagcttaactatgtgaaatttacggtatgtgttttcaaa

SEQ ID NO: 104433 - DNA, 175 bp, Glycine max
gttttttattaaaaatcttgggttaaccactacagggtgtgaccattttccttaagcaaaaagaacccggttatgccccttgatcgttactatgcttcttcgtgaggacattacaagaacatactgctctatggcccatacaaaaatttgcgttgggccttgatacaaaaaaatt

SEQ ID NO: 104434 - DNA, 382 bp, Glycine max
  unsure (1)..(382): unsure at all n locations
taagctgatgtgccccggctccatgggtctgaccctctgagttggatattcaaaatcactcaagcctttgaatatcaccacaccccagaccacgaccggctcaccatcgcgtccttctacatggacagccgtgctctagcctggtatcagtggatggncggtaatggccaactttcctcctgacagagaatccttcatgcattgcaaactcgttcacgtcctcccagtacgaggatccaactggagccctgttcaaattaacccagaaaaccacagcgcaggcttacctctttgaattcgaggatctcgcgaaccgcatcgtgggtcttccacctcactttctcctcagctgcttcgtctcaggccctaatgcggatattca

SEQ ID NO: 104435 - DNA, 336 bp, Glycine max
acattaaaaatgctataggaccatcggaagctgcatacatgtctatcgtctagataatacggactattactcccatgtaaatgtgctgacttatccttaaattccactattgcgtaattgcaggattctgtgcgagctctgcttatgtactggagtaaatgtcgaatgcactcttgcttatacaggcttgagacatagctatcttctgcacacatctaaaattggtccccatatggagattgggttactcggtgacaaagaaaaggaatatcctactgaggaaagtacgtgtcttatcagagattgctatatccagaagcaaactttggtccttgg

SEQ ID NO: 104436 - DNA, 388 bp, Glycine max
tcgcatggagctacatcaaataaaacaccaaatagacttagtcccaggaacaagccttcctaataggctaacttataggactaatccacaagagaccaaggagattgaatcccaagttaaggaattgttggagaagggttgggtccaatatagccttagtccttgtgttgtgcctgtgttgttggtgcccaagaaggatggtaagtggagaatgtgtacagattgtagggccatcaacaacataactgtgaagtataggcaccccattcctatgcttgatgatatgcttgacgagttgcatggtgcaaacatattttccaaaattgatcttaaaagtggttatcaccaaataaggatgagagaaggtgatgaatggaaaaccgctttc

SEQ ID NO: 104437 - DNA, 385 bp, Glycine max
atcagtgtccacatggatgtatgcatgatcagctttgcataaatttgtaaatcatcattgtcatatgtgtttcatggaaataatttggggcattcccttattcttgaaccgctggctaaacaaacatattgacatgcgtcatgtctcgccatctgtaagccttttgagccaaacctcgacgttttggccataaccttgacctaggatggaaaatttccaaccttaccattggaagaaagaatggaagattcttccctcaaaaaaaaaaagaagaagaagcctcttttaccttgggctacaagtatgcttcaaatggaaagaaaagaaaaggaaaggaagaaagtccaccaatcaaagattggacaaaaacaaaagaaaagaaaaa

SEQ ID NO: 104438 - DNA, 300 bp, Glycine max
accactaccagccttttggaatgctttgcattctgtagactttctatgtttccagccattgaggaattagtagaaattctaagatgtcctctcggaggaaaaaaaccatatctttcattcgagggtctcctctcttcgagcagaatagcaactgcggtcaaggaatcagcaagagagttggacaggataaaacagactcacaacggtatatcgcgcctgccactgaggggcctagaacacacggcgaggggtatggccactcaaggagattgagacccgcttatcgatgtgtgaacattg

SEQ ID NO: 104439 - DNA, 369 bp, Glycine max
  unsure (1)..(369): unsure at all n locations
ntaccattggttctaaacattgtgattttttctgtgttattataaagtgtctagagaatgaaaaactatgtacctttttcttcatttgtatgaaattaatgatttatttgttgaatattttcttcaacaccctaattaaagcttgtttacctgaagaaattatagagattatgttaaattggaaaagttatagaacaaaggactggataatttaacattgaaagtgtttggctagccattttaattagagatgtttacaaagaagcctattttactggcttatgcaacttatatggctccactttgctttaggtatatgttagcttttgccataaaataatgcttatccttgatattttgcagattctg

SEQ ID NO: 104440 - DNA, 375 bp, Glycine max
  unsure (1)..(375): unsure at all n locations
tctntactgganaattccttcctggattgacacttatgctgggactggagttgctggtggggcgatattatgcgggatccgcgttttgagtgggttccctttactagacgggcgccagattggaagggtttctgacgcaaaccgaaaaacttggttggtgtggagcatattggtaagtgttgtgaggggtttgggtttaagccaagtaagagctgaagtcatagtgtgggtatctccttccttcttctttgtcccacttgctcgaaatctcctattgctcgtgctggcaggatcgacatagtcaaacttttccctcttcaatccaacctcgatcctctcactcgcaaataccaaatctgcgaagctagagggaat

SEQ ID NO: 104441 - DNA, 371 bp, Glycine max
  unsure (1)..(371): unsure at all n locations
taattgcgttggaccttgtggcctaaataacttactttggggtgaatnaattctccactaacaaacttttaacccccttctaacagagataggcttaaaatgtagaagaagcagcaatcaatttaataatgttctttaaacatgcaagacacaattgattgcttcaaaataaataagataaaggaagagagaatgctaacacacgtttatactggttcggaaaattttgtgcctacgtccagtactcaagcaacccaattgagatttccactatcttttgtgtgttctctgtgctatcttcttttcattccaatgtgcttttaccttgatcacctatatgcatgctttgttaaggtcattcaacaatggga

SEQ ID NO: 104442 - DNA, 402 bp, Glycine max
  unsure (1)..(402): unsure at all n locations
gacctataaaactccgcttaacctttntattaaacaaaccaggctgttaacataccgggtcatatgctcccgtcgacagactggtctattcctatctctagtcatgaatgttccttcttcacatgaaattattaaaaatataaatcagtaaaatacaaaatatttcattaaaaatataaaaatattcaatatatttttaataattaaaaacaaaacataaaaaattgtatgaaactacattcatatgcacttactatcttttggtgtatccaaaatacaagggaagaagtgagagaagaagaaaaagtgtcaaagtgagagaatgttgattgtttggtagagttcaaatgtagtagtattaaaaagaaaggatatgctcacatgaaattttgttgaaagatc

SEQ ID NO: 104443 - DNA, 360 bp, Glycine max
  unsure (1)..(360): unsure at all n locations
ctcagcttaagtaataagaaagaatttatcggtttgtatttcgatnggggcaactcgactgtattttctgaccaacgcttcttctttctccctctcttcgctttcaccactgcaactgcttgccctcatggtctggaacaattccctgcttgcagaacaaccaatacacttcttttctaaatgaagcctctgtaatgatgccaaagtgttgggtgatttcttgaagcgtaccaccacttccacactcccacttgaccccatgaaagaccctctcttttttcaaggtatccccttctcaatcataaccttctcatcacacacattttctctcttgttttccctcaattacctctctctgat

SEQ ID NO: 104444 - DNA, 369 bp, Glycine max
tcttcctcattaccaagcaaatgttctattctagacttaacaaggagatagaatacacctgttaatagctattgtccatttactgtctattaagtcacttgctgcaagtaatgcagctggccaagccataacagtttagagtgagctcataacagtcatcattgcccctcgtttcatcagctccatcttaagttctgatgcaagtcacagcaatactaacatcattcacagcactactaataaactgataacttagttttataagcaccctataaccttaaccaattacttgtagtaagccaatcttgaattgcagtgctcacagcaatcagattcttggactcccactgcagtgcatacctaagtttt

SEQ ID NO: 104445 - DNA, 355 bp, Glycine max
ttggaaacatttaaaacatgtttccaaatatgaattaatgttcatataatattttcacaacatcttatcaaataatgtgtgtagcccatgtcgctagcacccttgtgaatatttatcaacatgggctatacacaacacttgataaaatattggaaaaacataataataacatttatttctatttgaaaacattttttaaatcttgccaaacgattttagcaacatttttaattagtgcaaggcaaaaaatggtgttaaagattacatgtgatgtagtcgatgcaagctctatgtttccaccatccaaacattgtgaacatcctcaaaggatgcacacataaactcaaaatcacct

SEQ ID NO: 104446 - DNA, 320 bp, Glycine max
ctatgctcttatgtggtgtaacaagctacaaaaggagagagcaagagatgaagagccaatggttgatacatggacggagatgaaaaagatcatgaagaagcggtatgtgccggctagttactcaagggacttgaaattcaagctccaaaaactaacccaaggcaacaagggggttgaggagtatttcaaggaaatggatgtgctcatgattcaagcaaatattgaagaagatgaggaggtaactatggctcgatttcttaatggtttgactaatgatatccgtgatattgttgagctgcaggagtttgttgaaatggatg

SEQ ID NO: 104447 - DNA, 420 bp, Glycine max
  unsure (1)..(420): unsure at all n locations
atctctnagtcacctgcngcatgcaagcttgcggactataccttcgaccaaacacggtcgtgtttctgtctcggcccggatataaagcgagttgcagtaccggctccgcttccctaaccgtactggaggcgtgtgccgtggctatatcctctatggttttctggagttntaacatgacctccgagatggaagccatttgatcttttaaggccgatagatcggccttcatttgttcctgcacgccctcttcattatccatttttctggatcgagtgttataagggtgccttggtgttttcttagttatgatgaatatcctaaagaaataaacaatggngagtatgcccaccaaacatgagtatgcaaatggatgatcggagcacttggattcaccctcaaggttttagataacgtgatgag

SEQ ID NO: 104448 - DNA, 291 bp, Glycine max
  unsure (1)..(291): unsure at all n locations
cccgcacttatcactgagctgcactgcttctatgctctggccctgattcatgaattacgtngcactactacctataagaatcattggccaacatactcaatttatgtccattccttaatgtctgaatgttatgaacaccttatttttaattcattggagcttatgctctgtccatatcaggtctagtattatacaaatactgtctatttgcctcatgatatgtggtccaactataagagagacttatacctatattcagaattcatacgttttctttgcctttaataattt

SEQ ID NO: 104449 - DNA, 407 bp, Glycine max
atacttcatgggaagactgtgactagcttaaatacacatatcaccttgaggactaagtgattttggaagacgattggaatgctatgaaggaggaaccttatacatgattaatggagaggttactacatcctgagtaccttaagaactacatctaatggtattgatagtagagctgaacaacttgtctgccttatctatttttggctgccaattccatttccattcactctgcatgattgtgtatacaaaataccaatctgcattttactatatataattacgaccctgtatagaccaatttaaatacttgatttcctgcctcttttttggaggtaggcctctacctagcctatatacctacttgtccctaaagaatatttaataaatcccccacccattcttttaag

SEQ ID NO: 104450 - DNA, 309 bp, Glycine max
accggatctataagacaccagcggctgcacttacctcccattccgacaatatgttttttggtggtctgacatatagaaagatgcagtatagattggtgcgctttccagacctgctaaaagccaagatggatcatcagagtcctaatggtttgttcaatacaataaagttcctgagtggaaatgagagagattcgctaaggattttgttgagtaatttcctaagatggttagaaggcttgatgctatatcgtgttatgagataggttgacaacgttgctcactttctacccttaatcttagatacttaat

SEQ ID NO: 104451 - DNA, 464 bp, Glycine max
actcagcttggagagattagagccactttgacaactaacgtgtttctctagatgatggcaaaaaggtgattataaagggtgaacccaaaattttaaagaaagaagcctcacttatatctatgttgaaagctctgcatctgggagaaaggttccttatcgactatcaccacattcaaacagagatagattggaaggatacaattccgccagaattaaaatatgtgctacatgatttcccctccatctttgaacctccaaaatgatgtccttcgcaacagcgtcaaggccatgccattcacctcaaagaaggagcccaaataccacatattagaccatacagaaataagtacaacatttggcggttttgtgtagattatagagctttgaacataatcaccattcctgacaaatttcccattccagtaattaaagagttattggatgagataggaggcgctagcgta

SEQ ID NO: 104452 - DNA, 472 bp, Glycine max
  unsure (1)..(472): unsure at all n locations
agcttctatccaaatggacttaccttgaatatttttcttgatagcccttttgagccttgtttccctttccttgttgtgaagctcactacaagccttatgtgaataaccatgatattaccatatccttaaggatatttggagctttggaattgttttgagaataagtgtggtgggtttttgtttcattggacaacttagttatgttggctatgcttcatgatgtattntgggccatacttgatgtacattgtatattggttaaatgttggacatgctgaatgaaatgttgtttctcaaggctaaaaatataaaatttgaaaaaaaaatcaaaaataacctaagttagtgataaatctaatggctataagatgaactcttggctactctaaagaaagtatatctttacttttatttttatcttaaaagactatatctcttgtctcatcctttggattaccattttcctattttc

SEQ ID NO: 104453 - DNA, 366 bp, Glycine max
  unsure (1)..(366): unsure at all n locations
tctttgagtgattngaatacactnttttatctacatctatgtttgggaaaaccaagagtggcttaatgacaaagaaaaatcgggtcttaatctcagggggagattaaaggtagttcctggagtggcttatagagtactcgttgtagcctgaagtggcatagagaatacttggttgtaataaaagaattgattactggaacccttcaagttttgaaggagaactgaatgtagcccaagagttggggtgaaccagtataaaacctttgtgttttgtttactgcttctatataactagttattttctatagtttacttctacactattgtgtccaagttttgcgaattggttttcaaagctcacagtga

SEQ ID NO: 104454 - DNA, 427 bp, Glycine max
  unsure (1)..(427): unsure at all n locations
tcagttgtgtggagcccactacaatggttttcttagtatctatntgaagcattnttcatgaggcgtgaagaacaagttgaagcattccaaaactgtgacactgaatgcaagatctttgagtgagaaatctgtgttttagcttcaaccctctttgtgagagtgacctacttctgatttgtgcttacaaagcttgtaataatattatatagaactgcgagattaagtttctgagtggcatccttcttgtgaggtgaaaatctatattttgtgcataacagatctatttctctgtaaaagtctagcattggctggcaaaggtgaaagcaagttatgtaattggtctagtcatgggtaggatagtatgtagtccaaggttggggtgaaccagtataaaaatctctgtgcaattttctctcttcgtactctt

SEQ ID NO: 104455 - DNA, 249 bp, Glycine max
gcgcatggatgggattatggagaagatgaacaaaatacactatactaatatgttactaacaagttcacatacaaaagatattctttgccactaacagtgagacatgggtggatgaacctatataataaccatctatatctctccacagtggcatatttatagttaggaaaattttttctagccgtgctcctcaacaagttttttttttatctcctccgatcattctacactcatctatgggaagctgtt

SEQ ID NO: 104456 - DNA, 403 bp, Glycine max
  unsure (1)..(403): unsure at all n locations
aacaaactaagcttcaggatgaaaggatagtgaggtttaaattttattagacgaaagcngaggctgcaaaggtcaaaaaagttgaccatcacttgattagacacaaagaacatttgacatattgtgggtgtaaaagagctaagcctactgcagtctaggtnagactcatgatgagccccgaacgtatggctctgcaagcggaagggaacaagagagagctgatagaatattgccaggaagccggaaatggatggatagattcactctcacttgaaaggagtcaaaacttcaagctttagccgaccaagaaatggggagtgacccactctgagaagtcatggctttcgatattgcacacagttcaatgatggctataatagaccatgagcgttgattatgcttg

SEQ ID NO: 104457 - DNA, 372 bp, Glycine max
  unsure (1)..(372): unsure at all n locations
actaagcttgtganatgcaacggcataacgtttactcgtatgttcattgagtcacgtaatacatcgaaacgctcgaaattgaaaacagaagctctgtgcaaattcaaacgacaatacattntaactcggatgtccgattgagtcccgtaatatatcaagacactcgaaattgagaataaaagctctgaacaaattcagacgacaataactttttactcggatgtccgattgagtccagtaatatatctagacactcgaaattgagaatagaagagctgagcaaattcaaacgacaataactttntactcggatgtgcgatggagtcccgagcgtctcgatatattatgcgcctaaattggacatccgagtta

SEQ ID NO: 104458 - DNA, 196 bp, Glycine max
  unsure (1)..(196): unsure at all n locations
catgagtttctccacaacctgcataagagtatcaaagaaaccttaactgtctatgattatggcttggttattgcgcaataataagtttgagatgtcattaataataaaatccagcaagtacttctttctatatgacactggcagntaggagcattcacttcctgcagcatcctaatatctttctactactcaaaag

SEQ ID NO: 104459 - DNA, 393 bp, Glycine max
ctaagctatgctattcttcttgtcactgagaggcctgtcgtcttacgaacatcttgtactggactcacccactggctgtcagaaagcgagtagatgattccaccttgtaagagcttaggcacttcctttctcaccatatatagaatgaccaggatgagttaccgctgcggccacctcactggcttagcctcattctctaatatgatcctatgcatgcaggttcatgggctaataccaggaatgtctgctagagaccatgcaatggccttgttgagcactagcaacaacttctactcttgctcatcatcaagggaggcagagatgatcactggaaacttttccttgtactccaagtaaacatacttgaggattgctagtgaaggcttcaactct

SEQ ID NO: 104460 - DNA, 357 bp, Glycine max
  unsure (1)..(357): unsure at all n locations
acatcaacaagacaatgaataggatatcgctaatagaaaaaagaaagacaccaaattagaatgtggtgctcagagcatcaacagatatatacaaagaaccttaccacgttaagtcaggttcttcaagcaacacatgtggataacctctatacaccggagaatgaaaatgcaggatattggttgggttgcggaacatgcaactgagatgcacaaatgagaaaaaccctactaactaaagtagtgtctttaaccaacatangcaaagtgaggtaaaatcggacgcttgcggaatatccaaatggaatccacaaattaagtgaaatcggaagcttgcaatatatgcaataaatggaatcg

SEQ ID NO: 104461 - DNA, 400 bp, Glycine max
  unsure (1)..(400): unsure at all n locations
agcttcntcattgatccagcagaggaggagcatactttctatnttactcaagtcacacccacggaactctggcacaagagacttggtcattgccatcttgaaagaatgctaaacatgaanataaggacatatgcaaaagaaaatttgaagaagtttcaaatggaggaatgcgaatttgttagcacaccaatgaatcaaaaggagaagttcaacaaggaagaaggtattgataacattgatgaaggatattatgggagctcgattggatgtctaatgtatctcactacaaacaggccaaacattctattttcttcaaaaaacaaaattgaaatttttggtgcaatcaagtactcttgctattgcaacaatctcgtgtgcatgggaagataacatttcaaat

SEQ ID NO: 104462 - DNA, 216 bp, Glycine max
  unsure (1)..(216): unsure at all n locations
actaagctcgtgaatcctagtaagactgaataggacttgcttctatattatcacantctnctacccaagaacctctaggttctattgctttgtcattgtaattattggtgtttaaatcatcccagnttcacataggttacaaattgatgcaacggatgggaggaacaattaaatattagatttagaagaaaaccacattggcctaatttttctatc

SEQ ID NO: 104463 - DNA, 331 bp, Glycine max
  unsure (1)..(331): unsure at all n locations
ataataaattgatttagtaagccaagtcttaacatatttttcaaatcatacaaagtaaacattgagatttggtattatattaagctctgctgatggtaagagaaatttaaaaaagggtgttaaacattttcttttcttttctttttttcaagtaaaaccagaaagaggaatatgcatactttattcaagatataagcaacaaaccatatattccacacacagaggtaaagtaaccccgctgtcccacagatgtcaaaaggaattctagccaagagcttccgacacatatcaagacaaaatntacgataatattgaacatattttgactgat

SEQ ID NO: 104464 - DNA, 293 bp, Glycine max
  unsure (1)..(293): unsure at all n locations
tcctcctctcctcctatgctttatttcaagatccatactgacagaagctccttcagaaatcctggtgcttcgagattntgaagcttacttcgagatgagtatggtaattgaattacagggttcatggaattatgcggttttactactaacatggaaacaaggttgtttggcatcttcaatggtcttaaagttgcaaaggctgctggatctcacattgttaattgtgagtcaaattctcaaattacgttaaagatgatcttccaaggtgtagctctccagaattaatatgcact

SEQ ID NO: 104465 - DNA, 402 bp, Glycine max
  unsure (1)..(402): unsure at all n locations
agatgatgcctattgtcaaagatggcatcatgagttttcataatctctttggcaatatctgctgaagagactataatgtgtggctnttcaccaagttgtaggtgcatcaacggtccatgttggttagccaagtgtgtcacagtttggtggggaagtggcccgaaaaataggtgaatgttgccaagaagaggcagtttccatggtccacgtggtaagattttggatattgaacggttcagagtgttgaacaatgcaaggagaatgcaagcaaaggtgaatatgagagagaacggaataagaagctccatgttatgaaatgaaatgttgtaatgtngtatatgcatgaatggatggtaagttctgcaggctcatacatacaagagtggtgtgtggtttatcaca

SEQ ID NO: 104466 - DNA, 408 bp, Glycine max
  unsure (1)..(408): unsure at all n locations
tcactaagtgaactatccaaagaggggctcctgttgactntgtctatgcacgaattaatataatccacattcacatccaatagtacctgaagtgtctgaagcatctaaagtatgtttctgtggacagctatagggtacaacatgttgctttggataaatctgatgaaaaatttaattatgatcaggggccaacatcctgtcgtcatcttctaattgattccaattgatgctttttggatagtgcggctagctaaataaaataaaatacaccttgtgttatttactatgtacgaataatgatattgaaattctgaatatgggttgtgtaatcttaatcaacggtttagatcatatactcacattaatatttctacacctttattttgcaatgagggtaacctattctaa

SEQ ID NO: 104467 - DNA, 361 bp, Glycine max
ctatgctcttgtgtggtgtgataagctacaaaaggagagagcaagaaatgaagagccaatggttgatacatggacagagatgaaaaagatcatgaggaagcgatatgtgccggctagttactcaagggacttgaaattcaagctccaaaaactaacccaaggcaacaagggggttgaggagtatttcaaggaaatggatgtggtcatgattcaagcaaagattgaagaagatgaggaggtaactatggctcgatttcttaatggtttgactaatgatatccgcgatattgttgagctacacgagtttattgaaatggatgatttgcttcacaaagcaatccaagtagagcaacaattaaaa

SEQ ID NO: 104468 - DNA, 226 bp, Glycine max
gcagctactctttggtccaatatatctttatacaaatatgttcaaaggaaatctgattcaccggatagcgcaccgtgattgtaagtatttaaaattataacggatgaattcgagtatcgaactctaggaactagtattagacaggtgtaaatccaaaacatacgcatttgttaaagagacattgataattgatggttaagaacataattaaactaagtctatgcta

SEQ ID NO: 104469 - DNA, 136 bp, Glycine max
tagaaccatcctcacagataaatcttggcttgaacaagggtcatgactgcgacggctccaccactggctgcatctatcatacttctctccatgtagctgagtacctcataagaatattggagaagaagatactctg

SEQ ID NO: 104470 - DNA, 287 bp, Glycine max
  unsure (1)..(287): unsure at all n locations
agattggatgagaggaagtgtgattttcgaaatctgcacttatgcagaaatgtgctgtcaaataggtacaacacaattgtggctatgtgcagaaaaatactatgcattagctggttgtggaaagagtagtgcggaatgagttctggatgtttgctagtagatcccactggtcaaaatgtagatntatgtactagagacttccagtaaaattttcgagtcgatccaacggttaacgaattggaacacaggaaaggttactgcggtctttaagtgagaaaaagctgtga

SEQ ID NO: 104471 - DNA, 444 bp, Glycine max
  unsure (1)..(444): unsure at all n locations
tgcaagctttaacactggcaactgcaagaaaattggaagttctggcatatatgggattaggccaaatggataaattacaaatgtcaaaagactaaccggtagggccatgactaacacaaggccaataaagcaacggccttaagcctcttttcattattgaaaatttatatanttttaaaatactcttatattaatagataataaattntattatattatttggatttaaattgttctaaaataattagtaaaatttattctctctaaatataaaatagaataactatattgaatgagaatatttntaagaattattgtngttgataagaacaagtaaaatatttctntaaaaaaaatattttggaatttnttgggtaatatttctctactatattnttcataatgcacaatgaanaagatagaatcanagtgataaaaaaataa

SEQ ID NO: 104472 - DNA, 302 bp, Glycine max
  unsure (1)..(302): unsure at all n locations
ctcagctntataagtgacattaggtgcagccatctccctaagagttctctacttatgttaggttgagccatgttctcagtataaaaattagtagtggaatgttcaaaatcagaatcaccctcaacagaatgctcagaatgctcacaatgcacagaacgaccaagatgcacactatgtctaactaatctttgaaaggttctatctatttcaggatcaaagggttgtaaatcacctagatatagtcatgcactatatgcagcaaataatgtgtttctcaacaagcacctaacaagggggtaaaa

SEQ ID NO: 104473 - DNA, 508 bp, Glycine max
  unsure (1)..(508): unsure at all n locations
gtcacctgcggcatgcagcttacatctcgtattcgcgtcattctgatcttattataaagggttaccgatctacaatgcataaatgaggattcatgtcatgagtaattgttgtaagagttcagtgtaatgatgaaaaccataaaggtaaagtgaacaaatcttgtgcaactatgatcaaataatgtgccatccgttatacaagcatatctagacctatttgttttgggaatacagtttactgaccatgagattctacgtttggacctatggtntttacgttgaagtaagcatgtagctgtgtcaatatatgctgagaagaccttcactggatctttcccgatttcccatattattatttggtggggaattcttgaatgcattatgtcaatatcctgcccaaaaataaataatatttctgttattatgctcggcggcgagggaattcctattcaatgtatgaaatatgaaatttttccactgtcgcggatagtctttatggtttaacttt

SEQ ID NO: 104474 - DNA, 212 bp, Glycine max
tacacatggctcaagaggaggagacttccacagaccaaatcctagagccatccccaacacccataactaatgatgccataccatctgcaccagcatctgagttagagcagcctatctctcaggattcaccagttgctcaagtgttggatcttaatgagcatgcacaggagcaaccacaggagcaggacatttaaatttgtgcattttgaaca

SEQ ID NO: 104475 - DNA, 398 bp, Glycine max
atccttgagtcacctgcggcatgcagcttaggctgttaatggcttagattgtttatttattggcaaaggttcgtgtggtggtcggcagaggagcataaaccacagagtctggcgacaagtacagatattttattcatggccagttgggttaccaggttaaccaaggcatctagtttaccttcaagcttcttagtctcggctgatgaagatgaattcgtggctacttgatgcactcctctaatgacaatagcatcacttctggcactaaattgttgggagtttgaagccatcttctcaattaaatttatggcttcagcaggggtcatgtctccaagggctccaccactggtagcatctatcatactttccatggtactgagtccttcataaaaatattg

SEQ ID NO: 104476 - DNA, 128 bp, Glycine max
gactcgtgagatgaacatgtgaactgtcacccaaaggtagagcctttctgacacacacctctttactgggatctttctgacctctttgtagaaatcacgagtgcgtatgctatcttaaatttaaccca

SEQ ID NO: 104477 - DNA, 319 bp, Glycine max
  unsure (1)..(319): unsure at all n locations
cttaagcaccgcggctgcaagctgttgagccacatagcatcctgagattgatctcaagaagaatnntatttgtaggcctgtaggcttgatcacggagaatggcatgatcactggccgccatattctttatcagctccatagcttcttctggagtctttaacttgatcttcccaccgactgaggcatcaaggagttgcttggaatggggttgcaagccatcaatgaagatgctaagttggattggctcgctaaacccatgtgtaggagtcttcctgagtaacccatggaagcgatcaagggcttcactcaatgattcatg

SEQ ID NO: 104478 - DNA, 423 bp, Glycine max
  unsure (1)..(423): unsure at all n locations
aatgctacccttaaaacaaaaatggcatacaaccccctccaataaatacaaacatcaatgtaaatttagagcaagcttatgcgcatacttcttcacgaacgttcacttgcacaagacattcttataactaagaaaaatgcacccatatacaatcaaggcaccttcgttacctagattatttacatgtacttccaaggtgtatttgttacctacatcacacacatttcctttgctaaattcacatacatgcatactctaagcactttggctatcaaaaattgcatacgtgcacatcttggtatttctaatacctatacatacacaaacttcatgatgaatcttgactatctacacaataaggtgctacatttcatgctttntttttttcaagtgtttttactacctaaagccgcatgcaaattc

SEQ ID NO: 104479 - DNA, 430 bp, Glycine max
  unsure (1)..(430): unsure at all n locations
ctaagcctttacatgtttagagatttctagagagagaaaggtcctttttccatatatatatgagagctcttgctgtgcgaagactggcagagaactgagcttgaagaggaagccatcctgagagcatgagatgagtctgtgagtgattgtgaggttctagaggtggaggagacatccccattacttgtatttcttcaatccttcattnttctcttctctttgttgtaaaggaagcttcccagatatggagagctaaatcctctgttggttcttccttgtaggtacatgatgtaaatacctttatatttatttaatgatattttatgtgttctctatgctatcagtacgtcattttcgtatgcttntgcattgatcacgtagatacatgctctgttangatcattcaatagtgggaattggtctgattctt

SEQ ID NO: 104480 - DNA, 248 bp, Glycine max
aaaacataaatcagatacagcagattactaatgaagattgcaatgcttcatgaatgctaaattaagatttgtgcatgcataaaaaaattgcaaactcaggtataccgagtttaataatctcatatttgcagtaatcttcgcatttccatctttaataacgacatccatttttgacaaattagccaaagttgaaggagagattctgcaaggatataaagaacataagagcattgttactcaccaatgag

SEQ ID NO: 104481 - DNA, 344 bp, Glycine max
  unsure (1)..(344): unsure at all n locations
atacctacgacatggtttatatgctttgcagncaaactcagtgatgaacaggcttcccaaatttctagtatgctatgaagtttccggctgctattttctattttctttttctcactatatagttttacctcagaacttgtttaataatggtcttttgtttttgacttgggtgcccaaatttaaccaaaaatgccaggagtgggttttgttttctccaattctaaaagaaagttgcacacaactcactcatgggagttcatgggacttctggatgaccaaccatggagactcttggttacttcatcagataccaagaaaacatcatctatggtttcattgatact

SEQ ID NO: 104482 - DNA, 311 bp, Glycine max
  unsure (1)..(311): unsure at all n locations
tactcagcttcttggctcctgttttcctttgctgtttaggaattgtattcatactactttattcattattctaagagaaacaaaatggatccaaaaaagggcttaaatttggtttatatgcactccaatcatcaactnttgtcaagaaaggattaaacgtataaaaaagaggagacaagattgtgggacattagtggagatgtgtaatatcccagatttatggactctagaaatattaataaaagataccttttaaggattagctctaataattaatggttaaaggatacccttaagcattattaataata

SEQ ID NO: 104483 - DNA, 387 bp, Glycine max
  unsure (1)..(387): unsure at all n locations
atcatttattgggaggggtgttttcacgtctttctaaattcaaaatccaagtattatttgatacaagttactctaaccttcactctgctttatagaaagagagaagagaagccactatcacttacagtaatataagacaatatgagataatttctttaagtctttctactaaaaatatgtaatacatgcgtttcaaaagaagagcaaattagactcacatctcttaagctaatgtctaattatatgtgacacaactctttntcttattcttgcactaaccgcccttaatcttcaaaaacattatactaacaccctcttatatattatactagagaaatgtngatcatcccacttcatcttggtacaaaatcttcctactacctttta

SEQ ID NO: 104484 - DNA, 248 bp, Glycine max
gttaaacaacatatatgagttaccttcttaatatcaagaaaaataaatgcatagaaagcatgcgagatgcattctgtgtacattacttagtccttacgttgttactgaggaatgtgctacgctataccttcgacatgagcacgtcaatgcgcatgtacatcattctctggattatcatcatcaatcgaatgcatttgttggcagacaaggtgcgtgttgcttacatctgttgctgaccatcactatgc

SEQ ID NO: 104485 - DNA, 295 bp, Glycine max
cgattacaatatattgggaatcgagtaccagtgtatctgaacgttgaaattctaattcaattgtgaagagtcacatcttctcataaaatgctgtgtgtaatcgattacatgggtttggtaatcaattaccagtgacaagttttgaatacaaatcaaaagatgtgactcttgcaatggttttcaagttgttctcaaagttataattcttccaatggttttcttgaccagacataaagagtctataaaagcaagaccttgacttgcatttcaataactctgataattacttgatatc

SEQ ID NO: 104486 - DNA, 332 bp, Glycine max
attgaataccctatgatgtccctatatatatataaaccagtccaccaattccatttctcagaatctcattcttacttcattgtggcacttcatcgatcacttggtgggcacatgtttatacattaattgtatgagaatgagggctatgtggcatgtcctattggtttataatacaccataagcctaatgtcttcttacacaattcttaatttccaaatcatgcataaaagcacccaaaacttctctcaagcatgagcatgttcttatatttagagatcaaaatgaacaaattgcctcaacgaagcaaaaactcaggattgatacttattgtt

SEQ ID NO: 104487 - DNA, 248 bp, Glycine max
  unsure (1)..(248): unsure at all n locations
tagagtttcaagagtcaagattcaagaacactcaagatcacgattcaagaatcaagagaagacttaatcatgataagtactagatttttttttcaaaacattgagtagcacaagaattattcacagaatcttttaccaaagagttntactctctggtaatcgactaccaaaaggtagtaatcgattaccagtagccggcattgttttcaaaactgaggtacaaagccataattgattaccataatcat

SEQ ID NO: 104488 - DNA, 482 bp, Glycine max
  unsure (1)..(482): unsure at all n locations
gctgtagaatggccagacatgatacatgtatttggttggtttggttcaagggtaaaagggatgccccacattatttccatgacacaaatgcaaaaatgatgatttggaaactctatgcanaactggtcatgcatgcacctatgtggacactcaagtgtcaaatttttatgctcatgtgatgctagggctcaggattcattccctctattttagtcaacccaatgtttccaaaatatgttcttttatccatttgtgcattcatccgagtccattttgggcgttcggggagatttcactgcgttcacccttcgggtgacacacatttttttcaaaaccagctatgatcgcgaatttccaagaagagttggtatcatctctttcaaaacatgtggtgttcactaacaactaatttggttcttttcctcttttttctactgcctctgtccctactgcccctctttttattgtcctttcatttttat

SEQ ID NO: 104489 - DNA, 285 bp, Glycine max
  unsure (1)..(285): unsure at all n locations
gctccggagtatgatagtcaccgctttatgagcgcggtacaccagcagcgcttcgaagccatcaaggggtggtcgtttctccgggagcgacgcgtccagctcanggacgacgagtatactgatttccaggaggaaatagggcgccggcggtgggcaccactggttactcccatggccaagtttgatccagaaatagtccttgagttttatgccaatgcttggccaacagaggagggcgtgcgtgacatgagatcctgggttaggggtcagtggatcccgttcgat

SEQ ID NO: 104490 - DNA, 376 bp, Glycine max
  unsure (1)..(376): unsure at all n locations
tataacaaactaatttatcttttaataatatacttcaagaataatctttattccaacctaacaaaataacttacaaaagatgtgtgatactacagaaattntgaaaaccacctaacaaaataacttaaaaaaatatgtgatcttccaaaaccacctaacaaaataacttacaaaataaaattgatattccagaaattatcaaacccacgaaagcaacaacgaaagcaagtgcagcagccataacagctganaaaaatggtgaaggagggctgtatttaaagatcctaaaacgccaaccccatttgcgccattttctaccctaaaacgctaacatgatttgcacttncagaccctataacgccacactgaaagctgt

SEQ ID NO: 104491 - DNA, 240 bp, Glycine max
  unsure (1)..(240): unsure at all n locations
agacgacaaaacaganaacagtaggcgttcaagttatctactctctcctatggttcccaattccaaattcaaacctattatgtcctccactaatattttctctctgaacaaccaactcaaattccctatccccactactaatgccaacttgaattaagcaatttcattttcctagacttggacaagtgcattatccctcctacttttccttgcatacctcttattgatctcgggcttggg

SEQ ID NO: 104492 - DNA, 299 bp, Glycine max
catgagaccatggggacgtcacgtggcgtgctattgcccaaaaccaagcttgaccaatcccgacccaacccgggcatagtcggtcagagagaacctgtgatgtacctaaacaggcgagctcctggcagtcaacagatgaaaggaacatagaccacatagcacggaggcttgtggtggctggccagctatgaacttgattgatgtgtgagatatggcctctggtaatcgattaccaagggtgggtaatcgattacaaggcttacaaatgaagacaggaggctaagatggtctcttgtaat

SEQ ID NO: 104493 - DNA, 415 bp, Glycine max
aagtcaccgcggctgcagctgactctgtagaactgtatgtaatcttaatcaatgcacatttcaccaatgacaaaagcaattcacatgtggcgaatattgcaactgcgtataatgacattaaaccaatgtataccttattttagaaatagacatggttggtaagtttggattcaatattatgtggctgactatagccacccattcaatatacatttcacctgtttcattataacgaccatcaacacttatatatttacatatgtatggttgatcattaagcgagaatgacattcaacactaatattaaggccttccatgactcaatgcaccacatacctgcagtctgttatgttgaatgccaaaaaagaagagcataacattgcatctgcactaagttatattacttggcatttca

SEQ ID NO: 104494 - DNA, 329 bp, Glycine max
  unsure (1)..(329): unsure at all n locations
catatctatgaaagttcgaaccaaaccaagattnttatatataattccccatgataaacaagtttgtgttcatggctaatgtatagagaaagtgaaacagtcatagatagaggaataccttatagcttccagacaattctttctttaactctgcaagatcatcaatcgacaaaagagttctctagcagtgcaaactgtaaatgacagagtaagaaattccttacaacaatgaaatcaactttgcttaatagattaatttccaactaataaaaaaatggtaataaattaatgcatatgctggattaattaaatatgcatctagctagcta

SEQ ID NO: 104495 - DNA, 352 bp, Glycine max
  unsure (1)..(352): unsure at all n locations
agagggagagaagttaaactttgaagcttncttgagaagcttccttgagaagttacacatgtntctatttatagcctaggtcactaactaaatgaaagcttccttgagaagcttccttgagaaacttccttgagaagctntctggagaagcttccatgagaagcaatagcttaactacacacacccctctaatagctaagctcacctccttgaaaagcttccttgagaaacttccttgacagggttccttgagaagctaaagcttagctacatacacccctctaatagcgaagcttacccncatgccaaattacatgaanacacaanaaagtccctactacanagactactc

SEQ ID NO: 104496 - DNA, 265 bp, Glycine max
  unsure (1)..(265): unsure at all n locations
ctaaaaactaagctcgagcattaataatatgctcagctggttgggagcttatattataagccacnnagatctccggaagagtagtcttgacaggtttacaaaaggctgtttttaagtgtattctgacaagcctaagtaggagcaggttccctagtctgaacctgtcttttcttctttcttattggactctgtcggcgacatataaaaatatatacaatgtgtggctgagtaaagtaactacacacttctgtaacgtaatgtgtat

SEQ ID NO: 104497 - DNA, 428 bp, Glycine max
  unsure (1)..(428): unsure at all n locations
aaactaagcttgagtgtattgagatggatgcccaactgggncatatcatgttcttgagaangatgtgttaatggctgtgctttgttctcatccacagttgtatgctatgcctacaatggatcaggttgttaaaatgatggagactgatgaatcagtgccttcaatacctgaaaggccaattcctcttgttgctgggaggcttgatattgagagatctgtgagtagtagtggctctggtcagctctctagtccaacgggttatcaatcatatactatagaaagtgatcgtcaatcttctaattctagggatgaaagaagctcaagctctagctctangatgttgagtacagattgagatattgggtgtgtggataattctgtttgacatgtagaatatagaatacatgttctttttctttaagtgtttc

SEQ ID NO: 104498 - DNA, 419 bp, Glycine max
ttacaacttctatcacaacccagtccttggataatatgcgtggcccttgcaccactagagtgggtctccatataaaatattatagaggatggacacttccttttgattcttatattaaagaagctaaaactctagggacatactgagatattgcaagactaaaattcatggaagcatagcaacatggatggccataacatggacttggcaccctcttggaaacaacatatatcattctcatatttgagacatgcataactacgacaacctataatgtgcgccaaacaaaatgctgggcacgtggacaactgctttgctttacgctaagatgttttataagcttaaatttaagctttagccctataaaatcatcctgtggggttaaaggtctgaccactactaaacccgtttcttttaag

SEQ ID NO: 104499 - DNA, 348 bp, Glycine max
  unsure (1)..(348): unsure at all n locations
cccaatgcttaggcattcactntaagactacacagtgtaacatgatagacacaaaacagaaaagatatttatggaactataagggcataaaagagttaccttattgcaagttgaagaaaaaacaagaacaactttatcaatgtattccaaagattttgagaagttgcccgaatcatataaggactgagttgtttccaacgcactttgagcctgcagtagttgagagagcttattttctgtagctgaatctccaggttctaactccagagaagatgtacatgcgcacaattaactcgagcaattacaaactgtatcataatcactagtcaaattatacagatagtgttc

SEQ ID NO: 104500 - DNA, 467 bp, Glycine max
  unsure (1)..(467): unsure at all n locations
gcgatctctgagtcacctgcggcatgcaagcttatcgaggacgggcctnggattctgtgaacctgtgaggatcaccaagtgcagagcttgggtntgacgagtcttgtgtgcagtgcatgtgatgtactctntcatacatggcactcgccatgagtggctgataacgacaatcaaatcgttcaaaaacaaatttactatggaattctgtggcacaagattaacctagatcaaactcagaaatatgattcaatatgggtcctacattcattcacatataaatagaaagggggatttttgtcaacaaattgtgagaaactctataagattgtgacaacacaaaaacatatttgatgaacaaaacataacangaacaagatacaattcatgattataagcgtcattcaattcacaaaccaatgcattagattatcatagcactacaaatgatgttcatgtgaaagtcagtc

SEQ ID NO: 104501 - DNA, 410 bp, Glycine max
  unsure (1)..(410): unsure at all n locations
cagcttctaaggaggtgagcttagttattagaggtgtgtntgtttctaatctctagcttctcaaggaagttgtctcaaagaagcttctcaaggaagttttctcaagaaagctttggaccttgtgattgagggccatgcattgtttgaacgaatgccccagtgttcccccatgatacgcgcaggtcgcgttggggttgtaccactttgggaagggggactgataaatccttccaggggttaccactgccaattggttggcaatcagtgatggcaaaaggtctccatatgtcatcgggattggggcaaactctggaagcttcttcatcggagggtttcttcccacattggaattcatgccangatgggcattgtcagcgggacgaggttatgccagagccaaagtctgagca

SEQ ID NO: 104502 - DNA, 309 bp, Glycine max
  unsure (1)..(309): unsure at all n locations
gctggtcgaggacttaccggttgttatcttttaacgatgaagaacgaatgaagaacgtcgaagaacgggtgaaacctttgcgaaattcctcacggaaaacgttacggaaacgtttcggaagcgcctcggcttanattatcttcacggaaacaatttttccaagcaaattctaaagagagaaaagtgcctcaggggctgaaccccttccttcttgctttcctcccctatntatagcacaataggggaggtggttgccgcccagctcgcccaggcgagctcagctcgcccaggcgagcagggttgctttct

SEQ ID NO: 104503 - DNA, 274 bp, Glycine max
  unsure (1)..(274): unsure at all n locations
actaagcttctcgggccatttctgcgaagcatacattgttattttatttaccaagaaagcactctaacacnaaatggcatacaaccttctccaataaaccaaacataatgtaaactagagcaaactctgcacatacttcttacaacattactccacaagatattttctactaaaaaaatgcacccaccacaatcaagcccttcgttcctaatacttatatgtacttcaagggttttgctcctacacaatgctttccttgtaaattaatactgct

SEQ ID NO: 104504 - DNA, 335 bp, Glycine max
  unsure (1)..(335): unsure at all n locations
cttaatgccattaacctatggatattaaaaaaacttaatggctgagtgttactgtaattgtgtgaaccaaaagtcacctccaacagccaacaatgtagccaccatttggtcttccaaataactgatgcctatgttgccaattgngcccttattacaacttgaactaaacctaactagagcccttttagttgattaacccaaaacatatttgtggtcagccaactttacaatgattgggccattatttaaacaaacttaacacttctaaattgagacaaagtggtgtcatttagtcctcctcctattgggcatgatacaactacaaccttgacttt

SEQ ID NO: 104505 - DNA, 246 bp, Glycine max
gattatagatgccccaatcccagaaaagtgttgaattaacatctttgttcctaattggatgtttttacattctttaccgcttattttgtataaaatggttaactagaagacaattttttgggcactaaccagcctctccaaataatttcagatatgttccattaataagcttatatacaagtacttgtgttattacctaatttattaccgactctagtcaaaggatgttattgtcataaacttact

SEQ ID NO: 104506 - DNA, 322 bp, Glycine max
  unsure (1)..(322): unsure at all n locations
tggtgtaatcgattacaatatattggtaatcgattaccagtgtatctgaatgttgaaattcaaattcaattgagaaaagtcacatcttttcataaaaagcattgtgtaatcgattaccacatgacaagtttgaacaaaaggtcaagagatgtaactcttgacatgattttctcaaggttataactctttcaatggttttcttgaccaacacgaagagtctatcaaagcaagaccttgactntgcattcaattttctttttgaacaacttcttgaacaacttttgagaaacctttaaacctttacaattctttcctactcatc

SEQ ID NO: 104507 - DNA, 288 bp, Glycine max
  unsure (1)..(288): unsure at all n locations
ngctgcaacccgtngaaaatgcacattaactggggtgtgtgactcattatacaaatggcacaagngagaagactntaaagtagtgttgtcataactattttcagttattataactgaattggttttggcaccaaagcataactagagtgtacatatatattcttgatcatgtaatgcagtggtgcggtttctgagagtggctgaaaaacagagaagctgaaaaactgcataaaaacagagagnttcatagagaaaaagagctatgagattgagagaggttttgttaaa

SEQ ID NO: 104508 - DNA, 362 bp, Glycine max
  unsure (1)..(362): unsure at all n locations
gtcacctgcggcatgcaagctntcaattcattctatacacccttaggggttcattctcgctntgtacatnntcatcttcatctcgtctactttttggtattcttttcttcattttaaatgagtttcgaccgatcgtttaagcccgaacttcacttaatcaatgtgaaaatgaatntcaaccaattgtttgcgttgtaatctcatataataacatttaaaataaaattcaaccgatcgtatatgttgtaacctccggtaatcatcaaaagggaaagttntaaccaaatatttactttgnaagttctctttaattgagttaagaaataaccaagtgagactaatgctaaaatcaactcacaaat

SEQ ID NO: 104509 - DNA, 221 bp, Glycine max
atcgctcttttattttctttttgctcatcctagtgggcttctttggtcacatctggatgtccaccttgagacagcttcagtctgcttcatgattgagaagcaccatcttgcttctatcaagtggtcgccagatggggctgtactggcctcttctttcatgtcataaattattcctaatctaccatgattcaggccgcttgaaccatgaatttgtacgggac

SEQ ID NO: 104510 - DNA, 329 bp, Glycine max
  unsure (1)..(329): unsure at all n locations
ttaacaaagactgagcttaacctggtaataaaataagtcagttcagaccaaactntatgtaggccagatcgtagaatcctgatgccgatctgacctattaccacccctatattgtgagcatcanaagctacaaattccaaccgacctttaaatatcacttgtgtagtcaccgtcgtggttattaacattatggccacatacagataaatactattaatgtgctcccataattggtgtcatggtactattgagaataattaacacatcttgatgtttaggttaaanataacacgctccgacaatatcataatacgcttgctaccacatat

SEQ ID NO: 104511 - DNA, 482 bp, Glycine max
  unsure (1)..(482): unsure at all n locations
agcttggatgcctnntaaattttaaggctgaagtcgagaatttatgtgttatttcttattaagatgtgagatctgatcgaggtggagagtactatggtagatacacggagaatggacaagcgcctggtttgttngcgaagtttcttcatgaacatgggattgctgcccaatacactatatctggttctccggatcagaatggtgtggtagaaagaagaaaccacactttaatggacatggtaagaagtatgagaagtaatagaaaacttccttaattcttgtggattgaagcattaaagacgactgtgtatatattaaactgagttccaactaaggttgtcttanagacacctttcgagttattcaaaggttggaaactgagtttgcgacatatacacgcttggngatgcccatctgaagtaacccacaagagaagaaactatacccacggactattagtggatatttcattggatatgcta

SEQ ID NO: 104512 - DNA, 214 bp, Glycine max
aactaagctgaacgtgtatgcgacgcgaacacggattatgctttctcagagcccgcgatgctcgggggacaagaacttgacaccggagtaccccaaagggccgcaaatgccatgaccaatgccacccctccggtcatggagcacacagaacactgatgcccacagtagcaactacagcagccatctgttgccgtcccaaaccccagaactatgg

SEQ ID NO: 104513 - DNA, 255 bp, Glycine max
atgaacacacttacttcctccaatttaagctcatctaaacatgcattgaaccctatgtcccgcatgtctttagatgtctacacattaagccaggaagtacttgaatgtgcctccaccttatatactgacaggacatatactggaatagctttgccttatgtctcttcatgtggatcgagagattcacgcttcttttgtcgttgatgggactctgccgcttgtctcactttctgttatatagacggacttgtatcc

SEQ ID NO: 104514 - DNA, 320 bp, Glycine max
agctttacacaagttgatttaatgaatactcgcccaatcgagacattcttgcctaggtgactagataactccaggattgaaaaagcttgggccacccaagctattgattcttgcctcagcgaatcttggatagagagtacattcgtccaagcgggtcattcttgcctaagcaagaaagcccactgggtgaatccttgttttcacatatttcattcgccaaagtgactctggtctcgcctggacaaagaaacaaggcattttataactccaagtacttaggtatcaactcctcatggctccaagattgctctccacttttt

SEQ ID NO: 104515 - DNA, 262 bp, Glycine max
agaaagctgacacattagccaacgcttgccgggcacgggcctatatataccatgagtaatgcgatgcaaactgcgccatttaagaagtgtatcacactataaagtactaaccaacatacaatgtcaagatggaaagaacataattgtattcaatgcagatagtctaactgcaaacattatgctgattttgcttgtactgacaaaacagtatggttgttttgcatattgaagggggaacacaagtagttatgaagacaaaaag

SEQ ID NO: 104516 - DNA, 358 bp, Glycine max
gacctactgatacagttatatatttctgacttcatgacatgagatgaaatgcacagattggacctcctgttagttggtatcattaagttcgcttaacacttgtgcttaagtgagacagtagtcatgagactgtggtttgagctacttttcttgaatttgtcttatgattaacctcatctaattggattgttcacattatggtctcctttttggctagctgcatattctgtgaaaacaagggataggtacactattgtttatctttctcatcatgcaatcaatgatttttgatgcttacacccctgtcgcatcctactcttcggcgggaggctactctagactcgcgggatgcgggttc

SEQ ID NO: 104517 - DNA, 428 bp, Glycine max
  unsure (1)..(428): unsure at all n locations
gcttctttggacctgaacctctttagaacttgctgtgtgcttcgnactggccctttcttcccttcgcagcttgagatcactattgctaccccatagagctccgcgaaagttgctgcggccatactcttccttgcgagccctctaggtctcttgttcaagggctcttgcggtaattgcattctcttcccgtaacccggcacactccttacgaacgtgtgtagcggccaacttgaacttctccttggcaagatatgcctttcctaactcgcttttgagagattggacttcttcagcctcttccggtgcttcagaactctcttcgctgacgacttttaacttggcgagccaatctaaacctcgtatatgaactctcatccattcgtggtcccaccaatgatgccattacgaatgcctctaagctcttgatc

SEQ ID NO: 104518 - DNA, 364 bp, Glycine max
  unsure (1)..(364): unsure at all n locations
gctttgcggatntggtcttcgctggctataatttctatatgggtctaaaaagaggcaaatctgatcatcatgctatgataaatgccaaacaatcgtggcaaatgaagagggtgagaatgagggagaaacccatgctgtgactgccattcctatatagccaagtntcccaccaacccaacaatgtcattactcagccaataacaaaccttctccttacccaccacccagttatccacaaaggccatccctaaatcaaccacatagcctgtctaccgcacttctaatgacgaacaccacctttagcacanaccaacacactcaccaagaaatgaaatttgtcagcgaaaagcctgtagaattcacc

SEQ ID NO: 104519 - DNA, 201 bp, Glycine max
  unsure (1)..(201): unsure at all n locations
gctacaactggcaacgnattattttttgatataccaaacccgacgaccctttggaaggtgactaccatatactaatggggtgaggtatctaggagacacatcaacaaataagaatataaattattagacatgggcgtctttcagcatctcattatcttaaagacaaagtatttgtgtgacatctcattttgttgcatcata

SEQ ID NO: 104520 - DNA, 355 bp, Glycine max
  unsure (1)..(355): unsure at all n locations
actaagctgatgtaaatacatctatatgcttttccggtttatatttggaganncgggtacgcgattgtgagtgacatccttgaccacagtgagttcgattgggatgtgcactaacacatgatcgcaactgagaatgaaaatgcttggcatgagcattgcattgtaagaattctatacatatatggctattcgctattcaaagcagataggatacgactgtttctattttttttctttttctagtcgcataaatcgactaaaccgtttcgactcaaggtgcttcaaaaactggatgatatattgggtttgtgtgctatagatagagccactggatctggagctgaaactgctacta

SEQ ID NO: 104521 - DNA, 173 bp, Glycine max
  unsure (1)..(173): unsure at all n locations
acctgangctgcaagcttcatctatagagagctatattcttattttgttctttctacggcgaactcgtatgaataaactcttatatcaatctaatgatgctgcctgtgtcctctatgctatctacaacttcattataataagcttttcgctatatcacgaaaatgcatgctca

SEQ ID NO: 104522 - DNA, 170 bp, Glycine max
ttgatcatcctactatgacgactgagaaaactggcgcaaatgaagagggtgagatagagggagaaacccatgctgtgactgccattcctatacggccaagtttcccaccaaacccaacaatgtcattactcaatcaataacaaacctgctccttactcaccacccagtta

SEQ ID NO: 104523 - DNA, 224 bp, Glycine max
  unsure (1)..(224): unsure at all n locations
cctcggttatgtgctacatgacaccagactctcatacacttatctgtcatagtagctatcagccccccctacccacatgtattcgaaccaatgtacgagactatataccaatttnctagccggaatgcgaagatacattgctccttattggcggctcgtataggtaacctattcacgtcgaccactaacacgactactctacttatacaaaatcatctttctta

SEQ ID NO: 104524 - DNA, 342 bp, Glycine max
  unsure (1)..(342): unsure at all n locations
gcttgtctcagcgtntatgcgagacggagactcacttgctttctatcatcgccaagtaccaagaagagttaggtctagccgcggcccacgagcataggattgcggacgaatatgcccaagtatacgcggaaaaagaggctagaggaagggtgatcgactctttacaccaagaggcaaccatgtggatggatcnggttgctcttaccttgaacgggagtcaagaacttccccgattgtatccaaagccaaggcaatggctgacacctacttcacccccgaagagattcatgggcttctcggctattgtcagcatatgatagacttaatggcccacataattag

SEQ ID NO: 104525 - DNA, 281 bp, Glycine max
actaagctcgtgtggtagcttgtgcttagatctaccctttttccgttatggtcttttgttattgatcaaaaatgacttctgctggacctactttctctttgtctggaactccgactatcacaactgcgaaactaaactggaagaactatttgtcatggtctgcttcagttgagttgtggttccttggccaaggataccatgatcatttggaaaagggtattgatactgttccaagtgacaaaaaatacgagtgggagacgctggcatatcaactatgtgct

SEQ ID NO: 104526 - DNA, 298 bp, Glycine max
  unsure (1)..(298): unsure at all n locations
tgccttgattaatatcttattaatgttataaatgaccatttccagaagcactggctttcaacctctgaaggttattaatagagttagagtttgtgggttctactgtatgtgtagtgcttattgggccataagcccactnttgcttttggtctgtatctattagcaaatcaatgaaaaccaaatagaaatagataattgaccattaaccattaccaccaataactgacagtagaaacattcaaattaatctgaaaagttggcgatattaccagtctggccaaaacaattagcaatgagc

SEQ ID NO: 104527 - DNA, 247 bp, Glycine max
  unsure (1)..(247): unsure at all n locations
atgcgggtgcccgggacattgtctccttcttagacacaacgtctaggggagcaaagtgccccaacgtatgtatttaatacggtgactcggaccctccattgatttgtctattgaggggatccagacagaacccatatgcgatgcatatgcaaaaggcgtgatgcgggaatgtacatagnatgacgatattnactgaacataagcaaaaggtatatgatacttatgctgggagtgngaaaaatggcac

SEQ ID NO: 104528 - DNA, 480 bp, Glycine max
  unsure (1)..(480): unsure at all n locations
tgcagctctccctatttgctataataggggatatgttnttaaganaagggttcagccccttaggcacttctctctctcttganattgctgagggaaattatttccgtgaagaaaatctcagcccgggcgcttccgtanacgtttcatgagtaattacgtgaagattctcgaccgttcttcaagattcatcgttcgttctttcgtttcttcagtcttcaacgggtaagtacctcagaccaagcttttcaattcattctgtacccgtggtggtccacattttggttcatgtattnttattcccggtttcatttgctttntatacccncttttgacgtgcttatgccatttatttaagtcatttctcgcttaattctaaaataaataaatttcaccgacatttgatttgttcatcgttatattggtaaatgatttcgacgtcggcgtgcctaccactttgatataaaaaggagttataatatt

SEQ ID NO: 104529 - DNA, 407 bp, Glycine max
actaagctgaggtaacaaatgccttggtaacctagaacccttctggccttttatataaatctgcaccagccgccagactctgtggtttatgctcctctgccgaccaccacatagacctttgcccttctgtgcaacaatctgaagcaattgaacagcctgaaacttatgctgcaaacatatacaacatacctcctcaacctcagcagcagaatcagccacaacagaataactatgacctctccagcaacaggtacaatctcggatggaggaatcatcccaaccttagatggtcgaatccttcacagcagcagcaacaacaacaaccttatgttcaaaatgctgatggcccaagcagaccatacgtgcctcctccaatccagcagcaacagccccagaaacaataaaca

SEQ ID NO: 104530 - DNA, 418 bp, Glycine max
  unsure (1)..(418): unsure at all n locations
ctgcagcttctcctatntgcttaacaggggatttgtgaagaaganaagggttcagccccttaggcacttctctctctctncaaattgctgaggaaaattatttccgtgaagaaaatccaagccgaggcgctttcgtaacggttccgtgagtaattacgcgaagattctcgaccgtttttcaagattcatcgntcgttcttcgttttcttcagtcttcgacgggtaagtacctcaaaccaagcttttcaattcattctatgtacccgtggtggtccacattttgtttcatgtattttcgttctcgttttcatttactttttatacctncttttgacgtgcttaagccatttatttaagtcatttctcgcttaatctaanaatcaaataatttccaccaatccgttgaattggatcatcc

SEQ ID NO: 104531 - DNA, 458 bp, Glycine max
  unsure (1)..(458): unsure at all n locations
ctaagcttctttggaccttgacaggcactaactcctctctcgtactatgcttatgtgctcgcgactggcctttgtcttccttcgcaacttgagttcattattgctacacccataggttccgcgaaatttgttccggccatactctttcttgcgagccctcttggtctctcggtcaaaggctcttgctgtattgcattctcttaccgtaacccggcacactccttccgaacgtgtgtagcagccaacttgaacttctccttggcgagttttgcctttcctaactcgcttttgagagcttggacttcctcgtcctcttccggtgcttcanaattctcttcgctgacgacttttaacttggcgagccaatctaaacctcgtatgcgaaactttcagcccatcgtggtacccaccaatgatgccattacgaatgcctctaagctcttgatctttccttagcg

SEQ ID NO: 104532 - DNA, 230 bp, Glycine max
ggactagttccgcccctgagtatgacagtcaccgctttatgagcgttgtacaccagcagcgtttcgaggccatcaatggatggtcgtttctccgggagcgacacgttcagctcatggacgacgagtatactgatttccacgaggagatagggcgccggcggtggacatctctatgtaccctcatggccaagattgatccacaaatagtccttgagttttatgccatgctt

SEQ ID NO: 104533 - DNA, 397 bp, Glycine max
  unsure (1)..(397): unsure at all n locations
aactaagcttgatgggtgagaaaaatacatgcttgcatcatatttaggtttataatgngaaacgacgcatacatgatattgatgatgtcaaagaagaatctaacaccgctgcttcaaatgataagcatttgcttcatgaataattcaagattgcttcgaaagattgatttgaaatacaaaacaaagccttgcttttatagactcttcatgtcttgtcaagagaaccaatttgaagagttataactcttaataaaacttaaaaccgatgtgaacaagtcaaaaatcatttgaagagttacatcttttgatttattcatagacaaccactggtaatcgattaccaaatcagtgtaatcgattacacaaagcttttagtgaaaggatgtgactcttcaca

SEQ ID NO: 104534 - DNA, 353 bp, Glycine max
  unsure (1)..(353): unsure at all n locations
gctntaaagccacttaatgttaagaatgatgttgtgtgtttagtaatagagtttatgtgccactagatacaactaatcaacttggtggtatgtaaagtttagtcaagaattatttctgtcaagaatcgaacttgggaactactcaaaccatttaatcttaactttaacacattaatcacttgtactcaatcacttggttattagaaacttaagatacgaatcaaagaagtggtctcaagaaccaagagaggttctctcacacaaagtttataattctttcaataaaatgagtcttagtcttctcacaagtaaagatagactattttataccatgatctaaaaactcttaaaag

SEQ ID NO: 104535 - DNA, 277 bp, Glycine max
  unsure (1)..(277): unsure at all n locations
gctatatgttccattgtaatatttgtgtgttgccctatttatatacaaancaaaaggagcctaattgtcttattcttgctggtttctaaactttatttaggtttgtggttgcactcaaagaggaattctataagctatacttgccgactttgggtgacatcaaggaaagggtgagatttaagctaggattgcctattcagagcattatttcacttttttatgcatttaacgtnacatttactttacaaagggtttggcatacaacaatggacacaac

SEQ ID NO: 104536 - DNA, 353 bp, Glycine max
gtcacctgcggcatgcagcttctgggggacatcttgacttgctttcttatctgtctttcaccacagattctgccttcttctagttttagattggggatgcctctaacagcacctctgacaatgatgttcttcatgcctcttaagtgcagatgggcaaatctttgaagccatattctgacttcatcttctctggaggattgacatgtggaggagtagcttggttcttggggtgttcataggtaacaattggcctttgatctgctgccctccattagaacttcactcttctcatttgtcaccaagcattctgactgtgtgaaatttacattgaatccttcatcaccaggtgactg

SEQ ID NO: 104537 - DNA, 313 bp, Glycine max
  unsure (1)..(313): unsure at all n locations
agcttctatagtctaatgactttaagctttgatatcttttgtaacctcgatttaccatagaattcagacttaaccttccaactctcaaagcctcactctntttccactcataacaccacattctcactgtccaaccctaggttaactctacctttcatttctaacagttttccatgagcaatttcagcatataaacatcacagatatcatcaaaaaaaccctaaaacagaatgggtatgtttaactcatccaaacatggcaatttcaacaagctttcaacaagagtcttcacaaaatccatcatgaagcagaa

SEQ ID NO: 104538 - DNA, 470 bp, Glycine max
  unsure (1)..(470): unsure at all n locations
gcttctagagaanactacatgcagctgcctcgttaatacgttgtctcaccttcgntaaccggtggatattctcgaaatttggtttgcaacttcacaagacacttgtccatgatatgacctttgngatctttgataagatgtctggagtctgctagaagcttccgttcccgagagcatctcttatttaagcatttcagcctttgctttcgtgtagcttagagaaaatgtcatttcttcttctttctttcttccaaagccatttctaaagttgcaagatatttatccatcacccacaaccaccattagccaccacaaccatcattgttctccattgaaaacccacaccgagaggaacccttcaaccaaagcggaatccccaacttgactctgcggttcagtagagaatgaaaaccctaatctgacctttcattttctttcgaggcaaccatggttctatgcttgcttcttgt

SEQ ID NO: 104539 - DNA, 351 bp, Glycine max
atatgttgtaaaacttcatgaggggattcatactctaaatgaaacattatcccaatcttgttggagggtctaaatgcctcgagaatatattaggtacaatagaagtcctatggacaaatatggtacgaggtacataagcgagaagtatgcttatgatgaagatacttgggtgtcctatattcatggggagtctaagggtgcgctataagtggccttgagaatactattgtagtcaagagtggcatgaaaaaatacttgttgaaatcaatctttgattagcggaaccctttataatttgtataagtgaagggaaatattttgtttgatgaaccatatagcctaatgttctac

SEQ ID NO: 104540 - DNA, 202 bp, Glycine max
  unsure (1)..(202): unsure at all n locations
aactaagctattttanagttgattttaatggtgttctggaatctattcaagccaatccttgancatataactctaaaggtgtttctgaatgtggaaacctatattntttgaaatgaaaccttccaatttgaataatcaactcgaataaaatttgttcaaagatctaaaccttgttttcttgtaaaatgatcacaattaaaac

SEQ ID NO: 104541 - DNA, 357 bp, Glycine max
  unsure (1)..(357): unsure at all n locations
agctntttatcattaatgactagcaagaggtcttatcttcgaaattcgtctcatgtcataaagtcaaaaatgcaaaaattgaatcagaaggactcttattggcttgtaatgaggctgggctacaaaaatattggtttttctaggattcanaggcttaaattctaagagagcacaaatcctagaattaaccaattaatctttntaatatacttagcttgctcattagcctttcacttgacttgttctaacaacacacacacttattngaactcttttcttttttaattttaattttataaattaattaattggtgggtggggtggttgtttcttacctttaaaacataactatctaac

SEQ ID NO: 104542 - DNA, 407 bp, Glycine max
  unsure (1)..(407): unsure at all n locations
ttaatacaatatttaaatacctgtagtttggggcggtccaggtctattctaatggcttacgccactgtaagttggacttatgaattattagatatttaaattaaatatttacattactattaattaataatgcatttttaattaatntccatcaataattcctactactattattatatattcttcttttctatgtatctatataatcaaatagtaataaaaaatatatcattttaaaatttttaatttcattcttatctntntctaagtatttggatnttatgagnatttaaactttaaaattacgacattttttatcactcttctatatggtgcgtcactgggtgtttgggtattctcgtgatatgttagctgcatacctttattttattagcaattntttaaaa

SEQ ID NO: 104543 - DNA, 177 bp, Glycine max
ctatacacacatataggtgatcagaccatgagcatgctaaaattaagtattaaatgaagcattgaacacctataacacaatctaattgatattaaagctattacctcaactgttccttagaaatccccaactacgatgtttagtcagccttaacagaaaaaccctaacacacatgag

SEQ ID NO: 104544 - DNA, 276 bp, Glycine max
  unsure (1)..(276): unsure at all n locations
cttgatacgcttcgcagcgtgattccgggtgctatgaatgtttgctcatcataatgctctttttaggcttcattttgtgctgttccactttttcaaatgactgagaaagtgtntaaataatttgagtaaattgtgaatagtgttgaattgcgtcatgcacgattggtagatcaaacttcgcagggtgtataataatgatgtattctacttgtatcactgttactggcaattgcgttgtgagcatagttcgacaagtcacaggttgatggatttggt

SEQ ID NO: 104545 - DNA, 231 bp, Glycine max
  unsure (1)..(231): unsure at all n locations
tggtgcacanaaagaatgatctactcttggtctatgatttcatgccaaatggtaaccttgattatgtctctatataaacccaacaacaacaactttgggttgtattgggggccaagattctcaatctcaaagcattaggcttgactattatatttgcttgaagagtgggagcaagtcgcgatccataaagatgtgaaaaccaacaacattttgatagatgcacacttgaat

SEQ ID NO: 104546 - DNA, 335 bp, Glycine max
  unsure (1)..(335): unsure at all n locations
ctaagctattgcttttggaggatgcttctagtgaagagagganacttgatgattttataatacacaatgaaatgctaaggcttctgaagctgttgctgaagtcagagcacaggtggataagctcgctgagagggtgagcctgcttctcatattatctttggttattgaaacataataactggagctgagaatgacgatatgagtgattttgatatgcaagtatctgtcttggaagtggctgaggatggagggaccagggtttctgacaaagagtttttgatgtccacagagttgcttatgaggcaattgctgaaactggatagtattgacgctga

SEQ ID NO: 104547 - DNA, 285 bp, Glycine max
  unsure (1)..(285): unsure at all n locations
tgagaatgtcaatccttaccctcggaagcaaaaaggaatagaatggaaatttccaatcaaagaataagagaaggacaacttccaatgagagcaaataagaaaagaatggatattcccaatcatagagtgggatgaagccaatagaaaagagaggaaattcccaatcaaagaatgggagaaagttaaaaagggaatgaaagatagttcttgaatgataaacagaaggaatatgcagagaggtcttntgaccggacaatatctgaccatacatatatgtcaccaatg

SEQ ID NO: 104548 - DNA, 263 bp, Glycine max
attctaagcatgttatacaatcctagaacgtcttgcactcatatagtgggcatgtataacaacttaagactctcgtgatagaggatacatgcaccactatttttttcaaaactaaaatacatgttctatatgaattcgaacaaatacaattctcacaaactaccttgtacattatcttgattcatttaaaatatttaagatctaacacaaaataggataataactagattaaaagacctttccacctatagtaaataaaacat

SEQ ID NO: 104549 - DNA, 400 bp, Glycine max
ttgagatctcctcttaacattggttgcataagctccgacaacatcagctttttaaaaattaatatattgagattctctcttaacatcggttttaaaaattaatattgatcttataaaaatcgatgttctgcttgcttagaaaatatcaatctaaaaaactgatattgatgtttttaaatatctatttctcaataccctctgtcccttgcccctgaaagcctcttaacatttggtttaaaaataataatgattttataaaaatcgaagttctgcttgcttagaaatatcaattaaaaaatggtattgggggtttaatatctattttaaaatctattctcactccctgcccttgaagcctggcttcttgaaccctaattctctttctgtcatgtatcttcaa

SEQ ID NO: 104550 - DNA, 408 bp, Glycine max
  unsure (1)..(408): unsure at all n locations
ggggagcacgaaattgaaggaagacaaagggagagaagttgaactntgagttgtgtctcacaagactctcattcatcaaagttacaacaagtgttacacatgcttctatttatagactaggtagcttccttgagaagctttcttaacaaaacttccttgagaagcttctttgagaaaacttccttgagaagctagagcttagctacacacacccatctaaaaactaagctcaccttcttgagaagcttccttgagaagctagagcttagctacacacacccatctaaaaactaagctcacctccttgacaaaatacatganaatacnaaaaaagttcctactacaaagactactcaaaatgcccctgaatacaaggctagaccctatactaatagaatggccaaatac

SEQ ID NO: 104551 - DNA, 385 bp, Glycine max
  unsure (1)..(385): unsure at all n locations
agcttcaatggagcttacatcatgtggtattattatcatcttcatctaggggatgttcttttgcttcctctatcttttggntcggngaattctcttaaattccttcttcttcatgatgcaatcctaccccgcaagggcattgtgtagaagactccaagtagattgtgctagagatccaagggaaggtcctanggttctcatgaaccttanggtagatttcgagcccatgggttaagtttagcccgcttatctttntaaatattagaataggtatttccttcgtctgggccttgtattttggccattctagtagtatanggttttagccttgtattttcgggcattttgagtagtctttgtataaggactcttttgtattttcatg

SEQ ID NO: 104552 - DNA, 323 bp, Glycine max
  unsure (1)..(323): unsure at all n locations
accttaaaactcagcttgtagaacaatcctcacatgatactntattgtcacagtatattttgctctctaagaaacttgagattntaacagaaacactntgtaagttgccaactaaattgtctattggtcaaccttcgcattcttctgttctgcaggttacaatttgtaccatctatggtgaggctcatgaaacaggccaatgtattcccattgaagaaaacactctagaaattcattatatgggaaataaaaaatgacaagggtatactcaaggaggattttcaggctttcagcagggttcttataatncaacaagacaatgg

SEQ ID NO: 104553 - DNA, 406 bp, Glycine max
  unsure (1)..(406): unsure at all n locations
tgagcagctcttaagcagggcgagtttactggcaancaaggatttctaggcacacgcaattctaatacaagtgatagtgagttggacaagaagctaacccagatggcaatactcagcaccttcaaagccacgtgaatgctatgggcttggacttgaatccatcagctccaccaatcgccaatgagattctggcagatggtcccattcagtatccatcaattggattaagccctggtgatatggcatctccagatgctgagaagcttcctaaaggagaaaaaaatgccggtggaagtggttcatcatgcgtgatattgttagatgctccagcagaaggggcatgcataccctgtggccatggtgctggatgcatgtcttgctagaacgaagtgaaaatcaaaaaatg

SEQ ID NO: 104554 - DNA, 286 bp, Glycine max
  unsure (1)..(286): unsure at all n locations
tttctcatgttgcatatgatgttgcatgttggttttcatcagagtccagtattcttagaaattttgaaccgaactttagaatnttacattcatgagcatgttcttacgagttgtttagattctctcagacgaagtgccacctaagagtgatatgtattatcaacatgtcatcaccaaagcagaattggattatgacagtcgacagaacttaagattttattaagaagcatttatgtctttttcttttgctctactgccatgcgaaaacattttaaatatgggaaag

SEQ ID NO: 104555 - DNA, 447 bp, Glycine max
  unsure (1)..(447): unsure at all n locations
agctntagcacttacatattncatatgaatnaattanttgtatttctactgggataatatcatcacgttagtgtgatgtgcantatacactcaatacaacgataccttctgacatgtataaagattgttaaataatttctcacaacagaaaaattaaagaaattgcgatgtgctcaaacttattatattctcagttacttctgatatgtcttgatatatagatagtttaacagatttaccgaaagaggctgatattttcattttttgcattattggcttattataataatttgataagctattcatactctaagattatgattgtatcattaccaccttgatccagattcactaatgcatcattggcttatttcaaaaaccatggcgttcatgctgccgaggaattgaaatgctacgttaagtgattggattcctcatttctatatg

SEQ ID NO: 104556 - DNA, 473 bp, Glycine max
  unsure (1)..(473): unsure at all n locations
actaagcttgcgctgcaagggatcgcagaagnactttcatctttttcaagacgaagaccctgctgcagcccttcgactcctgctgaacacaagtcaaaccaacaactcaagtgacaagattcctggtgcttcgtcctcatctgatgctgaaataaactcttcagtacgccaagattctctgctcttgaagttatcaatggaatacgcacagaaagatgtgcttaaatccattgaagagaacccctctgctgcctttgggcatctgaactttttgaagaaattgcacaacccccttacctctgatgaaactctaggtaaagttatccaaatcgaagccatcatcgaccagtttgcaagtgctgtgcagaanaaacgcgaaaatggcgcaagattagatgcccagatacaagcacatactcttcttctcgagaaagcccgagctgctcaacatgaagtcgaacgtctcaccaaag

SEQ ID NO: 104557 - DNA, 65 bp, Glycine max
ttaagacacctgcggctgcagcttcgggagacatatagacttgcttcttatctgacattcaccac

SEQ ID NO: 104558 - DNA, 222 bp, Glycine max
  unsure (1)..(222): unsure at all n locations
acctgacgtctcanacaaactactgaaacgtagcaagacaaggatagttgctgtgagaatacctcacccactcaacgtgtgctcacacaagtatggctattctgtcatgaaacactcttgccttataccagtctaattccccttgagttcttacgctattcaagagagtatggccacatccaaaaacgaattacctatatgtgttacgtaaagctagataga

SEQ ID NO: 104559 - DNA, 367 bp, Glycine max
agctatcatattgtctaagttctatatctgtatctttctctaacaatcattcgttgagacctatcaaggaagacatatttctacacacccttctatttcgagaactcttatcttttaaacctgagcctcctaacattggttatgacgatttgagcagacttgctcatggagaatatctcacacaaattattatatgcgctgatgaaatctatgcctgtggaaaaatcttgtggagacaatataaagaccaaattgatgattgtataagggaaattgatcaattgcatcaagcaatcaatctttgaacagaaatcactattctcttcctcaaataatacctaattgtttctatgaagaactttctaaa

SEQ ID NO: 104560 - DNA, 278 bp, Glycine max
tctaaagagccggagaagaagaacgtggcatatagttggcgtgaaatatgctatgctcaaagaagcttactaatgcacctgttctagctctttctaacatttctaaaacatgtgagctataatgtgatgcctctggagtgggagtatgagctgtatagttacaaggtggtcaccctattgcttattttactgaaaaacttcatagagctaccctcaactaccccacctatgataaagaactttatgccttaataatagccctaccaactagcgaacat

SEQ ID NO: 104561 - DNA, 379 bp, Glycine max
aagctcggacgtcaattcgtgataatcaaagaatgagtccaagatgttcaagatgtttctgatgttctagattgaatctagaacacttcaagattcaagaggagattcgatttcttgaatcttgaatcaagattcgaggttcaagcttccaagagtcatgatcacgattcaagactcacgatgtaagaatcttgagaagacttactctagataagtatgacaatgtcttttcaaatactgagtagcacatgaatttttctacaacctgtaccaaagagttttactctctggaatcgattaccacatattgtatcgataccactataaacaggtttcaaaagcctcttctgattacacgttccatgattcataagtgaat

SEQ ID NO: 104562 - DNA, 270 bp, Glycine max
catacactgtcctgccaagatggcatgcctctcgccatgaagagatgccaccaacatatatttcatcctataattaagaaaataaataagctttagcatcgaattataaacatacatctagtcttctaagcctttcattcctctcttctaatcgtgaaactttaatatgcaatccttgtgtagatgcctgctcattgacataaataatacctcgcatcacctttcttgaatttaatcaccagagaaataacaccttactctatgttatat

SEQ ID NO: 104563 - DNA, 136 bp, Glycine max
actaagcttcaggagggcagttaaaggggggtttaatttttaatgccacacgccaggggacttgagattcgtatatacgagaaaaaggggcttatagcgccattcgtgtctggggacccatggtgcctgagccctc

SEQ ID NO: 104564 - DNA, 255 bp, Glycine max
atgctattgaatgcctacatcggtcagcatacttctatattagactttgcgccttggccaaatttcctttgagatcatgtaacattttggccctgtcattagtcatcacgtttaccttctccacagttgatggaatagtggctcctttcaatagatggggtgggtcacgaccatacaaggctctgataggagtccatttcagagagtgtgtgttgttggtgttaaaccaaaactcagcccaacttaaccacttat

SEQ ID NO: 104565 - DNA, 316 bp, Glycine max
  unsure (1)..(316): unsure at all n locations
actaagcttccctgtgtgacctgctcttccaggaatcttggancattatatatctctcactagntncactcatccaccattattatataaaatgaatactaactaatgagaggcacttataatcctatctgcaatttgctctgatgcctcagatgacatttgactagactatttcgctcgggccatgttccacttcatgtgttgtctaatgggagatgggggatcaacgactgtgtcaacgcttctggattgggctatttactccaattgaatctttttcttctcctccatcaactattgttctataaaatcataa

SEQ ID NO: 104566 - DNA, 392 bp, Glycine max
  unsure (1)..(392): unsure at all n locations
aagcaccgcagctgcagctcatcaaatggggggtgccatagcattatttttatttgaattggacctttcagagtgtatttcgaaagatgatngcttctggaggaagtaacccatgtcgcctaagcaagctagacacaacctcctcccctttttctataaaaagaaaagggggtgtcaaaaggtccggattccccggtatatgtacaattgtttgggtgaaaaaattgttccgggaagaaatcaagccaggtgctttctacgctccgagagttccgaagcaatccggagggttaatcatcttctcttcttatcgtcttctcttcacggtagatccaaacggacttttatcatcttgtttttgcttattctattcgccaaataaatcttttctt

SEQ ID NO: 104567 - DNA, 312 bp, Glycine max
aactaacagaagatcatccagagcctgtatatgcgtgggtctttttgtgatgccaagcctccagagtgataaacattgcataaacaatggggaaacaccgaggacatgcgaacaaaccctagaccctttggaggatcagttgggctgaaatatcgtatatttatgtaggagaaaatgacccacgagaaaaaaagggctattaaatacagacctgaacagatcaatggagcctttgatcacttatcgccttactgcttcaagaacaacaacaacgccaccatagacggcaaggcgacactaaaaaaggcttta

SEQ ID NO: 104568 - DNA, 360 bp, Glycine max
  unsure (1)..(360): unsure at all n locations
agcttctcgtctttctcaccttatctagaggctctcttctctctagccaactgtcttttcttgttccctatccaatgaagtaaaccaagttttggaagatttaaatgtctccttgttccctaaatcattgagaattatcaatatagttgagtttatgatattttttcaaacaaaggatatggtgtcaagcattttatgaaattgcactacaatcaactacgctggacacatcanacacctactgtcgtagctacgtatcatatatatatctgcatgataataggtgtttcataaactattaaaaatattacactgtttgatgatggagtgggcatggtaccaaagtaatttaccatcttt

SEQ ID NO: 104569 - DNA, 421 bp, Glycine max
gtacactagcttgctaaggaagcttctcatcgaagctccctaggctataaataaaagcatgtgtaacacttggtgtaactttgatgaaagagaaacttgtgtgacacacttcatagttcaacttgtctgcatattctccttcaaattccacaccactctctctctgtctcttccattctattcctacatggaagcttcctttctaagtttcttatcctagacactcttggtggtgaagcttctccttccatggcttgttccctagtggatgacgcctcctctcacctcttctcctttatcctgcactgcaactccatggatcaaaatcaccattgaaagaccttattgaagctcaatgatctaacctccatagaagtttctcatgcaagcttccatcaatctccataagacttcatttccc

SEQ ID NO: 104570 - DNA, 348 bp, Glycine max
  unsure (1)..(348): unsure at all n locations
agctntgcctttagggcttggacctcattactttcttccgaagctttaacctcatcgcctctcacagtctttagatntgggagccaatccaatccttgtgttcggactctcagccacttatgatagccgccgatgatcccattactgcttcccctaagctctctgtcctttcttcacgccgcataccatgccttgcgaactcctttgagtaccctcgcgttgtggtcaccgaaaccccgtgcgatgaaaggcgtgatgctttcgtctgatggcactcctctcatggggtagccaagctgtcttatggcgaggacgagattatnaataatacaaccccttgttccatca

SEQ ID NO: 104571 - DNA, 306 bp, Glycine max
  unsure (1)..(306): unsure at all n locations
tttggttctcctcatagnagntgcattataaaatatgctctattttcatctcccactccaagtaagcctccggatcattctttcctttaaagggaggaatgttgagtttaataccatcaattccgttttgtctaagaacaccatcattccctcttctcctcctttcttcttcattatgatttctagtttccatttgatccaacctctcatggagcgcatcatctcgttgtttcattaacctctccaaatcttgcatcaaagcttgcatttggaattgcaaaagccccactcctcattaggatttgt

SEQ ID NO: 104572 - DNA, 385 bp, Glycine max
  unsure (1)..(385): unsure at all n locations
agctttcatagcaatctcccaacttggttactgttttagcagtccagcagccttgatgaggtccatgatctctttgcagtccaaggcatttcttcccagntctctttctaaagcaagccttcgttgatatacanaattccacctttcaacattgccaatggagtggaatgagatgttgtccaatggtgcatcanggacttttccaggcacctttttccctgatttcttggcccacttgatgtcgggaacatctagttcgacatcataatcagaatcagatgaggaaatttctttcctcttcttggaggggactgcaactttgctccatctggatgtggtaggagtgattggagtgctcttcttctgggccatagttttgattcgt

SEQ ID NO: 104573 - DNA, 259 bp, Glycine max
gtgccgaagtgtacatacttttggctttgcaagcgaggtctgacgtgtcaagtgaggaaagcctctgtatttgacaactctgcccttttctgattgttggagaacgcattgaagacaaatgttatgttttgtctgttgatacagacatgtgcagtgtactcgcaacactcttgcatacatgtcactcgtggagtgggcacgtactagagacttgatgcatgggtgagtggggctacgtcgtgttgcataaaatagggca

SEQ ID NO: 104574 - DNA, 277 bp, Glycine max
ctgcagctttcaagccatgctacaattacttttttatataagggtatccacgaaccatgtgaccattgctttaggtatcctacccatagaaaccacgaggtcaatcatatttgtgtggtttaggctaatagcatgtgttatcgcacaacttatagcacataccacaactcattgtgtgctatattgaaagaaagagtgtgatatttttcagcaatttaagtgccatgtgcccaccatagcgcaacaagtttaaccacccatttgtccaattcaaaac

SEQ ID NO: 104575 - DNA, 365 bp, Glycine max
  unsure (1)..(365): unsure at all n locations
taattttaacgcattttcattatgattactcttaaaatatttagcactctatattaacaaaagccttatatatacaggggttggctttttcataggcacatatattccgctacctataacactagcaattgctgcaacgagcaatgagatagacttacctgcgtcgtattatagtacagctatctaatgaactgtgactgccatgtgatgagaatacctacaaacccacctatcatgtaaccaagtgtagttatcttataccaatgatatgagaatggatctccgagcatctcatcanattattaactaactacaatattgatcacacgcaccccagagaataattggctaccatttcgatatca

SEQ ID NO: 104576 - DNA, 354 bp, Glycine max
  unsure (1)..(354): unsure at all n locations
tgcttcaatccatatggggagtgagtgtaaagttttctatgttacaacgggcagaagaanacttctatcgaaataataatgcttacaaacaggtttatcttaattgatcactttgttagttaaaaacgtaaattctcctattcttttatgccttatcctattttgcatggntagaacctttgggtggtaacatagcaaaaactgtaccgaagcaatctgtactgggaaaggcagaacagntctttgattcttttgtagtctctgcctatttctttttgaagttcagtactgttaagatcaatagagataaactgttccactgtctgcatacccacttatgtaatttgatttaca

SEQ ID NO: 104577 - DNA, 451 bp, Glycine max
  unsure (1)..(451): unsure at all n locations
atcctctctctttnntttttatccacacagaagggtagaggtgcggaccctntactatnacgcgtattcagctatttagggcttgtcttcactagacactngttttaagtagaacatttattctctttaatcatataaatttacgaatttgattcgtgtataaattattaactaataattcttattattagacatattaaattaattaaaaattattaaaaacctttaataaaagactattaatgtgatattaatcttatataattattgtaagtggaattgtgtgcgatagtgtaagtaaaagaaatatttgcagagtagcaggggaacatagtattatganaaattgtgattaataattgtttaataatcaatagttttgattacattataattaatntaataacacaattaattaaaattatttattaatattttattaagagaatca

SEQ ID NO: 104578 - DNA, 375 bp, Glycine max
  unsure (1)..(375): unsure at all n locations
agcttatcgttctagaatctcacattatttttgtgttcttcacattccaccacaagattattggtagctcattntgacatcttcataatctttgtgtgcttgtgcacattctctccatagatcatacctatcttctatatgataaccatgaagttcattcagctcctttagatcctgttgaagatatatcaatttgttttccaacacctaaaagttcttgagagaagtagctttttccttatcactagtttcaatctctagacatatattggactctcttttttaagagtcatacaagctccacatgtctaagtggatgccgtcagtgaaatttctacttgaatctgaagagttgtctcaagattaaaataatct

SEQ ID NO: 104579 - DNA, 346 bp, Glycine max
actgacagagacccgtgattagagcttgactactacaagaccctgttggacttattcgggtccactgggtgtcctgcagacgcgatcccttgcgacaatagatgaaatcagatatcagttgagtaatgtgcatacttacctatgatgatgtgaccttgccggggggaacgagcacccagtaggactacagatgcccgtaaccagagctggaaaccccagagccctgttggacttctccgggtccactgagtgtctttgtgggtgcgattcctgcacacaataaatggtatcagaaatcagttaaaccatatgtatacttacctatgtcacgaatgcatgacctcgc

SEQ ID NO: 104580 - DNA, 268 bp, Glycine max
  unsure (1)..(268): unsure at all n locations
ataaactctggtcaagataggataagatctgataacataaaatctaaatgaaataaaatctagatatgataagataagataagagctagatgaaataatatctagatgagataaaatctggatatgataagatttggtagaataaaantgtttgctctctttcagtccaaacccaattacttataattctcatgaaattaaattagaaacacaaaattagtctagttggcccacatgataaaactgcataattaatttgacaataagg

SEQ ID NO: 104581 - DNA, 348 bp, Glycine max
  unsure (1)..(348): unsure at all n locations
ttgatctacaattacatgcttgtgtctcacatgctcgcatgcctacggtgtagttaataattactattaaaaaacttattcattaaaaatctgagcatgagttaatgcctatagttagatntagttgataaaattgaacatgacaaaatcttggaaacctttttgtttcgtttttaattagtatggaaagaatttcatgaaagatggtagagaaatgtcaaatttctcttcttgagcattcaattctatttaaatattaagattacattacaaggatgcatgcataattaaagaggggaaaaaagatggtgataaaggcattttcattatggataaaaagtgtatatg

SEQ ID NO: 104582 - DNA, 238 bp, Glycine max
  unsure (1)..(238): unsure at all n locations
tatgctcaaactcaacatgtagatgttacctatccttttacctatgtgaacaacctcaccagatatagccttacacatgagacaatatgtcttgttgaatttaatcttgacgccttcgccacatagttgacttatgctcaagagatngtgcttaatgccattaacatatagaacactttttatgtgaagcttgagctgatttccaaagtctactttctgctatactctgtcccttatt

SEQ ID NO: 104583 - DNA, 466 bp, Glycine max
  unsure (1)..(466): unsure at all n locations
gctgctacaatccagtgtgcaacatcacatttgttttgataangnnnnngagccangatgagggnaatatgccccatgacactgtactgtctcagctctggcttcatctgcactgacttcaagtaattcaactaacatcaacatcgcttcgtcgacatgaagagtcttgaagctatggaaggtgcctatgatgggcagatgcagaaaagaggccacatcatcgagggtgatggtgacctctcctactggaagatggaaactactagtttccttatgccacctctccgtaaaagccgatataagtccctgatcgctagtatctagtggacctctcgaattcttgaaccttccttccatgtgaagataacttcaattcaggacgttcttaanaanattaaataactttaacaataataaaanatacttattgaaatataattatttatnaatatacataccctctcat

SEQ ID NO: 104584 - DNA, 326 bp, Glycine max
agctttgaaaagtgttgtttttcaccttctcgctaagccaatctgctggcttagcgagtgttcgctaagcgtaacactcatgggctaagcgcgaggaagactctggaagaagatgagctatacaagttcgctaagcgcaccacttcatctcactaagcacaccacttcatctcactaagcacaccgcttcagttcatctgctaagcgagaaaggcacgcgctaagataaaattcactaatgtgcgttaagcggtctataattgcgctaagcgcacgagcacaaacaaggccacctatttaatcctaaaatcagattttagaggggg

SEQ ID NO: 104585 - DNA, 383 bp, Glycine max
  unsure (1)..(383): unsure at all n locations
aagaaaaaaggagagaagttgaacttttagttgtgtctacaagactctcattcatcaaagntaccacaagtgtacacatgcttctatttatagactanggtagccttccttatagaagctttttttaagaaaactttcttgagaagactctttgagaaaacttccttgagaagctagagcttagctacacacacccatctaaaaaataagctcacctccttgagaagcttccttgagaagctagagcttatctacacacacccatctaaaaactaagctcacctccttgacaaaatacatgaaaatacaaaaaaagtccctactacaaagactactgaaaatgccccgaaatacaaggcttaaaccctatactaatagaatga

SEQ ID NO: 104586 - DNA, 325 bp, Glycine max
agcttctcaagggtgcttctcaaggaaatttctcaaggaagctacctaggctataaatagaagcatgtgtaacacttgtaactttgatgaatgagagtcttgtgagacacacttcaaagttcaacttctctccctcttttcctctttcaatttcgtgctcccccccccccctctctctctttcttttcctccattgaagcttcctctctaagcttcttatacaaggcactctcttggtggtgaagctccttcttccatggcttattccctagtagatggtgcctcctctcacctcttctcttttatcttccgctgcatctccatg

SEQ ID NO: 104587 - DNA, 402 bp, Glycine max
tatatctacaaactggtgaaataaactaaacaagtattagattaatattgaagagtggaatgactataggaattagtcacaagcactggaggcctaataaatgatgagccaattattaaaagcttgtcttttatataaatgaaaacaattcgatgggatctcattatcttatgtatgtattagacgtggggccagacacacaactaaacaggtggtaaacactacatgagttctattacagaatatacttatctggtcttcgggcattttttcatttaaagccaaaaagaaatattaaaacaaatttcctttccaatatgctaagagttccaaagggtttctgacgcccaatacctcatccacacccagacagtattactgtgaccattacaatgtacaaat

SEQ ID NO: 104588 - DNA, 329 bp, Glycine max
agcttggaagctttgcttccacaatcaactcatcttcattactcaaattttgaagcaacaaaccttaaattttccacacttgcatgaaatacaaattagatgttgaatacgaggaaccagatatcaactctatgatttgaaagaaagaacacaaaaaatcacacatttgttctctctctcattcttcataagtaggacaacttgaatagctcctatcttcaattgcaagactacaaaaaacacgtcgatattcaagggcactctctaccatcaaaaaagtggaattccacccagtaatgacatctaagcgcaaacctatctttgtatta

SEQ ID NO: 104589 - DNA, 425 bp, Glycine max
  unsure (1)..(425): unsure at all n locations
tcccgacccaacccgggcatagnngggctgtgagaacctgtgatgtacctaaacaggcgagctcctggcagtcaacagataaaaggaacaaagaccacaaagcatggaggcttgtggtggctggccagctgtgaattttgtgtgatatgtggatcatggcctctggtaatcgattaccaacggtgggtaatcgattacaaggcttaaaaatgaagacaggaggctaagatggtctctggtaatcgattaccaaggggtgtaatcgattaccaggcttgaaaaacgaagtcaggaaactaagggagcctctggtaatcgattaccaacctgtgtaatccattacacagagggatgggtcactggtaattgaataccaggtatgtgtaatcgattacacagtgcatttttgcatattttatgtcctg

SEQ ID NO: 104590 - DNA, 326 bp, Glycine max
agcttatcaattcttcaacatccatggtaactctaaccaacaacactctaaaaaaaattaaaagataaggatcgaatacacttgaaatgtgcaattctttgatttgcaatatttcttcacaagttgatcaattcatgtttgtaaaatgagtgacttttagatcaactttaatctttagacgtattatagttctattcttctttaagactctcttgaaatgtttttcacaaattctgaacgaatcaagagtctgttaacaagaaaacacataggggtctttataaattttgactattaaaataaatctaatcgattataaaacaagt

SEQ ID NO: 104591 - DNA, 421 bp, Glycine max
cttcctgttgttttcttggtgcatagatgcatgaattagaaatgaaaatttcaatgcaaaaatatcaaaatgcagaacttagaagtcaatttgaaggttggttattgagtcagtgatttcatctaattatgtgttggcattttaatgccttaatcttttaaactagcttctcaatgattgctactttactgtgtcactctgtcagattcattaaagaagttcatataataacaaattaatattcaaaatatagacatgataataaaaaatgttattgtgtggacttcaaaactagaatttgaagtacgagagatattgttataggtgaatgtgctgaacttgtgacaattcaacatgttaaattctttgtaaggaggaacttttgatatggtggtgcataaaattggacagtataggggat

SEQ ID NO: 104592 - DNA, 328 bp, Glycine max
agcttcaagaaaaagatggcctcagcatattccttatttccagaagggaattctatcaatagacctccaatctttaatggagagggttaccactactggaaaacccgaatgcaaatttttattgaggcaatagatctaaatatctgggaagccatagaaatagggccttatatacccaccacagtagaaagaattacaatagatggtagttcatcaagtgaaagcataactatagaaaaaccttgagacagatggtctgaagaggatagaaaacgagtacaatacaacttaaaagccaaaaacataataacatctgccctgggaatgg

SEQ ID NO: 104593 - DNA, 466 bp, Glycine max
  unsure (1)..(466): unsure at all n locations
accttaaaactccgctntnntgaaacaatcttgctactggtaattgattactataaactggtnattgattacgagagagtaaaaactctttggtaaaaggttntgtgaaaaattcatgtgctactcaatgttttgaaaaactatctagtacttatcttgattgaatcttttcttgattcttgaatcttcaacttgaatattcctgattcttgattcttgaaacttaaatcttgaaacttgattcttgaagtgttcttgattcaatcttgaactcattctcttgggctttttgtcatcatctttgttatcatcaaaactccttgaatcaatcttgattcaacatcatgaagcttgcttctacattctaaatggggacttagaagaaaaagtttatatgacacaacccgaaggtttttcctctagtgatggggctcacttggttngcaagctcaagaaatcaatatat

SEQ ID NO: 104594 - DNA, 309 bp, Glycine max
tttaagcagttaaccttcggagcttggtactttgtctagacatcctttttggggtgcgctaaaagaatctggtggtggagaggatctcgagggtgttgtcatggttgcatacaaaaagaaaaataaatcaagccaagttaattatcccaacatacaagtatgaaattctaatgaaagacagataataagaaatagaaaatgataatggacagcgtaaacaaaatttgggttatataccacattcaagtagcaatatcttcccataaaccttcatcatgatcgataccaattgcatatacatcatcctcc

SEQ ID NO: 104595 - DNA, 377 bp, Glycine max
  unsure (1)..(377): unsure at all n locations
ttttttaacccatgncataaaatgcatggtgaaacttatcaaaataagctctcttattaataagacagtaatcatatgcttacctaatgttccgtacatgaatataattttggatttccaacataattagggatattttattctatacacctaaaaagggttaaataccctccttttccctccaaatccccccaatattagaggcaagcaaaaataggatgtgaaaggattctgctcccctcccctcttaaaaaatgaaataaacaattaaattttataaaaatctctcctcatccctactctcctatgaattgaactataccattaaattttataaaaaattgtggtcattcctcccctacatttttccccccccc

SEQ ID NO: 104596 - DNA, 314 bp, Glycine max
agcttgttaagaatgaaaatcattttgcaacaaaaggtgatatcaaaagagcactccttcttaaacaatccttctactttctcctatcaagggaaacctcccttagcactgccagaattcctacatttgagaccttacccccaaaggtccaagaactcttacatgaatttggtgatatatttcccaaagagatatcccatggactatctcctcttaggggaatagaacaccaaatagacttggtccccggagcaagccttcctagtaggccaacctataggactaaccctcaagagactaaggagatagagtct

SEQ ID NO: 104597 - DNA, 424 bp, Glycine max
ttatatgggccattagatctatcatatgctaacaatagccgagaagtttgtggatcatcatatgctaacaatagccgagaagtctatggatctcctcaagggcagaagtagggtccgccatcgccttggccttggctagcaatcaaggaagttcttgactctcgctcaaggtaagagcaaatcggtccatccacattgttgcttcttgatgtaacgagtcgatcacccttcctctaaccttcttttccgcgtacacttgggcatactcgttcgccactctatgctcgtgggccatggctagatttaattcttcttggtacctgctgatgatggctaacatgttggtctctgtctcgcataaccactgagacaggtttcttttggaccttgagcaaaccttcaactcatttttcaagatcaaact

SEQ ID NO: 104598 - DNA, 292 bp, Glycine max
  unsure (1)..(292): unsure at all n locations
ttagcttttcaaatgtataaaaggctcacattcactttcttctacatcatattcaaatttgtccaaataaataataaagncatctcgactcaaagaaaatcatataagtctcatccaattaatatngaacctatatcctaatgtcacatcctatcaaagcgtggtgttcccgtgtcctctancatgagggtcttcttagtcatccacctattcatntgcttccccgaacacaagttcaagatcatcacaggatccaaacacaacaacacacanggagtgagttatcacattc

SEQ ID NO: 104599 - DNA, 229 bp, Glycine max
tacatacagaactttggcagacagttcatactccttcgaggaatgatcaccaatagttgatatcattcatagacgatgccgtctcatttgcctacttgagttttatgcctgacaagatacattctgtggatgcgctcaaaacagtcatagttgaagtgcaaaacactcgtattaacagaataaagggtgtgagaactaaccgtggtggtaagtattatggcaaatctga

SEQ ID NO: 104600 - DNA, 314 bp, Glycine max
tagcttgttgaagtgaaaggccccaggcacttgcttggcatctctctgcaaacttctttctttttccatttctctttttagatttgcattttttatagttgttttatgtaagtatgcatgtattcattgaacttggagaaaatagggtaataagcggttgctacaatatggcttgaaagttgaaacttattatgcgtgtgcttggatatatgttgttttggtggttgcatgtcttcgttaattgaccaaaatgttgtgggttgtgtggctgtacttcttatatattgattctgtgagtggatattgagaaaaaa

SEQ ID NO: 104601 - DNA, 315 bp, Glycine max
agctttcaccattgggatttgcgagaaagtatttgtggagggagaaaaataaatcgcatgatgacagtacaagtggaggcttcaatcccttctttgtctatttgacatttgggaactctatcggaatagttagaggaaaaaaattggaggaatctcagggaaccgctagagatgctgttatcgctggctgaagacacgtggacccgcttagaggtaagggatgagttattcacaattgagaattagtgagaacatgtgtatggatccttagagatatcaattggaatgggttttggggtatttttgcaattttca

SEQ ID NO: 104602 - DNA, 392 bp, Glycine max
actgtagggcaaccaggaaacgtctatgatcgtcagagcgtccaaacatgccctgtacgatgctcccttgatcccctttatgtgcgccttcgtcgtaagccacctcaaggcacgtggggtagtctcagcgtacgcatcaccagtcatgcatcgatgaacactgcaaaaatactcatatatccaacactacacaaataaagtgaacataacataaaaaccttaaaaattcattttccaacttaaaccagtttacgaactttaaaaattacctgtaatagcatcaagtatccacccatctgtcgtgtgggggtctatgaagcttcattcatctggtcatacatgtgaaccaaggtgactactccccatgcataagccccagactgacccaagtc

SEQ ID NO: 104603 - DNA, 298 bp, Glycine max
agcttctgcttattagtgcaccgctccttcaagaatttagcatatcttggaatttgctttattgcatccagcagaggtatgtttacctctacttttctaaatgtttccaatatctccttctctgcctcttccatttttttgttagaaattgctcttggagggaatggaagagggatatgctgcttctgtaaatcagaattaccagtggaagactcacctacacagaaattattaggtaacttactctttaaatttttgtcatcatcattttctggagtagagtgaagttgggcaggtt

SEQ ID NO: 104604 - DNA, 436 bp, Glycine max
  unsure (1)..(436): unsure at all n locations
tatgtgaaaagatgagactcttcacatttgaattttaattncaacattcaaaggcactggttatcgattacctaaacaatataataaattacagctttgtgaaaataattggaacgttgtgaattcaatttgaaaactttttcaaaacaattttgctactggtaatcgattacaacaatcttgtaatcgattaccagagagtaaaaactctttggtaaagggtttggtcaaaaactcatgtgctattcaaagttttgaaaaactttttaatacttatcttaattgagtcttctcttcattcttgaatcttgagtcttgaatcttgatcttgattcttgagatcttgaaccttgaatcttgattcttgactctagactntcttcttgagtcttgaattcttcttgattcttatcttgaactcttgaattgttcttga

SEQ ID NO: 104605 - DNA, 299 bp, Glycine max
agctttataagtgctggtctgggagacgaaggtcaagtgttcgcgatatgtgaaaatgatgttccgagtacttcggatttggtccgaccatgccctcctgatttccagctgggaaattggcgagtggaggaacgccccggcgtttacgcaacaagcataatgtaaacctttacggttttaaaagctctatagttgggcctaggctttagagttttctttttgttaaggctttgtgtcttttgtttttgaattttataatacaaggatctttcttcatctgttcctggtctctacccatt

SEQ ID NO: 104606 - DNA, 402 bp, Glycine max
  unsure (1)..(402): unsure at all n locations
gcttctcacatatgatgcgcccgaatcggacattcgtatgaaaantnatgaccacttgaatttcgcgagagttttcgatgttaatttccagcgtatcgatatattataagcctgagtcggacatccgtgtgaaaagttatgaccatttgaatttctcaagagcttgcgttgttcaattccaagcttctcgacatatgatgcgcccgaatcggacatccgtgtgaaaagatatgaccatttgaatttcgcgagagctttcgatgtttaatttcgagcgtatcgatatattataagcctgaatcgtacatccgtgtgaaatgttatgaccatttgaatttctcaagagcttctcgtgttcaatttcgagcctctcgacatattatgcgcccgaatcggacattc

SEQ ID NO: 104607 - DNA, 317 bp, Glycine max
agcttatcccacacaaatatttttttctaccaagtcacttctttctctaaacaaatcaaataaatttgtttgaaaaatgtgcacacaaacaaattatatcgtcatacaaatagatttaacaggtaagcacactatctttttatctcaggatatacaaggtaatgagagcttttataacttaagaaatacaagaatgagagcttgaaggttagagagaatatgcaattcaaaattggatcttcaactcttcaggtatatataagcttctttaacaattaatcgttgtaacaaacggtcttaatttgcatctagtgtag

SEQ ID NO: 104608 - DNA, 164 bp, Glycine max
tgtttcctctcccaataaagctgatctcatccatggctgcaactagcttgttgtcaataatgcattctcttggcccacgcacaatcccacatttatcacaggttgggaatgaaagtgtactgatggggacctctactcatacttttcatcaatgttctacctac

SEQ ID NO: 104609 - DNA, 327 bp, Glycine max
agcttccatcaaggggtaatcagagcacatgagcttcaagtaggttctccttaaacctccatttattttcagctttaccttctcttccattgttatttcttcatttttcttccatgtatctcctcacatgtcttgcgcttaatgttgttaacatgaatttttagaatttccaccaattaaacttgctatagaagctagatttgattatctatggttcaagttccttgttcttgttcttgaaccatgaattgtgttgagtttaggttcctttgagttttgtattgccatttttttggctgaaacctaaacaataaaattcttacaaaa

SEQ ID NO: 104610 - DNA, 364 bp, Glycine max
acctttccttgttatgaagctcactacacgccttaactgaaaaaccatgatattaccatctccttaaggaattttggagctttggaattgttatgggaataaatgcggggggtttttgtttcattggacaacttgatatggtgactatgcttcatgaagtattttgggccatacttgatgtacaatgtatattggctaaatgtactacatgctgaacgaaatgttgatcttcttacgctgccaagatcgcccttttctcttttttggatggaaaatttcggaataaaaaaaaaagaaaagcactcagttatagtggataagactttatttggcaccctattgaggaaacttttggtcctactct

SEQ ID NO: 104611 - DNA, 326 bp, Glycine max
gcttcataaaagtttatatggcttgaaacaagcaccgaggcaatggtacaagaagtttaatgagtttatgagaaactcaggattcaacagatgtgacatggaccattgctgctatgttaagaaatatgctaatagttatgttatccttgtcgtgtatgttgatgacatgttgattgcaagatctagtatgacagaaattaacaggttgaagcaacagttggtagaaaactttgaaatgaaggatcttggtccagctaaacaaatccttggtatgagaattcttagaaacggatcagagggaattttgaagctgtctcaagagaaat

SEQ ID NO: 104612 - DNA, 436 bp, Glycine max
  unsure (1)..(436): unsure at all n locations
tcttctacaagttcatntaaactacaaaaactcacaaacttggtctattcttccactttttcatgagctggtcatgagggtaggagacaccatttccattcttctttcaagtttttccatgtgttcttgagctcttcttccatcaaacttangtaaatgaccttcattttcaattctaagcttgattttcactttattttttcttgcttattctcactcgtagtttcaaaatcttatntttgcactcttgaaggttggaaaagtgaatccatagtccctcattctttcttctaaatttcatggagcatcatcaaggtaggggggtctctccaactcttgaatcctattcttgtctttaaacttccttaaatatgttgtcttgaaaatatcatattgctgccttgttctggatttgtgtgtcgggctggttttcttg

SEQ ID NO: 104613 - DNA, 329 bp, Glycine max
  unsure (1)..(329): unsure at all n locations
agctngcatacaagtattctccttgccctgcacttcaaaaccttctggttgggtcatatagatgtcttcctctaaatccccatgcaagaatgcaattttaacatctaaatactccaagtgaagattctctgcagctactatgctcagaataactctgatggtagtcatctttacaactggagagaagatctctgtgaaatcaattccttgtttctgctgaaaccctttcaccacaagtcttgccttgtttcttcttctgccgtcagattcttcctttaacctatagacccatctattctgtaacactttctttccttctggaaatttaa

SEQ ID NO: 104614 - DNA, 347 bp, Glycine max
  unsure (1)..(347): unsure at all n locations
aaagatgatgacaaaagtgatgaacaaaaagctcaagtgaatcaaagaacatctcaagagaatcagaatcagatcagattcagactcagatctcagaatcagataagattcagactcatgattcgagaatgaagaaaagactcaatcaagataagtattaaaagttttttcaaaactttgaatagaacatgagnttttgacaaaacctttaccaaagagcttttactctctggtaatcgattaccatattgttgtaattgattaccagtagctaaaagagtttgaataagttttcaaactggatttacaacgttccacatattttcaaaagggctgtgatcgattac

SEQ ID NO: 104615 - DNA, 328 bp, Glycine max
agcttctcccttattttgctataaatttggggagaagtgaagaagaatagggttcagccccttaggcacttctctctctctcgaaatagctgaggaaaattagttccgtgaagaaaatccaagtcgaggcgcttccgtaacgtttccgtgagtaattacgcgaagattctcgaccgttcttcaagattcatcgttcgttcttcgttttcttcagtcttcaacgggtaagtacctcaaaccaagtttttcaattcattctatgtacctgtggcggtccacattttgtttcatgtatttttgttctcattttcatttactttttataccc

SEQ ID NO: 104616 - DNA, 420 bp, Glycine max
cctaagctaacgctgtttcatgttaaatcaaatagagcttaaaattgttcttttcaatcatgcaaaaactctaagtcatttggtttgggaaaccattattgtttattctaatgtttcaaaatacttttgtgtttttgttcatcaaagaagtttaaaaataccagttggtgatttttccaagcatgtatgtcaacaattttttgttaggcccaaaaaaggtatatataatttacaactacattaacaaaacaaaatatatcaaataatgcataaatcagttaaaaacacaaactcgcttaagtttccaaagaaaataaaaaataaataaggtgataaagtactaaaatttaatacaaagtgataaatgatcataaagacaagtcacaaatttttggagatcatggttgaagagctcaatct

SEQ ID NO: 104617 - DNA, 311 bp, Glycine max
ttagcttgaaattgttcaacggaagccctcgagaaattaaaatggtcataacttgtcacacggaagtccgattaacgcgcagactatatcgagacgctcgaaattgaacaacgaatgttatcgagaaattcaaatggtcataacttgtcacacggaagtccgattaaggcatttatattttcagaccctctaaattgaacaacggaagctcttgagaaactcaaatgggcattacttattacacggacgtccgattccagcgcctaatattttgagacgcttgaaatctaacaacggatgctcttgaaaaa

SEQ ID NO: 104618 - DNA, 367 bp, Glycine max
gaagagctttcagtgtacaatttcgagcgtctcgatatattatgcgccttaatcggacctccgtgtgataagttatgaccatttgaattttccgagagcgttcgttgttctatttcaagcttctcgataaaaaatgcgcctgaatcggactttcgttcgaaaagttatgaccatgtgaatttctcgagagtattcgatgtacaaattcgagcgtctcgatatattatgtgcctcaatcggacctccgtgttataagttatgaccatttgagtttctcgagagcttatgttggtcattttcaagcttatggatatactacgcgccttaatcggactcctttgtgacatagtatgaccatttgaatttt

SEQ ID NO: 104619 - DNA, 314 bp, Glycine max
agctttgcagtatgtgggcctaccaagtgtgagtatgaaaaatgaaaagtaagaaaggttaatcttgattatacaatcatacacaacttgcccaaattggttttacttgaaactaatcctgaccatccatggaagatttaattgttggaacaagtggcctcagaataattaagaaggggggttgaattaattatgaacgtgtcttgactaattaaaaatttatccttcttaatgttactagattcaattaggttttactactaagttatgagaaagtaaagaacagaaacaataacttagacaaaagtaaagcg

SEQ ID NO: 104620 - DNA, 417 bp, Glycine max
  unsure (1)..(417): unsure at all n locations
caagatcatattcttctatttgataagcaaagaaaacacatgcaatcatttgtatcaaacaaaaactattattccccatacaaaaaaaaaatatattaacaaaagatggcagacaaaaagccattgtaaggatttctttaaataaaaaacattgacaaaatataatagtccaatgatctggctattattttgttttaaaaagttttcattttaaataaattctgttactttattattaaaaaaacacactaacataaagcttgatttcaaaagatttgccaaaaccttattttctataaatttcacatcttttttctaatagagaagcctactttntggcaaaaaagaaaaaacatggatcacccacatttacatctcataaggaagaagtgaaaaaaaaatattcttgaaagggat

SEQ ID NO: 104621 - DNA, 319 bp, Glycine max
tttgcttattgcagcttaaaacatgtgcgatatacaaagtctgaagatcctcctgagtggtgaatttgatatgaaagatctaggggctgcaaagaaaatcttaggaatggagatctatagggacaaaactcagaaaaggttatttttgtctcaaaaggattacattcagaagatacttgtgaggtttgaaatggctgattctaaacctattggtactcctatttcagaaaaaagagaagttgtctgctatgataaaggttcaagctcaagctgatcaagactatatgtcaaaggttccatactcaagtgttgttggcag

SEQ ID NO: 104622 - DNA, 431 bp, Glycine max
  unsure (1)..(431): unsure at all n locations
aaagaaagaagttggaggtatgatgtttctttatctccatggattcaacttaacanggtggggaagtaggattggaatttcattaataacccacatactacaatttctaaaattctcaaagctaaatatttttcaaatatttgatacttggatgccaaactaaggcataaaccaagctatgcatggcatagtatttttgcttcacatatattggtcaaggatgatattttgtggagaattgatgatagttccatcaatatttggagccaaccttgggtgcaagcatcagcaagctcatatatcacttcatctaccccgctcggccttgaggatcttaaagtcagtccactcatcaaccaccaacaacaatgttggcatcaagttgtggtacaacaaattttcaatgacaatgactagagaaatgttgcttt

SEQ ID NO: 104623 - DNA, 317 bp, Glycine max
agcttcaccaaagtgtttattttattggttttgtgtgttatattttcaagacttatcttttatcaatgagttatatataaagagacaatcaatcaacatgtagcaacaaaatacttgcagtaataataataacgtttaacaatagaaattaaaaaccaaacatcaaacattcttattttaaagacttgtgttcacaagattatttgaccaagtaaaagataacttcttaaggtgggaatgaaagtagtgaaatgtttttagtttttcacataaactaattctaaaagcattttatctgtaaaccatcattaataaag

SEQ ID NO: 104624 - DNA, 338 bp, Glycine max
  unsure (1)..(338): unsure at all n locations
cttatcttctccttcttggacaagaatggngaggtgagggcaagtatattttattccattataccttggatgcaactgtgatctgtatacccaaatcagctagaatttgagggggtattaaggcatactttgtcttgccttgaatcttaatgagcgtcccaatcacactgttgcaaacatttttctccacatgcataacatcaatacaatggctaacgtcaagatcacaccaagacggaagatcagagaatatggacctcttctttcatatgcaactctgactttatccttctattggggcttgccaatacaatattcagatgtgaacccgctgatat

SEQ ID NO: 104625 - DNA, 314 bp, Glycine max
tttaaatgatttttggatagattttttaaatctctacataggattctataagcttttgaaagaatagatgagtttgatcaaagttcatgatacgctttcctaagagactcaaggtcatcaagatttaccttactatcctggtctgattcagatcttttagaggttttgtcttccatcaggcatatgtttgcttctttatcatcttcattagacaaggtgtcgtccacgtccccacgtgcacataagccccttattttctttagtcttaaatattctcattttattttgatttttctctagatctgaatattctg

SEQ ID NO: 104626 - DNA, 299 bp, Glycine max
agctttctgttaaaataactaactggtagttaggctttctgttatagtcggtaagcttggttccttttgtaacaaactataaatgtttgaaagcgctttgcagaagagaagaagaaataatactcctttctctatctctctcttatctctcttatctctctttccctttgaggaggttgctgggcctcgaataccacctactaacattagtgctttcatcatcgttgccatggctgacgacactcgttcgaaaacaagtactgaccgatgggaggacgctttcgctaagctttcatcat

SEQ ID NO: 104627 - DNA, 440 bp, Glycine max
  unsure (1)..(440): unsure at all n locations
gctttgcatagttataagatgagtaggagacagagacttttctaacgcgttatcaacaacgaaaatatctaatttatttggctcgcattataattacccacaatcatgtcatgtgtgtgaaaaatggataaaatcagaaccagctcaacatatattctagaagaaaattatagaaaattacatcatttttaaccggatatttcagctgctttgggttctggcttcttcatttcttccttagaaatagtaacagtgagaaccccattttccatggatgcctcgatctgatccatcttagcattttctggtgaccttaatcttctcatgaacttgccactgctacgctccacatgatgccacgtggcattcttggcttctttctcaagggtncttntccacttatttggaggaccctgtgatccttaacttccaccttcaat

SEQ ID NO: 104628 - DNA, 305 bp, Glycine max
catgcaaagctgggttttgtttaaacgacactcaaatataaagctgactttttgggtgttaaattggtgaaaacaaaatcgacaaaaagaaaagaatgggtagatcaattaaaataaattaaactatacaataaagaaaagatttgacaagaacgggtgaagaaaagaatagtttacagagaaaatggttcgatgaagaaaaaataatccttagacagaaaagttatttgacaaaataaatccacagaaaattaaaattgttagaaagtacatgaaaactgaaaagcaaattggattgctaatta

SEQ ID NO: 104629 - DNA, 361 bp, Glycine max
  unsure (1)..(361): unsure at all n locations
acaacagaagccaaaatgctaggaaaggaaatcctaatgaaattgctatgactgaactgattgtgtggaatggggtatatatagttttgtaatcaaaaactaagcactngcatataataataataataatattttttttgctaaggcaactagtcccctggcttccattttgttggggttacaaccttgaagtttgaggacttttgccatgacttcatcaccttcaacacttcatccatgttcctcctagtagttgcaggtagagaaatctagcttgatctacaacactcaccaattaatatgttagcctcactactgaaaaaggaaattaaaaagcagcactttcattaatttatttagt

SEQ ID NO: 104630 - DNA, 332 bp, Glycine max
gcatgcaagcttcttggaatttattgatctcagctcttgcttctcatggaaaatccaaggaggcgctatcactatttcagtgcatgtcaaatgagggtggaggtgcccatcctaatgatataacatttgtagggttgctttctgcttgtgtgcatgcaggccttgttaatgagggctatagattgtttgatatgatgagcacattgtttggattggtaccaaaaattgagcactactcttgtatggttgatcttttggctcgtgctggtcatttatacgaggcctgggatctaattgagaaaatgcccgaaaaaccagacaaggttacatta

SEQ ID NO: 104631 - DNA, 350 bp, Glycine max
gagccaaagtaactaattacagttaaatataaatcaataataattcttggaacaagacttataattagatataaatgaataaggtatgcataaagaggatattaataacggattgtatggggcatactcaaatttgttgaccacacatacttttctcgcttgacttatttactcacgtatagaatgtcaagggaagaagcatacctaacctttttatagcccataaatgggatgaattcatggtattgtgtacttctatcatagatattaaactcttaagttaattcgttaattattatgaggttacaaatatgttttatgtgaattgattatgggagaaattttgtttt

SEQ ID NO: 104632 - DNA, 328 bp, Glycine max
agcttgacacatttttgataacaagactaacttcatttgcttcttgtttgtgacaactttgttttcatccaaatgattttttgcatgagaatgttttaaataggaaaaaattaattttcatgagaaataaattttgaaaaaatatataatgcacaactaacctggtagaattgttgtctagaaattttcccaaattattataaagtgatatcataatatttagaaattttcttgcgaaaatactgttgtagggcaacaaaggaacaataattatgaaaaatagattcttgtaatttgtttggctcgagaaaagtatatgacatattat

SEQ ID NO: 104633 - DNA, 435 bp, Glycine max
  unsure (1)..(435): unsure at all n locations
agaactaaactngagaaattgcagtcctanaggttgttgatggataacaaatcagcaattgatttagctaaacatcctgtggcacatggcaagagtaaacatattgaaaccaagtttcatttcctgcgtgatcaagtgagtaaagagaagcttgaattgaagttttgcaggtctgaagatcaagttgcagacatattaactaagccattgaagtctatcaaattcaaggaattgagagacaagttaagagtgacatccttgacaaatttgaattaaggagggatgttgatctattctgtaattcagttagttagttaggagttagttagtttgacagttgtgaaggtagttatagttacatgtgcagtgtataaaaataatagtgatcatgaatgagatgatgagaatgcagaagttntattcagaattctaagt

SEQ ID NO: 104634 - DNA, 327 bp, Glycine max
agcttcaggttgctcattgactccagattgctgcaaggaaggacagagatctgtatggtgatctgcagaagaacataaaccataaactcttgcaacaggtgtagatttctgattcatggcaagctgagttactaggttgaccaaggcatcaagttttccttcaagctttttattttcagtagatgaagatgaatccgtggccacctcatggactcctctaagaacaataacatcatttcttgcactgaattgttgggagttggaagccatcttctcaatcaaattcctagcctcagcaggggtcatatcaccaagagttccaccact

SEQ ID NO: 104635 - DNA, 390 bp, Glycine max
  unsure (1)..(390): unsure at all n locations
ttctctctctaaaacctggttttgagactatctgaaagggtgccccacaaagggaacgaaggactctttaaataaaactcaatttttactgtttctacaatgtcggtaatgtttatcggaactattacaaaacttttacaaattacattaataagagggacagacaaattagttacaataattcatgattactacaactaattaatcgtngtctaacgatataccaaaacagtcatcttcattctggtagaatggatcatcttcttggtcatcgttagtctccggtgattcggcttccttcttgggaggttcttctttcgcttcctgttgaagtagttggagaacttctttgagattctgggcaagactctctttagattntgagcttgc

SEQ ID NO: 104636 - DNA, 327 bp, Glycine max
aagcttgaaatcttttacatcaactgtttaaaaaaggaaacattaatatatatatatatatatatagagagagagagagagaggaaggagcgggtatgatttaacatttatcctatttccgcttccttcatctttgctcaaaactctcaaatatattgtgcttttataattcctgccttactaaatattggaagtttttaataggaataggatattaagttacagacattttcttttttaaaaagagttagagacatttaattacctctccacattatagtaattcataagtagataaaagtttaaataaaagtagaaattaattaa

SEQ ID NO: 104637 - DNA, 379 bp, Glycine max
ttcctgaataagcagatataacacggatctatctaaccaggcacctcttcttcccactggttattgtgagagaaccacgctatttatctgaaacactagaggcttgccaaaacacattaaaaacaattacttattactacagaaaaactttcagcacatactcataactagcattacaaacctgaacactgagacacaaaagctccgcaagtctcttcaaaggaatactttcatagtattttgatataacaataatattctgataaggtaacaagaatacaccacattaatgctcacatcctaaatcaagaaatgtgaaaactgaaaaataagtcatattcacaaaatacctcccaagccaatggagggaaggaagggg

SEQ ID NO: 104638 - DNA, 416 bp, Glycine max
  unsure (1)..(416): unsure at all n locations
actccagcttgtgtaatcgattacacttatttggtaatcgattaccagtgactgtttcttaataaatcaaaagatataactcttcaaaagggttttgactttttcaaattggttntaaggttttctaaaagttataactcttctaaatggtcttcttggccagacatgaagagtctataaaagcaaggctttgatttgcttttcaagacacttattacacttattcatacaatcctttacaagccttgaatctctttgaacttcttcttcttctttgtaccaaaagctttctgaagttttctggttttccaaaccttgaaaacttgtgctattcatcttttcattctcctccccctttgccaaaaagaattcgccaaggactaaccgcctgaattctttttgtgtctctcttctcc

SEQ ID NO: 104639 - DNA, 321 bp, Glycine max
ttttgctttttgccactaccaaagaataacataacacaccaaatataaatttaaataaataacacaatatatattttaataacgaaagaaaaatttaaacaatatatatatatatatatgtaacacaaataataacataaaatatctaaaacaaataatattaatacctaaaacaaatatagcatacaaactttttaatacctaaaactaaaacagataatttaattatcaagcaacaggaaaaaaataaacacaacaaatattaactacttacctaagtttgagtttcgccaccaacacaaatgtaacaagccccaggaa

SEQ ID NO: 104640 - DNA, 396 bp, Glycine max
  unsure (1)..(396): unsure at all n locations
tgataagacattttggttttgagaggatacganaatttagttcagaacaactcttatgaattttgtgtcccaagtcacctatttataggcctttgatggtcattcaaaaatctcttgaacaaatgtgactcttgggagttattttctgaagagttgtgactcttggcttggatcaaacttgagaagcgcttatctntggcatcatcaaaacttcatatcatacatgcttctacattcttgacataacttgttgcttcaaagaatgtgaattgtcagatgtccaagatatacttcatgctcatcatggaagttgcatgaaatatcatattggagtgctagttaaaaaatctctcgtaaagattaaatgggatggtaaggtgacactacataacttta

SEQ ID NO: 104641 - DNA, 316 bp, Glycine max
tagcttatagaaacattcattggtccaacacacactcaacaaatagtcatcatccatccataattccaataaatcatgctcagtataatgcatgcatctgacctcaactctcaaatgcaatgtggtaccatccccaaggaaatagtttaagcgtgtccacacgacactctcacttaggaaaactaggcagtaagtgtcgaggtcaccctgtcatgcacaggcaactccccccgccacggtgatcagcctgagtctcaagggagttccaaactgagtgacatggccccaattacaaatattcctcctcatgagaaac

SEQ ID NO: 104642 - DNA, 441 bp, Glycine max
  unsure (1)..(441): unsure at all n locations
ngagatgaagaagtgtataagggtgaaacttcctgtttttatttgttgaccacagagtggtacttagagatatgtcgcgggggtcaggagaccttggggacgtcagggggggtgctattgcccaaaaccaagcttgaccaatcccgacccaacctgagcatagtcagtcagtgagaacctgtgatgtacctaaacaagcgagctcctggcaggtaatagataaaaggaactaagaccacaaagcaaggaggcttgtgtggtggctgaccagctgtgaaacttaattgatatgtgggttatggcctctggtaatcgattaccaagagtgggtaatcgattacaaggcttaaaaatgaagacaggaggctaagatagtctctggtaatcgattaccaaggggtgtaatcgattaccaggctttgaaacgagatcaggaagcta

SEQ ID NO: 104643 - DNA, 317 bp, Glycine max
ttatcttccatcaagtggtattatagcacaagagcttcaagtatgtgctccttaaacctccatatattttttgctttaccttctcttctattgttgtttcttcatttttctccatgtatctcctcacatgtcttgtgataaatgtttttaacatgattatttagagtttccactgattaaatttgctatagaagctagatttgattttctatggttcaaatttcttgttcttgttcttgaaccatgaattttgttgagtttaggttcctttgagttttgtcttgttattttttgtggctgaaaccgaaaccataaaa

SEQ ID NO: 104644 - DNA, 438 bp, Glycine max
  unsure (1)..(438): unsure at all n locations
tctcccncaattntctataaatagggggagaagtgtattggaaaagggttcagcccctgaggcacttctctctctttcgaatntgcttanaaaaattgtttccgtgaagaaaatccaagccgaggcgcttccgtaacgtttccgtgagtgatttcgcgaaggttttcgaccgttcttcgacgttcttcattcgntcttcatcgttctttggtcttcaacgggtaagtacctcggaccaagcttttcgattcattctatgtacccgtggtggtccacagagtgtttcgtgtattttccttctcgttttcatttactttccgtaccccttttgacgtgcttaagccattttatttaagtcatttctcgcttaacctanaaataaaataaatattcaccgatcgtttgaattgtattatccgttaacttcngttaaaatga

SEQ ID NO: 104645 - DNA, 315 bp, Glycine max
tagcttgactttggtttatacatgattgatacatgatttgggacttgtaggatttgatttgggcaagattggatgagaggaagggtgattttcgaaatctgcacttatgcagaattttgctgtcaaaataggtgcagcaggattttggcttggtgcagaaaaatgcttgtgtgtggttggctgtggaaagagtagtacagaatgtgttctggatgtttgctagtagatcccaacggtcacaatgtaggcttaagtactagagacttccagtaaaattttcgagtcgatccaacggttaacgaattggaacgaagg

SEQ ID NO: 104646 - DNA, 435 bp, Glycine max
  unsure (1)..(435): unsure at all n locations
cagacactaaacagaactactcaacaagctatatctttatatataaaattaaatatatttaatgttttgaaaatataaaaatgttaaataatttttacaaaataaataagaggatttaaaaaggaaacaattttagaagaatttaaaattattcttcacatacataatataggacttggtaaccggtatacgcactattttcctccaaaactaattttcttaagtcaaacaccttaaacttgtaagttgaagttttttgtgtccatgtgtggaaaaggataaaatgtaaaattaagttatcagcttatattgccaacttaatatttatcaataaaaaattaagttaactaacgttatatcttacaaaattctaattctcaaataaaaagtgattatatgtatgtatatntaattagtgcataaatactactatga

SEQ ID NO: 104647 - DNA, 325 bp, Glycine max
agcttcttttggaccttgaacaggcaactaactcctctttcagaaccatgctatgcgctcgcgactggtccctctcttcccttcgcagcttgagttcactattgctaccccacagagctccacgaaatttattccggccatactcttccttgcgagccctcttggtctcttgttcaagggctcttgcggtagttgcattctcttcccgtaacccggcacactccttccgaatgtgtgtagcggccaacttgaacttctccttggtaagtttcgcctttcctaactcgcttttgagagcttggacttcttcgtcctcttccggtgc

SEQ ID NO: 104648 - DNA, 430 bp, Glycine max
gctttgcgcacaagactagacgagttcaaagatgaatgttccaacatactttgggcttatcattgttcaccccaaacgacaactaaagagggggaaccattgacaagaagtctattttttcaagcatagaagaatgaagaaaacatgagggtggaattagagatgaaagatgaagtccaagagatggccataatcaaggaggaagctaccaagctccgagcaccaagaagatataataccaaggttcgatgttgagcctttcaatctagcaacctagtgtagcgagtaaaacctaaggttcatccttggtgagtcttgctaaaccctagacgaacacatccctggtcaaatttataaaggcttgtaaaacccaaggtccacccttggtgagtctcaccaaacccatgatgaacgcattcttggtcgaatc

SEQ ID NO: 104649 - DNA, 297 bp, Glycine max
agcttgcatcatgtgatatcaagagcgtcttcatctaggtgaggctcttttgcttcctctatcttttcggtcggcgaattctctttaattccttgctcttcatcttatcctccatgtatatactccattgtcttggggatcggcgctgtctacagtagattccaaaaaaaacaaattaaccgattgaatcttatatctatacttgtgcttgcatttctatggctcaaattttgtacatctactcttgaatcatgtttttgtgtggatatgcgggtctatcatttgtcattcataata

SEQ ID NO: 104650 - DNA, 306 bp, Glycine max
atctttattgtcgatttattcactggttatacccccctttgacgagcgtaagccgttttatttaagtcatttctcgctggaactaacaatggaataaagttcctccgatccgttgaagttgattgttccgtaacttcgagttgagatgaaatttggaccgttcggacgtgccgtaaccacgtttgaggtggaagacagaggtgaaagtataatataggaatgaaaaagtatcttttagtgagattaagcggaatatcaatcggacgtgtttctctttgggatctctcagcttttatcgaatagact

SEQ ID NO: 104651 - DNA, 312 bp, Glycine max
cctgtttcatgcaagcttgtataatggtcagacatgatacatgtcagggtttggtttggttcaagggtaaaagggatgccccacattatttccatgacacaaatgcaaaaatgatgatttggaaactttatgcaaaactggtcatgcatgcacctatgtggacactcaagtgtcaaatttttatgctcatgtgatgctagggctcaagattcattccctctattttagtcaacccaatgtttccaaaatatgttcttttatccatttgtgcattcatccgagtccattttgggcgttcggggaaatttcact

SEQ ID NO: 104652 - DNA, 369 bp, Glycine max
gtcaccgctttaagagcgcggtacaccagcagcgctttcaagccatcaaggggtggtcgtttctccgggagcgacgcgtccagctcatggacgacgagtatactgatttccaggaggaaataaggcgccggcggtgggcaccactggttactcccatggccaagtttgatccaaaaatagtccttgagttttatgccaatgcttggccaacagaggagggcgtgcgtgacatgagatcctgggttaggggtcagtggatcccgttcgatgccgacgctatcggccagctcctgggatatccgttggtgttagaagagggccaggagtgcgagtatggccagaggaggaaccggtctgatgggttcgatg

SEQ ID NO: 104653 - DNA, 331 bp, Glycine max
agcttgaaagagtttggatagtccaagagaatttcaagtccatatccatcaaagtctgaaaagagtatgatgaactaagggacgtcaatatggccacaggtgaagccttggaacgagaaaccaagaacgctcgaaaggaagaacacgaccaaagcaaagttttgaggggtctttatagcggcagcatatagatgagctcaagctccgaataggtgaaaggaatcatgatgggtcagaggcatgatcttgaaagacgagctaaaggtttgccttaggtcgaaaataaatttgtgccaacagttaggcgagactgaagggaatatgtgggcca

SEQ ID NO: 104654 - DNA, 363 bp, Glycine max
ttacacctgctggcgtctcagatcgcactacaatcattcgtataaaatagattacaaaagctttgttttgaccttccaccaagtatcataggtatcattctacaaatatgctcaacaataagaaagacagcatcatggaataactgtgaatagagataagtaacaatttaccagcggtgtgtacaatgactagacatgaatatgaacccactaatgagagtcgccatgaaaaacgctagctaggtttatattctagaagtcagattatggtgagatgatctatcgagaaaatactcttgcccctgatggaataaacttctccataagcacttgtaggcgaaaaaaaataataagggtaaatga

SEQ ID NO: 104655 - DNA, 327 bp, Glycine max
agcttgaaagagctttgatagtcaaagataagttcaagtccatagccatcaaagtctgaaaagagtatgatgaactaagggacgtcaatatggccacagctgaagccttggaacgagaaaccaagaaggctcgaaaggaagaacacgaccaaagcagagttttgaggggctttatagggcagcaatagtgagctcaagctccgaagaggtgaaaggaatcatcatgggtcaaaggcatgatcttgaaggacgagctaaaggtttgccttaggtcgaaaataaatttgtcccaacagttaggcgagactgaagggaatatgtgggcca

SEQ ID NO: 104656 - DNA, 444 bp, Glycine max
tacacgagaatgagattggagtttcctcctaaataactgccgaataacacctccagccatctcagttcacactacaatcattcatataaaatagattacaaaagtaaataaatacctccaaccaagtatcatagatatcattctacaaatatgcacaacaataagaaagacagcatcatcaaataagtgtgaatagagataagtaaaaatttaccaacggtttctacaatgacaaaacatgaaaatgaacccaaaaatgaaaattgccaagaaaaatgctagtaagttttatattttagaatttagattatggtaagatgatctatcaagaaaatacttttgcccctgattgaataaacttctccataagcacttgtagggcgaaaaaaataataaggtaaatgaattaagtttctcccataagtcaaaatcaactcatgcata

SEQ ID NO: 104657 - DNA, 326 bp, Glycine max
agcttgcttctacactatctctacaggaagatgacatgccttgccaaagacaacccgataaggggacatccctatgggtgccttatgggcagtcctatgcgcccaaagagcatcatctagcctggtgctccaatcctttctgttaggctacactatcttctccaagatcctttttatctcccagtttgaaatctcagcctacccattggtttgagggtggtaaggtgtggaaattctatgaacaaccccatactttttgagcaaggcatacattgatttgttgcaaaagtgggtgcttgatcactaacgatggctttagggattcc

SEQ ID NO: 104658 - DNA, 152 bp, Glycine max
cttcattaaaaaagattcctaaagaagctaaagcttagctacacacacctctctaatagctaagttcacctccttgagatgagaagctagagcttaactacacaccccctataatagctaagctcacccccatgacaaaaaacatgaaaata

SEQ ID NO: 104659 - DNA, 328 bp, Glycine max
agcttatagaccatattgagaaaaaagtttgccaccttatgtgctgtgtaatggttagggagggcacccaagtgggctcccttggtaaagcgatatactactaccaggatggcaatatatccctatgaagaagggaggccagtaatgaaatccagtgatagatcttgccacagagaagttgtaatgggcaatggttagagtaagcccgcaggtctcttagtctcatattttacttgttggcaagtggtgcacaggcatatgaattgtttgacattcgcacgcatattggcccagtagaatttcgtatgcactcgatgaagggtttttg

SEQ ID NO: 104660 - DNA, 359 bp, Glycine max
  unsure (1)..(359): unsure at all n locations
acgacgatcgggatgcagatcgcgtctatccagcgttgatgttgggaagttagatcaaccctttcactacttcatccatcgaaggctgctctctcttgggttcttggngtgagaacattcgatgaaggcttggatactgttcatgagtattttcagctgcaaaccaaaggttgagcgcgccagtttcgcaccaatctgcggtctgttcagctcgaacgaaatcgatgcgcgagtatntnactcagatcaaggtgatttctgatgtgctcacccggtgttgctgtccggtgaaacatgaagattatgttgatgtgctacttgtgaaacttccttatgattatgcaccggtcattgcaatc

SEQ ID NO: 104661 - DNA, 329 bp, Glycine max
  unsure (1)..(329): unsure at all n locations
agcttgagactgattctgactacagaaaaagacataaaggaaagaacacggacaaattaataaaaactaaaacatgagtttggtaataatcaagttccttaaactcaaagaacccaaaaaaaaaagttccttatgctccacacaacagaaaggaaaagccgttttcttagtggacagtatgattgctatgataattatatgttgaaaaaatatatggatttatgttggaaatgcatgcatgaatattatatgtaatgtgtataaaatagaatagactatatccatntataatcctaagatttgaaagcaaaaagtatgagaactataaa

SEQ ID NO: 104662 - DNA, 458 bp, Glycine max
  unsure (1)..(458): unsure at all n locations
ctgagaagatacactnttagtctttcaacaagagattgtggtgacacaaattctttttcctctaatgaacattgtcattgacttcttgatgcaanttaccatgcttctcctccagcccctgctcaaagtggtggtggatctatgcttggtggcattggttcaaccatagctcaaggtatgtgaaggaagatgaatgttacattttccttatggaatcctgtgtaagaaaaattttcatcttatctggtttctattgggtttttttttcaagtatggcttttggcaccggaagtgcagtggcacacagggctgtggatgcagtcatgggtcctcgtaccattcaacatgaaacagttgttacagaggctgctgctgctgcccctgcacccactgcaaatacttttggtggcgatgcatgcagcattcatacaaaggcattccaggatgtatgttattct

SEQ ID NO: 104663 - DNA, 319 bp, Glycine max
  unsure (1)..(319): unsure at all n locations
ttagcttttctttcataatcagnctgtctagtgactaaccattctattataagttcacactcttgttctttctttgatcaacatgcgcatttgctcaaactcatgaaaaggaacacaaattccatcaaaatcatgcattcaattctaaatgaaagcatacacccatattcataagtcaataaaagtgcttcacagccatgtcatcaaaacaagttaaactgttcaaaatacttcagaataagcaaactaactacccataaagaaactagcaatgtatataaatataaaggaaatattgtactaaaactataattataat

SEQ ID NO: 104664 - DNA, 411 bp, Glycine max
atcattatgcattgactatgaatggcaatcccatatttaatttattccctttatgtaagcctacttttgggacacaatactcagcacttgtagtgctatatagatttataggtgttattaatcttgtggttagattatatactatttttgctatgacaggttaaaagagagaataactactttcattgttattaatttggctttaattgtatgtgcggattacatgaattagcaccattagtcaaatatggtcaattttgatttttgaatcagtaccaaatatgtacgtaggtatggatttcgagaatttatagcttaatgcgggtactcatgtaaaagaaatgttgtttattttactatcaacttattaacaacgtgggataacaaaataaaatatgttaaatatatttt

SEQ ID NO: 104665 - DNA, 315 bp, Glycine max
agcttcggaagatagtgatgaggtacaagccctaaaggcagagcttgaaagagcccgagtagtcgaagagaagttcaagtccatagccatcaaagtctgaaaagagtatgatgaactaagggacgtcaatatggccaccgctgaagccttggaacgagaaaccaagaaggcccgaaaggaagaacacgtgccagcaaagttttgaggggctttatagggcagcaatagtaagctcaagctccgaagaggtgaaaggaatcatcaagggtcaaaggcatgatcttgaaagacgagctaaaggcttaccttaggtcg

SEQ ID NO: 104666 - DNA, 444 bp, Glycine max
  unsure (1)..(444): unsure at all n locations
tcagaccaaagcgactcanaatctaggcatctaaaacccctcaatttagtggattttcaaggtttgagaagtgaaaatgagaatggngtaaatttagagtaaactctcacctcacacaagtctataacattgatttaaacttgctcaaactgattttacgcctcaaattccaccgaatcaaaatttgactcctcaacacccaattttaccctaggaatggctcttgccttcactttggtcatttgtttttctctcttgcacagtccaagctttctcataagtcctaaatgacatttcaaactaggatttactcactttaacctccatttaccactgaatcccggtttagccttccaactctcaaagcctcactctttttctactcataacactacattctcactttctaaccctangntaactctacccttcatccctaacaat

SEQ ID NO: 104667 - DNA, 316 bp, Glycine max
agctttggtccattcgttacttgtgggaagatcaactttgaatttggatgaggtgactatcgctcttagagaaaatgaaagaatcatgagaacttaaaatgttgatgatgaacataattcaatagctatggtggagtctgagcgggggagaaatcattcaaggagacatgatgagccaagagaaagatcaaaatcgcaatcgcgtccgcaacgagatatgagtaacatacaatgttactattgcagtgagaatggtcatatgcaagtgaggtgcaaaaaaataatggaggacttgaagaaattaaaagatatgaac

SEQ ID NO: 104668 - DNA, 385 bp, Glycine max
  unsure (1)..(385): unsure at all n locations
tatttcctgtcccgagactccatggntgtaaagctgtgaatacaatcatgatgatctgattcatgttgaaggcctatagatttcgcaagaagtcattgctgcatagcctcttccaagtcttcaagagagttttcttctgtattcttgaacccctcaaaagcctctaaagtcctgttgtttgggcctttacaagaggaatcatttaaaccacccagacccttgtcctcccttagcgagatatcttcttctactacaggctcaagaggggcagctttagatgggccatgtctttgtctaacatagactttagagaacaaatcagagctcccttttgatgtctgagccgaagttgggtggttttcctttttacacccctccatcttca

SEQ ID NO: 104669 - DNA, 315 bp, Glycine max
agcttcaaaacaatgatccaaatcataacagccactagaacaacaaaatattggctgctcaaattcagcagtatagccccccagcaagctattcttgcgattcatggtgccattcaagcaccaaaacaatttactcaacgattttgttaggatataagaagggagagctagttaagatagttagactattaatgaattagttagttagtgagaggggtttattagatataaataggggaagaaggataggagagggggagattttttgtcattgtaaattgagcattagctctttgtgaaaggagaaatcctttg

SEQ ID NO: 104670 - DNA, 386 bp, Glycine max
  unsure (1)..(386): unsure at all n locations
aggatacatgtttccttttgaccctacctccactctntatcatgtaagactctgaagtcaacaggtttgccttttaatgtgtatgaacaaaactaaaagcttnttctgaatgtacctttcaacaaaaatgtttaagatgatgtagattctttnatacccttttaagatcttcatgtatcgctcaattgggtacatccacccaaataaacaagaccacacatttaatttncctcaccagatgaaaaattaagtgaaccatgatgtcgaaaaatgaaggaggaaaatacatctctaactgacacaagataatagcagtcttgttttccagctcatctaacttgagaggatcaatgactttgctacatatggcattgaagaaaaagcat

SEQ ID NO: 104671 - DNA, 316 bp, Glycine max
agcttggacttcctatgttctgggaacctctctttcctcaggtgtacccaaacccaatcacctggttcaagcacgactttctttatgcttttgttggcttgccttgcatagctcgcattttcttttcaatttcagccttcacttgctcatgcagcttcttcacatactcagctttagcctgtgcgtccttatgcttaaacatagcaatgttaggcataggaaacaaatcaagaggagtcaaaggattaaatccatacactatctcaaatggtgaacaattagttgtgctatggacaacccgattataagcaaactc

SEQ ID NO: 104672 - DNA, 298 bp, Glycine max
agcttgaagtgaataggatatgatttttgtttgctttggaataggaacgtaatagaaaagttaaaaggaaatggaaacctaataggaaaaggaaacgttaataggaatacgaaagccaataaaaataatgaggaatgtgaagggtcacatgactcacacctaaattataattaaagtcttacttgattataggaatgaaagttatggaacaatgtgtaatcaaagtctgctagtttcaaaaaaaaatattaattgtacccaaaaaataatataagtatatatacatatatataggccg

SEQ ID NO: 104673 - DNA, 431 bp, Glycine max
acacatgctcaccattttgatttgctgatttacccactccaacccaccagagaattatattacttttcttcataacagcattttcagggaaatgtaagaaagacaacaagccacgttttccaacatgatcaagtttgttacaatttacctcaatcatcttcaactcctcacgttgtaggctcgaagggagctttcttgatgactgagaatcctctatattagtactttggatttcaccatcaggcagcaacgtttgagttgattctcttattctcttgcgaatgtgtccctcctcttttgtcaacttatttatgtttttgttgcgaagatagccatccacgactgctaatgtgtcaaggagttcttcttcattcttcttcactaacgaaaacaggtcctgtatcctaatcaactcagacttcaaattattc

SEQ ID NO: 104674 - DNA, 298 bp, Glycine max
agcttcgttcactatctcaaaacctatgtcagtcaattttcctacatccttgccttttcttctttgcctcattatttttcgttgtcctgaatctgattctctatgtcctcttctttctggaaattaatactcacactaattaatcaaattagccctaattacctctttgttctatttaatcacttatctaagtctttgtatctgcacaattttttaattctttttttacattttttagattttagttttactcattttagtccctgcccgtctatttttaatctagttttagaaacta

SEQ ID NO: 104675 - DNA, 349 bp, Glycine max
  unsure (1)..(349): unsure at all n locations
catggtgacgagatttacattttgtttttgagcccaagagattggtgtggttaaaaattggaaacataacccagagnggnntttnntatnatnnttattaacacaccaatctgaatcactataaccaataacttctccttctatattcttctgactggtaggatataanatgccaagatccaatgttcctttcacataccttagaatcctctttgctgctaggaagtgagggggnttttggtttctccatanacctgcttatcaacccaacacaataagcaatgtcaagcctggtgttacatatgtacctcagtgagcctacaatttgcttgtacaaggtaggatcaac

SEQ ID NO: 104676 - DNA, 331 bp, Glycine max
gcaagcttttccgaacacccaagatagactcggctgaatgcacaaattgataaaagaacatattttggaaacactgggttgactaaaatagagagaatgaattatgagccctagcatcacatgaccaaaattttttcgacacttgagtatccacataggtgcatgcatgacttgttttgcataaaatttccaaatcatcattgttgcatttgtgtcatggaaataatgtgggacattcccttttatcgttgaaccataccaacaccctgacatatatcatgtccatccgttctacaagccataagccaaagtcccaactcaccataaacct

SEQ ID NO: 104677 - DNA, 387 bp, Glycine max
ctcctctttcagaaccatgctatgtgctcgcgactggtccctttctttccttcgcaacttgagttcattattgctaccccatagagctccgcgaaatttgttccggccatactcttccttgcgagccctcttggtctcttgttcaagggctcttgcggtaattgcattctcttcccgtaacccggcacactccttccgaacgtgtgtagcagccaacttgaacttctccttggcgagttttgcctttcctaactcgcttttgagagcttggacttcttcgtcctcttccggtgcttcaaaattctcttcgctgacgacttttaacttggcgagccaatctaaacctcgtatgcgaactttcagccattcgtggtacccaccaatgat

SEQ ID NO: 104678 - DNA, 348 bp, Glycine max
agtctacctgcatgcatgtcgagctttgcacagctcttcaacccttctttcttcttcaagttataattgggtgtaagtccttgttaactcaatcagtctccatcgctcacacactcttccagtaaagtcactaattgtttcagaaagatttctttaaacaataatcccaccattagtgagattcttggatagtaaaaataatgagacgagcgtataaccaaggagcggagaataacaagtcaaatccttggcttggtagtatatggatgtgtttgatacgcgttctggcgtttctttgggggttgacacatcttaacatctctaccttcattcaaagtcgtcacgtca

SEQ ID NO: 104679 - DNA, 462 bp, Glycine max
  unsure (1)..(462): unsure at all n locations
gaccttgaaactccgctttatgaaattttcactggtgatcgattacaggtttttgattatcgattacacaggtaaattttgaagggtcataacctttgaacttggatctcaagagtttcgttgctgggtaccgattacaggttgccacacctaatcctaaaacctttgtaatagctatttttcaaaattggcttatggtaatcgattatgttggatcaagtggcctcagaataattaagaagggggggttgaattaattattcctaaacctttactaattaaaaatttactcttctaaggcttttacttatgttgttaagagaataaggagtagaagagaaacttaacagaaagtaaaagcggaaattaaatgcacatcggaaattaaaatagtacggaagaaggagacaaacacacacgagttnttatactgggtcagcaacaacccgtgcctacatccag

SEQ ID NO: 104680 - DNA, 327 bp, Glycine max
agcttccaaattattgtaccacactactgcagctccggccaggctatcctgaaagaagtgtatcaacagcttttcatctttagaatgggcgcccatcttacggcagtacattttgaggtggtttttgggacaagtcgtccctttatacttgtcgaagtccggcactttgaacttcgggggaataacaacatcgggtactaagcaaagatccgtcatgtctgcaaatggatagtccccaaatccttccacagccctcaatctttcctcaaggagatcgagcttcctcctttcttcagttgccgggggcggcccttccatagacaaaac

SEQ ID NO: 104681 - DNA, 305 bp, Glycine max
ggggagcaaggctcgacattctttgatattcctcctgcgaatactaccttgtttattttttgaaatcctctaactaaaaaacacaagccccctatacactcatccaaaaaatgattatgaaaggcggcatgaacaaagaagcgatctttggccttaaaaacaatggttcctttggagtctgttaactccgaaaactaatgataagcccgcaccgctcatcaatagggaacgagcgggctgacccgcttgatcgggctaacaaaacacgcggtcgtcaaggttatccacactatcttatgccgctc

SEQ ID NO: 104682 - DNA, 329 bp, Glycine max
agctttattcaagtacaaagaaattaattatattcaaaatggatgatcaagacagtctctagagtcttaggaagggtatattaaataggaagggaattccaattgaagtaccaaaaggtttagccaagaaatttaaattaaaaagttttttcaagagatttactctctggtaatcgattaccagaggatgtaatcgattaccagtggccaaaaatgatttacaacagctattaaaatttgaattcaaaatttgcactgtaatcgattacacatatatggtaatcgattaccaacagttactgaacgttttaattcaaattttaaagctt

SEQ ID NO: 104683 - DNA, 431 bp, Glycine max
agcctagatagaagtaataaagttggttttgcatttatctccttctaaaagcaagtgtgatgccttgtttatagtttcatttccttcatatataatgctaattatatgtgatgccttgatttatatccttgctaacaaattaaagagtataagatagttggtaataatcttctttacttttctattctactcttttcttttctttttggttagttgttgcttgattttgagttgtgacttgaaatatttagattttatatatgattgcttgtgataattttattattttaataaattcagattttgtggtagcatatttttatgataaatagacaatgttgcctttctatcacatcactactttgtcaagtttttggtgttaagtcattggaatttgactgatgattttgattattctttatgatctaatt

SEQ ID NO: 104684 - DNA, 312 bp, Glycine max
ttgcttgttagcattctctttaattgttttgaactccttcattttctgcatcttaaattctctaacctgatttagggcttgcgttcctttaatcctttcatctccttcatatttattatggaggaaactccatatttcatatgtcgatttgatggtcatgattctagtgaaaatttcttttgagacaacaacaaacaaagttgcttttgtctttgactttcttgctttcatttcttttttattttttatctgagccattgttggattagttggtaagggaagaacttcgtagtcttcctcaacagcttccca

SEQ ID NO: 104685 - DNA, 438 bp, Glycine max
tcttcctatggctacggccataggtgtcttgatatctgctcctatacccgggctcaaatatggctctgtcaccacaaccacatgcatacatattattgcgttaaaggtaaaagaaatgcatgggcccacttatcattgagtgttggataacaaacgtttgcttctaaggctccatgatgataacataacaatttcttccaacctacagaagtaaacattttcgaggccactctataaatcataaattattctttttcatagttcttaaaggaaattagatgttacttcaacatcttccataagaacaaagagaccaaacattgacaattcgtactgtctgggctcccttttagttcttcaaacattttcgattcatttagtatgttaaaagccaaaacgcccaaatcaatagtggaggctgagcgcctcttccaccac

SEQ ID NO: 104686 - DNA, 316 bp, Glycine max
tgctagaattattttttatttaaaaattttttgtgtgtcgaaaagctttttaggcctcgttctcatgtttgggccatcttctgcattttctggtaatgggttcaattaaatgggcaatgagtgtcccattacccacagttggcaatatgggtgaatagtctcgcatcacccaatagcccagccctcacggcttaactagttcacttcaaattgctatgcacgttatattcgtttaaaaatttcagcccaaacttgcaaataatcattataatttatataatcgcttacctaattactgtaactgaaatcattattt

SEQ ID NO: 104687 - DNA, 456 bp, Glycine max
  unsure (1)..(456): unsure at all n locations
gaacatcaatctcagctttctggngtagataacatgagcctgatcgatcttattctttatcctcacatctcctaacaggcgaccagatacctccctctttctttaatgtggcttaccaaagaatagccttccttcttctaagtctgcatggaaataccctactcccaagttccaacaaatttcattcaatcgcacctttatttcactgatcatttggagaaaaaaaagaagaaatttagtgtgaatttcaaaaatgaaaagggatgaggttacactcatattactaatgtccaattttttcttaatccatgtaactaatggtgaaagttgaaatagaacagcgtagtggtttggtataacaattaaagggtaaggattcttaagaaaagtggggaatacagagcgatatccctttattactattatagattttacaaccaaaaatagaattggaat

SEQ ID NO: 104688 - DNA, 318 bp, Glycine max
ttagcttccatcaacttttgtaccaggggaagggaagcactaactcactatctactttaccatcgagaagagctaccaaatgacaaaaaaggtggcactagcactcatcacctcggcacaacgacttaggccctacttctagagtcattaagtggtagtcaagatgaactaccctatcaaataggttttgagtattcctaaactcgcaggaaggatggtagcctggtctatcgaactgtcggagttcaacattcactatgaaccacacggccccatgaagacacaatttatggctaactttctagcagaatttgctgg

SEQ ID NO: 104689 - DNA, 312 bp, Glycine max
tgatattggaagagggccaactgtgcgaacacaaccagagagggaggctatcacacagctattatgcataccggagcaagatttcacccgggccactgcaaagagacgagtgtggatcatgcgcaccaacatgaccactcttacacatatataaatgacgttgttacttaacaacattctgccaagtgatcgtaatgccaatctccccctgcagatgtatcggttggtctgtgtcgtcatgacatacgtaagtatgcacatggttcaattgatttctgatgtcatctactggttgcagggatcgcacccaca

SEQ ID NO: 104690 - DNA, 314 bp, Glycine max
tagctttgatgcattatatggagaggttaatgaaacaacgagatgatgcgctccacgagaggttggatcaaatggagaatagagatcataatgaagaagaaaggaggagaagagggaatgatggtgttcctagacaaaaccgaattgatggtattaaactcaacattcctccatttaaaggaaagaatgatccggaggcctacttggagtgggagatgaaaatagagcatgttttctcatgccacaactatgaggaggaccagaaggtgaagcttgccgccacggagttttccgactatgctcttgtgtggggg

SEQ ID NO: 104691 - DNA, 242 bp, Glycine max
  unsure (1)..(242): unsure at all n locations
aaacgggggagattatgaaaaacgcccggcgaaaaaaagggggaaagaggaaggaaggaagaggaaaaaagagagaattaaaggaaaaggagaggagcgaagagacnccataaaataagaaaatattgaggatgataaaagaatattagatgacgtaaaagtggaggaatttgtgagaattgtgaaatttttaaaagtggggaaaaggtttaggggagaagattttgtggggagagaaatta

SEQ ID NO: 104692 - DNA, 319 bp, Glycine max
tagcttctcacagtttatttttctcaaacttgagttttggaagaccaattactaagtcttttctaactagatgattaagataatgcatgttaatgtgtgtagccctacgatgccacaaccaagaatcatctatattacttaccaaacaactcagctcatgaaatgatgcatgttcaacatttagcatatagaccttacctattctcttgccaatgtggacagctttatcagatatggctccacttataagacaatagttcttgttgaacttaattttgaagcctttttgacaaagttggctactgtttggaaggttatg

SEQ ID NO: 104693 - DNA, 319 bp, Glycine max
tttgagccttggttccctttccttggtttgaagctcactacaagccttaagtgaaaaaccatgatattaccatatccttaaggaattttggagctttggaattgttctgggaataaaagtgggggggttttgtttcattggacaacttgttttgttggctatgcttcatgatgtatattgggccatacttgatgtacattgtatattggttaaatgttggacatgctgaaagaaatgttgtttctcaaaggccaaagagtttaagttcatgtgtcatataataaccagaaatgtgatgatcgcctaaagttgagtgaat

SEQ ID NO: 104694 - DNA, 297 bp, Glycine max
agctttcaaatgattttacaacgttccaattgatttcaaaaaagctgtaatcgattacaatgttttggtaatcgattaccaatgcctttgaacgttgaaattcaaattcaaatgtgaagagtcacatcctttcactaaaagctttgtgtaatcaattacattgatttggtaatcgattaccaatggttgtttctgaataaatcaaaagacgtaactcttcaaatggtttttgactttttcaaattggttttgagtttttctaaaagttataactcttcaaaatggctctcttgatca

SEQ ID NO: 104695 - DNA, 392 bp, Glycine max
  unsure (1)..(392): unsure at all n locations
tcaaggataacaaggatgccccacattatttccataacacaaatgcaaaaatgatgatttggaaattttatgcaaaactggtcatgcatgcacctatgtggacgctcaagtgtcaaaatttcatggtcatgtgatgctagggctcacgattcatttcctctattttaaatcaacccaatgtttccaaaatatgttcttttatcaatntgtgcattcatccaagtccatttcgggcgtccggggaaattttcacagcattcacccttcaggtgtagacacgttttttttttcaaaaatcggttatgatcaatgattttttttcacaaaaaagttggaaatcatctctttttcaaagcatgtcggtttttaactagacaacttattttcttttt

SEQ ID NO: 104696 - DNA, 298 bp, Glycine max
agcttgtacttggatggattttcacgataatgcccccacccacatgtcaacatttaaccttcgtactctgctgaatcttgaaaagttttggtatggaacatttatctacttattttataaaaaaaaaaaggttttaactaatatatcacatgaaaactcagcaaagcaaaccaaaatcttaataattatattttgtccaagattagactgaaatttaagcatatgctgcatacatcaaaaaaagcatgttgctacagtggcaatgtcttaaaaaagtttcaaccactcacaacgcaat

SEQ ID NO: 104697 - DNA, 334 bp, Glycine max
  unsure (1)..(334): unsure at all n locations
gaatgtgcttagagagtttttttggtactggaaagaaagctttcgttgtttttcttacccataaaggttaccaaaaatctttattttttattgctgaagttattggtttagttgcttttgatttgtagaacaaggtccagcaaccatatacttttagttttggcctaaattatacaggaggacacgcaaatagtttntaattgttcttccttgagttatatggtttactgatcaaaggctaacaaatatattttatgccttttggccatatattatgatatacgtaacaacctaatttagctatttagaaaatgcggaatttcggagttttgaa

SEQ ID NO: 104698 - DNA, 321 bp, Glycine max
agcttgaaccaaattcggtgagactgtgaccttactctgtgagtgaacgactaactgtgagtaatgatctttgcatgaatctctgaattctagaatgatatgtataacttagaacatgatgaaggccatgatttgtatatacacaagctcttttgaccaaatagctcaccttgaatgataactgtatcctttgctcccttttttgagctgaatgatattgtcaaaaatttgaaccctgaacttaaataaatatctcctgataccttgcttagattctaggagagcatatggttcaaggaaaatttactctaaatttggggg

SEQ ID NO: 104699 - DNA, 457 bp, Glycine max
  unsure (1)..(457): unsure at all n locations
actccgcttaagacttagtcttcatgttgctacccctatctctaacaatctccccctctttagcttggatgatgccaaacttgaattgccatttgagtgcatttggagagtcttaaaggtaaaggcttttcttatacaaacctgaaagtttcttaacactaagagaagcatcaattcatatcatcatcatcattaagtagagttatatatgaatgtatattctaatccaatgctaatgcaatttcttttttttttttctttatccccctacataatgctaatgcaatacactatgctaatgcaatgcactatgctaatgcaatttttctcccccttttggcacaacaaggccaaaaagttattactattcctagaataanaacaaacaagcatataatgtgaaaagggaaaatatcatgggcttttattcatataagagccattacaacttaaacat

SEQ ID NO: 104700 - DNA, 321 bp, Glycine max
  unsure (1)..(321): unsure at all n locations
tgaacccaaaccggggagactgtgaccttactctgggagtgaacgactaactgtgagtaatgatctttgcatgaatctctgaattctaaaatgatatgtataacttanaacatgatgaaggccatgatttgtatatacacaagctcttttgaccaaatagctcaccttgaatgataactgtatcctttgctcccttttttgagctgaatgatattgtcaaaaatttgaaccctgaacttaaataaatatctcctgataccttgcttagattctaggagagcatatggttcaaggaaaatttactctaaatttgggggagga

SEQ ID NO: 104701 - DNA, 409 bp, Glycine max
  unsure (1)..(409): unsure at all n locations
ctaagcttacactagtttatgtgctcccatcttacatctcccttttactggagagccaacttaattgcctttgagtgcatttggagagtcttaaaggtaaaggctcttcttaaacaaacctgaaagtttcttaacactaagaaaagcatcaattcatatcatcatcatcattaagtagagttatatatgaatgtatattctaatccaatgctaatgcaatttcttttttntttttctttatccccctacataatgctaatgcaatacactatgctaatgcaatgcactatgctaatgcaatttttctcccccttttggcacaacaaggccaaaaagttattactattcatagaaataaaacaaacaaacatataatgtgaaaagggaaaatatcatggccttttattca

SEQ ID NO: 104702 - DNA, 307 bp, Glycine max
gcaagcagctttgacaatttttccacacgcttttgcgcgtccatagcaaaatcttcaatgaactcacatatagaaaaccaggtaacggaccccgtcaatataaaggcatgggacatgttccatgttccaacgtacaacccggagctgaaaagcaaagagttgaaacgccctcctgggaaggaaacgtaaagaataacgcacaaccaggaaataacacttattcgtgcacacgaacggcggggggaagaagcaaatagacgaaggaattggcccatgcgcggtgaaaaaacagaagggcacaaccgcg

SEQ ID NO: 104703 - DNA, 326 bp, Glycine max
agctttttggctaagtggatgtttcaatcaatcatggccttcatcatcttcaactcaggcattcattccataatcagaatgtcatgcaaaaatcattactcgatgctagtcattctctcacaattaaagatcacacactcaccgggttgtggctaatgattaccttcagaatcaatctgtcaaactaactaacattttcagtcatgatcctaatccatgttctttctcttctaatcgttgcatgctcattcaaagcatataatctatgcattacacttcactcaaatcatgcaatcgatcatttcaaaccattcaacaaacacgga

SEQ ID NO: 104704 - DNA, 428 bp, Glycine max
  unsure (1)..(428): unsure at all n locations
ctgccccttttnctataatagggagaggagggattaacattatcatttaaccctcctggtatctgaggatcacttgaaattagtgaaaaaatcgttttcgtgaagaaaatccaagccgaggcgcttccgtaacgtgtccgaaacatttccgtgggtgattttgtgaacattttcctccgtctttcgttcgttcttcggtcttcaaccggtaagttcccagaatggaacttttcaattcattctatgcacccttggtggtccccacttgtttcgtgtacttttattttcatttcatttacttttcgtaccccttggtgacgtgctttagtcatttatttaagtcattttctcgcctaatcaaaaaataaaatatatttacactgatcatttgaattgtaacatctgttaatttctgttaaaatgaaatc

SEQ ID NO: 104705 - DNA, 326 bp, Glycine max
agcttgtcacttgtaagcatagtcgatttatctattctgagcttgttatgaactcatcagaacacttgctattttttgctctttgtatatatttcatttgtggatatgttggattgtataattttcctctgtatctgatgtagatggaaatccattgaatgttcttcttataggaatactttgatgagatgacatgacaaacttgtattcctaacattctggtgagagcttgttatagcatgttatgtttgctactactttttatttctttgaccctttgaatggccaaaatagattttgatgtcttcatgaaatttgtagataat

SEQ ID NO: 104706 - DNA, 451 bp, Glycine max
  unsure (1)..(451): unsure at all n locations
acccatggaagctcctaatatctcctacacttnttgttgtgggccattcttggatggacttgattttctcatggtccacttggaccccatttctaccaactataaatcttaagaaaactatattatctacacaaaaggtacacttctctatattggcgtaaagagtgtttttcctaagaactgaaagaacttgtcttggatgtcctaagtgctcatttaagctcttactgtacactaaaatatcatcaaattaaaaaactacaaatctacctataaaatcccttaagacatgatgcataagcctcataaaggtgctgggtgcattagtgagcccaaaaggcatcactagccattcatacaaaccaaactttttcttgaaagcggttgttcactcatcaccctctttcattctgatttggtgataaccaacttttaagatcaatttttgaaa

SEQ ID NO: 104707 - DNA, 314 bp, Glycine max
  unsure (1)..(314): unsure at all n locations
ttagcttgtagntgctatcatgtgatgtgaacaaccttaagaatgcatgcatgtgttgaaatgattaagggttggggtagagtagataatcttatgtcttggaaattgtcatcatgatgctatgcgcatagttgcgtgctaagcgtgtatgtattggtgcaagagacacacttggcgcatgataactcgctaagcgcacataaactttggctaagcgcaaaaagccgtgcggagcccaaaaatctctatgcttggatgcatttcgaattgggcttataacaagatatccttgtaagcaccccaaaactttttgt

SEQ ID NO: 104708 - DNA, 413 bp, Glycine max
gaagttatggtaagatgttgtatgccattattgactaaaagtagagttccactggtaaaactaactttccaaaagtttgccttcgcatgaaatggccccaaggaaacttgccacatataggtccatgaaagacaaggcccccgaaggaactatttccgctccggagtatgacagacaccgcttaatgagcgctgtacaccatcagcgcttcaatgccatcaagggatggtcgtctctccgggagcgatgcgtacagcttacggacgacgaatatactgattttcacgaggaaatatggcgccggcggtgggcatcactggatacttccatggccaagattgatccagaaataatccttgagttctatgccaatgcttggacaacataggatggtgtgcgtgacatgagattct

SEQ ID NO: 104709 - DNA, 316 bp, Glycine max
agcttggagaggatgcttcaatggaggaaaagaaagagggagagaaagagagaggggggagcacgaaattgaaggaagaaaaagggagagaagttgaactttgagttgtgtctcacaagactctcattcatcaaagttacaacaagtgttacacatgcttctatttatagactaggtagcttccttgagaagctttcttgagaaaacttccttgagaagcttctttgagataacttccttgggaagctagagcttagctacacacacccctctcataactaagctcacctccttgagaagattcctaaagaagcta

SEQ ID NO: 104710 - DNA, 434 bp, Glycine max
  unsure (1)..(434): unsure at all n locations
tacttanagggaaaattatgtcattgtcatgcttaggaatatataaacttggaactagttagtgatcctagttgcctaaattgcttaaaagataaccaattctatgagggctgtgataacttttttgccatagtaatgtaaagtagctacaaggacaattccacttattttcaatcattgtcattgtatctatatctatataataaaagagaaggactatgaaatgcctattatgcccatgcttgaaattttgacatgtggcatttttgctggatttttggtcattttacccctccaactttgaccttagttntctaccacctggcttactggattgctttgttttgtgccatgtgtcttgctggcttgttgcaccttcattgctatttccatgtgtatttgtgcccaattccatttctctctctatttctttc

SEQ ID NO: 104711 - DNA, 312 bp, Glycine max
agcttgcttgagaagcttctatggaggctagatctttgagcttcaatgagttcctttaatggtgattttcaaccatagagatgcagcagaagataaaggagaaaaggtgaaaggagaaaccatccactagggaataagccatggaagcaagagcttcaccaccaagagggtgccttggataagaagcttagagaggaagcttcaatggaggaaaagaatgagagagagagaaggggggcacgaaattgaaggagaaaaagagggagacaagttgaactttgaagtgtgtctcacaagtttcacattcatcaa

SEQ ID NO: 104712 - DNA, 410 bp, Glycine max
cggagactttcatgttatctatcatcgccaagtaccaagaagagttaggtctagccacggcccacgagcatatggtcgcggacgagtatgcccaagtatacgcggaaaaagaggctataggaagggtgatcgactctttacaccaagaggcaaccatgtggatggatcggtttgctcttaccttgaacgagagtcaagaacttccccgattgttatccaaggccaaggcgatggcggacacctactccgcccccgaagaaattcatgggcttctcggctattgtcagcatatgatagacttaatggcccacataattagaaatcgctaggaaacttgtatggtctctcaaaccttgactagatacgactttctgatataaaatgagtggcccatgttctactccaaaagc

SEQ ID NO: 104713 - DNA, 310 bp, Glycine max
agcttcttatccaatgcacagtcttggtggtgaatctccttcttccatggcttattccctagtggatggtgcctcccctttcctcttctcctttgccttccactgcatctccatggtggaatatcaccattgaaggacctcattgaatctcaaagatccatcctccatagaagctccacatgcaagcttccatcacaaaatttattgtgtcagaaatatggaaattgcgaaaacaatttaaattaatcaagaaaacataggattggacttcatcgtttatacccttaatatcttaataagattaacatgt

SEQ ID NO: 104714 - DNA, 402 bp, Glycine max
  unsure (1)..(402): unsure at all n locations
tcaactcttagaggtgactatgagcgtttgtttatggacgactccgactcaatatctgattatttttctcgagtattggccgcagtcaatcaacttaaaagaaatggtgaagatgttgatgaggtgaaggtcatggaaaaaatactctcgaactttaaatccaagttttgacttcattgttaccaacattgaagataacaaggatttagagaccatgactattgagcaactcatgggttccttactagcatacgaagaaaaacaaaaaagaaaaattaatcaaaaggaggctacggagcaactactacaactcaacgtataggaagcaaactatgctaattacaagagccanagatgacgatgtcgtggccaatatcctggacgtggacgaggacatggagg

SEQ ID NO: 104715 - DNA, 263 bp, Glycine max
tgcatgcaagcttggagccattgtttctaaaccttatttagcaaagacgattccctcatccataaaggaaattgtcactataaagacttaaaactgattggacaaatgctcgtgaatgctacgtgaaattctccaagaaagaaccatccaatttggggaaaaagaaaacaattctataaggatcaatctcccatatcaacattttcctcaccataatcgaggatcttggacctccttctaaaatgaagatcagtgaccaaccc

SEQ ID NO: 104716 - DNA, 347 bp, Glycine max
catcttattatactagattatcaaagaacgtattgactattgacaattaatgaaaagcaaattgactatgttcactccatgcatgaaaagaaacaattgtgtggttttttgatccaatgtcagttaaagaggttgaatgtcaaccaacaatatatgatgttaaaatgatgctaaaaacaattattgaatatgaaataccctaaatattctaatgatgtaaagattctttttttaactgatagtatatgaagttttatactgatagaaaacaatatatcatgtttaagaccttactattcccagatgttattcaagataattcatcttcatacaatataaggctgagc

SEQ ID NO: 104717 - DNA, 300 bp, Glycine max
  unsure (1)..(300): unsure at all n locations
agctnggttgaaccccataacccaaggaatggcaattttgatcgccaatacttcgacaacatttcatagagatgaaagactcgggaatacgtatgctatgcatggaaaatgtaattatgagattgagatgcccgaagaaacatcatttcctatttaaccatgcattaggtaccatgctcaatcattttgttttgttgttttttttttagaaatgggtttatgatcccaacatggttggctcatggtacctaacacatgcaactaagaatgcagtgtgaattttcacgcttcctttttttg

SEQ ID NO: 104718 - DNA, 374 bp, Glycine max
tttgcgacgacatggtccacacatctcaccgacacatgtagagccttggtgtgtcctcttccctcaacgagaatctcttctttcgcaaacgccatataattattggtggttatatgattaacgatgccttcaaaaccctcaactgagatatcgtgtgctacatgggcatcgttgaggacctttatcaacagcgcacgatgaggctcggagtttatgagcagttcaagcaaagagatccttgctggagttttattaagttgctcaactaccttaaactcactttgttggatgaagcgaaggaactcatgagcctcttcaaagtcaccgtctttccttgaagaccctatttcttttcagccacttttaccaccgga

SEQ ID NO: 104719 - DNA, 297 bp, Glycine max
agcttttcatcttacagacagcaaaaaagaatgtttatacggataaccactcaggtatttccgcccgtcagcgtgactcaaatgtcagtatgacagatcttgtgagcgcggaagatgacgtaaatctccgcatgtcaacgggcttgtcggccgcgattgacgaagggcgcaaaagacaacgttagtctctgtgtgctatcaggcttttcgtcttatagagagtaaaaaactatgtttatacggataaccactcgggtatttccgcccgtcagcgtgactcaaatgtgagtatgacag

SEQ ID NO: 104720 - DNA, 366 bp, Glycine max
taagatgagaatccaggagaaatgtcgatgattttgtgctcttttataaaagatatatttttatatatatattatttacccttttttttttatttccaacgtggttatggcacgaccaaacggtgggaattcattttaacaaaaattaacgaatactacaattcaaatgatcggtggaaatttatttttttagattaggcgcgaaatgacttatataaatgactgaagcacgtcaaaaggtggtacgaaaagaaaatgaaacgagaataaaagtacacaaaataaatggggaccaccacgggtacagagaatgaattgaaaaagcttgattcggaaacttacccgttgaagaatgaagaacggatg

SEQ ID NO: 104721 - DNA, 346 bp, Glycine max
  unsure (1)..(346): unsure at all n locations
nntgttcttttataaaatgagaaagttctggactcattacgttatctaaaaatcttggggtggatccaagtgctccgatcatccatttgcatactcatgttttggtggcatactcacttgtggttatttctttaggaatttcatcataactaagaaaacaccaaagcacccctataacactcgatccagaaaaatggataatgaagagggcgtgcaggaacagatgaaggccgatctatcggccttgaaagatcaaatggcttccatctcggaggtcatgttaaaactccagaaaaccatagaggataaagccaccgcaaccgcctccagtacagttagggaagcg

SEQ ID NO: 104722 - DNA, 325 bp, Glycine max
agcttctcaaggatgttttctcaagaaagcttctcaaggaagctacctagtctataaatagaaacatgtgtaacacttgttgtaactttgatgaatgagagtcttgtgagacacaactcaaagttcaacttctctccctttttcttccttcaattccgtgctcccccctctctctttctctccctctttcttttcctccattgaagcatcctctccaagctccttcttccatgacttattccttaatggatggcgcctcctctcacctcttttcctttgtcttccgctacatctccatggtggaaaatcaccattaaaggacccc

SEQ ID NO: 104723 - DNA, 411 bp, Glycine max
  unsure (1)..(411): unsure at all n locations
ggccgatgtacctggatatgctattatgctcagcctattttcattttctttatctggggaggccaagagatggttgcattcattcaagggcaacagtttaaagacctgcatcttcattccatcagtttcctgatgaatctttgagtgaggcattaaaaagattccgtagcttgctgcggaaaactaccactcatggtttttcagagcctatacagctgaacatcttcattgatgggttacggccgcaatcaaagcaattactcgacgtttatgcaagaggaaaaattaagttgaagaaacctaaagaagccatggacttaattgaaaatgtggctgccagtgaccatgcaattttgcatgatagagttcatattcctaccaagaagagtntattagagctttcatcacaag

SEQ ID NO: 104724 - DNA, 342 bp, Glycine max
gttacctgctgcatgcaagcttttcaattaatcaatttgaatattatatatgtttttttagtgagctataacataatcacacttaaaaaaatagtataggaaagtcaattacaaattttatgtgaaatataaccactaaatcacatgaaaaaaagatgtaataatcttgttgaacatatgattgttaattaaacttaatatccaaactttttttttatcttatagaaaaccaaacaaacacctactctaaccatctaacaatccacatccatggaccatcattgccaaatacgattttcggcaatgacattatgcctctcatttctttctcctttcttcctt

SEQ ID NO: 104725 - DNA, 447 bp, Glycine max
  unsure (1)..(447): unsure at all n locations
ggaatgctatngctacatatcctattctcaccatagttaaaaattcgggtcgatccaaccagtcagaccgatccaaccggaaccaagtgatataattgggttgatttagttattggactgggcatacatctagtcttattggacccgaccgatttggagtaaacctggtaacccaggttttaaaatcagtttcacatataagaaaaataaaaaaatgctcccaaacacttcaaaaaaaaaaaaatccgagacttgtataattgtgttattgaatattatttgtagacttatgttatcaattttaatatttcaattgggtatttagattttggaatatgaataaatttttcttaatcaaataatgttagttatatacttatatataatagatacatgtataattntaaattntttaatatatattanattgggtcaattattgacata

SEQ ID NO: 104726 - DNA, 325 bp, Glycine max
acttctgaatttttctgagtgaggagatagaacatagctttttatgagaaaatgctttccttttcctattattttatttttttcaaaaacacttgccacttgtccctttttgagtggaacaaaaagggaccacctttttctcttgatgtgactcatgcacagccacaagaagagaaaaatctgaccttgtgaaatgttaaaatcttgcctcggtttgcgtgccatttctttggttccagtccttcgcgtttctatgcacccgtcggggccagttttcgaaagtaagcaatatgtatatcaaaacgctcagaatgaaaccccgagc

SEQ ID NO: 104727 - DNA, 451 bp, Glycine max
  unsure (1)..(451): unsure at all n locations
actcagctatgctgcnacatctacaatagacctcctcaaccttagcagcttaatcagccacaacaaaacaattatgacctctccagcaataggtacaacaccgggtggaggaatcatcccaaccttagatggtcgaatccttcacagcagcaacaacaacaacaacaacaaccttattttccgaatgttgctggcccaagtagaccatacgttcctccaccaattcaactgcaataacaacaacagtaacaaccccaaaaacagcaaacagttgaggcccctccgcaaccttcccttgaagaacttgtgaggcaaatgactatacaaaacatgcagttttaacaagagaccagagcctccattcagagcttaactaaccagatgggacaattggctacgcagttaaatcaacagcagtcccagaattctgacagattaccttctcaatctt

SEQ ID NO: 104728 - DNA, 312 bp, Glycine max
agcttatgcggcattttctacaggagtatgactttgtttgctttatttcaatatatatttatgttaaattatagcttttaattaagcacaaagctaacatgcttgttgaaggtgttttcacaatataccaaatgacatgctatgcctttatcacccgtctttttcaatatgttcgtgagtttgaataaattccacaatgtgttttatgtataaagtaactactatcaatatcaaagaagtaataaaaattaatgggacacattttggtatgttccatagttaaaacttagggtacttatatctgccccaaat

SEQ ID NO: 104729 - DNA, 316 bp, Glycine max
tagcttcaatggagcttacatcatgtggtattaagagcatcttcatctaggtgatgttcttttgcttcctctatcttttggttcggtgaattctcttaaattcctttttcttcatgatgcaatcctaccccgcaagggcattgggtagaagactccaagtagattgggctagagatccaagggaaggtcctagggttctcatgaaccttagggtagatttcgagcccatgggttaagtttagcccgcttatctttttaaatattagaataggtatttccttcgtctgggccttgtattttggccattctagtagta

SEQ ID NO: 104730 - DNA, 431 bp, Glycine max
  unsure (1)..(431): unsure at all n locations
tgttagaacaatcctcacatgatactntattggcacagaataagttgctttctaagaaacttgagattntaacagaaacactgtgtaagttgccaactaaattgtctattggtcaaccttcgcattcttctgttttgcaggttacaatatgtaccatctatggtgaggctcatgaaacaggccaatgtattcccattgaagaaaacactctagaaattcattatatgggaaataaaaaatgacaagggtatactcaaggaggattttcangctttcagcatggttcttataatcaacaaggacaatggaggtcgctccctagtaatcagttcaacaaagactagggtggaccttctaacaggccaatccaacaagggcctaacatttttcagatgactactaagctggaggagacgtttacttattttatg

SEQ ID NO: 104731 - DNA, 316 bp, Glycine max
agcttctttgagataacatccttgagaagctagaacttagctacacatacccctctcataactaagctcacctccttgagaagcttccttaagaagattcctaaagaagctagagcttagctacacaaacctctctaatagctaagttcacctcattgagatgagaagctagagcttagctacataccccctataatagctaaactcacccctatgccaaaaaacatgaaaatacaaaaaaagtccctactacaaagactactcaaaatgccccgaaatacaagactaaaaccctatactactagaatggccaaaa

SEQ ID NO: 104732 - DNA, 435 bp, Glycine max
tcccagttatggaaagctaaatcctctggttggatttccttgtaagtacttgatgtaaatatctttttatctatctaatgatgttttgtgtgttctctatgctatcagtatttcattatagtatgcttttaccttgatcacgtagatgcatgctttgttagggtcattcaacagtggaaactaatctgattcttagaacttgataggacaagggttgtttgtcgtactatcacaagggatcggggtacgataacccatttgttgtatgtttgtcttaatgcggtcctggacgagtttagtccaacaagaggaatctgcggacgatgcttgatcaggattaggctagactatcatgaggaatcatggtttagcattttaggagacaccatagaatgcataagcattgttaagtagatgatgcaatcctacccccca

SEQ ID NO: 104733 - DNA, 318 bp, Glycine max
ttagctttgacaacgtcaaatagattctcaaatagagaaaagtccaaattaactaaaatacaaaaagaatggaaccaaacattagaactgataattaccatcttgaagagcagccataacctccggatcactaaatgccgccatcagttcagggtcctgagaaatgttatcaagcaacatttgatatcaagacaagaataagcattgtgtgcatgttcattaggaagagaggaattttttgtaatgattttttctcaaaagcacacaaaaacatccaaagtccagatttacttacactcaagattttgctaaaatcaa

SEQ ID NO: 104734 - DNA, 311 bp, Glycine max
cagcttgtagcaatatcaaacgaaaataactttatacacggatgtccgaatgagtctcgtaatatatcgatacgctccaaattgaaaacataagcccgtagacaattcaaaggacaataactttttactcggatgtccgatagagtctcgtaatataatgggacctccaaattgaaaatggaagctcctatcaaattcaaacgacaataactttttgctcggatgtccgattgagtcccgtaatatatcgagatgctcgaaattgaggacacaagctctgaacaattttgaacgacaataaatttattctc

SEQ ID NO: 104735 - DNA, 398 bp, Glycine max
  unsure (1)..(398): unsure at all n locations
tagtgtctcgatatagtaccttattcaatcggacattcgagtaaaaagctattgtcgtttgaatttcctacgaacgttcattttcaattcggagcgtgtcgatatattacgggactcaactggacatccgngtataaagttattgtcaactcaatttgctcagagcatcgaatctaatatttgagcgtcttgatatattacgagactcaatcaaacatccgtgtaaaaagttatcatcgtttgaattggctacgagcatccggttgcaatttggagcatctcgatatattacgagactctgtcgaacatccgagtgaaaagttattgtccgttcaattttctaagaacctccattttctatttgggcgtctcgatatattacgggacccaaccggaca

SEQ ID NO: 104736 - DNA, 300 bp, Glycine max
agctttgatggtttctagaagaaatcacatgtttgtcatcatcaaaaagggggagaatgtgaatgtatgtatacatgattttgatgatgtcaaagaagaatctaacaaggctgcttcaaatgataagcatttgcttcaagaataattcaagattgcttcaacaaacaaagccttgtttcaagattcactaaagaccaagccttgccttaaaacaaagtgctttcaagacatgcaaggctctggtaatcgattaccaggaagtgtaatcgattacccgaagacagggttgagaaatagctg

SEQ ID NO: 104737 - DNA, 359 bp, Glycine max
ataccacctgaaggaaacttgactgtggagcttctattgatgctggatcttttaactttaatgggatccttttattgtggattttcaccatggagatgcagcgtgaagacataagtaaatgatgtgagaggaagcgccatccattaaagaattagccatggaagaaggagcttcaccacccaatatgagcctttgataagaaacatggagaggatgcttcaatggaggaaaagatagatggagagaaagagagaggggggagcaccaaattgaacgaataaaagatggaaagaagtggaactttgaagtatgtctcataagactctcattcatcatagttacaacaagtggtacacatg

SEQ ID NO: 104738 - DNA, 297 bp, Glycine max
agcttctgttgtttaattttgagtgtctcgatatattatgcgcctgaatcgaacatccgagtgaaaagttatgagcatttgaatttcttgagagcttacgttgttcaatttcgagcgtctcgacatgtgatgttcctgaatcggtccaccgtgtgtatagttatgaccatttgaatttcacgagagcttttgttgttcaatttcgagggtctcaatatgtgatgtgcctcgaacatccgagtgaaaagttatgacaatttgaatttctagagagcttccattgttcaatttcgagcg

SEQ ID NO: 104739 - DNA, 407 bp, Glycine max
  unsure (1)..(407): unsure at all n locations
ctcgtggttttcttgagaagatttctcaagaggcttttttgagaagctacattcttatctattcacccctctattaactaaattaacttccttaaaaataattacggatgaaaataacgcaacaaataatcaaacatcgaacataattactaataatatatagatatatatatcatggtgttacacatcatatattgagacgctcgaaattgaacaatggaagctctcgaaaaattaaaaatgtcataaattttcacacggatgtccgatcaggcacatcagatatcgagacgctcgaaattaaaaaaacggaacctctcgagaaattcaaatggtcataactnttcacacggaggtccgattgaagcacatcacatatggagatgcccgaaatggaaccacggaag

SEQ ID NO: 104740 - DNA, 299 bp, Glycine max
agcttaggtctttgttttataaaacaatctaggcctatttacataaagcctagcctggtctgacctgacctaatctcatctctaactatagaaatattcatgatatcctttagtctaaagcttgtactcctcttcataagcatgtctcttatttgcatgattatacaactatgtgagcatgagggacaatgtctttctcttatgttagtgtggaagtcaataaaatggttcattttcttgctaatgttggtgtgtggcaatctcaatcctttgttatttgggattttccttctccttaa

SEQ ID NO: 104741 - DNA, 340 bp, Glycine max
ctcatgcatgccagcttggctttggtttatacatgattgatacatgatttgggacttgttggaattgatttgggcaagattggatgagaggaagggtgattttcgaaatctgcacttatgcagaattttgctgttaaaataggtgcaacagaattttggctttgtgcagaaaaatgcttgtgtgtggttggctgtggaaagagtagtgcaaaatgagttctaaatgtttgctagtagatcccaacggtcaaaatgtaggcttatgtactatagacttccagtaaaattttggagtcgatccaacggttaacgaattggatcgaaggaattggtactgggg

SEQ ID NO: 104742 - DNA, 392 bp, Glycine max
  unsure (1)..(392): unsure at all n locations
cctcatcatccctcatagtcgttagatgtgggagccnatccaatccttgtgttcggactctcagccacttatgatagccgccgatgatcccattactgcttcctctaagctctttgtcctttcttcatgccgcatcccatgccttgcgaactccttggagtaccctcgcgtttgtggtcactgaaaccccatgccatgaaaggcatgatgctctcatctgatggcacttctctcatggggtagccaagctgtcttatggcgaggacgggattataattaatacaaccccttgttcccatcaagagaacatttggacatccttcgcatgaagatagaatcctgattcttccttccttctagcgaggaaaccaaattacagacgcccctccatg

SEQ ID NO: 104743 - DNA, 328 bp, Glycine max
gcttttaagtgtttagctaacccattttaatagaatgattaaataaatatttaagttaatcaaataagttaaaaagattaaatcatttgaaaacattgttacccaagtcccttaacctacatataaacacaaaagaaaaaaaattacaatattcttttgttaatgattttaatatttaacaaaaataattgaatgaaacaataaatacattcaatgtctttaaaacatgaatattaataatttctccatttgttaagagaattatctactaaaaattagaattatatatatatgaacaaacctttcataagtaaaatagcatataaaa

SEQ ID NO: 104744 - DNA, 419 bp, Glycine max
  unsure (1)..(419): unsure at all n locations
tttgtacctatggaaaatttacacctcgttttgacttatgaatttaacatccaacaacaacaaanaaattcggctatctgtcctcagacttcccttgggaacgtttggaagcttcaaaaggattgaatgctttaactcttcttgatgcttcaaaacgtttggatgctttcaaacgagctgtgaattcaactgttgtgtgtctaatcgatcgctgccttaccacattacagtattctggatcactttgttgcctgtcgtttctcatccactgaatcatttggtgatacatagggaagaaacgcatttggatggaagcatagatgaaatanggaaggagggaagcaatcataatgagcaaagttatgatccagaaaaatggtgctggtgcaagagcttcaatgaagaccttataggctgtg

SEQ ID NO: 104745 - DNA, 327 bp, Glycine max
agcttgtctcagcgtttatgcgagacggagaccaacatgctagctatcatcgccaaataccaagaagagttaggtctagccgcggcccacgagcataggattgcggacgaatatgcccaagtatacgcggaaaaagaggctagaggaagggtgatcgactctttacaccaagaggcaaccatgtggatggatcggtttgctcttaccttgaacgggagtcaagaacttccccgattgttagccaaggccaaagcagtggcggacacctactccgcccccgaggagatccacggacttctcagctattgtcagcatatgatagactta

SEQ ID NO: 104746 - DNA, 428 bp, Glycine max
  unsure (1)..(428): unsure at all n locations
acttacccgttgaagatcgaagaactatgaagaacgaatgaagaatgtcgaagaacggttcaaacctttgcgagattcctcacggaaaacgttacggaaacgtttcggaagcgtctcggcttaaattttcttcacggaaataatttttccaagcaaattcgaaagagagagaagtgcctaaggggctggaccatttccttcttcatttcctcccctatttatagcaaaataggggaggtggttgccgcccagctcgcccaggcgagctcagctcgcccaggcgagcagggttgcttcctccagaagcaaccgccttctggaggaatcttctggagggcccaaatgggcctgggtgctatttgcacccccatttttactaagtacacccccctctggtggtntttgggaattcttctttcgtaaaagta

SEQ ID NO: 104747 - DNA, 326 bp, Glycine max
agcttaaagctgcttgttcccaaacctttaattggcccacttcacctaccgggataacaactccatataacctccttacggtggggcatgggcttatgctccacatccaagtatgggctctagcatacatatatggatcacatctaattggggcttaaggacccattaatgtccatttaccatctacacattcatttatcgactgctatgacgtgggccagaacccatcactattgacatcttttaggtcagcttatatgatccacaggcgggcgtacttaccacaggctaacagagtcttacttatactggctaaaaaatgcatc

SEQ ID NO: 104748 - DNA, 310 bp, Glycine max
catgttcatgcgtgcacctgaaccgagtcggcactcgcgcttgttggaggaagagcattctgaacaccatgcacgaggacgcgcctccatctacgctatggtatcgggcccgactcttcatatctttatatacataggcgctgacaatggagcagaccttggtccttcgtccaccaccgcgcgatgaggaatgctaacctgcgtctgtctttaaatgtataacaaaaggtgataaagtgattccatgtctttcgtaggagggacttgcggagcaagcaaatattgttctaggcgatgaacctttacacca

SEQ ID NO: 104749 - DNA, 300 bp, Glycine max
agcttgccgttttttctccttgtaggcagagccactcttttcgtcagcgcaaaacacacagtcagccaatgggtaaaaaagaaaaacaaaattggggacaagaaaaatattacaaaccattactagatacaaacgtgagtcacaggacggcgcggcagcagcgagcctatgatggcggcgtgggtggttgactgtgtgtgacagaggagttactaccagatacaaatgtgagtggcagaaggctagtgttgagttccttttgtttggataaaattttaaatttcgacgatgcatatttcg

SEQ ID NO: 104750 - DNA, 382 bp, Glycine max
taagagcctaaacttgtagcttcaatgcaatgaaacatgtttatggctaggaatccaaaatttggttttatgattagaaaaacatgaaaatatggacttctttgttaagatttgagctggcccatgattggcactttgcacctaagtaacgtgggagatgctttttcaatggtgtgtagatatatgtgaatatatggcataaaaatatgttgcaaagtgtgtgaatatatggcataagaataccttgcaaagtgaatgaatagtaataatgcatttcacaatatgtatatttgtggataagtagcataaggaggccttttaaaaaaaaaatgtacccgtgccaaagatggcacgagaatgcttccaaatgaatatatgatgt

SEQ ID NO: 104751 - DNA, 307 bp, Glycine max
tagcttggccacctttgctagtaccgaatcactgtcttgccatgcttcatccgcatcgactcttacagcctttagataggggagccactccccttcttgtgctctgactctcagccacttatgatagccgaacgatgaccccactactgctgcccctaacctctctgaactttcttcacgccgcatgccatgccttcgtaactacttggagaaccctcgcgacgcggccaccgaaaccccgcgctaagaacggcgtgatgctcaccactgagggccctggtctaagggggaaccccagctgtctcaa

SEQ ID NO: 104752 - DNA, 401 bp, Glycine max
  unsure (1)..(401): unsure at all n locations
tgacctttnggttcagctcagcgctgtgttatgagtatacccgctctagtttcatctcacactccaagtgggcctccggatcatgtctttcataaagaggaggaatgtctaatataattccctcctgtcagcttcgtttaggaacaccgccatgccctgatctcacccttacttcctcattatgagaatgtatgtgccatttgatccaacctctcatggagcgcatcatactggatgatttattgacctatgcaaaattagcctcatagcctgcatttgcatttgcacaaacccccctccatcatgaggagttgggcttgccatctcagacaagcgaatcatacgcatctcgaacattatagttgatgattgaatcgctgatgaagacatgaccgctaaca

SEQ ID NO: 104753 - DNA, 313 bp, Glycine max
agcttaccctctgtacctcaaatcagatgattgactggtgccgcaccgatctggcaaaaacgctgaaagttcccgtggagaatgtgcgtattatctccccgtatatcggcggagggtttggcggcaagctgttcctgagaagcgatgcgctgctggcggccctcgccgcccgagcggtgaaacgtccggttaaagtgatgctcccccgcccctctattcccaataacaccacgcaccgccccgccacccttcagcacttgcgtatcggtgccgaccagagcgggaaaatcaccgctatctcacatgaaagctg

SEQ ID NO: 104754 - DNA, 454 bp, Glycine max
  unsure (1)..(454): unsure at all n locations
ctatgaaactaagcttatacaggcggcgtanacgccggaggtggaggtattctcgccccattgtccaccagaacccgcagaaaccgggaaactggaatcgccgaggtgaaccgcaacctgctccagcggtacgccaagcatttccgctgccgtctgggccaaaatggtgtagctgccggtgccaatgtcggtcatgtccgtttctacggtaacggtgccgttttgttcgaggtgaacccgagcacccgatttttccagcagattattgcgaaagcccgccgcaacaccgtggccgactagccactccccgtcgcgcacctgtccgggtgtggcgttgcgctgcttccagccaaatttatccgctccggtgcgcaagcactcgataagctgacggcgagagaagcagcgcgtcaggtctgcggggtcaacctgagtgtcattcatgatgcgaaac

SEQ ID NO: 104755 - DNA, 317 bp, Glycine max
agcttcttatccaatgctcatcttggtggtgaagctccttcttccatggcttattccctagtggatggcgccgcctcttacctcttctcctttgtcttctgctgcatctccatggtggaaaattaccattaaaggacctcattgaagctcaaagatccagcctccatagaagctccaccagcaagcttccatcaagtggtatcagagcacaagagcttcaagtaggtgctccttaaacctccattaatttttttgctttaccttctcttccattgttgtttcttcattttttctccatgtatctcctcacatgtctt

SEQ ID NO: 104756 - DNA, 430 bp, Glycine max
  unsure (1)..(430): unsure at all n locations
ctatagaagataatgctactgtagccgtttncaatacagctagggaagcggaaccggtgctacagcccgcaataaacttgggccgagacataaacacgacggttttcggtcggaggtatagtcctcaagcctacccttatggtttgtctccggacttcactccccgtaccgctccagacgatttgagccaagcccctaccttcgaggggaaactccctccttgtgccgactatcctctgcaagaagatgatgaaggagatgcccatctatgccctctacttcccctcaaagatccggccccccatgaattgccccaaccaaacatagtccgccatgtcccgtctccacacgcacccgttaaagaatccgttccttttgcaaaagataaggganagattgatttacttgaagagaggttgagagcggtaga

SEQ ID NO: 104757 - DNA, 329 bp, Glycine max
cctgtaggcatgccagcttgtagggtttaagtctcacgattgtcacgtgctcatgcaacaattgttagccgtggctatacgagacatcttgccaaacaaagtcaggttcacgataacttgcctgtgctttttcttccatgctatgtgtagcaaagtgattgatccagtaatgtttgatgagttggaaaacgagaccgcaattatactatgccagttggagatgtattttccccctgctttctttgacatcatgattcacttgattgtgcatctggtcagagaaatcaaatgtcgtggtcctgtttatctacggtggatgtacccggttg

SEQ ID NO: 104758 - DNA, 299 bp, Glycine max
agcttgaagacttctcacaatggatcctaaacataggagataaaagactatcttaaccagactatcttaaccaaatgacgactttgctaaaattggaattttggaagacttattgattactgaatttgacgactccattcatgctattgtcaaaagcatatacccttaactgctacaccaatacaacaatcaacaatatttgcaatcaagaactatattggcatcaacaattgaaatagttgaccaactcaacgaatatgtattatctttaaatcgatgtaatctcatctaccatttga

SEQ ID NO: 104759 - DNA, 302 bp, Glycine max
agcttgcacgaatttggtaaggaaaacaagaagagaaagaagattaagagccccttaccaaagctttgatggaagaaacctcaagaacaccttgtatgaagcttagaagaagaaagaaattgactcctctccctcttggtgaactcatgcaaaaatggtgaaggaagggttccaaattgatttttaaagaaacaagaagataaggcttaaggctttacattgacaagcttaattgaaaacataaatgacccatgaccagccatggtgaacgtgccaagccatgtcatttagggttagtgttg

SEQ ID NO: 104760 - DNA, 351 bp, Glycine max
  unsure (1)..(351): unsure at all n locations
aaaggggacaactggtgatggtatgctnattcctgggcctgtggaagggggatattgttttgcgccatactcgatcgccacctagtaccacatgtgacgggtgccccataatccaataagcttggtgtgagaaagcgtggaagagtcagtcttcctacttttatttgttgaccacagagtggtacctgaagatatgtcgcgagggtcaggagaccttggggacgtcaggtggggtgctattgcccaaaaccaagcttggccaatcccgacccaacccgggcatagtcagccagtgagaacctgtgacgtacctaaacaggcgagctcctgacagtcaaccaataaaagaac

SEQ ID NO: 104761 - DNA, 311 bp, Glycine max
agctcgctctgcaataagagaagctgcaactagtttgacaaaacgccttgctcaaacagcccaggagacctttggagatgttgaagaggcagtcgagaaagatgctctattactgccccacagatggaactgtccctcctctaacaagctatgccactaactatgtgaagcttttattagagtaaggtcagctgtgtagccatctgatcccaatattgtcgccataccaccaacgagttctagcactttttgctgtgctgactgaggacaaaaatgttacccattatgtcttatattgactgttaaagagc

SEQ ID NO: 104762 - DNA, 412 bp, Glycine max
  unsure (1)..(412): unsure at all n locations
gcatgcagctcgaagacacaatggtgggagacttgtttactcaacattttgaagaagtggggctgtgcggaagtntacgagacaagagagaagaaattctttctcaccggcttttcttttctatttactctcttttgaggcgcgctcccacatgtcattttttaattacaagcgaagggcccacctttacctttgacttgaccacatactccgccataacagaagaaaaaaaaactggacctttttggatgctgaaatcctgtctcaatttgagtgccgtctctccgattccagttcttcgcgtttctctgcacccgtcgggacctgtttccaaagggaggcgatgtatatatcacaacgcttagaatgagaccctgagcgaggctcacacggtggtcctgtataattataa

SEQ ID NO: 104763 - DNA, 448 bp, Glycine max
acctgcggcatgcaagcttgcatgtgcgcattgcacattgagcgcacatgcaaagtacatctggcttaagtggccatgcattaagcctccaaatgcacgcttagcacacatgcacgatacaactggcttctaggttggcgtctgacactaagcatgcactgacatgctgagcgtgtaactccatttcttcaacattttccacacctatgttgttgtgttaaattctacaaaaaattagaaccacaacactgtgaattgaataactttagcattctctggataagaactcagaagaagctaaattcttatcttttaaataagaaagaagccttaaaagacaagaaactatataattgctctgttatttaggtgtacaaactaagtatgcctagcaaattataagtgttctcaccatcaaccttcagcaaatgcttgagctcttttttgc

SEQ ID NO: 104764 - DNA, 243 bp, Glycine max
gacctgccgcatgcaagcttaacattcaatttcgtgcgtctcgatatgttacgggactcaatcatacatctgagtaaaaagatatggacgattgaattggctcagagcttcaactttcaagttcaagcgtctcgatatgttacgggactcagtgcgacatccgagtaaaaagttatggtcgtttgaataggctgagagcttcaactttcaattacaagcgtctagatatgttacgggactgaa

SEQ ID NO: 104765 - DNA, 216 bp, Glycine max
gttgactgggccaagattggttgaaattcatttttacacccctctgtattttttattgggccccggatgtggctttggcccgataaattttttattctgcaacgaaagatttgcttcttgaagacctttatccattgcacaagccgagaataccccaacaagggtatctgccttttctggatcctgaacaggattcaaaaaaataccaatttggtc

SEQ ID NO: 104766 - DNA, 450 bp, Glycine max
  unsure (1)..(450): unsure at all n locations
ctgcagcttctttcaagaattcataggcttaacacatattttgtcttcatgctggggtcacaattttctttgttggccactctagagactaaattctagataactgctgataagcttattatgtatcaaaaggccaattgctacaaaggcaagggagtgctaattgaaaacgatgaaaatgctccactaaccagatatgttaaagctcattctggtcgacttttttagacatgagcttgaagctctaacataaaagactgagctcactaaaagaaatgtgctcttgtntggaaccttatgagaacccaccagtagatgcagttcaccatgaaattaggcaatgctatcagaccttaaaccatactntgttttatcaagacactcctttcaacatggnttgtgcatggaaaagggtagtctatgatgtgtcctatcacaccttttcatttg

SEQ ID NO: 104767 - DNA, 375 bp, Glycine max
ggatcttaagcaccgagctgcagctttcaacggattatacttattggttaattgaagagaagtggggcggactgttggtatcaccaagcagcaagtatgcatgcatgtcattggtggtttttatagacaatacctaccaaacaaacaagtacagactcccactacttgacttttgttggagtgacaccaacggcgatgacaatctctgctggcgttgcatatcttgaggctgagcgtgctaataatattgtatgggcttttgaacgatttcgaggcctatttaaaaaatgatcgcctccctcttgttattgtcactaacagagacctagccctgatgaatacagtgacaactgtgttcccgagtttctaatttgt

SEQ ID NO: 104768 - DNA, 425 bp, Glycine max
  unsure (1)..(425): unsure at all n locations
agcttcttatccaaggctcatcttggtggtgaagctccttcttccatggcttattccctagaggatggcgcctcctctcacctcttctcctttgtcttccgctgcatctncatggtggaaaatcaccattaaaggacctcattgaagctcanagatctagcctccataaaagccccacaagcaagcttccataaaaaactaggcagcaactgttgagatcaccctgtcctgcacagaccactccccccatgttgattagcatgagtctcaagggagtttcaaatcgagtgatatgccacccaagaaccagcatgtttcctcatgaaaaaccacaagtacttatcgaaaaagtttatactatttncacacaattatgcagtatgaaacaagggcaccatcaatgcactaactttgaaatagttaaa

SEQ ID NO: 104769 - DNA, 246 bp, Glycine max
  unsure (1)..(246): unsure at all n locations
ttaccctattatacacttcttgtactaccttatttctaactcagngactttacaagtcctcctaaccgagtacaaagagacttgcatcaatatggcggtgagtaattaatcactcctctgtgtgcaaagtttcaaatcatttgcttatctaatatgaatctcatgttgatcttcgaatgtgtcgagtaccatgtactcatttatgaaagctgctaaattcactccttgtgaacttggaatggactg

SEQ ID NO: 104770 - DNA, 368 bp, Glycine max
atcattatacatgtgattagcgctattgtgaatgctattcttttatgtcattatgcgtgccagcgtgatgtagttgtgtaattaagaatgtcatgagtgtaaagctcatacattgtaagtaggaagaagggttgatttgaaaaaagtaaccatgtatgaagctcacaagaatgatatacatcaccacaccatattcatactgaaagtctcaagaatttgggaatcacattccaatcccatgttaacgtaatatatgtgataagcttgtggcaacacttgctctaatccttatttttgaacttcaagtaaatgtagtagaattaagaatgaatccttctgttcttgataattattgccgggttgattct

SEQ ID NO: 104771 - DNA, 332 bp, Glycine max
  unsure (1)..(332): unsure at all n locations
tacatcacctgcggcatgcagcttacagccatccttcatgaagagctatttctttttagctttctcttatcttcgattagaaactcaacttgacatttgttcgatattatacggtgatgccacttcctgtcnaacattcatatgatggaagactttacagagttgagcattacaaaattgtgtacctacatgcttttatctattttaagacatagtctacttgttaccaaactatattcgttgccacgcgagtgatggtaagggaccaacaaaattcattccccaacaatcaaagacttttacctttagaaggactgccatggcatttcatg

SEQ ID NO: 104772 - DNA, 445 bp, Glycine max
  unsure (1)..(445): unsure at all n locations
gcaagactcgctattaaattaaaagcgtgttgtaaatttattgaaatagtttgttaatataaaacaataaacatattggagtaactgtctatgtgaattctattcttgttttgtagacaaaaacatatntaattaaaaactaattaaatagtgctgctaaagtaaatattataatattatgaaataaataacccaaatattaatagaaagaaaaaagtacttaaaaaatagttacatatgaacaatttgaaaagcaaagggtaaaagtatattaaaatactaaggatataaatggaaggaaaacataaactacaagcttataaatatacactctttaagacagttaattaatatagttagtagcattaaattgtaactatttgattattcttgcacaatattcttataatatcggaaccataatcttctctttcactaattcctt

SEQ ID NO: 104773 - DNA, 394 bp, Glycine max
  unsure (1)..(394): unsure at all n locations
agctatatcatcgtcaccttataaacattgttgtgttatctttcaacataaccatgcaagcagctgcatacctatgcaacttgtctaatgtgaaaaaataattgggattaattcatccctttcgcaactgttaaatgtatgttatgagtcatgacaagattctagtcagcatccttctcaaagtttagtgttcgtctttttcaaaagaggttttctttctctcctttcctttttttgtggattcgtgaattttttgttattgattntttatgtttacttattggtatgaattaccaaattcgtaactaatgttatgatgggtcctatatatctcgatttcgttgtgtatctagtttaaatatataatggaatcatgattctattacgagtgaat

SEQ ID NO: 104774 - DNA, 403 bp, Glycine max
  unsure (1)..(403): unsure at all n locations
agcttcatgatgatgaatctagttgattcaagtttttttgttgatgacaaagatgatgacaaaaagcctaaagaatgatttcaaaattgagtcaacaagttcaagatcaaaattaatttccagtttcctgagaagaaatccagaagagtccagaatccagagaagtttgatttcatgattcaagagaagatgaattcaagattcaagagaagaaatcaagaagacttcacaagggaagtattgaaaagatttttccaaaaacaaacattgcacagttttgtttttcaaaatagtttttctcaaaatnttctaagttaccagagtgttactctctggttatcgattaccaagttcctgtaattgattactagtcgccaaggtcgatttcacaagcttttaactg

SEQ ID NO: 104775 - DNA, 338 bp, Glycine max
agcttattctgaggatagtttattatcatgcactttcttgcagagttggcttataacaggccaatcatacctatggagcattttcttgagccagtagccccgcctgaaagttaacttttattagtgagacccaatagggtgctctacctgagcccacacctgggcaagttgatctatagccaactgacccacaatcttcaggggtgaaatcaccgtctcttcctgagcgtgaagtagttcccccatctccacctctaattgtcatctccgatgcatcatcagatgaagcgcgtgcccctcctgattcaccagctggagaaacagctgaccctcttgct

SEQ ID NO: 104776 - DNA, 408 bp, Glycine max
  unsure (1)..(408): unsure at all n locations
acctgcggcatgcaagctataaatattttaatattgccattcttttatttcttattggccaacctcttcctcgngaaatactacttctattctgaataaaatgctcttaaaaatgtttttcttattcgctcaatcattttcaacaaataatctataaaaaaactattttgttatttgagataacacacaatgacattcttattaccaatcgtcgtattttgggtgtaattgcgatgccctatgttatgattttacaaatcataaatttatttttcatttggatgaaaaatataacattaaattttttaaagtttattttatcatatcttattattcaattaaataatatatacatgttgctcctttatattatattcatgagctcttacttatttttgttataactat

SEQ ID NO: 104777 - DNA, 372 bp, Glycine max
caccttgacctgatttgggggagaaatatgtcacatattcctaacagctttgcaaacagaaaagtagagttcaaatgctgaagtattgtacaatcacaaatctaatactgcccagagaccacaacagaaagtaaaattgtttagttgaggaaaagcaatgctgctgcagatattaatgaagatgggtgagatattaatgtggaactgcctgccgaagaatcaacacataataaatacgggataatgcaaccacaatgcaaggtaaagcttgtttatcattctaaataaaaaccattgaaaagtaatgggctaataataacaagtactatcctatagtacaaaggaagctaaactggaactggttaataattt

SEQ ID NO: 104778 - DNA, 419 bp, Glycine max
  unsure (1)..(419): unsure at all n locations
gacccgccgcatgcaagctntagctgtaaacatatccttactctcacttttatactagngaaccttcactcttattcgagcttatactcgactntactcttactacactagctctctttgttgggtaactgcctccacttttcttactcgaacttatctcttacatactacccttgctttagtctatgatggaaaacactacacacattctaacctatggacacataatgtcattctagatagaccttcttgcctttaaaaagccacttttcattcatctccagtgatcacaatagtttcccatcccaatatatatcataactaaggagggaaccatccacccattacacaagcacaacctaaggcattgatggcatgcacatcatccatacaccaggcagactaactcacaataatgc

SEQ ID NO: 104779 - DNA, 373 bp, Glycine max
  unsure (1)..(373): unsure at all n locations
catctatacgtgctgcctaggagtgcgaaaagtaatgctagccatattttgtttttcatganctctctctccaacatttagttatgtctatattcatgtgaatcgctaacatttgaatttaaggaaagaacaaacttacacataatataaggtatctatagtctattcctcaaacgtcgttttttacgttgataaggagtacatgtcgctgtctttacttttattcctttcctctccaatcagagagtgccatgtcgccttacctcctagtgtgagacaatagacatatcaaaattcaacgtttatcccataacggatccttcactaaggtctataaaaggcaacctctacccaaaagcaacgaacgaaaaaa

SEQ ID NO: 104780 - DNA, 410 bp, Glycine max
  unsure (1)..(410): unsure at all n locations
tttcctcagttctttaacattgcttgaacaatattcttggcattcatttaactgactttgggctaggtggccactctcaataaagtactttcgacacctactgtacgttgatttcaccaatgctgttatgggaatgttgcgacaatcctctaaaaccttattgatacattctgaaaggctcgttgtcatgtggtcatatcgaagtggcacgaaagatgtggcctaatgtcaagaagtggcaagaaagaatgtggagagagcatttggtgtgctcaaatctcatttcgtaattatatgtgattcatcgggtaattggcatattggtaccatgtagaacacaatnctggtatgcattatattatataacatgattgttgaatgaacgagatacatgcaatggtcacgttgat

SEQ ID NO: 104781 - DNA, 452 bp, Glycine max
  unsure (1)..(452): unsure at all n locations
agctctaaaagattaaattcaaatttctaaaagttcgtttcaacagtattaacctctggtaatcgattacataccttgtgtgatcgatgatacgcctttaaattcaatataaaaattcgtnaattgtgtcagaaatcaattcagctactagtaatcgattacatcctctagtaatcgattaccagagaggaaatatcataattttgaaaaataattgttcgtagaaacatttctaaatatntcctttaccccaatctatgcggtatcaattaaggaattctttctaagatcctatcaactaagtacatcgttcttcttgcgattttgaatgcttgacttgaatcacacttaactttgacatcatcaaaacttcatatcatatatgcttctacaatctgccctttttgatgatgactataatatgagatccagataaacgatatacaattgat

SEQ ID NO: 104782 - DNA, 459 bp, Glycine max
  unsure (1)..(459): unsure at all n locations
tagagncgaccgcggcatgcaagcttcgcataggaggaaggttcactgggattattggacataacttttgcttgtgtgngggtgacaaccgtgaataagagagaaccgagctcagggggtaacaaaccttcgttgaagtattggtatcgtgtgaagagagcttacggtggtagtcttgtaggtaccatggtgcttgtttgggtcgtgttgagcgtctgggttgtgagaaaatgggtttctccacacgtgtaatgtttacggggtcatgtactggaggtagtgttggtgaggttcctgtaattgggtcatgtggggtaatggagaaaggttctgggagtatcgtgctgggttttatatctgaatgctgtgggttaatgatttgcggaaaatgatttctataaaacacaacatttccggatgtagcgatgctctgtgaatcgcaatcataaatcatatatc

SEQ ID NO: 104783 - DNA, 319 bp, Glycine max
  unsure (1)..(319): unsure at all n locations
ttgagaagctagagcttagctacacacacccctctaataactaagctcacctccatgagaagctttctttgaaatattcctaaagaagctagagcttaagtacacacacctctctaatagctaagctcacctccttgagatgaaaagctagaacttagctacacacccnctataatagctaagctcacccccatgacaaaatacatgaaaatacaaaanaaaagtgcctactacaaagactactcaaaatgcctcgaaatacaaggctaaaaccctattctactagaatggcaaaaattacaggcctaaactaatgaaa

SEQ ID NO: 104784 - DNA, 401 bp, Glycine max
  unsure (1)..(401): unsure at all n locations
catgcaagcttctatacaaggaggttgantccacatatattgttgttttttgaggctagatgcattgggatcgaagatacttatgcccttctgtataaggcctaccgcctatctgggctgctacaaaaagctgaagcggccttggcgagaagagacatatggccttaccttacgttgctgctggattaacttgctcgggccacatgctgaacaagaaatataatcaaggattgtggatatgacatgataaggatgatattgaaatggtgcttgcttatctcaaaatgtaaaaaatttccactctgatttgaggacctgcacaatgcacgaatcttacactttaaactcaacgacactgcaaatcacctagtaattagttcatattatttatatcaacaaag

SEQ ID NO: 104785 - DNA, 345 bp, Glycine max
  unsure (1)..(345): unsure at all n locations
atggagttgttgaatctaatgtcatcttgcgagggcattggagttatctcttagcttgaatttatcttttagtttttactgaatgttatcttttaattnacattttctaagcgaactccaccacacccatatcgcaaaaagtgtttatattttttttctttctcaatgtaatgtttatatattccaaattattgtattgcgctcttaaaaaaaatagtctatgatgtttataatttaaattgggatcgccggaatatatggtgatatctgtaatttaattttgatttggtgaataattgcggctttttcacacggtgaaatgatactattatggaagcgaggtcg

SEQ ID NO: 104786 - DNA, 379 bp, Glycine max
  unsure (1)..(379): unsure at all n locations
gctgctggctgcgcgtgcttcaaaatttttagtttatatattttgttctataatcttgggtccatatggaatgctttgaaattagttgctaaaatggggagtgattattttacaagtttagtgctgatcatgtgtggaaactgaactataaacttaaaaaacaactgtgttataaaagtttttttataccctcttatggaagcatcctgtatgaggcttgatgatgacgtctgaaataagatgttgctgtatgatgcaatgaagatttnctttgactgcaacattttatttggcacttttctttgttttttaaggctagatatacactacttactctgaaataaccccattgtttcattataattggtaattgaaacat

SEQ ID NO: 104787 - DNA, 364 bp, Glycine max
  unsure (1)..(364): unsure at all n locations
agctntcatacatgtgcttgttaanaagactcttgtccaagatcacaatttattttctctaagcgatcttttatttctacatcaactggttcagattgggaccccctctgcaagtctgtcaattcaccatgccatatccatgtcgtatacttcttcttaaatacattacacaatagatgttcccatatgtcatcgagtacttgtcgtctcctgtttaaacagcttatacaaggacaaaaaacttttccatccttatccggtcgacttttttttgaggtgaattccaaaaactatttgacgccttcctcatatgcggngcttatgaaacttgcattcatccaactttgattcatgcaattaataa

SEQ ID NO: 104788 - DNA, 399 bp, Glycine max
agcttctacttatgtggcagggcgggcttccctcactttcttgtctccatctctagctttgaccactgctcttccttcccacgatgcttcttttcatatccgcctgagtgggcttatagcctaaaccatactttccacgatttcctttggcatttatcaggctagttatgccgccgttgcctttgcctaaacccattccgggttcataaccgctccccaacataactcgggccatcattactgctgcatcggacaggcaagggctgccagagaaggagtccacggaagaaatgctgaccacctcaaaagactggaaagtgatttctaacgattcttctgcggcttccacataaagcatagaggatgggcagctcaccaagatgtcttcctcgcctgaca

SEQ ID NO: 104789 - DNA, 383 bp, Glycine max
gatctctcagtcacctgccgcatgcaagcttgtggcctaggatcttctttatcaatggattcctttgcttcttggaagatgaatggcaacggaataaagaaggaagagagagaggagacgccacttcaaggagaagatgagtctagaataagctcaccaccataggaggccatggataatagcttggaggaagaaggagatgaatgaagagagaggaagagaagatcatgaaattttgtgctctaaaagagctctgaaatctcaagtttaattttcaaatgatcaaagttggaacaatgcacacacatagcctctatttattgcctaagtgtcacacaaaattggagggaaatttgaatttctatcaaattcacttgaatttg

SEQ ID NO: 104790 - DNA, 400 bp, Glycine max
  unsure (1)..(400): unsure at all n locations
tgcaagcttggttcgaggtacttatcccgtgaagatctattaacgatgaagaacgaatgaagaacgtcgaagaacggttgaaacctttgcgaaattcctcacggaaaacgttacggaaacgtttcggaagcgccttggcttagattttcttcacggaaacaatttttccaagcaaattcgaaagagagagaagtaccaaaggggctgaacccttttcttcttcacttcctcccctatttatagcaaaataggggagatggttgccgcccagctcgcccatgcgagccaggttgcttcctccagaagcaacagccttctggaggaatcttctggagggcccaagtgggcctggttgctaattgcacncncattattactaagtacacnccctctacttttt

SEQ ID NO: 104791 - DNA, 379 bp, Glycine max
  unsure (1)..(379): unsure at all n locations
agctggaagatgtgtaacccaccatttccataatagaacactggtgatgtgtctactatcattgntatcatttctttcttcgtcattgagggaaccacttgcgctgccaaatccctccacctttggacatattctgtgaaagatctgtgccccctcttgcatatgctctgtagttgcatcctatccggagccatatcagaattgtactaatactgcctaatgaaggcaaccattaggtccttccaagaatggactcaagaaggttccaagttagtataccaggtaataactaccctagtaagactttcttgggagaaacgtatcagcagtttctcatcttttgcgtatgcccccttctttcgacaatacatctttatat

SEQ ID NO: 104792 - DNA, 205 bp, Glycine max
  unsure (1)..(205): unsure at all n locations
aagaattcaaaatgacaaagnctgagaattctttttgattcttcccttttcccataaacaaaagaattcaaaggactaaccacctgagatttctcttgttcccccttcacaaagtttcgaaggactaaccgcctgagaactttgtcttaacacattggagggttaatcatntgttgtacaagtagaggggacatctacttgggtt

SEQ ID NO: 104793 - DNA, 419 bp, Glycine max
  unsure (1)..(419): unsure at all n locations
agcttgtctttggtttacgtatgatttatactttatntatgacttgtaggatccaattngggcaaatatggatgatggcaaggtggatatcgaaatctgcccaatttgtgcagcaaaaagctgtctaattttgtgcagcagaaaattgtgtttgtgcagaaaatgtttgtgtcgctggttagggaaagagtacttcatattgggttttggacatttcctaccagatcccaacggtccaaatgtagaattatgtactacggacctccagtaaaatttttgagtcgatccaacggtgaacaaattggaacgaagaaaatgttactggtgtatgtgagtaacgaaagctcgggtattggtttgtgtcttgagcacagttctctacctctgccctattttcttggttttgataaagcatgatg

SEQ ID NO: 104794 - DNA, 386 bp, Glycine max
  unsure (1)..(386): unsure at all n locations
agcttgnngatattttactatatatgtgtgngtcttcgtttatctctacctcgttaaaaatgagataatctactcctcatgtgtcgtttatgttcggatcatgtgatgatcctaaaccttgtgtttgtgaaaacaaatggctaagcgaattactttaaaaaaccttgtgatggacgactccgagacacaatattttgataggatgtcacattggaacaagagttttattttaattgcatgacggatcaaacatgtcattttactttatttgactaacttgaacagccttgttttaagtcataaatatttctaagaaattctatctggtaagagtgaagcgaatgtgacattaccaccgtgactgattacgatttattgaataaatg

SEQ ID NO: 104795 - DNA, 467 bp, Glycine max
  unsure (1)..(467): unsure at all n locations
cacctgcacgcatgcaagctttctaaagggtataactcttctaatggttttctcgaccagacatgaagagtctataaaagcaagaccttgatttgcatttcaataacacttataacctttacaaacaacttttccacatattcttttacaacctttgaatctctttgaacatcttcttaaacttcttcttcttcttcttcctttgaaaaagctttcttaagttttctggttttccaaaccttgaaaacaaaacttgtgctattcatcttttttattctcttctccctttgccaaaaagaattcgccaaggactaaccacctgaattctttntgtgtctctcttctcccttttccaaaagaacgaaggactaaccgcctgaattctttcgtgtctcccttctcccttgtcaaagaattcaaaacgacacagtttgagaattcttttgattcttccctttcccataaac

SEQ ID NO: 104796 - DNA, 398 bp, Glycine max
  unsure (1)..(398): unsure at all n locations
agctngccgcccagctcgcccaggcgagcaaggttgcttcctccagaaacaacagccttctggaggatcttctggagggcccaagtgggcctgagtgctatttgcacccccatttttactaaatacacccctttctatatttttggtgattctttttccgtgatgttacgaaactttacgaatctcgtaatgatacttattttttcttccgcaaggttacgaacccttacgaattatgtatttactcttttttagctttcgaagaagttacggaaacttacggattgtgcaaaaacatctcttttcgacttccgccacattactgaatttcacggatcgcgcgagcctgctttctttagatttctgagacgtctcgggacttcatttattgtgcaaca

SEQ ID NO: 104797 - DNA, 471 bp, Glycine max
cagtcacctgcggcatgcaagctttgtatggtaaaaggtgtaggacacccttacattggctagagccccaggaagacctcaccttaggacttgaagtggtataacaaaccactgagaaggtcaagttgatccaagagaagatgaggactgctgagagtaggcagaaaaattatcacgacaagaggaggaaagacctggagtttaaggttagtgatcatgtattcttgagactggggttggttgagcattgtaatcccaaaaactcacacctctttttgtcagtcctttccaaattctcaaaagagtcggtcctgtgtcataccaaattgcattactttccagtctcacttaaaatccaatttcatgacactagtgatcaaatacaatcatgcatcacgagtagaatgaaatcataaattattagtagaaaagattgatacatatataatatcaaaagggatacataacggt

SEQ ID NO: 104798 - DNA, 285 bp, Glycine max
gacccactttctcaataaaaatctagtgcacaacctaggaattaacaaactaatgactgagcgtactgaaagggtgcgacaaaagtacccccacaggcacatgacaccaccatttggtctcccaaaaggctgacgccgaagatgccaattttgcacatagtacaacttgaactaaagcccttatagttgattaacaccagacatatgtttggtcagccaactatacaaagatcgggcctttatttacacaacacaaacactctaaaatgtgaataaagcggtgac

SEQ ID NO: 104799 - DNA, 338 bp, Glycine max
  unsure (1)..(338): unsure at all n locations
agcttctggtgggacatcttgacttgctttccaatctgacattcaccacagattctgccttcttctattttcagattggggatgcctttaacagcacctttgtcaatgattttcttcatgcctcttaagtgcagatgtncaaatctttgatgccatattctgacttcatcttctttggaggatagacatgtggaggagtagctggtttcttggggtggccataggtaacaattgtcctttgatctgctgcccttcattagaacttcactttttttatttgtcaccaagcattctgactttgtgaagtttacattgaaccctttatcacacagctgact

SEQ ID NO: 104800 - DNA, 296 bp, Glycine max
gcttatcgagtcggaattattgcgtgctgacatctgaatgttgaagaaggaaattgtagattgacttagggatatgaagttgtagagctttatagcgttggttctaaatcccacatagaagacttacataagtttgtctgatacaggaaagaggagttgagtacaaattttgagttcaagattggtttggatttttgcaggttccggaacttaagaagcaattattgaccattctataatgaatgggagagaggttgtgtttctaccaatgacaaagtcaatcgctatagaaatgt

SEQ ID NO: 104801 - DNA, 209 bp, Glycine max
atatgaaatacttatctatttcaatttattggagtgtagagcactctaagtaacatatctttccctgtctaggatgtgcgtggcacgagagaaacaaaatataattagtgggagaagggtttggaaaaatgacactaccttaccatgcctcatgtcaagatacactgtccatattcaccctcttccctcaacttagctcatgtttactt

SEQ ID NO: 104802 - DNA, 409 bp, Glycine max
  unsure (1)..(409): unsure at all n locations
agctntattatgccctctcccctcggcggngatttcttcttcggcgaaggcaagatagttgntggcagtgatattatcgaccaaccctccgaaaccttctatcgagaatgtctgggccacgtgggcctcattcagaacttttactaacaaagcccgataaggctcggaactcatgagtaactcccacagcgagaccctgccggagtttttgtgaggtgttcgataaccttgaattcgctctgctgaattatacggaggaactcgctggcttcctctagcgacacctnncttttaccatcctttttctctggaaggccttttgcccgaatatctttattcgaagcgtggggtgcttcgccatctgtcctccaccacttttccttttccttgacgttcgcgggttggactg

SEQ ID NO: 104803 - DNA, 427 bp, Glycine max
  unsure (1)..(427): unsure at all n locations
agcttccatcaattatacttattatgtagnttatttaattattgatgcatttaatacttggaaggtgatgtttgaccaaaaaaatgttgtatgttatttatgtaggtttttgatactcgcgatgaattattgaaatgggttcaggaggttgcatttgagttgggttttattgttgtcattttgaggtcagacataggaaatcaacctggaaggaagacatttatcgtcttgcgttgtgagaagggtgacaaatataatataaaaaagatgcacagacagtcactgggactagaaaatgtgattgcccttttaggttgaaaggaagaccactaaagactagtgaagtatgggtacttagggttctatgtgggtctcacaaccatgatngtgttgagacattggtcggccatccatatggtcgttgact

SEQ ID NO: 104804 - DNA, 454 bp, Glycine max
agcttgtagggttaaagtctcacgattgtcacgttctcatgcaacaattgttagccgtggctatacgagacatcttgccaaacaaagtcaggttaacgataactcgtctatgctttttcttccattctatatgtagcaaagtcattgatccactcatgtttgatgagttggaaaatgaggccgcaattatactgtgccagttggagatgtattttccccctgctttcgttgacatcatgattcacttgattgtgcatctggtcagagaaatcaaatgttgtggtcctgtttatcaacggtggatgtacccagttgagcgatacatgaagatcttaaaagggtatacaaagaatctatatcgtctataagcatctattgttgagaggtacattgcagaagaagccattgaattttgtcataatacttagagaaagcaaacctggtgggcttcctg

SEQ ID NO: 104805 - DNA, 266 bp, Glycine max
ttagggacagacatgtacaactatttttttatattaactcttgactcacctacaatgactctattctaccacataagtcatcgattagtcgataagcgtctaccatcaatgccgactgcaagagacagtatctaattaacaggagcgagaacgggtcaggcgaaacaagccggctacaaaccgcgcaaagaaacataaacgttgcgcttccattgtggcccaaaaaaatgtatgcgctttactcccaacacagcatggcccaatgc

SEQ ID NO: 104806 - DNA, 413 bp, Glycine max
  unsure (1)..(413): unsure at all n locations
agctnggaaagatttgattgaaaccagtttgggtaaagcgctttagtgaacatatctgcgagttggtgggaagaggaaaccggaaggaggttcatgagtccacaaagaagttttcgtcaactagatggcagtcaatttccagatgtttagtcccgtcgtgaaacactgtgtttgtagcaatgtagagggcattttggctatcacaatatantgcaggatgtcttgaatggggaacatgtaagtctctacgtagtaaaataaccattgtagttcacaagtgggtgaggcgagggctctatatttaacctctgtagatgatctagagactgtagattgcttctttgttttccatgaaaccagaggattaccaccgaagaaaccataatttgtgactgatcgacgagtgtcaacac

SEQ ID NO: 104807 - DNA, 378 bp, Glycine max
tattctctgtgaagtgtgaactatatatctcttgaacatatatttgtagatccgcatggatactcccagaggaatcaaggactcaattcctgcttggattaagttttatgtacagggctcctggtgaaaattccatacagctgaatatactatgatcccccagaagaggtaagattctagacttcttacgatgtagatacacttagaaagagagatgacaaatctaaatatctcttttcccattgtgggatagaattgtatctatggcctctctttgtggtgctcgtgtatatgtcaaattaccatgtgatggttacttatacttttcattctaatggcatgcactactgtggtccatgaattttttttttcttttta

SEQ ID NO: 104808 - DNA, 391 bp, Glycine max
agcttcgaccttagatccttcttgttggatcagactcattatcttatatcattaccggcacaacatacttaaaaccaaaacttcatccgcagatccgtcttgtaagactcaagttcaatactgtttcatctcagtcctaaggcagcaatacatttcttaatgctaaagtcacctaactatgcatacaaatggatgatcagaccaagagcatacataatttaagcactaatagaagcattgaacaccagaaacataatcaattagatattaaagtaattacatcagttgttcttcagaaatccccaacataggtgtttagccagcccttatagaagacaccctaacaataatgagcttaccaaacctatgtatctctacaaaagttgcttct

SEQ ID NO: 104809 - DNA, 357 bp, Glycine max
  unsure (1)..(357): unsure at all n locations
agcttcacagnttatttttttcacacttgagttttggaagaccacatactaagtctttcctaactagatgatataaatgatggatgttaatgtgttccaccctacaatgccacaaccatgaatcatcatctatcttactcaccaagcaacttaactcatgagaagatgcatgctcaacattcagcatataaatattacctattctcttaccaatgtggaccaacttacccgatatggcttcacttataagataacaatttctgtcaaactcaatcttgaaacctttatcgcaaagtgactaatgtttagacgttatgctttagtgcatccatatgtagcacattctttatcctgagt

SEQ ID NO: 104810 - DNA, 435 bp, Glycine max
  unsure (1)..(435): unsure at all n locations
agcttataagaacaaaattgtcttaatcattttcaaatattcatgtgaattangacgcatcaacaagaatcaagccaaggctattgtgcaagcaatcaatggggcaaaacacaccaaatgattataatgatggatggctcacattctcacaaaggtaaaatcatcactttcaaattgagctttcaaaactatcatgacatgtagagaaaaatcaagaatttcaagtcacaaaatgtcaagaacttttattttcaaaacaattacccatttctcgaacatatcctataattcaaagaaaaacatgcaaagtcgtacgtgcacacaaaattgacccacaatattaaactgaaaatccgacgaaactaacaacattaacaaattaacacaactaacatattaacanaaccaacaaaactagcaaaaccaaagaacact

SEQ ID NO: 104811 - DNA, 266 bp, Glycine max
  unsure (1)..(266): unsure at all n locations
agctntcattgttcaatttcgagcgtgtcgatatattatctgcctgaatcggacctttgagttaaaagttatgaccatttgaatttctcgagagcctcgcgctgttcaatttttgcgtgtcgatatactgtgcgcctgaatcggacctccgagttaaacgttatgaccattggaatttctcgagagcatacgttgccaatttcgtgcgactaatatattatgcgcctgaatctgaccttcgtgtaaaagttatgaccactcatatt

SEQ ID NO: 104812 - DNA, 345 bp, Glycine max
  unsure (1)..(345): unsure at all n locations
agcttctcgaatgcctccttcgncgacaacacttatattcctgcgcccgtcttctccatctgcatctccaacggcttccttgtttttttgaatttcaaataccgctccccctactactacctccttaacggccaattgcggatatatatatatatatataatatacaataaattcacgtataatcttatgaaccccaacaaaacaaaaaatagttattataaatatttaaaaaattaaacaactcttttaagaatatatattctaatttaatatataacaaaataacttagtttttggtgattaaaaaaatataacctctgtaattaaaatatacatgtgaatat

SEQ ID NO: 104813 - DNA, 380 bp, Glycine max
  unsure (1)..(380): unsure at all n locations
tagaaattatatagtcaactattntgtcctcacctgaaatatttccactggtaagccttctggaggcttgaagccattgttatccaagctttgcagtctaaaaagtctatcttcacctccttggtacttctgttctttataatgagttttaatataacatttttaattactgattcagatccttccagatatgataaggggatcatcaaaattgttccacaatgtcgagactgcaactcctgaatatatggaactggaagccttcaaaaagctatcttactgtaacaatgtaaagaatctagctgtttatacccatcaactgcgatggataaagtcaccagcagagctcaagctgatgaaagaatctgcatcaattgctt

SEQ ID NO: 104814 - DNA, 90 bp, Glycine max
agctttgcaggcagctacctagtactacaactgtgtcatgtcgagcactaattgtaaccatgacgaacgagagactagcgatacatactt

SEQ ID NO: 104815 - DNA, 216 bp, Glycine max
  unsure (1)..(216): unsure at all n locations
ccctagatcacctgcggcatgcaagcttcctntctaacattttatttatgcactctcttgtttgtgaagctcttccttgcatgacgtatctcctatgggatgatgcctcctctcacctctttttcttctcgattccattgcctttaacttcaagaagccaaccactccattgttgaataagatccaaggcctacaagcttcacatggagctccgtc

SEQ ID NO: 104816 - DNA, 398 bp, Glycine max
  unsure (1)..(398): unsure at all n locations
agcttattggaattatcatcacaagatgctttgttggcacaaaataagttgctctctaagcaacttgaaatcttaacagaaacacttattaagttgccaactaaattgtctactggttaaccttcacattcttcagttttccaagttaccggttgtaccatntgtggtgaggctcatgaatcaggtcatttcattccccttgaagaacacactcangaagttcactacatgggaaatcaattgaggcaaggttacaaccaaggaggattntcagggtttcagcaagggtcctaaaatagcaagggtaatggagagccaccctggcatcaaatcacaaggaccagggcaacttttcacaggccacctaacaaggtcaatattatcaaaaaccccaactg

SEQ ID NO: 104817 - DNA, 438 bp, Glycine max
  unsure (1)..(438): unsure at all n locations
agctntatagggagccatgccaatggtataatgatttactgtgtgataagtgaactctatcaatggaagagaactctcccagtttcctttctgctctaagacacatgctcttaaaaggtcctccaatgactgaatggtccgttcagtttggccatcagtctgaggatggtaggctgaactcagtctaagcttggttcccaacgctctgttcaagctctcccaaaatctagaggtaaatctaggatctctatcagatactatgctagattgcacaccatgtaacctgacaacctcacttatatacaaggtggtcaacttttccatggaaaatctgatattaatgggaatgaagtgagcaaacttagtcaatctatcaacaataacccatatagaatctaaacctctaggggttctaggtagtcctaccacaaaatccat

SEQ ID NO: 104818 - DNA, 416 bp, Glycine max
  unsure (1)..(416): unsure at all n locations
agcttgcccgattcaggaattaaaattgggtttttacaggggataaaatggagactgcaatcaatattgggtattatattctgatcatgccttttttactatggatattattccatgctatctgacataaatatcccgttgcatttttgcttgtagttcgcttagacaaggaatgaaacagaatattattcatttggatagtccagaattcaagcactagagaaggatggagacaagatggctattgcaaaggtaaagtaaacttgagaccttagccttgttttcatctatcatgaattagctngcatttctagtaaaatggtttagcaagcatgctaataagttgtttttcttcaaaattgcattatccagtgacatcctctacgcgtagttgagaagcacctaatctgctttat

SEQ ID NO: 104819 - DNA, 431 bp, Glycine max
agcttagttactatgttgactaaggcatcaagttttccctcaagcttcttattttcagcaaatgaagatgaatttgtggccacctcatggactcctctaaggacaataacatcatttcttgcactgaattgctgggagttggaagccatcttctcaatcaaattcctagcctcaataggagtcatatcaccaagagctccaccactggaagcatcaatcatacccctctccatgttgctaagtccctcgtagaaatattgcagaaggagttgctcatgttaaacaagtggcctcagatatcttaagaagggggagttgaattaagataactcacacctttcctaatttaaaattctattttgattctaacccacatcccaagatttctttcaaaatgaactcctaaataattatgccaattaatcttacta

SEQ ID NO: 104820 - DNA, 425 bp, Glycine max
  unsure (1)..(425): unsure at all n locations
agctggggttacaactntaaaaccaaaaaagatatctaattntgcatattgtagcttttttgtattaaatccttctggttgtaattgtgatgccatgatacttacatactagtggtactntaagattgatgcctgtggcagtacttggaaattcacatatgcttttttttcctctctcacccagctccgtaaattccccaaaacaagatacactaacaagtatatggagatgctaagttgcttcttctgatttcaggcttggcaggtctagtagctacttatgggttgaccgggatgtcctttaccctgaaggttatgatatgatcgggtttggtcctgatgaaggatgacttaatatattggtctaccattatgatatgaaacttatctcgattgaggtatctccaaagaatttatatattttt

SEQ ID NO: 104821 - DNA, 467 bp, Glycine max
  unsure (1)..(467): unsure at all n locations
taagtcacctgcggcatgcaagctcngcattggaattgcgaaagccccactccatcattaggattagttcctgacatctcaaacaaacaaatcaaacgtaacaagacaattatagttgctgtttgaatacctcacccactcaagtgtatcacacaattatggcttttctctaatgaaacactcttgccttntaccactctaattccccttgagttcttaggtaattcaagagattatggccacaacaaagaacaattcaccaatatgtgtaagggaaggctagaaagacaagaaaaggttaaccaagaaaaatgctaacaatgtttttaggcacaaatgaaggaaataaaattcagaaattaggaattcaagtaacaatccttcatgcaaccagtatattaccttaaagagattttttttttaaaaagttcttcaagcatgaaccattcagcccaaatttttttttt

SEQ ID NO: 104822 - DNA, 213 bp, Glycine max
gtttctttatctcacattcatcaaaaactgatgctttggtgctggaaagcacatctatctcctaatttagacaatgattctagaaatgacatatcttttgtggagaaaaaggagaacactaagcccaaatatgcgattctccaccatccattctaccaaaaattgaagggtaggcacttgatcatctctagcttctttggcggatagcctctc

SEQ ID NO: 104823 - DNA, 259 bp, Glycine max
  unsure (1)..(259): unsure at all n locations
agctatcctccctcaattaacttgtgaacagattttcatttctcatagnaagctcacattacggtgcatgtcttttataacatacgcactacctcatacttatgaaaagagaccacacttgataggcatctgccttctatccaaatagtctttacacccatgaatcaaaagaacacaattgtcttgcaaaatcatgtgatcaattaagctgttcatatgcttcatacggtcctgctcatattccaaaaacgttagtttt

SEQ ID NO: 104824 - DNA, 313 bp, Glycine max
  unsure (1)..(313): unsure at all n locations
agcatgcctctttaattaaataaaacaccactcttttgagtatanaattgataatattcctttacattcttaagcaatttgaaatttagtttagtagtttgttcttggaacagaatcttagtcttgttattttctaccctctctacgggtatgaatgcttttgcacacccttaaattgatactattgctgctaattcttagtctcattcatcaaggtaagcttgcctcgttaattaggttaaataaataaaacaccactcattgagtataaaattgatactattgcttgtaatcttataagaagttgggctcc

SEQ ID NO: 104825 - DNA, 376 bp, Glycine max
  unsure (1)..(376): unsure at all n locations
agctttacagcagattntagtaatgacctccttacctataagtaanataacttaatgccattaacctagggaattaaaacaaacttaatggctgagtgtaactgaaattggtggcaaccaaaagtcacccccaacagccaacaagtcagccaccatatggtctcccaaaaggctgatgcctatgttgccaattgggcccttattacaacttgaactaaagcccttttagttgattaacccaaaacatatttttggtcagccaactttacaaggattgggccattatttagacaaactatacactctaaaattgaaataaagtggtgtcatttagtcctccatttgggccatgatacaactcacaaccttggacttt

SEQ ID NO: 104826 - DNA, 292 bp, Glycine max
aggactgatctttctagggtctttttaaaatctcacgaacaaaccgccctcttgggggtgcacaggcctcgttcgcatgatcatcactatcatcggtatgcctaatggctccctgaagaccaaataggtcattcttaccacctcggagcggatcctgcgctccatggttgataattagaactccaataggcaaaacaaaatgatagcacatacttgaactctgaccagaaatactgtatattatacaatgatgaggacagcaaagccatagagcatatttccagttgaaaca

SEQ ID NO: 104827 - DNA, 436 bp, Glycine max
gcttttataaaataagtgtgaagtatcttaataatatgtaaaataacacaaataaatatatctatattctactattttatgttatattctttcttattgaggatttttttattaattttatgttgtttcttaaaatatttttaatcaagtttaaaataatataaaaaatacatttaaataggtattatatttttattatgttaattagtgtcatagttaaaatgaatcatctaatataaaattattccaaaaataatagacaaaatacattatttaaataataaattaaatattataagtagcataatggttaaaataaataatgtaacataaaaaatataaaatataataacaaaaaataaataaaattatcatcaatcattataaatgtctatatttataatgctaaattaataaaataaataatataatcctt

SEQ ID NO: 104828 - DNA, 284 bp, Glycine max
  unsure (1)..(284): unsure at all n locations
gaccgtgagcaccagagctgcagctgcgctggtgctaatgtgagagtatttttgtacagnggnncgntggaacctatatttatattaaatgagcgagggtgctcgtccttgtttgaagggggtggtgtatccttgtagataattcacgacttatatataatagccgggagcttaaagataatgtttgagataaaccatttacttatagataaagtcgaagattatcataccatgtatgttatgtgacgctataaataaaataatacctgctcaatagataagat

SEQ ID NO: 104829 - DNA, 362 bp, Glycine max
aagtatttatatggtataaattctcctgctccattaagcttttgatgtctttagaggtacttcctcgttgactcttttgtcctgaatggaattgccatgacacgtttattgtactgtctttgaatttggtagatgatattgcgttgtgggaggtaatttcgatggaattaactcaccatccttcatttgccagattgttatgacatttgttgttggatcacctatgatgtcttgtttccaaggtaatctatatcctttcttgtggcataaacatgaaaccaatcaaagaaaaggacatttattttgactctttctacaaatacgtaaaacttgccttggacttgttttctgtttgtaccctt

SEQ ID NO: 104830 - DNA, 461 bp, Glycine max
ttaagtcacctgcggcatgcaagcttgttaatgagataaaattatgattatgaccaattatccactctcatacatcgccaactcgaaactcgataatctatttgtattgctattctataatagagctcccacataagagagaaagaaagacataaacaagtctcttttgaaaaaaaaacaaagaaagaaaagagaaactgacaaaaataattagctctggagttggtacagaattcttccaagttaactagaaattttgaattcaaaaccagtacatacaattaatatgccgttggtacaagcagatgattgaattttttaagtaagctcttatgtttgaattttataaataaaaaaaatatgtttaaaatgaaaaattctattaaaaaagtattttttaatggaaattaattattaacaaagttaatgaaaaaaattatttgcatacatctgcattaaat

SEQ ID NO: 104831 - DNA, 427 bp, Glycine max
  unsure (1)..(427): unsure at all n locations
agcttgcggccacgtcggggatcgaattatctatgagataaaattcttggcttcattntgaagtgttcgttcgaacttgattcgtttgtgtccagttctttgattgttatgtactccaagtgtgcgaaagttgaggatgcgcgcaaggtgtttgatgggatgactgtcaaagacactgtggctctaaatgctgttgttgctgggtatgttcaacagggtgctgcaaacgaggcactgggtttggtggaaagtatgaagttgatgggttcgaagccaaatgtggtaacttggaactctttgatatctgggttttcacagaaaggtgaccaaggaagggtgtctgagattcttaggttgatgattgcagatggagtggagcctgatgtggtatcatggacttctgttatatttggttttgtgcaaaact

SEQ ID NO: 104832 - DNA, 383 bp, Glycine max
  unsure (1)..(383): unsure at all n locations
atatgaaagtttacgctaaaaaatttaataaactcatgattttctaatctgtatacatatnttttttatattatgttataagagtgaaatccttatccattttatggataactatttttgtaaaagaaaaaacctcacatgatgatctttaatttttttaattatatattatttttattcacaacatttaaaactcaaattttactcaaagaaattgaacttattaattacatgtataattatttgttatgcaatctaatgtttttaatgattaaagattgactaaatctgtcaaacgacaaacaatctaaatccatgagcagaatacagatgcgtgacaaaaatcatatcacatttgatacatgttgttcaatatagtacaa

SEQ ID NO: 104833 - DNA, 432 bp, Glycine max
  unsure (1)..(432): unsure at all n locations
agcttggttgtggcaatagcaccccaccttgacgttccaaagtctnctgacccccgcgacatatctncaggtaccactctgtggtcaacaataaaagcaggaagttcacccttcaacacttcctcatctcaagcttgtaggattatggggtacccatcacatgtggtactatgtggcggtcgggcgatggtgcacaacaagttttccacatccacaatgcgcgcataaacccaccatcccctgtagcccacctccaactgagctcacgtactcccacgtagcccatatcctcgtttctctcaacaccgggtccccatcaatcctcccaagcttccccaacatcaaagtaatgcaacattcaaacagcacaaactatcacagccaagaaaacagagcaaaggcagaaaacttctgccaaacaccaaccaaaat

SEQ ID NO: 104834 - DNA, 386 bp, Glycine max
agcttcaacatcagaccactttcaggtgttggaactacttcacatggacttgatggggcctatgcaagttgaaagccttggaggaaagaggtatgcctatgttgttgtggatgatatctccagatttacctgggtcaactttatcagagagaaatcaaacacctttgaagtattcaaggagttgagcctaagacttcaaagagaaaaagactgtgtcatcaagagaatcaggagtgaccatggcagagagtttgaaaacagcaggtttactgaattctgcacatctgaaggcatcactcatgagttctctgcagccattacaccacaacagaatggcatatttgagaggaaaaacaggactttgcaagaggctgctagggtcatgc

SEQ ID NO: 104835 - DNA, 443 bp, Glycine max
accctaagcacctgcagctgcagcttaacttagttgttgggagacattattggactgattcgctggaacactggttgtgtcttaatggttttcctgcaactactattcatggtgaccagtcacaacagggtaatctattgcataaatggtaatagtaaacagctctttgaatggggtgtcttatgtctatgaagattggtgtataacataaaactgttatagtgtgtgaaaaatcgtgcatattattgttaaaaaataaattaaaaatatgaaacgtttaactgaatccccaattcccccttttttgccacatttcactttcccatattgctgttgacttttgtttatagtcaccattctttgccatttgaaatgaattgcatgttccctgattgagtatgaactctttctttaataattcttttcactctcacaactgaagt

SEQ ID NO: 104836 - DNA, 355 bp, Glycine max
ttggcccttcctgcttgggtgacaaaagcatggctgggccgcactacaaactataatatagaaaactgctgcaaaactaagtatgcatcacaacgcctattgcatcgaaggcagagagtagtctaaagaacacgatgaaaatgcgccggaaaccacatatgacaaagctcatgcagcacgactgtattagacgtgagcgagaggcaataacataaacaactgagctcaatacaacaatgtggcaatagaatggaaccacatgagagcccaccaccaaatgcagaacaccatgagagttgccatgctatgagaccttagaacatacgtgtaatgatgaagaaactccttgaacaag

SEQ ID NO: 104837 - DNA, 364 bp, Glycine max
ccttgcaacagtcctaaggaagtagacacggagatggacaagaaaatccgcagtatggtgagtagcattttgaaagaagcctctgtgcctgaagctgatgaagatgttccaacatcttccaccccgaatgtttctatgcctgatgttgagaaagatgttccaacatcttccggcccaaatgatgaagtactctcttcccccagcaaagagagatcaacagaggaagatgatcaagccgcagaggagacccctgcaccaagggcaccagaacctgctccaggtgacctcattgacttagaagaagtcgaatctgatgaagaacccattgccaacaggttggcacctggcattgcagaaaggttac

SEQ ID NO: 104838 - DNA, 428 bp, Glycine max
gcttgtaggattatgggggacccatcacttgtggtactaggtggcggtcgggcgatggtgcacaacaaggttttccacatccacaaagcgcacataaacccaccatcccctgttgcccacctccaacagagctcacgtactcccacgtagcccatatcctcgtttctctcaacaccgagtccccatcaatcctcccaagcttccacaacatccaagtaatacaacatttaaacagcacaagctatcacagtcaagcaaaacagagcaaaggcagaaaactctgcccaaaacaccaaccaaaaatcacagcttttctcacttaaagaccccagtaacaattccttcgatccaattcgttaaccgttggatcgactccaaaattttactggaagtctatagtgcataagcctacattgtgaccggtggga

SEQ ID NO: 104839 - DNA, 442 bp, Glycine max
  unsure (1)..(442): unsure at all n locations
agcttctctcctctcatgagtaatggatccatctnctatgatgcattgactggncaagcaatcccatgatggcaaatgagcatgctaaaacaacaatctaatctgtagaagttattcaattaaataactctatagaaatggtcctcataatttgtgatatgtggataacaagtagataatgatggcaaagggtgcaaacagaatatgaagtgactaaaattgacaactatacggcataaggataatacaacaagaatcaaggaaaaagttcataacataaaatgggaagcagaaatcctgacaagagaagtgaacctgcaaatataatcatccatgagtagatctcctccatgaagtaagcatgatactgttgtttatcaagaacaacaaaaggcacaacatattcaatgttataaaattcagaaaataataaaaaaagagc

SEQ ID NO: 104840 - DNA, 388 bp, Glycine max
  unsure (1)..(388): unsure at all n locations
tttttgttgatgaaatagattcgctcctgtcttacgtatgctattttatagccaataaataagtttattgctatagtaggttctgatattctgagccataacattatcatctacaaggaagtttcataacatgcaattttactaagtgaaaatttactgtaattatgccatttattntttcttactaatgcaaattatcttttgcagcgtgaatcagacggtgagcatgaatcaagtagacggctaaagacacagtttctcattgaaatggaaggctttgacagtggtagcgagcaaattttgcttatggttattaccnactcactggtttcaaattccttttttatttggctcagcaatacactcaaatgttagctcactgcctgtt

SEQ ID NO: 104841 - DNA, 456 bp, Glycine max
  unsure (1)..(456): unsure at all n locations
ggaccctaagcaccgcggctgcagctatgctganatattacaatagacctcctcaacctcatcagcaaaatcaaccacagcagaacaattatgacctctccagcaacagatacaaccctggatggaggaatcaccctaatctcagatggtccagccctcaacaacaacaacaacagcctgctccttccttccaaaatgctgctggcccaagcagaccatacattcctccaccaatccaacaacagcaacaaccccagaaacaaccaacagttgaggcccctacacaaccttccctcgaagaacttgtgaggcaaatgactatgcaaaacatgcagtttcaacaagagaccagagcttccattcagagcttgactaatcagatgggacaattagctacacaattgaatcaacaacagtcccagaattctgacaagctaccttctcaagctgtccaaa

SEQ ID NO: 104842 - DNA, 415 bp, Glycine max
  unsure (1)..(415): unsure at all n locations
acttaagcaccgcggctgcagcttgaataggaagtgggaagggtgttctnttttgctttatagnagaccacagagtggttcctggatatatgtcgcgggggtcaggagaccttgttgacattatgtggggtgcttattgcccataaaccaaactctgatcaatttcctacccaacccggggcatagtctgttattgtaaacctgtgattaacctaatcatgcgagctcttgtctttctacagattaaacgaaaactatacctcaaacctcggatgcttgtggtggctggtcaactgtgaatcttgcgtaatatgtggatggtggcctttggtaatctattacaatgtttaaaattgtggacgggaagctctaatggtctctggttatctataaccatgtgtgttatcgattacca

SEQ ID NO: 104843 - DNA, 435 bp, Glycine max
  unsure (1)..(435): unsure at all n locations
agcttgaacacacatgtgtcactaagatattcttgcatattgatggaataacaacattaacaagaaagcaagcacaaaaattaatatgttaatgagacagtgaacaagttaaggtggaaaactaaattcatatttatataaaccacacatacagaaatagaaacttctatccaaattattaaggaccaaaaccatactcaagatatagcacacaacaagactttgtccaaaaaaattcaagatgcaaaattatgtctctggtgaaacacaaatattaccaggaaagctttaaagcttataacggaccaacctataaacacgttaatataaaatatcctcatgttccacaccaataaaatatttcaccatatacatgacaacaatatgagtntttgtgtgtaagaggatgggcatgcaattgcgccattggaccgc

SEQ ID NO: 104844 - DNA, 426 bp, Glycine max
  unsure (1)..(426): unsure at all n locations
agcttatggccaaatatggaaaagttattatccctatagctaatttgtttaacctgattaatattatcttactctattgacaagctcgcattgcatttctttggtttaaaagattttgcagaaaccgcctatgtaggtgaaaatgcaaacaatcataattcacgtggaaaggtaatatatgccatctttataaataattgattcttctgactaagttgcaatattaaatatgatatcatgacattataaaagattgcacatacatagtacatatgccatcacatatatacaatttaattctaacacatagagtgagtgggatttgaatttcttcaaaagggattacaggactntattcccctaaaagcagaaaacaaagcctacggttaaaatgttattaccaaagatgaattatggtaagaccat

SEQ ID NO: 104845 - DNA, 433 bp, Glycine max
  unsure (1)..(433): unsure at all n locations
agcttgtcatttatatgcaacataacntgttcatttttatctgtactgcagtctgtgtgtagtgagaatgagaatctagaatctatcactatcttttgttgtttgagttaatgaatcaacattgtcatgcanggcaagaagggtgtttggataaaattacctattcatttagtcaatctggtngaanctttattgaaggtaactaactttattgcttaccttaatgataatggttatgcttgaaatgtttggttaatgaaaattggagtgctgttaatgcttttaggtatcaattttatttattaacttatttccatgacacttctatgcaggagggtttttggtatcatcatgcagaaccaaaatatttaatgcttgtatattggattcctgaaagtccaagcactattcctgcaaatgccacacacagggt

SEQ ID NO: 104846 - DNA, 429 bp, Glycine max
  unsure (1)..(429): unsure at all n locations
agcttgtgcaaatcaaatcactcctatatttcatctctagcatgcattttctntctttacccactcctcacgtttggttttttggggaaaaacaccataactaaacgcgccgcaagggatccctatcgcaccagatccaaatctagaacgatgggtgatcaagaggagacgcaggaacagatgaaagccgacatgtcggctctgaaagaacaaatggcctccatgatgaaggccatgttaagtatgaagcagctcatagagaagaacgcggccaccgccgccgctgccagttcggctgccgaagcagacccgactctcttggcaactacgcaccatcctccctcaaacatagtaggacggggaagggacacactggggcacgatggcagccctcacctgngatacaaccgagcggcttacccttatgga

SEQ ID NO: 104847 - DNA, 335 bp, Glycine max
tctaagtcacctgcggcatgcaagcttgtgagtataggaatacatggcacatatcttcatggacaaaagccctcttaattacaacacccaaggcggacaatatatgcatcaccacatgagaggtgtttaatcacacacacctgtcagttagaagcaacctattctctcagtgctcgaacaagttatatattatatcatcagaaccatggctgtccgcatagataaaccttatggataacctgcaccattatgacctctgctgtttagcacactataacaacacactcattgggagtatcaatggactcccaattagagtggtgataacatgggcc

SEQ ID NO: 104848 - DNA, 436 bp, Glycine max
gcatgcaagcaggagacgcgtgtttatctctttatatctagtcacttaaaaaggtgtgacttttgaaaaaatcttcatacacaagccacttgaagaatcgcgacttttggaaatgtatttttcgaaatcagtcactggtaatcgattaccattaaggtgtaatcgattacacatcaacagatgtgactcttcattttgaatttcgaaaattaaaatgtttagaagctctggtaatcgattacaagtgttgtgtaatcgattacactagtttaaaatgatttaaaactgtttaaacctaagttgtaactcttgaaatttaaaatcttaacattttaaaacactggtaatcaattactaccttctggtaatcgattaccagagagtaaaactctttggtaatgattatgtgaaaacttcttgtgatactcaattgttt

SEQ ID NO: 104849 - DNA, 416 bp, Glycine max
aagctgcaatattgctattgtttttgtttctagctactccatattgttgacaattaacttgggtttctacctttgtgatcatttagtttaatgtgctaagttgtttcaagtttggtctttggcaagtgtgtacaaagttagtacctatcactttctatattttttgttgttcagacctcactatgaagactaaaagtttcaagtctttaatatgttagtttttaaatatttttggaggtagatgttgaaggtacttacgtctggccttgtgggagagctcattttcttgaaggctatgtcatgttttaataaaaggctatgtcagtttttaacagtgttactttattgctatgaaaaattgttgtctttgagagcggtgatgctcacacaatagttcaaaacaaagtatcaataat

SEQ ID NO: 104850 - DNA, 441 bp, Glycine max
  unsure (1)..(441): unsure at all n locations
agctngaacttgtgaaacgtcatagggaaattggctccctctttcactttttaacttanaatttgacaaagtgtgattatctttacaaaactaacaaagatattctcaattcatttgcaggtttttgaacttgatggcattctcaaaaatcatgaagacatatgacatggtctcatttggttctgaaagattatatatggcaacagtcttttcacttatgttctctagtacttgcttaattattgtttaccactttaggtcactacaacaaatgtatgaagggagtatacttaaaggtggttgatatatttcttatcttctggttatacatgtttcatatatttcccattatttacaatttcattacaggtattgcaaaggaagacagaagaagctaccttggctagaaataggtcaaaagaacttttggaatccagaaat

SEQ ID NO: 104851 - DNA, 439 bp, Glycine max
  unsure (1)..(439): unsure at all n locations
agcttcaacattcaattgcgagcgtctcgattcttgtctggacttaatcggacatccgagtaaaaagatattatcgtcttaattggctcagagcttctacattctaatttgatcgtctctatatattacgggactcaatcaggcatccgtgtaaaaagttattgtcgtttgagttggctcagagcttcaacattcaatttccagcgtctcgatatatgacgggactcaatcagacatccgagntaaaagttattgtcgtttgaattggctgagagcttcaaaattctatttctagcgtctcgatatgttacgggactcaatcagacatccgagtaaaaagatattgtcgtttgaattggctcagatcatcaacattcaatttcgagcgtctagatttgtgacgggactgaatcagacatccgagtaaagagttattgtc

SEQ ID NO: 104852 - DNA, 429 bp, Glycine max
  unsure (1)..(429): unsure at all n locations
agcttcattncctttctgtaattgcttattgtattttctgatttcaagagaactgtccacaatgaaatgaggtctgtagtatatcatacatggttcttcaaatgaaattatattctatgagtatagatacattagattgtggatgctagttacttttattctaccattaacattttccgtaagctacgtgtaatgagtataaaattttcttaattttgatgtctaaggatctggaagcggaaccatgcaagtttggagtattgagaccaaaaatgaggtattctctattctctactataatatgattctgctattttttttaaaaaaattctaataggatactttaaaatgaggcaaatgtttaaaccagcatctgtagttcatagatgtggacatgtttattgatgtattactggaataattcaagct

SEQ ID NO: 104853 - DNA, 450 bp, Glycine max
  unsure (1)..(450): unsure at all n locations
taagtcacctgcggcatgcaagctttggtagatcaaggagagtggacctcgttcatttacatattagcactgttggtgtttgggaccatactctttccaaatgtagacgagctagtggatttagcagcgatcgacgcttttcttgcttattatcacaacaaagaaagtctggtcatcgtttgtttggccgatgcatatgacacattcgacctaagatgtgaaaggagcggtgcaagaatcgtctgttgtacccccactctttatatgtggttgatctcccatgtntttgatgatgacaatcaagtgatttctttgcaacatcatcaaggcaatgcatgatccacattctccccctatgtcaagcaaattctttttgacatcatcaaaacttgcatgatttacattctccccctttttgatgatgacaaccattatccaaggcttgatatt

SEQ ID NO: 104854 - DNA, 409 bp, Glycine max
  unsure (1)..(409): unsure at all n locations
ctaataaaactgagtgttggtatgacttttaaagnagnnatcacaaaagtcaacaaactcactatacatggtgttttgtgattgaatgataatgtaaaattactttaattgtcagtatataatccattttctcaactatcaattgcaaagaaaaattatcacttttggtgaaattgtcttgagctagttgaaaatgatttcggtgtgcactcaaagatggagtatatatgatgaatttcttttcagggatattctccactatgttcaccagcagctctcaaaagtgatattcttaagaatcctgttgtcacagagattgcagagagattggggaagacaccagcacaagttgcccttctatggggcttgcaagcaggtcatattgtgcttcctaagagcactaatgagt

SEQ ID NO: 104855 - DNA, 436 bp, Glycine max
  unsure (1)..(436): unsure at all n locations
agcttccatggtgacccctacatatttctctataccctgcctaagatggtttttccaaaagtcgacttanaatctatagaatttaatataatttttctaattacaatcttagaatttaaaaaaacctacagtaatatttttttatcaaataaaaactcaccataattgactatagaatntacaaatcatatttgataaaaatcgtctctcttcccaacatgatgatattttattactcaataaaattaattttaaattcatgatttatttggtgaaaaaaatcttaaaacttaaaagagagtcactttttttccctaattataccatgcaataatattaaaaaattcaaatgaaattttaaattaaattatatatgatgattggtttaatttctgacgatacgctaatcttaattattttactttaccagaactac

SEQ ID NO: 104856 - DNA, 433 bp, Glycine max
  unsure (1)..(433): unsure at all n locations
agcttgctgagcataggctactgcacacnaaccatatggccattatggnggaaatgttgacattttgcagtaacattcatggactgagctaattaaacggatcggcaaatctggcttaccttgccatgtgctttgagtttctctgagtttttgtttcctcattttttgtgtaatatagggtggaacaaaagaaagaaggaaggcttatccaagtcaacagaagattcacttaaaaacatgagttaacatttcacatgtatactttctttcctaatttggttttctttctgttaaaattcgtgaggaagtcaaaataacaaatagtttttcactataaagtaattttggtaatatttgttgtataaaatatttaaaatgagaattttatcataaaaatatttgcacttatcttggtaataaatactggtacatg

SEQ ID NO: 104857 - DNA, 429 bp, Glycine max
agcttcagaacaggtcagagacccatcattcttttttaggtgggtcgttactatcttggaaggaaatgacttaaattgagaaatctgtcaaactcactaatgaagcaaaaaaattgtcgttgaaaatggagagaagagtgaaataagatgagtaacttaaaatacttgataaatgtgtacagtactttgaaacttaggtctgcttttccttcacgtgggttgattgagttgatgccatgataactctcatttgtctttccatgattgcatcgtgcgcgaaacgcacacggagaatctataataattgaatttccatcattactccccggacaacacaatcaaaaataaaaaagagtaatttacaaaagaataaaaaggttgaataagatgaagtccgattgaagccgggacgactgggtggaccacttt

SEQ ID NO: 104858 - DNA, 354 bp, Glycine max
tctccggcttctataagagaaataaatatatattatcccctgcacaacctataaatactgctaggcatgtggccttaacccatcatcgaaaaataatgagccggattggtcctaaacaataatgaggagacgactctcttcataactctcgaaatctattcacagccctcatcaaagactcttctggaatttgatgataaggatgagatggtagcttttacttcatcaggctaggactctgggaagtatttcttcaaaaatatttcaccactttatcccacgtcttaagactattacctttaagtgaatagagccatatttttgcctctccaaacaaagaaaataaaacaagct

SEQ ID NO: 104859 - DNA, 423 bp, Glycine max
agcttgatttgtaatattgggtttggggtttattatttttacttacttccctcttattccccattgctcctctattcctttgggttttagctactatcccatactttcatctaccttgtccttggccccattacaaccttaaaagaccttttgatcctcatgtgcatgtatttgtgatgtggttgtcaattttagagtcttgccaagtctatgtggtgtttgttttcatgggtgctctgagagtaaacagtagcctagacacctgagagatagagtgcatatcttgtgaggctttatcacttttcattcttgagctgattgactatcttgtcatgtttgagatgctaggatgattttcatgacaaccttgattctttaactcttaacgtgttggatgttacccattcttttcattccttgaga

SEQ ID NO: 104860 - DNA, 440 bp, Glycine max
  unsure (1)..(440): unsure at all n locations
gcttatgcgcatacttctgtacgaacgttcactngcacaagacattcttataactaagaaaaatgcacccatatacaatcaaggcaccttcgttacctagattatttgtatgtacttccaaggtgtatttgttacctacatcacacgcatttcctttgctaaatttacatacatgcatactcaaagcactctggctatcaaaaattgcatacgtgcacattctggtatttctaatacctgtacatacacaaacttcatgatgaatcttgactatctacacaataaggtgctacatttcatgctttattcaagtgtttttgctacctaaagccgcatgaaaattcaagtatattttcttttgccgattaaaattgtattcaaattaaaaggtagttttgtaaggtattttctttacatcacatgcaacatatatatatttt

SEQ ID NO: 104861 - DNA, 456 bp, Glycine max
ttaagtcaccagcggcatgcaagctttatatgggcctactgctgcttctataccgttttcaacctcctaacggcctagctacctgtaactgggttacagaaccttcgaaccttcctagcctaactaactcagttttcatctgcacgaactgcatggcttccttactcatgaacgtagtcctctatgtaagagggaaaagttactctccgtttgggcctttctaaagacacccctccactactgtcttccacttgtactgctaatggcaccccttgcgtctgctgcgtatcactcccatgccctccaaaccagacctcgtcctctaggtcataaagtgcttgaaactcataccagtcttcccatgaagtgtcctctggtgtgagccctacccactgcaccagcaccatgcgtcgcggcccggtatcggaaggaacaaccttggaagcgacaatagtc

SEQ ID NO: 104862 - DNA, 436 bp, Glycine max
  unsure (1)..(436): unsure at all n locations
agctnttgtcaataggcgctacgaaacaattataatttcttctttatgaatggcattaatatcgtctgccccacactattttaatattagttatcataattaaaatcgttatcattgtgttgaagcactacactcggtcgcctcacattatttaactaccataactcgcttaaaaagagtgtgtactaatcttgctcttttctaatgcttaattttattttatcaaagctaacaaaaaaattgattttgtaaacaagtaaattatccggaaaaaaatgaggttcttctaatttttaaaattttgaattaagtctctcttttggtaccagtgcaggtaagtctcattaattttagtttctaaccaacggtcgagaaaagaagagaacaatttaactcacttttttccgaaaagactatatattcacttattcttcct

SEQ ID NO: 104863 - DNA, 421 bp, Glycine max
  unsure (1)..(421): unsure at all n locations
agcttgctgctaatgccttcttagcacatatgatattatctgtcaatgccatgtcagcactttgtgaggctactggggcaaacgttcaacaggtgtcctattctgttggtacagactcaaggattggacccaagtttctcaatgccagtgttggttttggtggatcctgcttacaaaaagatatcttgaaccttgtttacatctgtgagtgcaatggccttccaaaggtggctgagtattggaaacaagtgatcaagatcaatgattatcagaaaagccgatntgtgaaccgtgttgttgcatcaatgttcaacacagtttcaaacaaaaagattgctattctgggatttgccttcaagaaagacactggtgacacaagggagactcctgccattgatgtatgccacgggctactatgtga

SEQ ID NO: 104864 - DNA, 375 bp, Glycine max
tagctcgcccaagcgagctatgttgtcttctctataatgcaccgccttctggagaacttcctggaatgcccaagtgggcctggttgctatttgcaccctcctatttactaaatacacccattgcctttttttgctgattctttttccgtaacgttacggaaacttaccaattatgtaacgatacttgttttctttccgtaatgttacggaaccttaccgattacgtaatcatcccttttttgccttccggaatgttatagaactttacggattgcgcactaatacttccttttaactttcggcatgtcacggaacttcacgaattgtgctacaatgctttcttttgacttccgacatgtcttggaacttcaccaa

SEQ ID NO: 104865 - DNA, 439 bp, Glycine max
  unsure (1)..(439): unsure at all n locations
agctntaagaagtgcctccacttcctttgttttaacaacttgantaatttgagattttagaatgtcaagataaacatgaatgaagaaaaagaagaggtcctccaatatagaatttctagaaatgatgtcaccaaaaaaacataaccaactgaattgaaaattagttaatgttgaaaaaaaaagtgtcacacaacttggatagaagaccccacaaaggaggccacttgaaggaatagatgcaacattgactttgaatgattcacaaaatgacatatatacgcaatcaattagattcaaaagttaagttgtccatatgtgttgaaagacataagtaaaatttatcaactatacaattgacaatgtatttaccttaatcttgcctacaaaattcatggcttcttctatgaattcaatgagattattttggggaggtttctca

SEQ ID NO: 104866 - DNA, 370 bp, Glycine max
  unsure (1)..(370): unsure at all n locations
agcttcaggctgctcaattgctccaggttgttgtatggaagggcaaaggtttgtatggtggtcagcaaaggagcacaaaccacaaacccttgcgacaggtacaaatttctgattcaaggccagctgggttaccaagttaaccaatgcatccagttttccttcaagcttcttagtttcagatgatgcagatgggtttgtagctacctcatgcactcctctaatgactatggcatcatttctggcgctaaactgctgggaaaanaaggacatcttctcaattaaatttctggcttcagcaggagtcatgtctccaagggctccaccactggcagcatctatcatacttctcgtcctattactgaggccttca

SEQ ID NO: 104867 - DNA, 431 bp, Glycine max
agctttgcatgtctagagatattatagagataaaggtccaagttctacagagatttgagagattttgttgtgtgaagatctgcagagactagagcttgaagcagaagccggtttgagagcttgagatgagtttgtgagtgattgtgagatcctaaaggtgaaggagacatcctcaccacttgtatttttgcaatctttcatcttgttcttctctttgttgtaaaagaggcttcctggttattgaaagctaaatcccttgttggatcttccctgtaggtacctgatataaatatatttctatctatttaatgatgttttgtgtgttctctgtgctatctacttttcactccagtatgcttttaccttgatcacgtagatgcatgctttcttatggtcattcaacagtggaaactggtctgattctaaagtcc

SEQ ID NO: 104868 - DNA, 80 bp, Glycine max
ggaggaatggggatggaatgacgtagataacgaacctgtaaatgactagcaacattctcttttgtcaaacctgggacatt

SEQ ID NO: 104869 - DNA, 382 bp, Glycine max
acccctctaatagctaagctcatgtgattgagaagattccttgagaaacttccttgagaagctcccttgagaagctagagcttaacttcacgtacccctctaatagctaagctcactctcgtgccaaaatacatgaaaatgcttagctacacacacccctctgatagctaagctcacctccatgccaaaatacatgaaattacaaaaaaaggccctactaccaagactactcatattgccttgaaatacaaggctataaccctatactactagaatggccaaaatacagggccaaaaagaaggaaaacattctaatatttacaaagaagaggggttccaaacctggcccatgggctcagaaatctaccctacgattcatgag

SEQ ID NO: 104870 - DNA, 247 bp, Glycine max
cccaaacccgtcccttgatccttcttaatggaagcatcaaaattgcacttgatcataccttctcaaggtctcacccatcggttagcttcgggagcccgaagagaaacactgggcttttcatcaacatggaaagattgggctttctggaaagttagccccaaagggaaaaccttcttattgaacacctattggtttctggtgcgatgctaggtgcaaccagcattattactgatgcacccagcattaa

SEQ ID NO: 104871 - DNA, 421 bp, Glycine max
  unsure (1)..(421): unsure at all n locations
ctgcagcttcatagagaggactcccccttttatccttcttatttngatgcaggtacgcacatggctaaggaggaggatacctccacaaaccagattcatgagccatcttctacacttgtacctgatgatgccacaccatctgcaccagcacctgagtcagagcatcctatctcttaggattcaccaactgctcaggtgttggaccttaataagcatgcacaggagcagccacaggaggagcatggcgtttaaatttttgcattctgaacacttgagtttattttcagttattttatgatttatgtcatttcaatttcagcttttatgtttcagctctttaaatttcagcatttaaatttcagtagtgtaattgtttgtttgcttgtacaaaaagcttgattgaacaatgaattggttgaac

SEQ ID NO: 104872 - DNA, 438 bp, Glycine max
  unsure (1)..(438): unsure at all n locations
agcttagatatttgctatcaattggtgttttaaatntcattntaagtatatntgtantttggaactttacccttgtattgtgacacatgtggttatgactatgagatatcaaatgttgtgtttgtgaaagcaaatggctaggtgaggtggatccttctcttgggatcatcatggcaagtgtatgtaggcatgaagatgtggccattttcttcttttcttttgagttatttaatgtatagtgcttaccaactcatgtgattatggatatttatctttttaagagttgtatatacttctaaatagttgggtgtttagttgctatgatgttgtatcttatgataacatgttgtagtgcccaaaatacatggctntattcagttgattntagtgtatagatgcattaccttgaagttgtgagtttttagatgatggtttttt

SEQ ID NO: 104873 - DNA, 399 bp, Glycine max
  unsure (1)..(399): unsure at all n locations
agtaacgcngatatcaaacgtctttatgacttcaacttctatgaaaaaaacataattcggaatccttcaattgcgtgtcatcaagggtcaattttgcaaaaacaatgagagaaaaatatacccttacatagcacttcctaattaaaattttaatgaaagacattgaataaacctatttggaggaacaaagcaaacagtcgagtttataaaataaagaaatcaatacctctctaggaaccaaatctatcttaagagttcgctagaggtccgtcataaaatttgtcacaggtggcaaaacttctagaaatccaaagagataaataatttcatatcagatatcctagtatgaaaatcattttctccccagtaataaaacatcacaatcgattgcctatcaag

SEQ ID NO: 104874 - DNA, 435 bp, Glycine max
  unsure (1)..(435): unsure at all n locations
agctngatgtgccgagattcaatggctctgacgccacangctgtatcttcaagataacgcagttcttcgagtatcacacaacaccagatcatgagagactcacgatcgcatcattctatatggaaggttaggcattagcatggtttcaatggatgcaccggaatggtcaattatcgtcttgcccggcatttcttcatgctctccattcgcgattcgcatcaaccacatacgaggatcccactggactgctatgtaaactgcagcagcgaaccatggtaaacaactacctctctgaatttgaagctttagcaaatcgaatcatcagattaccttctacaatggccctgagctgcttcatctcgggccttacaccggcgattcgccgagaggttcaagttatgcaaccagcctccatgagtcaagcagtggcctatg

SEQ ID NO: 104875 - DNA, 429 bp, Glycine max
  unsure (1)..(429): unsure at all n locations
agcttgtttcanaccatagatggagtgatttattttgtctaccatagactntgagtcatctgatacaaagttttctggttgcataatataaattggttcttcaatgtcaccatttagaaatgcagtcttaacatccatctgatgtagctctaaatcataatgagctaccagtgccattattggtctaaaagaatcctttgaagatattagagaaaaggtttatttatagttaatgtcttccttttgggtaaatcctttagcgactagacgagccttatatctctcaacattgccctttgaatcccttttggttttaaatatccatttgcaatcaataggtttcacactttcaggcaattcgacgagatcccaaacgtcattgtcttgcatagatttcatctcatccttcatggcattgatccagtttta

SEQ ID NO: 104876 - DNA, 435 bp, Glycine max
  unsure (1)..(435): unsure at all n locations
agctnttgtcactccacccatatctggccttcacattaaccaaacttaacaccaccgacaacaacgtcaacgaattgttgcaccctagatacaaaggcttctttgaatcactttgtaatgtatcatacataggggcatgtgcttgctgaaaagactcttgtccaaggtcacaaatcatagcctccaagcgatctcctatttctacatcaaatggttcagattgnggctcactatgcatgtctatcatttcaccatgccatatccacgtcgtataattcctcttaattccatcacataataaatggtcccgaatgtcgttgactttntgctgtatctcgttcaaacaatttatgcacggacaaaaaaaactttccatattcatctggtcgacttctttttgaagcaaattgtaggaactattccacgccttcctca

SEQ ID NO: 104877 - DNA, 238 bp, Glycine max
  unsure (1)..(238): unsure at all n locations
tcgacccgttccttcaaagattcattcgctcgttcttcgttttctttagtcttcaacgggtaagtacctcaaaccaagcttttcaattcattctatgtacctgtggtggtccacattatgttccatgtatttntattcttgttttcatttactctttatatccccttttgacatgcttaagccacttattttagttctttcttccctcaatctataaatgataactaatttccaccga

SEQ ID NO: 104878 - DNA, 430 bp, Glycine max
  unsure (1)..(430): unsure at all n locations
agcttgtagaatggccagacatgatacatgtcatggtttggtttggttcaagggtaaaagggatgccccacattatttccatgacacaaatgcaaaaatgatgatttggaaactttatgcaaaactggtcatgcatgcacctatgtggacactcaagtgtcaaatttttatggtcatgtgatgctagggctcaggattcattccatctattttagtcaacccaatatttccaaaatatgttcttttatccatttgtgcattcatccgagtccattttgggcgtccgggaaaattttcacagcattcacccctcaggtgtatacacattttttcaaaaactagctatgatcaatgaattttttttcaaagaaaagttggaagtcatctcttttcaaaagcatgtcggttnttcagctaaacaacttatttt

SEQ ID NO: 104879 - DNA, 401 bp, Glycine max
  unsure (1)..(401): unsure at all n locations
ctttttttggngcnccaaaatgtgggaatgtgctcaaatatgtggggcaattttggtttgttttcttgcttgattgggttggattgggggtttgtatgggatggccctatgcctataatgcattttgaagcaatgggacatgccacattgtccccgttctcttgctattgatacctaaacgcacgcccaccaagtgttcggtgaaatgcctcaatggcattagcgcgtgacttttgtaaggaaacaacccatggggcattttggtttgcacatattttctattttttgagacatgcattcattcccgaaaaaggctatagtaattgccccacatatatcctatgcctaggaaccaaagtttttatgcaaaacaacacaagaggaggtgcatgttgggtaaa

SEQ ID NO: 104880 - DNA, 424 bp, Glycine max
  unsure (1)..(424): unsure at all n locations
agcccttgcgaattggtcttcgtcggggatatgatcgaaacgggtctngaaagaggcaaatttgatcatctttctttgatgaatgagaaaactgggacaaatgaagaggatgataatgaggaaggaactcatgttgtggctgccattcctacatggccaaacttcccaccagcccaacaatgtcatcgctcagccaatatcggcccttctcattacccatcacccaatcatccacaaaagccatccccaaatcagcaacaaggcatgcctgcttaccacacgcccaatgcccaaacaccacctatagcgcanaccaaaaaggaattttgcagcaaaaagcctgtaggattcatgccaaattccggtgccatatgctaacttgcttccatatctacttgataatgcaatggtagccataacccct

SEQ ID NO: 104881 - DNA, 263 bp, Glycine max
  unsure (1)..(263): unsure at all n locations
agcttggcgacgacgaaggcagcattgttcctgtgcccaggccgaggaccatgccgctcttgacggactccacggccttgtcggcggcgagtctcttgaggtcgtcctgggtgagggtgatggcgcggatggcggggagggagtggggtggagtgcncatttttatggagttaggggtgcgtataataaggcgcgtggaggcgtngttgtgtgctgaatacagagatggtggataggagagggattatgaaatccttgattat

SEQ ID NO: 104882 - DNA, 316 bp, Glycine max
  unsure (1)..(316): unsure at all n locations
gcttgaactctgaaatgctgatnntgcgttactgcttgtgcaacccacaagaatagggatcctcttcctgactagacctgttattgtcactgtcctctctcttgcggctttttgtctatgctgaccgagtttcccccaccatctgatggaggccctcctttattgaatacaacaaataatctcttgatatgcctcatgttcagcagctctactttaatgagatccatctctggttctaagtctgcaatcacctttgcatactcgtggggctgattcacaaaagcactcactctgctgtgcatacaccaacttggat

SEQ ID NO: 104883 - DNA, 455 bp, Glycine max
  unsure (1)..(455): unsure at all n locations
agtcgacctgcgggctgcaagcttgtagggttaaagtctcacgattattatgtgcttatgctacaattgncagccatggctatacgagacatcttgctaaacaaagtcaggttagccataactcgcctgtgctntttcttccatgctatattgtgccatttggagatgtattttccccctgctttctttgacatcatgattcacttgatcgtgcatctagtcagagaaatcaaatgttgtggtcctgtntatctacggtggatgtacccggttgagcaagacatgaagatcttaatagggtatacaaagaatatttatcgtccagaagcatctattgttgagaggtacattacagaagaagccattgaattttgttcagaatacattgagaaggctaaacctgttggccttcctgagtctcggcatgatgacagagtgggtggtaagggttcaag

SEQ ID NO: 104884 - DNA, 435 bp, Glycine max
agcttcgagatattaaaatggtcataaattttatgtctgaagtccgattaaggcgcatgacatatcgagacgcttaagattcaacaacggaagctctcgcaaaattcaaatggtcataacttttcacatggatgtccaattcaacgacataatataccgagacactcgaaattgaataacggaagctctcgagaattcaagtggtgataacatttcacacggatgtccgattcggggacatagtatatcgtgacactcgaaattgaacaacagaagctctccagaaattcaaatagtcataatatttcactttgaaatccgattccggcgcatagtatatcggtacgctcaaaattgaacaacggaagctctcacgaaattcaaatggtcataactttacactccgatgtccgattaaggcgcataatatatcga

SEQ ID NO: 104885 - DNA, 427 bp, Glycine max
  unsure (1)..(427): unsure at all n locations
agcttccatcaagtggtatcagagcacaagagcttctttgttgtgctccttaaacctccattaattttttgctttaccttctcttccattgttgnttcttcattttttttctccatgtgtctcctcacatgtcttgtgctaaatggtgttaacatgattctttagatnttccaccaattaaacttgctataaaagctagatttgatnttctatggttcaaatttcttgttcttgttcttgaaccatgaattgtgttgagtttaggttcctttgagttttgtcttgttatttttgtggctgaaaactaaaccataaaattcttacaaaaatattaaagtagaagaaaacctcaaaaatctagagtgacttattcacctattgtaggtntgtcatagaagtcatgtctagtcatgaaacttgtcactta

SEQ ID NO: 104886 - DNA, 435 bp, Glycine max
  unsure (1)..(435): unsure at all n locations
agctngagctngcactaagcaactagaggtctcttatttcgttaattgcaacccaaaaaaatgactttatgcctatatggcaggacttgcttaagccatgagtgtgggcttagcgagctccaaggttaggatgacagaacacaaaatgttacgaatgcgacaaaacacacaatcctgtgatgaaaacagtaagaacactagatgatcctcacctagtgtgatcagaatgaaaaataaagatacagaatacgcaatatagacacaaaattatattaagcaataacacttgtgcagaatgctgggataagcatanaggaagtgcacgggaagaataacgagaagttatataattaatctttcaacttacaacacttacgagtcacacgttttgcatgcagcctaacaaaaacaattgcattaatggtgttggcgctt

SEQ ID NO: 104887 - DNA, 436 bp, Glycine max
  unsure (1)..(436): unsure at all n locations
ctgaggatgaagcttgattagagaggtggttatatttcttatanaactccttgaatagccataccttatttctttctgcattgacttggtatttgtcaaactgtacagattggtagtggggatagatctgaacgcatcagaacatactaatttcctcagggccgtgtaactgatcatagagttggtatcacttatcactcagtagatgatgtgatgcaaggtgaaaatctcgatgtcttcattgatgctcttctattgcaagaagaaatggatgcaatggcaacttttagttcgtctcantaaaaccagtggattcaattcagctgttcctgattattaataatgtcttattggtgtaatttacttctgaaaagattaaaagtgtcatattttgcttctggtgccaggcagaggaagaagtcgagataacatatca

SEQ ID NO: 104888 - DNA, 434 bp, Glycine max
agcttaattcccaaaatcacatctacttgtatcatgtcttttatgtcaaagtttcgaaacaataaggacttcacataatttatgaaatgcatattcctaccaaatatcaatatgtcatcccgatacaaacataaaatgacacatccattattatcaaattgtttcacatacacatatttatcactattattaatttgaaaatcatacaaaagaataacttaatcaaacttttgtgtcaatgctttggagcttgtttcaaagcatacaaagatttaacaatttatttttcaagaaaaaatattttcaaagaaagtcacatctctagactccataatagtaccattagaaatttcagatacttctgaattaataactaagaatctataagtagtattatgtaaaaaatatccaacacaatataattaatatttttt

SEQ ID NO: 104889 - DNA, 426 bp, Glycine max
  unsure (1)..(426): unsure at all n locations
agcttgttgaagaactcagaatatatcattattcttctngcncacacatcgttcgcgtgtatgatatccactccacacggattgaagtagaggagaccttcaaccatataacgcaacgtggcggacaaaagtgggcagttaacttgaatggtcatcattgtcaatgcggaaggcattctgcgcttcactatctatgttcacacattattgcagtctgtggttacgtgagcatgaactactaccaatatatagatgttgtttacacaaatgagcacatcttataagcttactccgcacaatggtggcctcttgggaatgaagcggctattcctccttctaacgacgcatggacacttatccctgacccaactacaaatcatgcgaaaggtttaccaaaatcaacaacgataaggaatgagatggatt

SEQ ID NO: 104890 - DNA, 184 bp, Glycine max
  unsure (1)..(184): unsure at all n locations
aaagggggaaggtttttttttttcntttcnacaggagatcagaaatataacccccccccccccaccaaaattagataagactcaacgaaaagtaccggcgcgaacagaccaccnccggccagacaggcgaatcaattgcatttttcgcaaccgatctaagataaaccaaaaagaatgcacctat

SEQ ID NO: 104891 - DNA, 427 bp, Glycine max
  unsure (1)..(427): unsure at all n locations
agctctgaattcattctatgcaccctcatttgttctttcttgncttgcatgtcttcatcttcattcttctaccatcgatgatctttttctttgttttaagcgagtctcgactgatcgtttaagccgtaatcttacttaatcaatgataaatgaatgtcaaccaatcgtttctgttgtaatctcatttaatcgctgttaaaataaaattcaaccgaccgtttgtgtcgtatcctcggttaatcatcataaaaataagtttcaactgggcatttactttgaaagtactctcttaatgaagttgaaaacaaccaagtgaaaccaaacctaaaatcaactcacaatcaagcttttgtcccaagaaaatagcttgaatccattcaaggtccaatgccttaaacgatctttattacttttatcgggtgaaatg

SEQ ID NO: 104892 - DNA, 348 bp, Glycine max
ctaaacacagcctgccgcgctaagccccagatgcttatgggattaacaacttccagttgggcttagcacaaggttaggctaagcgctagggttttaaacttaaacgtcacgttggctcgctaagcgcagatgtgcgctaagcgcgccatacgaagttcagtttttaaaaatcaaaggcagaggcactctgggtgttacctttgcacccaaacctttgcaccttcctaaccttgagcacttgtgtattgactgctgcgtctgtactgtctctctacatcttcattgcttcatttcaagaacaatcccaagaagtgagaccaattctattttatatttcattcttcaaac

SEQ ID NO: 104893 - DNA, 431 bp, Glycine max
agcttgtaggattatggggtacccgtcatatgtggtactaggtggcgatcgggcgatggtgcaagttgactctccacatccacaaatcacacataaatccaccatccccagttgcccaccttcaactgagctcacgtactcccacgtagcctttatcctcgttcctctcaacaccgggtccccatcaatccctccaagcttccacaacatccaagcaattcaacatccaaacatcatgaactatccaaaaccaagaaaatagggcagaggcagaaaagtctgcccaaaacacattccaataccacagctttccttactcaaataccccagtaacattctcttcgttccgattcgttaaccgttggatcgactcgagaattttactggaggtccctaatacataaatctacattttgaccgttgggatctac

SEQ ID NO: 104894 - DNA, 427 bp, Glycine max
agcttccattgatttaatacaaatatgttttttatgtattccagcagagcaacctaggaagggttttactacatgtattgaaagagaaactaacttgcttgaattagttcatagtcatgtatgtaatagtaatgatgtgttaatgcgttgtggtgagagatactttattactttcattgaggatttctccaaatattgttatctgtatttagttaatcacaaaagtgagttgtttgataagttcaaagtatataaaacaaaagtcgaaagacaaattaatattttacgttctgatagaggtgaagaatacacatctttagacataagtatttttgtgaaatgcatgatattattcatgaagcgacacctttgcttctcaatctaatggtattgcggaaagaaagaattgtaccttgcttgatatggg

SEQ ID NO: 104895 - DNA, 434 bp, Glycine max
agccttggggccatataatcaaaactccttctgctgttttatctccgggacggcgattagttaacgagtgtatgaatactcggctcaaaaaacatccttatgccatatgagatgttgagagataagctgatgaatgaattaaggcggctacattatatcctactctcaatgtctatgatcattgtaaatccatgagtgaagaatgaggtgttccatgaactcagattactattctaccgtaaagagaacttaaaatacgctgcattgtttggctcaccctctttactacctcctttatgattgagtacttactatcctatggagtcttatcgattctgagacttcacacactgatagtgctcgttatcatgataaaaacaataataagagtgaaatatatgagaacgagtgaaacctgaactgctttcgaaaaa

SEQ ID NO: 104896 - DNA, 64 bp, Glycine max
ggagtatatcatttgatcttaaagttataacttcagtcctaagattttctaattcttcatttaa

SEQ ID NO: 104897 - DNA, 457 bp, Glycine max
  unsure (1)..(457): unsure at all n locations
ttaagtcacctgcggcatgcaagcttgtggtgatggcactagnngtgatgcttggcatctcttcttgggctataaataggatgaaatttgtgcccaaattggacgaaaaaacggaactggattatgaatctgatgaatatgatcaccactcaatccctcgaaaggagtattgaaacctggatcttgccaacgtgaagtggatgaggggtttcgtcacgtctacaccgctggcaatgactatggcacacctggccagggaggaaattaaatattaaatgttattaattagtatatatattaattaaggatgcattataaagctgtatatatgtatgcatatgtcttgcagtgtttgatgtgatgagtaatgaatgctanctgatgagtgggtgttggtaattagatattcatgttagtaataattagttagagaataatttcactactacacataaca

SEQ ID NO: 104898 - DNA, 431 bp, Glycine max
  unsure (1)..(431): unsure at all n locations
agctntgtgtgaagattctatccatgcactgggttgtttttttctttctttctttnaactctctatatataattaactaattaagccctctcatccctccattccccattctctctcacacaaaatggaagcaaaattggttgcacagtgcaagagtccaacactaagtttagctcaccgaaaaccaaaacacccttgtgtggtggttggagtgctggcaaggcctgttgatgagatttcaggagaagcaagaaaaacaaatcatgtgtacaaagatggtttgtttgatcgcataaccataaactatttatcaaaatgcgttcaagaggcaacaggttcctagcttcccttttaattcatactacccttcaatgagtaaatttgaatattcttnttgtcatttctcctcattttgaggcttataatatatg

SEQ ID NO: 104899 - DNA, 436 bp, Glycine max
  unsure (1)..(436): unsure at all n locations
agcttattcaaatgtgtagatctgcactattatntttaatcacacgtcataaacattacaacaaatctgcggttaaaacccagaaaaacacacgcaccataaacactacaaaacaacagatctgccatcttcatcttcgagggcgcaaggacgcaacgttcacacttgccccaggtgttcgtcgatgttgcagatatgggctgaaagggatgacgaatgcgattgcgagagacaagttatgaagagagagggataggagcgcacatatcggccgaggcactaaaattaaattaccgaaatgaaggaaagaagaaagagagggttaattanggaaatgggtaattttaaaatgaaattatcataataggtattgtttttaaaaaaattacgataatgagtaaatggtattttgatatatgattttacaataaaaaaa

SEQ ID NO: 104900 - DNA, 441 bp, Glycine max
  unsure (1)..(441): unsure at all n locations
taagcaccgcggctgcagctgtatatagactaggaggtgtttatatgcttatgagagtggcttataaccttccaataattttgttaagcttattttaataagcttcataagcacttaatcaagctatttacctaaacttgatctttgaccaagaggtcangagtttgatcgctgtcacatctactctcttaatatacttgaatttcagcggtaggtaaaatggacatatgcattgtccacactccacacttcaaaccctaaagtttaatacatgacgagcatattagacactataacattcatataagtcataacctaatagcttgcgcttttaggatagtttgtccttaaaaaccaaattggcaaaatctattacagtaaaaccaagctatatatcaattctgatagatttgggaacacaaccataataaatcctagttt

SEQ ID NO: 104901 - DNA, 438 bp, Glycine max
gatccttaagcacctgcagctgcagctataacattacatacttatctattattatccaagcatgcatgtaactattatgtctatcataatactttatatattcacaatggtcattcacactcttatggattggaccgtgggatgctatcctacatttccacttaaatgcacatatctaaacccacttatgtgtcacctgtgaaaaaccaaaatatcattgatgtagaataaaatacattgattaactaaacccacatttcatactcggacccctcatatgggagcgctggcttcggtccttgaaagcatgtcagcactaattaatctgacgtcatcggtattagaattacaattaacaataattgaattactgtttgcaagatattcaactccataggagtgtttgccaatatatcaatgagtgggcacagataatta

SEQ ID NO: 104902 - DNA, 430 bp, Glycine max
  unsure (1)..(430): unsure at all n locations
agctntatgacacccttatccaatcatgctatcacttggnngnngnagagcaactcattctgaaactcaacgggaattcgcgagaagagcttctcaccatgtgaaatcccatgaagcttagttgtaaattccacaagataagagtaatccagttccttaggcctgtaaggcctctccctgatcacccattccatcacctatcaatcaataaaaaacgaataaaatttcatttttctctaacaacagctaatgcccttttcattctacatcatttttcaataaatctaagatggctntaacataaaaattcacattcactatatacatgactgacctgaagggcacgcttgttcatgttgagcttcctgagacggttaacggcgtgaaagacgtcaacgccgtgaacggggaggccatctctcatccaact

SEQ ID NO: 104903 - DNA, 365 bp, Glycine max
agcttgcacgaacaccgctaacttccacttattatgataagaaaacaaagcagaattgacccaaattctactttgatctaatctattgaacctaactcttgccggtccattcagtgagttgtgttcagatcgttcaagattgtgtttagatccatagaattggaagcgaataagtcaataggttgtatgcctagcatgataatgcagtcttttgatctgagatatatagggttcgttgctttaaatcgcaaagtggatgaaggcttgggtggagaagacactatggctagtcgtgctatatttatggcattgatatctggacttccttctttggaggagtcggtgttagatgtctataaaaattt

SEQ ID NO: 104904 - DNA, 426 bp, Glycine max
agcttaaagaagtactcaaaccgggtgtatttattcccaagacctagactctgaagagtctgtcagggccttttcctcctcattcaagcccaatccaaaaaatcttttaacacatactttatctatgaattgtacaaaacacaagactcctcaattgttctcaaaataattttatcttgtcaagcttgtgattaaactcatcgagtccccacagtggttcccatcacaatactcatcatgtattaactcatcgccttaaatggtcttatagtcatgtgattgtacaattcatagatcacaactcaaagcacataacatctcaatgcatatatatcacatacattcggtctcaatcacgatgatataatcccagaagaacatgctatcacacctcatgaatcatatgcactttaattatgaactata

SEQ ID NO: 104905 - DNA, 443 bp, Glycine max
  unsure (1)..(443): unsure at all n locations
cctgaggcatgcaagctcggaggattatggtgtacctatcattgtggtactaagnggcggncgggcgatggtgcacaacaagttttccacatccacaaatcgcgcataaacccaccatcccctgttgcccacctccaactaagctcacgtactcccacgtagcccatatcctcgtttctctcaacaccgggtccccatcaatcctcccaagcttcccaacatccaagtaattcaacattcaaacaacacaaactatcacagccaataaaacagggcaaaggcagaaaactctgcccaaaacaccaaccaaaatcacagcttttctcacttaaagaccccagtaacaattccttcgttccaattcgttaaccgttggatcgactcgaaaattttactggaagtctctagtacttaagcctacattgtgaccgttgggatctact

SEQ ID NO: 104906 - DNA, 438 bp, Glycine max
agcttctgaagcaagactccgttgagtggttatagcactatatcttcatgtaggggtcccttaaaccttcaggtaggatctccttcattgttgtttcttttatggatcaaatttcttgttcttgtttgtgaaccatgaattgtgttgagtttaggttcctttgagttttgtattgctattttttgtggctaaaacatgaaccataaaattcttacaaaaagattaaagtggaagagaacctcacaaatctagagtaacatgttcacctattgtagtttcgtcatagaagtctcgtctagtcatgaaacttgtcacataagattccttatgttgggctgaatttttttttcttgtgtctttgcctaattcttttgctcatgagtgtatgaaaatttttatcctattatttgatttgagtcaaatcttgcatgtttatta

SEQ ID NO: 104907 - DNA, 441 bp, Glycine max
  unsure (1)..(441): unsure at all n locations
agctnggagaggatgcttcaatggaggaaattaaagatagaaggggggagcacacaattcatggaataaaagagggagagaaatggaactttgaagtgtgtctcataagactatcattcatcaaagttacaacaagtgttacacatgcttctatttatagattacgtagcttcattgagaagctttcttgagaaaacttccttgagaagcttctttgagaaaacttccttgagaagctagagcttagctacacacaccctctcataactaaactcacctccttgagaagcttccttgagaagattcctaaagaagctaaagcttagctacacacacatctctaatagctaagctcacctctttgagatgagaagctagagcttagctacacaccccctataatagctaagctcacccccatgacaaaatacatgaaaatac

SEQ ID NO: 104908 - DNA, 426 bp, Glycine max
  unsure (1)..(426): unsure at all n locations
gcttcgttgcaagccagtggttggaggataaagctggatggtttaattgattnngggagtgcataatcatgaattggtcaagtcattagttggacatctatatgcgaggcgattgactaaagctgaaaaaacacttattgctgatatgaagaagttcatggtgaagccaaaaaacattctgcttactctgaaggaacacaatgtcaatagctgttcgaccattaaacagatatacaatgcaagaagtgcattatgttcttccataagaggaagcgatcttgaaatgcaacatctgatgaagcttcttgaagactcttggtcggtggtccgcaaccatctgcttaaagaacttgccaaattctcagaagactatatccagctctttggtggcatggagagatttgacgaattaacgatgtcactact

SEQ ID NO: 104909 - DNA, 422 bp, Glycine max
  unsure (1)..(422): unsure at all n locations
ctgcagcttcttacacatgagagagagtatgaagtattatgaatcagtggggggatgctnctccactctaaaacctccaatctctcaaatctcatccaagctccgcaagatccttcctcgcaagctcagctctctctagtctctccatagccacaaactctcaaaaaactcaacaacccttccagaaattgtgattaaataggccatctcgtcagtgaatgcatacttagcggaagatgagctcgcttagcatacataagtgacttctggcttagcgccagtcatactcactcagcctgaaggtgaagacggtgtgcttagcgagttggccttcactcaatgcctctatacaactcatccttcttccagatttgtccatgtgcttanccatcagatggggcgcttagcggatgatgcgctta

SEQ ID NO: 104910 - DNA, 58 bp, Glycine max
tttatcaaacaatccaataacacaagaaatacatcaaacatctcttttcagttatcaa

SEQ ID NO: 104911 - DNA, 428 bp, Glycine max
  unsure (1)..(428): unsure at all n locations
agcttctatagaaggttngttcctaatntctctacacttgcctcacctctcaatgagctggtgaagaagaatgtggccttcacttagggtgaaagacaagagcaatcctttgcttttctcaaagaaaagctcaccaaggcacctgttctagctcttcctgatttttctaaaacttttgagctagaatgtgatgcctctggagtgggtgtgggagctgtaatgttgcaaggtgggcaccctattgcttattttagtgaaaaaattcatggtgccaccctcaactaccccacctatgataaagagctttatgccttaataagagccctccaaactttagaacattacattgtttccaagtaatttgtcattcatagtggtcatgaatcagttaagtacattcagggaagttgtgagactccatggtttgc

SEQ ID NO: 104912 - DNA, 432 bp, Glycine max
  unsure (1)..(432): unsure at all n locations
agcttctaaactntatacaagaatgaagctctgataccacttgttagacaagtggcctcagatatcttaagaagggggggttgaattaagatattccaaactatttcccctaattaaaaatctatttcactttttaaccaagttatgaattcccttaatgacaatcttcttaaatattaattcaaatgaaacaatttgaatatgaatataaagcgataataaataaaggagattaagggaagagaaaatgcaaactcggttttatactggttcggccacacccttgtgcctacgtccagtccccaagcaacccgcttgagagttccactatcttgtaaattctttttacaagttctaaacacacaaggacaatccttcctttgtgtttagaattcctttacaacaagagactcacagtctcttaatccctta

SEQ ID NO: 104913 - DNA, 427 bp, Glycine max
agcttatgctacaaacatgaattatagacttccttagcagcaaaaccaacaacagcctaattattatgacctttcgagcaatagatacaatccgggttggaggaatcatccctatctgagatggacaagtcctccacaacaacaacaatctatacctcctttccagaatgctgctggtcctaacaagccatatgttcctcctccaatgcagcaatagcagcaacagtcacaacaaagacaactagctactgagacccctcctcaaccttccgtagaagagttagtgaggcacatgacaatccataatatgcaattttagcaagagataagagcctccatctagagtctgacaaatcatatggggcagatggctactcagatgaatcaagcttaatcccaaaattgtgacaaattgccttcacaaact

SEQ ID NO: 104914 - DNA, 368 bp, Glycine max
acggatctaaaaaaccgtttgcgcacacttacacacacataatacttaaacctttgtagaaagataaatgagtaaaccaatctttaaataaaggtataggactaaatgtttaattttgcgcactccatatcatatcatttatagagcattttagaagcattcatttgtgacccatggttgactcaattgacatatattcgtgcttaataatggcacattggctgagttttggaatattgggcctaaatgagcttagttgtggattttagttcatttttaagattcttgatctcatttccatatgctgtcttgtgtaggatatttcttgatctgcagaactcacaattcgatgatctatgctcgggaaa

SEQ ID NO: 104915 - DNA, 316 bp, Glycine max
  unsure (1)..(316): unsure at all n locations
agctaccagtctataatagagcatgtgtacacttgttgtaactctgatgaatgagagtcttgtgagacacaactcanagttcaacttctctcccttcttcttccttcaatttcgtgctcccncctctctctatctcctcatctatcttctcctccattgaagcatcctctccaagcttcttatccaaggctcatcttggtggtgaaactctctctctcatggtttattccttaatggatggcacctcctctcacctcttaatctatgtcttccgctgcatctccatggtggaaaatcaccattaatgaccctattg

SEQ ID NO: 104916 - DNA, 377 bp, Glycine max
gaccaaaagcaagcacgacaacgctatgcagagagcctgaggtagcatcatatccttctacaagggagcctgccaagcctcaccctacagtggctaaagccactcaagtcatgagcatcgacgaagagtctcacatccacgagatgaattctacatagatccacaagatgacacctctaacagaggcctgaaacccatcgaagagcttgtcaagctgcaactcaaacctaaactcatacagtgcacacggcttagtagggaccttaccagccatgagcattggcacatcaccgacgtgctacacaaaaatgtataaattgttgcctggaagctgtctgacatgctgggaatccatcctaacataatctaccacaaac

SEQ ID NO: 104917 - DNA, 120 bp, Glycine max
cttgggtatcattctacccttgactactttctaatgtgctatgcttgagcactcgaatgtagctctttcttaacttcacccaaataattgagcaatggtgaaagcctttgaaatcctatg

SEQ ID NO: 104918 - DNA, 340 bp, Glycine max
ttaccactactggataactcgtatgcaaattcttatctgtgcaatatatctaaatttctgggaagccatagaaatatggccttatttacccaccacatgagaacgagttccaatacatggtagttcattaatggaaagcctatccatagaaaaacctagagatatatggtctgtataggataggaaaccagttcaatacatccgtaaagccaagaacataactacatctgccctaggaatggatgaatattttagagtttcaaattgcaagagtgctaatgaaatgtgggacactcttctatttcacatgaatgaacttcagatgttaaagatctatgat

SEQ ID NO: 104919 - DNA, 287 bp, Glycine max
agcttatctgtgaggattcttttcctttattttgaatttcatatttacgctttgttatgcttattaatcattatacaactgtggaaaactgtcagaatattctacttgtgaattagatctatttggtttgacatggttttgataaatattttttatcgatataaagataattgttattgtgatgttgaatatggtctgccacctggaatataaactgtaatgattatcattcttggctgtctcttacattatgcatgtgttgttccgtctatgactggaaatttcat

SEQ ID NO: 104920 - DNA, 133 bp, Glycine max
  unsure (1)..(133): unsure at all n locations
tcacgcttctaaatatttttaaatgtagattcaacatcagttttcaataccaaaccaatgttaaccaagcgatgtaaacgttaacattggttnttttggaaaaaaaccgatgttaactcatcaaatgttaaca

SEQ ID NO: 104921 - DNA, 260 bp, Glycine max
cctttaaccgcctcttcaacgtctcagaagtgaattgtataccgctgctatgggcaagagatgataatactgttcttctgcaactttagatgtgatatctgtacttcagctcacctgacaaatgtctggcctgtgaaatctaaatgatcaaccattcagtcactccatgcatctctttcaatgatgattgctcatgcattttttcttgaaaataaataaatacataaatgacttatcattgtataaaagaaaagaccctt

SEQ ID NO: 104922 - DNA, 298 bp, Glycine max
atgagaattgctcatagtttgcacatcacttatcatgatacgacgacgaaagacctggaattctagggtggtgatcatgtattcttgagagtcactccatggactggggttggtcgagcattgtaattctcaaaactcacactctcctatattggtcctttccaaattcttaagaaagatggacctgtggcataccaaattgcactacccccgtctctatctaatcttacaatgtctttcatgtcgctcaacttcgtaagtatatccgcgatccatcccatgtgattgaattggatga

SEQ ID NO: 104923 - DNA, 351 bp, Glycine max
gtaaggttacaatataatgcttatcctaacagcaaacatgacatgctaatccctctgatattagaacaaactcatgtaatctatttatgcacacgcgtatgtgtggaatatcctaccatttatatcaacatagaggccatctcacacattctaattgtcacacacatatatgcatttggaaagacattcattcttacgctcaggcattggtcaaaatcacacctaatttatatcttatacatatgctattacaaactacctacatatatttgaaatatatatcatacgaagttttattgtttcactcacatttattcatattggcaagctatttacatatcacacacttga

SEQ ID NO: 104924 - DNA, 304 bp, Glycine max
  unsure (1)..(304): unsure at all n locations
gtctgaagagagtatgatgaactaatggacgttcatatggccaccgatgaagccttggaatgagaaaccaagaaggcccgataggaagaacacgaccaanacaacgtttgaggggctttatanggcagcaatagtgagctcaaactctgaagaggtgaaaggaatcatcacgggtcanaggcatgatctggaaggacgagctaaaggcttgccttatgtcgaaaagaaatttgcccaacagttaaggtgagattgaagggaatatgtgggccatcatcgatgagtgcaaagagaagctaaatct

SEQ ID NO: 104925 - DNA, 440 bp, Glycine max
  unsure (1)..(440): unsure at all n locations
tcaatattagtagcttgtgattattttatttatatataaagaaagaaatattaaaattacataacttctacaaaatatatatatatacattgaaatcacatagattcaataatatcataccacatgtttaacacatatttttatgtggagattattatatattattaaaatatattctttataaaattattgataaaataatttattaaatactaaattgataaagttaaaaaataatttaagattttctttttgcaaattaaaaaataatcaagttttaaatgatctatacaagccatgtccaaaacttttaattaggctcctttaaataaatgagttaagcttgagccacctactttctttcacaagccaaacttaaatttcaaatattcggcttaacctgggtcatangtacccttaacctctacaaccacctacta

SEQ ID NO: 104926 - DNA, 130 bp, Glycine max
cggttcgtccctgctaacttatctttcgcatcatgccatacaggatcagaccaatataaaaccaaacaatccctatgatatacgatcacaaaagtgattctaattcatataccacctaatttcaatttac

SEQ ID NO: 104927 - DNA, 404 bp, Glycine max
  unsure (1)..(404): unsure at all n locations
acatggacttgatggggcctatgcaagttgacagccttggaggaaagatgttgcctatgttggtgtggatgatatctccagatttacctgtgtcaactttatcagagagaaatcagacacctttgaagtattcaaggagttgagcctaagacttcaaagagaaaaagactgtgtcatctagagaatcaggagtgaccatggcagagagtttgaaaacagcaggtttactgaattctgcacatctgaatgcatcactcatgagttctctgctgccattacaccacaacagaatggcatagttgagaggaaaaacaggactttgcangaggctgctagggtcatgcttcatgccaaagaacttctctataatctctgggctgaagccatgaacacatcatgctaca

SEQ ID NO: 104928 - DNA, 415 bp, Glycine max
  unsure (1)..(415): unsure at all n locations
agcttgaanaanatgcttatttgaggaaatgtatgagagaacgtgggagcactacattgcaggaataaaagagggagagaagtggaactatgaagtgtgtctcataagactatcattcatcaaagttacaacaagtgttacacatgcttctatttatagactacgtagcttccttgagaagcttgcttgagagaacttccttgagaagcttctttgagaaaacttccttgagaagcttccttaaaaagattcctaaaaaagctagagcttatctacacacacctctataatagctaagctcacctccatgagatgagaagctagagctcagctacgcaccccctataatagctaagctcacccccatgacaaaatacatgaaaatacataatatgccctactacaaagactactc

SEQ ID NO: 104929 - DNA, 386 bp, Glycine max
  unsure (1)..(386): unsure at all n locations
aatgctactctttaaacaaaaatggcatacaaccttctccaataaacacaaacatcaatgtgaatttagagcagactcatgcacatactttcttacgaacattcactcgcacaagatattcttctaactaagaaagatgcacctatgcacaatcaatgcaccttcgttacctagaatatttatatgtacttccaaggtgtatttgttacctacatcacatgcacttcctttgctaaatntacatacatgcatactcaaaacaatttggctaccaaaaatngcacacgtgcacattctggtatttccaatacctatgcatataccaaacttgtgatgaatcttggctatctacacaataaggtgctacatttcatgctttattcaag

SEQ ID NO: 104930 - DNA, 365 bp, Glycine max
gggaatacgtgagctcacatggaggtgggcaacacgggatggtgggtttatgcgcgcattgtggatgtggaaaacttgttgtgcaccatcgcccgaccgccacctattaccacatgtgatgggtaccccataatcctacgagcttgagatgaggaagtgttgaagggtgaaacttcctgcttttattgttgaccacagagtggtacctggagatatgtcgcgggggtcaggagaccttggggacgtcaggtggggtgctatttgccaaaaccaagcttgaccaatcccgacccaacccgggcatagtcagtcagtgagaacctgtgatgtacctaagcaggcgagctcctggcagtcaacagata

SEQ ID NO: 104931 - DNA, 454 bp, Glycine max
  unsure (1)..(454): unsure at all n locations
gtgcagcttctgtccatgaganagtggttcccacaatacaacagggagtgaagattgctganaactctacccttgcaacaagtcctagggaagtagacactgagatggacaagacaatccgcagtatggtgagtagcattttgaaagaagcctctgtgcctgaagctgatgaagatgttccaacatcttccaccccgaatgtttctatgcctgatgttgagaaagatgttccaacatcttccggcccaaatgatgaagtactctcttcccccagcaaagagagatcaacagaggaagatgatcaagccgcataggagacccctgcaccaagggcaccagaacctgctccaggtgacctcattgacttataagaagtcgaatctgatgaagaacccattgccaacaggttggcacctggcattgcagaaagggtacaaagccgaaagggaaaaac

SEQ ID NO: 104932 - DNA, 393 bp, Glycine max
  unsure (1)..(393): unsure at all n locations
ttcagctaagacctcattagctatcattacaccatggaggatatgtctgcctctgaggaaagcaatttgcacagaactgtatctttcaagtgactntggatagggtaagcactaatctcatccaagagagccacagttactccctcctcatgttcaaataggtgtctcctccatttcaaatcccatctccacatattctggtagaagctacccatggttgaaataagatcgttctgctgcttactaatggtgaagagctaatggtatttgtgatccagactgcagccctctcccagccaattgtctttccaaaatcgaatttatcctcacacctgccgtcacaccagaatttgatgaatatcttgaagtcattgtgctgatatatctttctga

SEQ ID NO: 104933 - DNA, 396 bp, Glycine max
gccactattagctccaacactatgcatggaaatgagggtaggcatggaaatgatggcaggcaagggttggtttttcttaccctacctccgcccccaaatctcataaccacccctgccctcgacggggccagaaattataccccagcccccgcccccgacggaggttgattttccccgcccagccttgccctcaaaagatataattatcaataacaaacaatttatatataaatcaacatcataacaaaatacaattttggacaacaatggaataaatcaaagtgataattgtggataccaatcacaacatagaagatataattatcaataataaacaattaacataagttttaaacattcctaacaagtttcaaacattccacacaagaatcaaac

SEQ ID NO: 104934 - DNA, 368 bp, Glycine max
agccgctgcaactgctgataatgataagatattgacactctctgctcgtacccctaagatatactcaatgtaagttacccctagtctgcttgctcggccttcttttatttttaatgatcatatgatgtctgcattcctatgtcataagtgttgcccatactctatcttgcatttcacaatatcccttagaatatgtctccaatctactcaatttttaggatctatcaaatattgctactatgagaactctaactccgtgctttgttagattggaatctttgtaagtgaaaatgaatccatatgctcaaatgtcggctatggaagtaaacaaggtagtagatgttttacttcataactctctcccaacc

SEQ ID NO: 104935 - DNA, 411 bp, Glycine max
  unsure (1)..(411): unsure at all n locations
gcttgaaatatgctgctcataagtattggattatatgagtgttggattttactacanatgactgggganaaatggactgcaattttcatgtgaagacaggagacggaagaatgctttaacaggagcgcacatcagtgttttagcctaaagcttgttacctctcctgtctttgacactgacaatgacctataattttgtgttttaaattgccttagtatgatccagtgcgccttttaattggatacacattggctagtagtgtgttaaagatgaaaacaatctcatttgttgcaatgccatagttgcaagtgatttgttcatcatgctttgcctgagagtagcctattctgatgtcgctactctgttggtgctggtgagccacttgataggatcccatcttcctctgcacct

SEQ ID NO: 104936 - DNA, 365 bp, Glycine max
  unsure (1)..(365): unsure at all n locations
ttttttggaaggaatatttgggaagaatatttaggttagatccatttactgcacaccctgtcactgataatacgttctacattcgttctgctcaatcatcaaatatgttctctgatgattcatggaaggctaaatttctagcgttgtttatcttgaggatcaagcacagctctctttgaggttagctatgtgtgttgaaattatattattttttcttctcacctataactatggttaagttgcttaaaaccatgcgtgcttagtgcatgcattattggtttctgcgtaatttatggnctgcctcaagattcatgtctcctcatgttataatgagtttggtgggttatctacaaatcttctcttat

SEQ ID NO: 104937 - DNA, 461 bp, Glycine max
  unsure (1)..(461): unsure at all n locations
gcttntggagtagacacatgggaccaactcattttatttcanaaagtcttatctagtcaagatctgagagaccatacaagtttcctagcggtttctaattatatgggccattaagtctatcatatgctgacaatagccgagaagcccatgaatttcttcgggggcggggtaagtgtccgccattgccttggccttggctaacaatcggggaagttcttgatccatccacatggttgcctcttggtgtaaagagtcgatcacccttcctctagcctctttttccgcgtatacttgggcatactcgtccgcgaccctatgcttgtgggccgtggctagacttaactcttcttggtacttggcgatgatagccagcatgttggtctccgtctcgcataaacgctgagacaagctccttttggacctcgaacaggcaactaacttctctttcaagaccatgctat

SEQ ID NO: 104938 - DNA, 416 bp, Glycine max
  unsure (1)..(416): unsure at all n locations
gcagcttgccccattaacctgagattgagagaaaatgattattaaacacacttattgtgaatactaattatttattacccatacttaacagaaagtacttataacattacaaaataaccataaattgggagagtttgatacaatttatataagtnttatacacaaaaattagtcattttcaccgactaatagtgtgttgttaggaactttagcattgtaaaatgtactgtttccttagaacttgatataacagggctagataactgcattgctaggaatagagtgcagggttttggtttttattatgttgtgattataatgctgtttaaattaagctatgtacaacaagagacatctgcgaacgaagtttagtttaaattattccaaatcatgagacatcagtgtttgttattttt

SEQ ID NO: 104939 - DNA, 194 bp, Glycine max
agcatattgataacatactcatgaattgggatcatacaatgagttctttataacaactctcagtatctatgcagcttgtcatcagattgatgtcaattatttttttagaaatgtttggcggatttaaacaattcaaacactatgttatgagataatgaaatttattattcggcacctgatttactccatatcat

SEQ ID NO: 104940 - DNA, 400 bp, Glycine max
agaatgtactttccgcacaaaagtgcggtaaagaagagaagtgataacattcatcttggtcttatcgacctcaatacctctactagagaccaaatgccctaagtgatgtaagctccattggagcttgaaggcctaagatcttcttcatcaatggattcctttgcttcttggaagatgaatgacaatataaggagaaggaagagagagaggagacgccacttcaaggagaagatgagtctagaaaaagctcaccaccataggaggccatggataagagcttgggggaagaaggagatgaatgaatggagaggaagagaagagcacgaaattttgtgctctaaaatagctttgaaatatgaagtttaattttcaaatgatcaaagttgggaaaatgcacaca

SEQ ID NO: 104941 - DNA, 225 bp, Glycine max
aagccatcttctcaatcaaattcctagcctgaataggagtcatatcaccaagagctccaccactggcagcatcaattatactcctctccatgttgctaagtccctcatagaaatattgaagaaagagttgctcagaaatctggtggtgaggacagcttgcacacaatttcttgaatctttcccagtactcatacaagctctctccactaatttgcctgatgcctg

SEQ ID NO: 104942 - DNA, 271 bp, Glycine max
tatgttgttgtggatgaattctccagatttacctgggtcaactttatcaaagagaaatcagaaacctttgaagtattccaagagttgagtcttagactttcaagaaaaaaagactgtgtcttcaagagaatcatgagtgaccatggcagagaatttgtaaacagcatgttcactgaattctgcacatctgaaggcattactcatgagttctttgcagccattacaccacaacagaatggcatatttgaaaggaaaaacaggactttgcaag

SEQ ID NO: 104943 - DNA, 284 bp, Glycine max
taactcgcctattgcttttcttccatgccatatgtagcaaagtcgttgatcctgtcaagtttgatgagctgaaaaatgaggccgccattatactgtgcctgtgacatcctggaaatttctacccagaattttgtaagcggatatatttaaataattatatatataagtattattcaggggatatatatatatatatatatatatatatatatatatacatatatacacaccgagatcagcggagtgggatcacacggacgaataggaggtgataatgcagtctg

SEQ ID NO: 104944 - DNA, 464 bp, Glycine max
  unsure (1)..(464): unsure at all n locations
agctatcacatgagtctntatatcataagtttggtanagttactaaaataaactaatattttgatcagctttaacatggaccttactgagatgggctaaaaagagcttgtatgaaagttaaacataagtcatagtaagctcttccaaacatcaccttattcatatatgatgaaatttgtggtcacaatattaatttaacacttaacaataattgtgcaccaactcataaactgctatagacaaagcatactttttaaaataacgtttgaatgaggataggtctttaacaattaacaagttaagctggaagctattagaataagtgatagctntctttgtacattgtgcttcgctcatttcaaaatgatgatgttggcattttcttaggatatattgccacataaatggagttttgcttggctagtccatgtaaaatccaagtttggatatatttacctacatga

SEQ ID NO: 104945 - DNA, 314 bp, Glycine max
  unsure (1)..(314): unsure at all n locations
gactcactaanggtggatcttgggtttgacgagcctctggagaagtgagactcaactangacagaccttgggtttgacgagcctttggagaagtgagattcaccaaggatagactntgggtttcaaaaacctataagtctcaccaaggacaaaccttgnngttgatgagcctttggaaacacaagactcaccaaggacggaccttgggtttgatgagcctttggagaagcgagactcaccaagggcaaaccttgggtttaacgagcctttggagaggcaagactcactaagagcangcattgggtgatgagtct

SEQ ID NO: 104946 - DNA, 412 bp, Glycine max
  unsure (1)..(412): unsure at all n locations
gtactaccaatactaataaaatacatatacttttagtatcccaacacttaagaatntcatagttaagcatgtttgacttgaaacaattatgggatgagtgaccttctaaaatgtntttcaggaagtgcgtgagtgaggataaaacactatgaaaagtctcgtgttggtttacatggacaatcaacaatcctgagaccaattagacattacgagataattggttgttgatgtctcagaaaaaactacctactgatggttttgattggtggagtgttattgttaattccatagcaagtgcgccaatntgttcaagtaattaaaatggtaagtccgagtgttgagtccacaatgactntgactatactcgaaagttgatatttctaatnttaagcaaataatgaactatatttga

SEQ ID NO: 104947 - DNA, 270 bp, Glycine max
  unsure (1)..(270): unsure at all n locations
ctgcagctgtgaatgcctgttggatatttactaccctttgtttaggtttttgatgatgttggatgttgatgctgaatgctctggaaactgtagaatgaaagtgagtaacctaggtggaagtgaaatgggtgtatgatggaaaagatgagctttaagttgaaggtagtctaatttggataatggacgtaaaggagttatactacttgaatgtcttagacttgggagaaactggacttggtanaaaaaaacaagatcaagtgacaagagcct

SEQ ID NO: 104948 - DNA, 363 bp, Glycine max
  unsure (1)..(363): unsure at all n locations
gcatctcgatatattactggactcaatctaccatccgagtcaaaacttattgtcgtttgaaattgctcaaagcttctgtattaaatttctggcatctcgatatattaagggactctatcgaacatctgaggataatagttgatgcaatcctaccccgcaagggcattggatagaaaaactccaagtagattgggccaaagatgcaagagaaggccctanggttcttatgagccttanggtagatttcggacccatgggctaagtacgagcccacttatntttgtaaatattagaataaagttntattatttttgggccttgtatttanggctccataatgtaggtagggtaccctacaaatat

SEQ ID NO: 104949 - DNA, 413 bp, Glycine max
  unsure (1)..(413): unsure at all n locations
agctntaacattcaacttcgagcgtctcgatatattacaggactcaatcaaacatccgagaaataagttattgtcgtttgaacttgctcagaggttcaacattcaatttctagcgtctcgctatattacaggactcaatcagccatccgagtaaaaagttattgtcgtttgaattggctgagagcttcaacattcaatctcgagcgtctcgatatgttacgggactcaaacagacatccgagtaaaaatttattgtcgtttgaattggctcagagcatcaacattcaatttcgagcgtctcgatatatgacgggactcaatcagacatccgagtaaaaagttattgtcgtttgaattggctcagagcatcaacattcaatttcgagcgtctcgatatatgacgggactcaatc

SEQ ID NO: 104950 - DNA, 424 bp, Glycine max
  unsure (1)..(424): unsure at all n locations
ctcagcttgagccattcaacacattcgtttactcggatgctgttgatcccgaacaatcgagacgctcganatgaatgtgaagctctgagccattcaaacgacataactttttctccgagtctgattgagtccgaatatatcgagacgctcgaattatatgttgaacttctgagctaattcaaacgacaataactcttttctcggatgtctgattgagtcccgtaacatatcgagacgctcgacattgaatgtngaacctcttagctaattcaaacgacaataactttttactcggatgtctgattgagtcccgtaatatatcgagacgctcgacattgaatgttgaacctctgagctaattcaaacgacgataacttttttctcggatgtctgattgaggtccgtaacatatcgagacgctcaa

SEQ ID NO: 104951 - DNA, 458 bp, Glycine max
  unsure (1)..(458): unsure at all n locations
agcttncactntaatgttagagaatcaatagatactaggtacttatttaataaatntacgtaaaatataaaataaattaatcagttcaacattcaatatattttttaatcatgatattatactaaattatccttgttaaaagcaaatattaagtacacatgatcaactttctcttctatcataatttatttcatattcaaaattaattaagatttaaaccttanactatttaattaaaagataaaagtcacttttacttatatcaagttggttattcaacattcaatcatttggtatttaaatatattaaatttcatataaataagatatttgttggtatgttatttagtaatgatgaatatttacttatattntaaataatatattatttggtaaaataaaatagtacaataatatcaattattttttatttttaagaactntcaatttaattggta

SEQ ID NO: 104952 - DNA, 368 bp, Glycine max
  unsure (1)..(368): unsure at all n locations
agttctaagagagcacanatcttagactaacccagtttgtcttttcaatccgcttagcccattcactagccgttcacttgactgtgttntaacaacacacactcatgtgaatttctcttgttcttctnnttgtttttaaacacatacaattgtattaatttgctatgtgtgttgtagtttcttacctntaaatttattcattcaacaaactccctcaaatatggggcgagattgtcttaaaccaatgtgctctcctaatacctaagcaaggtgaatgaagataataatttcaaagcttatggttcaatttgaaaattacaattcagctcaaagatgggtgcgaatgatatcatcatcgataaacaggt

SEQ ID NO: 104953 - DNA, 365 bp, Glycine max
  unsure (1)..(365): unsure at all n locations
aaactgaacttagtctgaatggtagacacaaaccaatataaatatgtgtcttactttctttttagttattctttgtcttaaactgacatagtgtttgaatttgatcttgtttgaaaaacatattctattttttaaaatatgtttgcatcgtttaaacttgtttttgcgcaaatttgttatctctttntattaagttatacttcaaatgataactttagttttcacgaaaaaagacttaagaaaattctaaaattacaatttaaccccttacgatatttctatttgtagttactttntttaagactttacttttgatcacttaatcacatntgaaatcatagtctattaaaattattattaaataa

SEQ ID NO: 104954 - DNA, 135 bp, Glycine max
aaataagaagatatgttgttgggatggctaactgattaaatcttaatcatcttacaaacaaatgtgaaatctaagccattagtttttggtctagaagtttccaagaggttcggagagcctttccaacacttttag

SEQ ID NO: 104955 - DNA, 461 bp, Glycine max
  unsure (1)..(461): unsure at all n locations
tgcagctgaggatatggagtacccatcacatgtggtactatgtggcggtcgggcgatggtgcacaacaagttttccacatccacaaatcgcgcataaactcaccatcccctgtngcccacctccaactgagctcacgtactcccacgtagcccatatcctcgtttctctcaacaccgggtccccatcaatcctcccaaagcttcccaacattcaagtaaaacaacattcatacagcaaaaactatcacagccaagcaaaacagggcaaaggcagaaaactctgcccaaaacaccaaccaaaatcacaacttttctcacttaaagaccccagtaacaattccttcgttccaattcgttaaccgttggatcgactccaaaattttactggaagtctctagtacataagcctacantttgaccgttgggatctactagcaaacatccagaactcattctacact

SEQ ID NO: 104956 - DNA, 346 bp, Glycine max
accaccgccttctttggctccgctgatctcatggtgaaaataccattaatgaccccattgagctcaagatcaacctcatagaaccccacaacaagcttcatctaggggcatagacacagagcttcaataggtcttcttaaactcataatttttttcttacttctcttcactgcgttcttatttttctcatgttcttctacatgtcttgtctaatgttgtaacatgattcttagagttcactgataaacttgcttagaagtagattgatgtcatggtcaaattctcgtctgtcttaacatgatgtgtagttagtccttgatttgcttgtattttgggtgaacctact

SEQ ID NO: 104957 - DNA, 470 bp, Glycine max
  unsure (1)..(470): unsure at all n locations
gctaaatagtatatggatacataaattnttacccaatacatgagaaaaatattaaggaagttatgttaaaacttgaaagcataaatgtatgagcaaaaagaatgtaacagaataactaagccacatattagtgagtgaaaccctaaacactgcagtactaaacagaggattatagtgtggagcaattaaccaaatttttttaattagtgcaagtgagtgaaattatattttgtccctaggctgaaagaaagcaaatcttatgcctcaatacctatcatactttctcaggctgctaatgctgtgtcaattcatctctttctctccatggctattatttaatgcaggcatcgtcattgccttgacataaaanaaaatgtcttcttacagggtgattaacaccaggtaacttctcttataattatgactgtacctaacatgtaactggcataatataccataagtggtttttt

SEQ ID NO: 104958 - DNA, 386 bp, Glycine max
  unsure (1)..(386): unsure at all n locations
atgagatgcccgaagaaacaccatttcttagttaaccatgcattaggtaccatgttcaattattntgtttttaagtgaaacgggtttatgaacccaacatggttggctcctaacacatgaaactaagaatgtagtgtgaagtttcacgcttcccccttctttgtttttgttttgtagaggaaaacgcaaggatgagcaaacatgaaaacaaatggtatgcaattttgcagatcaaaaagtttgttgaacgcatatgcatgatgatgccatgactcatgcaaaatgtgaggctggaatatgataacggacgaatgcaggatatgtccattatgatgttatgaagagatgtttatgcgatgcatgatatgaatggcatttacggacac

SEQ ID NO: 104959 - DNA, 113 bp, Glycine max
tatttattacccatacttaacagaaagttcttataacattacaaaataaccataaattgggagagtttgatacaatttatattaagtttatacacaaaaattagtcattttca

SEQ ID NO: 104960 - DNA, 365 bp, Glycine max
  unsure (1)..(365): unsure at all n locations
tcttcagtcaaggtatatatgatcatcttgatngaatacccatcccgtcatgccaacanatgaagaagccagttggagaaactagattatcaactacggcctacgcttattgttatggcaatatgatcagatttctctcttatgaagaggcacctgatgaggaactaagatgttccccaaaagcggccctagttaaatagatcattacagctagttgtaagcatanttggattaaacaattacttcattgaaatntgnggatcatcagcaaatgaagttatcttctaataaacaagcatactccaagtcattcttatgcaagtcttttgtctatcaagtatttgtatgttcagaatttattcttc

SEQ ID NO: 104961 - DNA, 367 bp, Glycine max
aatctgctctactactacggtatcctaaaaatggtgttttccgcccacattctccaatctattttccacgagttgctccctttcccttgatggatcaacttcttcctaccatgtaactaatttaaatatactccgtgattctcttgctctatgtgctccacttatgggttctttgcccaacaaggtgtggctcttgatcactaaaccttcctctttacttctaatttctgacttcaagaattgctatcggtcaccatcactactaccctttgagttaattccccctattatgcttccagcaaaggtgggtcactccacctttcttgtccaagagatagcctctacttcaccacattccctccgtgtt

SEQ ID NO: 104962 - DNA, 228 bp, Glycine max
gatagtagtgtgaaatgggcaacctaattctcgggacttgtacaccttgattttgcaccagtgagatctaacactttctgcgtatctaaggccacttcgaagaagacaatcaaaagggggacgcaacgggggtctccactggcctaaagctatagaacccctcctagcagggcgagcctctattgttataggagggtgatgaggtcgattgatttattactaatatga

SEQ ID NO: 104963 - DNA, 441 bp, Glycine max
  unsure (1)..(441): unsure at all n locations
agctatagtcattacttgttgagaaccatattccaaagtcaattgttcctttgatatagcaaagaatttgttntgcgaccttgagatgtgtagtggttgaattcttcatgtattgactgatgagtctagaagcatatagaatttctggtcttgtgcacgtcaaatatcgtaaactacccaccaaactcttgaaatttgtagtatccaccttttatgctttgtcaaactttaataacttcattttgcactccaccaatattctaattggcttgcagctatccaacttgaatttctggagcatctcctttgcatagttttgctgtgaaatgaagatttcatcttccttctgctttacctcaatgccaagatagtatgacattagtctaataccagtcatctcgaactacttgatcattgttttcttgaactcttcaaacatac

SEQ ID NO: 104964 - DNA, 442 bp, Glycine max
  unsure (1)..(442): unsure at all n locations
taaaaaccttagagtcctactagatattgaccctanaagagaatcgacactgcactaaactaccattatccaggccattggcagcaaggacagaaggaccaagctgaaccaaattcaacagtgagatgcctcataattataatgaaacacatatgacaaagtttaaaataaattcaattaaacacattttgagtttataggaaaattantgcatgnnttgtgggtagttctgttcagttcgaacatgatgatgggtggagacttgcaagctttatttgggtgagtgttttagttgcctgatcatgatggacttctatggttntgtaactagtggtacgtgatcatttgtaaatattntacgcttaagtaagatataagtaaaattacactcgtatgtggttcaatagtaaattatgcttttagcgtatgtgagtgcatatat

SEQ ID NO: 104965 - DNA, 317 bp, Glycine max
tgtctttcacatgaaactgtttcttggggtataggattgattgttgtatctcttaatttgcccctctaagcatatctaaatatgcttggacaagagaattgtgtccttaaatcaccattcttgctatgtatcttcattggcttcttgatgcattctgttgtgggagctgagattccattgggttccaagctttctgtgggtgataatgaatattgggtttccttcaatggtgatattgcatttggattctacaacatttcagatcaacctaaccagtttagtgttggcattagattcatattcaagtctataccata

SEQ ID NO: 104966 - DNA, 414 bp, Glycine max
  unsure (1)..(414): unsure at all n locations
ctctgantaattagttntaactcgagacanattgtagaaatagctaaanagtgaaaatgatcatgtatgctgagaatgatggctctgaactgaatagtaggatntattaacttatanatggaggaaaagactaggcagatgctgagaactattttcctctggatgatctcctttcaaacttaactctttttctctattatgaatgttgttttcctctgttactactacaaaagcagtttaacatcggttattacatcggtttggacaaaccgatgtaagtaaaccgatgacaattgtaatanatatattctaacatcngtttccaaaaccgtgtaatgctaccgttacatcgtttgaaaacgagtacgttgaatgtacatggtttcaaaacgtgtatcatccgtgtgctctggt

SEQ ID NO: 104967 - DNA, 414 bp, Glycine max
  unsure (1)..(414): unsure at all n locations
agcttgaatcaattaaatcatgtgtgtaatttattaccagacataanaattcaaatatcaagtctgaagagtcacaactctctagaaactaactgtgtaattgattaccacatttatgtaattgattatcagtaaggaattttcgaaaataactctcaagagtcacaacttttcaagaagtttttgaatggccatcacatgcctataaataggtttagagtgtttctgaataacattgtcttatcactctcaaaatattccttggccaaaatactcgcaaattcaataaggaatcttgattgatcttcaattgtaatatccttttcttaaagagagaaaattcttcttcttcttcttattcanagagatctgtntaagagaccgacggtctctagttgtaatgatttctgaaca

SEQ ID NO: 104968 - DNA, 406 bp, Glycine max
  unsure (1)..(406): unsure at all n locations
agctngctgaaatagaatattggttggttccataccacttatctgaaacaagcaatgactttaaagttcagcacactagtgaacaatctacatttgtactaaaactactaaagatattatcttgttctttccaaggaagaaaataatctcaccgagttactatcagtgaatattatggcaccagatttagtccttccaaactcaatcatacatgcaaaagttgttgaaataacaaagatgtttggccttaggaagggcgatcgaggatctgccagattccaacagttgttntggatgtaggccaagttgatcacggggcacataaactcaaaggtcagggtgtctgaagggaccccctgtgtgtcgcagggagccatgatcatggcaggaaagccaagtcgagatg

SEQ ID NO: 104969 - DNA, 430 bp, Glycine max
gagacaagtggaactttgaagtatgtctcataagactctcagtcatcaaagaacaacacgtggtacacatgcttctatgtatagactacgtagcttccttgagaagctgtcttgagagaacttcctttagaagcttctttgagaaaactttcttgagaagctatagcttagctacacacacccctctcataactaagcatacctccttgagaagcttccttgagaagatttctaaagaagctagagctgtgctacacatacctctctaatagattaactcacctgcttgagatgagagactagagcttagctacacaccctctatgatagctaggctcgccccctgacagaaacatgaaataaaataaagtcttattcaatacaatcaaatgctcgatatcaagctaaacctatctcttgatgccgaatc

SEQ ID NO: 104970 - DNA, 439 bp, Glycine max
agcttctgttggatgggatgtgtgctctatcatgcaagaatatgtggacactaccagccatattctcaattaattccatggcttcttcaacggtcttcgattatatttttccccctgcagaagcatctaaaagctgcttggattgtggccttaacccatcaatgaaaatattgagctggataggttctaacaatccatgagtagacgtctttcttaggaacccacgatatctttccacagcctcacatcaagactcatctggaaattgatgaagggatgacatggcagctattccttcagtagtcctggactctgggaagtatttcttcaacaatttttcaaccactgtatgccaagtcttaacactattacctttaagtgaatagagccatattcttgcctctccagacagacaaggtgagaacatgctcaatctaat

SEQ ID NO: 104971 - DNA, 414 bp, Glycine max
  unsure (1)..(414): unsure at all n locations
aaatgcacccatatacaatcaaggcaccttcgttacctagaattattgtatgtacttccaaggtgtatttgttacctacatcacacgcatttcctttgctaaatttacatacatgcatactcaaagcactttggctatcaaaaattgcatacgtgcacattctggtatttctaatacctgtacatacacaaacttcatgatgaatcttgactatctacacaataaggtgctacatttcatgctttattcaagtgtttttgctacctaaagccgcatgaaaattcaagtatattttcttttgccgattaaaattgtattcaaattaaaaggtatttttgtaggtattttctttacatcacatgcaacatatatantatttntgtgagaacatttgactatcaaaaattacataca

SEQ ID NO: 104972 - DNA, 120 bp, Glycine max
cacatgtggtactaggtgcggttggccatggttacattatgtttcccatcacaaatggctaaccacttccctgtgccacctaactgacttacttctccacctacccatatcttggttctc

SEQ ID NO: 104973 - DNA, 467 bp, Glycine max
  unsure (1)..(467): unsure at all n locations
ctgtgactcttggcaagttcttaaaactatgtcactttaaaagttgtgacttttgaagaaatctttataaacaagtcacttgaagaattgtgacttttggaaatntattnttcgaaatcagtcactggtaatcgattatgtgactctttattttaaattttgaaaattaaaatgtttagaagctatggtaatcgattacaagtattgtgtaatcgattacaaaagttgaaaatgtttaaacacaagttgtaactcttgaaatttgaaatcttaacgttttaaaacactggtaatcgattactaccttctggtaatcgattaccagagagtaaaactctttggtaatgattttgtgaaaacttcttgtgctactctaatattttgaaaaagtttttagtacttatcttgattgagtcttctcttgattcttgaatcttgatcttgattcttgaatctttgcttgaaac

SEQ ID NO: 104974 - DNA, 371 bp, Glycine max
  unsure (1)..(371): unsure at all n locations
actctgtgggtgatgctcctctgccgaccaccacacagacccttttccttntgtgcaacaatctgaagcaattgaacagcctgaagcttatgctgcaaacatctacaatagaactnctcaacctcagcagcaaaatcagccacaatagaacaattatgacctctccagcaataggtaaaatcccgggtggaggaatcatcccaaccttagatggtcgaatccttcacaacagcagcaagaacaacaacaaccttattttcagaatgctgctggcccaagcagaaccatacgtcctncaccaatccagcaacaacaacaaccacaacaacaaacagttgagggcgtctcgcaaccttccttgaagaaatatg

SEQ ID NO: 104975 - DNA, 363 bp, Glycine max
  unsure (1)..(363): unsure at all n locations
tttcagccatggagntatagcgaaagattaatgagaagaggtgagaggatgcaccatccactagagaatagccatggaagaagaagcttcaccaccaaaagagtgccttagataagaagcttataaaggaagcttctatggaggaagagaatgacagagagagatagaaagagagagagtggctgagaaattgaaggagaataaggagagatgttgaactttgaagtgtgtctcataagtttctcattcaacanagttgggacaagtgttacacatgtttctatttatagcctacgtcactaacgttgtgaatttattttcatttcatgtgaaccctaaagggatatttcaagaatatgccaa

SEQ ID NO: 104976 - DNA, 323 bp, Glycine max
  unsure (1)..(323): unsure at all n locations
ttttccagataatttgaatattctattattattttggctttttttggttaaccgtgggtacagtgtgacgatcggtagattttgtttacaggattaacgaatacacgccatgacggtgaattcgtttatattattagcagatacggttaaagatcggtaagctcgtaaaacgaagaaaganctgaagtgacaaataagatgaagccacaacagaaagaatgaagcttgatccaaactaccgtgaaacgagacggtaagacggcgaacctccgtttgtctgaacgttaaacgtacgagccctgctggattttacgaacattttt

SEQ ID NO: 104977 - DNA, 107 bp, Glycine max
aaaaggagagaagtgaacttgagtatgtctatagactctattataaagtacaacaggtacacatgctttattataactagaacttcttgaagcttctgaaaacttct

SEQ ID NO: 104978 - DNA, 346 bp, Glycine max
tcacagtctttagatttgggagccaattctattcttgtgttcggactctcagccacttatgatagccgccgatgatcccattactgcttcccctaagctctctgtcctttcttcacgccgcatcccatgccttgcgaactccttggagtaccctcgcgttgtggtcactaaaaccccgtgcgatgaaaggcgtgatgctttcgtctaatggcactcctctcatggggcattcttcgcatgaagatgaatcctgattcttcttcctttagcgagggaacattaacagaccccctcctgctaccaagagtggtgccaacaacaattcttgcccgtcttttacatcccg

SEQ ID NO: 104979 - DNA, 405 bp, Glycine max
  unsure (1)..(405): unsure at all n locations
cttaaatggtccatgcaacttanattgctatgtattgactaccttaaactttgatgaatgagagtcttgtgagacatacttcanagttcaacttctctctctcttttcctccttcaatttcgtgctccctccctctctctctttcttttcctccattgaagcttcctctctgagcttcttatccaagacactctcttgatggtgaagctccttcttccatgccttatttcctaggggatgatgccttctgcatggtggaaaatcaccattgaaggacctcaatgaagctcaaagatccaaccttcatagaagcttcagaagcaagcttccattagtttaacttttattttgtatatnttggtcaagctaatttggttggaggttcacaatgtctcaaactgatat

SEQ ID NO: 104980 - DNA, 287 bp, Glycine max
  unsure (1)..(287): unsure at all n locations
tattctcaacagtcacatctttgtatgtggttcttgaatggctatcaaaggcctatatatatgtgacttgagacacgaatttgctaagagtttttcagaacaaaaaggtcttatcctcttataaagcaaaatcgttntatcctcttacaaattccttggccaaattacttgtgattcaataaggaattatttgagtgctcaaattgttcaatctatctctttcaagaaagatatcttcttttcttcttcttcattctgaaaagggattaagagaccgaaggtctctt

SEQ ID NO: 104981 - DNA, 306 bp, Glycine max
tcaaacaccgcagctgctgggggggattttgatcgtatatgttttctcttaccaatgggcgggaacctaaaaagaacccagttcagatgatttgtattgagtttatttccctatatggatttacttgacggaggagataggtggttctactcctagttgaatttctattaatgttaacctctataaaattatttaattctgagatcgaatttgcagcttgatgattaataaaaacttagtattgagatgggaatagtcacgctttatacctcttgtggaattagattgttggataagaaaacacgt

SEQ ID NO: 104982 - DNA, 397 bp, Glycine max
  unsure (1)..(397): unsure at all n locations
acatgaccaactaatctagcattaatggttgggttggctgtggccataaagcacatggcttttcttaataaccaagttaggttcatcaatgcatccatttggtgcctncatggataatgcctgtcataattattgaccaatgaaatggaaaggggaaagacaaaagaaacanaatcatgctgaagataagcaactacttgtanattcactcatttggaaaactngaaatgggccaggtatttcggctgtacgtggcccacatagtacaacttgaaacaccatttcttgaacacaacaaaattatttatagaccaaaaaaagaaaaacacaattacttcatattctttngtccacctaaaaccactatatttcgttgacagcaaaccatgcttttcaa

SEQ ID NO: 104983 - DNA, 416 bp, Glycine max
  unsure (1)..(416): unsure at all n locations
tctaagctggcccactggaagcgcattaggtctagcaagcctattaactaagcctatagactacaggagctagatggtgaagcaattccaagaacatggaacgggtccaatctaaagttctacttcagtgaacctgctgtaagaccagatgttgtactctttttcctacttaattcttttgtcccacaagagaaaaatcatggttttgacttaagaggttttaatgaggcacattcggngtaatgaggggaatttgtactcaattgactacattaagtaaagtttatctcccttcagtctttttaattntcttatgtcaactttacaaaggcttgctaaacccaaagtccatccttggtatgccttgacaaaacccaggatacacgccatcttggtcacaacttcatatgctcatc

SEQ ID NO: 104984 - DNA, 422 bp, Glycine max
ttctcacctgaaaagatgatgagattttgcacaaaagtatatagtttctataaaacaattcatgtaggtggaccttcttctagtaattctgacttatcgcagccgcctatctcatttggaagaagtggaaaaagagatcttggagaccttcaagaaagtagaggtgaacataccgctgctagatgccatcaagcagattccaagatatgccaagtttctaaaggagctgtgcacccacaaaaggaagctcaaaggcaatgaaaggattagcatgggcagaaatgtgtcagcattgataggtaaatatgttcctcacattcttgagaaatgtaaggacccaagtactttctgtataccttgcattattgggaacagtaaatttgagaatgccatgctagatctaggagcatcaattagtgtca

SEQ ID NO: 104985 - DNA, 451 bp, Glycine max
  unsure (1)..(451): unsure at all n locations
agcttagattaanaatgataatntcagcttattgattagaccggcgttgctaaagttgtagaatttacagcaacaaaacatgaaatttgggtaattgaagttagctaagaagtttccgtgtgttataccaatntttatttatttatttatgggtgcccctacctgtcataatttcttgattaactgcaagatactacttcaagtcttaaccatccggttaaattaaacattacttgttaaattacatttattcaagccaatttaacggaacttgcagtttatgatatctttgggtatcttaagtaagctttcggtgacttgtcatgtttgcatacttcggtgcttaaattttatagttntggttgaattaggaaatcagtaggagaatttctctgtatgaaaggatctgcaatgagagtgactgctccatggaaaatggctatgcccagat

SEQ ID NO: 104986 - DNA, 461 bp, Glycine max
  unsure (1)..(461): unsure at all n locations
taagctcatatatatcatagaanataatattatatttattctcanatatcatacanaatgtntagaacttattntttttagattatcatctaatattgaaatgcttgactctctgtatcacatgatttatgtcgtacaagaaaaaaaatctcanaataaatgttattttaatttttaatataatattaattaaaaaatttcatgtatatctcctataatattaatattaacaatgaatagtataaattataattgaattaatgatgataaagttaattntataaaattattattgattttctatctattggttgttcttaatatatgtggaagaaactaaagcaacacttgtcatgagatggnggaatattaaatactaaattgatanaagttaaaaataatnnttaaatttttcacaaatcanaataattaagtatgaaaataatanatagtcgaactta

SEQ ID NO: 104987 - DNA, 431 bp, Glycine max
  unsure (1)..(431): unsure at all n locations
agcttgaacttcaagtgctcaacttggctagatagaacttgttgcacctttactaatagacaactaatcagaaaataaattcacatacaggaatancatcattagtactaatgtattggtaacagacacacctcactttgcattaaccttgtagactgcttctctgaatgatgagacaaagctgttattaattctgatctgccaaaaaagggcaagggaaatgaaaagtattagttgtgaaatttagaggtgagaataagaacagaaccaacctgtgcatgatgaagatctggctcaatgtgtttcctaaataatggaaaaatgctatctataaggtaatccagtgaacaagaatccccaatgtcatagcgaactttagaaagcaggctaaaatgaacaccaccaacctgatttataaaaatatatgctct

SEQ ID NO: 104988 - DNA, 498 bp, Glycine max
  unsure (1)..(498): unsure at all n locations
tncacctatgtcagggaacttgtcgtctcaccgccgcggntattatatggcggcagtacctattaggtcactctttcatcatactaacggatcataggagtttaaaggaagtgatgaatcaggcggttcaaacccagaacagcataaatacctagcacgactactgggttttgattatgtgattcagtatcgagcagggaagagcaatatcgttgcggacgcactttcttggtcaggagcatcaacaactgcttcattattcattatctcattccctcacttcgtcttcctcgaagaattgcgaagggagttgcaggcaaatcccgagtttanggaattaagaaggaagatgaccgctgaacctcacacatatcctaatcattcactagctcaggacctcattctntatntcngtcgtatatgggtaccccnaggctgctccttcatcaaggtccctactctcagagtccatcagtcgccgtcaggtgggcatatggg

SEQ ID NO: 104989 - DNA, 385 bp, Glycine max
  unsure (1)..(385): unsure at all n locations
aggttcactgaatgttatatccaactataccttggccttactatgatctgggagggccatcatatacggctaggtagtgctatttgcactgtacatacctttcaattgtttgatgttatatatggctcttggtagcataaataaatgttgaagcttgacaccatatgagcaccacttgaaaccaattagtcctatctgtcattacatgaaattgcgagctagaattgctgataaagcagttattaaatggaatttgttggacattgcatacaatgtgaatcttcatgccaaaagagcaatggatgtgtgtttttatgagcagttttgaagtgnggtactgtttntgtgaacatcaagttcttggttaaatggtcactatcaaatt

SEQ ID NO: 104990 - DNA, 434 bp, Glycine max
  unsure (1)..(434): unsure at all n locations
attcaattaggttattgttgtcctgtatattaagaataagaggtatttccttataatcattagaggttatctatctctcccagcaaaagaaagttacagcagctaaaaaatttgagggtatatatattaatctatgcttatagaaaagagttgctagggtatctttataaatcctagagttatggtactgtgccaatacgcacaccaagacaaagaataagaacgataaaaatggaggaagagagaaattttcatgtacaataccaacatccttanattttggagggtaccatataaatgaactttctctagatcttaattatcataattaataaggtgcgtctgagattttaaatctaattgaataacagatagtcgccaataatatatacaccacaaaatataatgtgaaccttcttctcatccaacttaat

SEQ ID NO: 104991 - DNA, 425 bp, Glycine max
  unsure (1)..(425): unsure at all n locations
cctactatatctctctattaaatcccaatattcaactagtagctcgtgatatttccttctctctcttttttttctctcatcagaatatcacgtcatggtagtatatataattatgcaggccttagacggtgtggcaagagttgccggctaccgtggctcatttatctgatgccagacatcaaacatggaggctttactgaagaagaggacaacatcatttgtaccctctatgctgagatgggaagcaggcaagtttttccaaaatngtttcaatttaacactataaatctataacattgatcattgattgaacaaaaaaaacaactgatatattgataaagtatacatccataagatattactataattatactttaacccacccattttattatttatttgaaaatttatttctcaaattattg

SEQ ID NO: 104992 - DNA, 269 bp, Glycine max
caatatttattcattctagacataatccgatttcatacttgtttcttatacatgagaagccacaatctttggatgtgttcaaaacattttaaagttaaggtgaaaatcaactacacaagagaatacagtgtgtcagatctgaccgtggtggtaaatactatggcagatatgacagttcacgtgaacaatgtctggtgccctttgccatgtttctataggaatgtgtgatcatcccacaatacaccatgtcggggtcacctcacatgaat

SEQ ID NO: 104993 - DNA, 325 bp, Glycine max
ggctgcactatgcacaaggcaagataaaatgtcaatgaagaattgaagctgcaggatccacgatgtctgatacgatgtcctgacatccggcccgataatactggacatataatctgtatatcttaacagatattgtgcagttagcaagagattagatgatctatctctaggaacgaattaaaagataattaaagtttgaatttcatagtagaagagttcgttcagggattaaagatttaagataaaaactaaaagatccaactgcctcttttagatctttaagtgcagattttcaggaagaatgatagatctcattcagcacaag

SEQ ID NO: 104994 - DNA, 327 bp, Glycine max
  unsure (1)..(327): unsure at all n locations
ctacaaaacttacggaacgttttgagccctcggttggatttattacggaacaatttttccaaccaattctaaagagagagaagtgcctaaggggctgaaccctttttcacttcacttctccccctatttatagaaaaatgggggagaagcttgccacccagctcgcccatgcgagcagggttgcttcctccagaagcaacagccttctggaggaatcttctggagggcccaagtgggcctggttgctatttgcacccncattcttactaagtacacccctgcctttttttttttggtgattcttttttctgtaagtacggaaactta

SEQ ID NO: 104995 - DNA, 362 bp, Glycine max
  unsure (1)..(362): unsure at all n locations
gtgatggcacgagtgtcaacatgcactttatcaaataatcatatgggggacgngctatgttatgacacatacgtatttgcacacataaaaattgtgtgtgaaacatattacaacacctatccatgtacatatttttttgacgaacaatctcaatgctacattctatatatatacacacattctctggaaggcttcttttgttacctactcacaaatacacatatgttgaagaacactgttacgctacccatccaacactttgtaaggcactccatgctatatatattcatattatgcaaggcattgtattgaacattgtgcaaggcatgtccatgctatatatatattcacatatatacata

SEQ ID NO: 104996 - DNA, 292 bp, Glycine max
tatattactataagctatcaaaataagtttctttttctaggaaggatcactaatctgaggattaaacccctgctgataaagacttccaaccttggtgttgccttgcgaagatgatcttcttcttcattcaccttgtgttaacccattcaaaatcatctgccaattattgggctactccgttatgcccaataaggattgacctaatgattaagagaacttccctgttgaaccctcatgacccgacttgttttgcataattttgccccatacaactcgttccactatattctta

SEQ ID NO: 104997 - DNA, 256 bp, Glycine max
aatgcttaaattcttgagtagaataatcaaatggtggttaacatgctacatattatgggcacattgcccctaaatgttgtgaatggtaattttttctaaaaatacgccctgagtgtacttgtttattagttcactgtacacattcattagctaaaccacacaagttgttgactctgcttgctatatactaaataaggtacatttcatgcactacctttatgatgtgtatgtagcatggaccaagaactttactgaa

SEQ ID NO: 104998 - DNA, 364 bp, Glycine max
  unsure (1)..(364): unsure at all n locations
agcttgccacccagctcgctcaagcgagctatgttgcttcctccagaaggcaccaccttctggagaacnttctggaaggctcaagtgggccangttgctatttgcatcctctggttactaaatacacccccttgtctttttttgctgattctttttccgtaacgctacggaatcttacgaattacgtaacgatacttgttttctttccgtaatgttacgagaccttacggatcacatanatcatccttctttgccttctggaatgttacggatacttacggattgcgcactaacacttccttataacttttggcatgtcacggaacttcatggattgtgccacaatgctttcttttgaattccg

SEQ ID NO: 104999 - DNA, 367 bp, Glycine max
  unsure (1)..(367): unsure at all n locations
atgtcttggatatcccctgcagttacattatggtccaccttttctttatacaaatatgttcaagggaaatctggtttgccggaaagcgcaccggatcgtcaagtatttaaatttaaaacggatgaatccgagtatcgaactcaaggaactagtattagatatggtttaattcagaaataaggcattattganagaaacattgataattgatgatttagaacataattaaactaagtctaggctaaaaatagtaaaaatgcangtcagtaagatcgacaatagtaggtacagatgttgggtctctctaacanactagctggcatatataaagatgtttctctaatcaatcatgcttttgtgttctatg

SEQ ID NO: 105000 - DNA, 455 bp, Glycine max
  unsure (1)..(455): unsure at all n locations
agcttcgtgatgatgaaccaagccaatttgatgtatgccaaagcccaagtgattttcaagatcaagcatcaagaatccaatccaagagtcaagattcaagagaagaaatcaagaagtaacaagtcaagacttcatataggataagtattaaaagaattttccaaaaactaaatagcacagttttgttttacaaaagaantttctcaaaattttctaaagttaccaaagtgattactctctggtaatcaattaccagttggcagtaatcgattaccagtgaccagattgattttcaaaatattttcaaatgatttgtaacattccaaaatgaatttcaaatagtataatcgattacactatattagtaatcgattacaagtgaatctagacgttggaattcacatccaattgtgaagattcacaacttttcataaaatacattgtgtaatcgatta

SEQ ID NO: 105001 - DNA, 314 bp, Glycine max
  unsure (1)..(314): unsure at all n locations
gaatgtgtccaaactaaggagggagcatggtagaactaatttgtgattccttgtcaaatacatataaaaccacatacaatgaatagatttatttttttgtcggcatctagttgtcttattataagtgatgaaatttaaaagtctaaatagcatacatacaacgacattattcattcacaaattttcttacataaaactgttaactntttaatagttaacttaatagttataccaatgataatatctaattcatattggataatataaaaaaaaattacacttaccatgaatagaagttagactgatttttgaaa

SEQ ID NO: 105002 - DNA, 302 bp, Glycine max
gtgctatttgaacaatttgtgccccttccacctaatattcttattcttatattattactaaagaaaaagtcaatctcttccttcataagccaccactcccatttatatacatttatcctaaagccatatacaattttcctcaaacataaatatacactcgcgcatatataagtctctctaagcatattaatccctttcaagactcttaatctctctatatttcaaaactccaacactaaaatgaacgacttgttcttcggcttcttctcctcaccatggccaatctcgcggaccaccccatg

SEQ ID NO: 105003 - DNA, 188 bp, Glycine max
taacctaagcacagagtcacgtacccaatttaatctagccttacatataatctctatccttagtatatatctgactttagcatttgatccctcacaacattttttttacaatggatccctaatatttcagaagttttgtgcgagatccctattgttaaaagggatatgttaactgctgatgtggccat

SEQ ID NO: 105004 - DNA, 399 bp, Glycine max
  unsure (1)..(399): unsure at all n locations
agcttcannattttatgctgaaatagggaaatttgatgcatcaaggcaaatcagagaggtttctctagcaaggaagatgactaaggaaattggtcatagtttaattgagataagacaatgactggggaaaatagagttcctgaattggtgaaacattttagcccattattcacacaagataaagcaatcatgtcattttgatgagctgatgaagatgtttcctaagatgataaggtcttgtctatttgggcaatcctacaatctaagggaaagatttcttttgtaaggaagttttggtgagcatgcccagaaaatgagggtcggcatttgtattcccatgtttggtgtaattaactgacatcttctaaaaatagaaaaaaaaaaaaaaaaaaaaaaact

SEQ ID NO: 105005 - DNA, 340 bp, Glycine max
  unsure (1)..(340): unsure at all n locations
taaccttatgtcatttcgtggtgacctgatcgaggtgcgaggaaagcttcatgtnttcgcgccatcgctttagatctcattgccattgtcactgtttgggttcgaggtaagcttggtccctgtgcctttgtacatcttcaagttgtttggacttaatctctagttgcctttttgttttcaatgtatttggttcaagagttgttgtagttntgattcattctgatttgtaataagcctgagctcttgattgcatttctggggcatacttacattcagttntgtgatcttgcatgtagcgttccattccttcatagtttattntgcctattctaagtttgaa

SEQ ID NO: 105006 - DNA, 319 bp, Glycine max
  unsure (1)..(319): unsure at all n locations
agctnttatgattatggggtacccatcacatgtggtactangtggcnnggcggcgatggtgcacaacaattctccacatccacanatcacgtataaaaccaccatcccctgttgcctacctccaactgagctcacgtactctcacgtagcccatatcctcgtttctctcaacaccgggtccccatcaatccttccaagctttctcaacatncaggtaatgcaacatccaaatcatcacaaactaacaaaccaagccaaacaaggcaaaagcagaaaactctgcccaaactcaaaccaaaatcacaagcttttctcactt

SEQ ID NO: 105007 - DNA, 366 bp, Glycine max
  unsure (1)..(366): unsure at all n locations
acacccctatgttggctanagcctgtataagaccttaccttatgacccgaagtggtacaacaaaccaccgagaagctcaagttgatccaagaaaggatgaggactggttagagtangcagaanaattatcaggataagagatggaaagacctggaattcgaggttggtgattatgtattcttgagagtcacttcatggactggngttggtcgagcattgaaatcccgaaaactcacacctcgtttatcggtcctttcaaattcttaaagagaggtcctgtgcataccaaatncattaccccatcttttttaatcttacaatgtctttatgtgtctaaactctatagatatccatgaccatctatgt

SEQ ID NO: 105008 - DNA, 318 bp, Glycine max
  unsure (1)..(318): unsure at all n locations
cagagagaaatcagagcacagtcagacttctatggatagtattaaagacttttcaaaaccaaatagcacaagtttgttttacaaaagatntttctcatattttttaagttaccagagtgattactctctggtaatcgattacctgttgtcagtaatcaattacaagtgagtcagttggttttcaaaatattttcaaatggtttgcaacgttccaaaatgagtttcaaatagtgtaatcaattatactatattagtaatcgattacaagtgaatntgaacgttggantcaanatcattgtgagagcacaactttcataa

SEQ ID NO: 105009 - DNA, 155 bp, Glycine max
  unsure (1)..(155): unsure at all n locations
atcactacntaaaaaataagttttaacatcccgttgttaacatcagttatctgaaaaccgatgtcgttaagcacttacaacatcggttttcaaataaccgatgttaacaacttgatttagtgcgattttaacaacgattttaaaataactaatgt

SEQ ID NO: 105010 - DNA, 357 bp, Glycine max
  unsure (1)..(357): unsure at all n locations
ttgcacctctctgtatactaaatgcacacccttttatattttctgtaattctttttccgggagcgtacgaaactttacgaatttcgttacgatacttatttttccttccgcatggttacgaatccttacggattatgtatttactctttnttggctttcaaagaagttactgaaactcacggattgcgcaaaaacacctcttttctattgtcgccatattacggaatttcacggattacgcaagccttgcttcttttggatttctgagacgtctcgggacttcatttatttgttgtcatcaagtaataatccccggacgaaattagggtatgacagcataatatatcgacatgctcg

SEQ ID NO: 105011 - DNA, 316 bp, Glycine max
  unsure (1)..(316): unsure at all n locations
tcacaacagggacgagggactccttaatagacccaatttntactgtttctacagtatcggtaatggttaccggaactgttacaaaactntttacaaattacattatttaaaagaaactgacaaatcagttacaataattcatgattattacaactaattaatcgtcgtccaatgatataccaaaacagtcatcttcattctggtagaatggatcatcttcttggtcatcattagtctctgatgattcagcttccttcttggaaggttcttcttccacttcctgtngaagtagttggagaacttctttgagattctg

SEQ ID NO: 105012 - DNA, 329 bp, Glycine max
tgatatcaagaaacacctctggctatatcaaaggactttcactacctttgtgtgttgccttcgccggaaagattgattatttcccttcttttcattcttcaaccatggtcctttcaaaccataattcctgaaaaatcacttctgcccagaattatatcatggccataactctcgttatacacgctcaaattaagtgatgtttgagcctaaattgaatttcaaacgagatctttcacctcgttttggaatcacctcatttggagccatgtagctcgagttatttccattttttatttctgtccagccaccacttaacctatgttttatca

SEQ ID NO: 105013 - DNA, 315 bp, Glycine max
  unsure (1)..(315): unsure at all n locations
gaagaccattgacctatccaatcttttgaaaagaggaattttcacatgtaatgtcttcttatcacgggcgagccccttttactcagaccatcatgctcttttgataccaacgatgcaaccaaacagtgctatagaaagatctcttgatggacatatgttcaaacaaaggatgtgaatgttaacgaaaagggatatgtgggattggcatgaacattaattanagcctatctgcattcgactagtggctaatcattgtagcttatgaagccacttacataatctttttaaccggcagttgaacttgatcaatcacat

SEQ ID NO: 105014 - DNA, 482 bp, Glycine max
  unsure (1)..(482): unsure at all n locations
ctcgacccggatccttgagtcacctgcggcatgcaagctttgaactngaattctgtgaatataatgctcatattgctagtgaaactgaaattaggagtgtaaatgcaaagggtaaggaaatttcagctttggatagggatgattggaatggtaagtttttcccttgtgatgatgagctttctagcattgattatagtaaggagttaactgtgagtgcttctcctctggtggatgatgagaaggcaaatgggatacaatggggaaaggactggtggtggagacaggatggaagtggggagttatgtactaaagactacgtaatggagtggatagggagtcagatctgtccatcaaacgctgattgtgatgatggtaagaacaatgttcacgcgaaagtggagttggaaaattcatgtcccaaggataaagaccatgatgctattgacctcaatcacaggtgtgtgggataggacataatacta

SEQ ID NO: 105015 - DNA, 307 bp, Glycine max
  unsure (1)..(307): unsure at all n locations
tggaaagacaattgtgagccgagatgtcgagttctatgaagaaggcatatggaattgggaggagaaagaagacacttatgattttttcctgtactttgaagaaatagatgaagaagccttgactccaaatgattcaactccagcactttcaccaactccttcaaccaatgaagcctcatcatcttccgaaggaagttcangtgaaaggccaagaagaatgagaaantattcagaattatatgatgaaactgaagttataaatgaattgttttgtcttttttgtgacagtgaacccttaaactttgat

SEQ ID NO: 105016 - DNA, 460 bp, Glycine max
  unsure (1)..(460): unsure at all n locations
aagcttctaaggaagctacctagtctatanatataagcatgtgtaacacttatggtaactntgatgaatgagagtcttgtgagacatacttcaaagntccacttctctccctcttttattccttcaatttcatgctcccccctctctctntctctccctctttattntcctccattgaagcatcctctccaagcttcttatccaaggctcatcttggtggtgaagctccttcttccatggcttattccttaatggatggcgcctcctctcacctctnttcctttgtcttccgctgcatctccatggtggaaaatcaccattgaaggacctcattgaagctcaaagatccagcctccatagaagccccacaagcaagtttccatcaagtggtaatcagagcacaagagcttcaagtaggtgctccttaannactccattaattttttttctttagcttctc

SEQ ID NO: 105017 - DNA, 431 bp, Glycine max
  unsure (1)..(431): unsure at all n locations
agctcactgtngctgccncacanagctctcacggaattgtctcggccatgctcttccttgcgagccctcttggtttcttgttcaagggctcttgcagtagcttcattntcttctcgtaactcggcacactctttccggatgtctgtagcaaccaacttgaatttttcttgggcaagtcttgcttttcctagttcggtttttagagctcggacttcttcatcctctttcggagcttcaaagttctcctcattgataattntcaacttgaagagccaatctaaccctcgtgtacgaactntcagccattcatgataaccatcgatgatgccattacggatgcccctaagttctntatctttccttaacgggccttcccacaccttatggactctntgtataacctngaaaccttgtgcgccgaaatctctcac

SEQ ID NO: 105018 - DNA, 447 bp, Glycine max
  unsure (1)..(447): unsure at all n locations
agcatgaactatctgtgattccacaactgctatgtttcctcgtataatagttcatgtcattaataaatatagcananacattgaattncacccaagaanagggactgttcttcaacttatataggctttgtacatataaaagaaggatttatgagaaattgaatctaaccaccccccgaaatataaatgatcaacactgtaattatattctaattacccaaaatagttgaggacctcaattatttgatctgctaaatcttcagcagaaggaataggatcctcggcacaatttgcagttgctcccaacttcaagaactcttgtggaagtttagagggaaaactatattgaataataatattcagtctacatgcaatanaaaatacattcaaatcaaccaacttacaaacctcatgttcaggaggacttgattgatatatgcataagtt

SEQ ID NO: 105019 - DNA, 349 bp, Glycine max
  unsure (1)..(349): unsure at all n locations
gcagattgcaatgccaaggtgcattcctatttaccaaacaggtcatagcctttctagttaggctctcannatggcaccctagaattatcttcttattagaggtgttcatgttaaacatatttacctacagttgaagatgataggtacatattatagacatttacctacagttaggagatagaagtagaagttaatgactnttacctacacactatacataataggtaaaaccaatagtgacagacaattagtcgtcattatatgcctcctcaaagttgacgtaagaaacttccgttggacaaagtccatcatacatttcccttcgaatattnttatttatagcgacagt

SEQ ID NO: 105020 - DNA, 218 bp, Glycine max
agctgtatccgcggaaccgcaagcgtcaatgctgttttgctgcatatacaatatagcaaatcaaactcaaataaccaccaaaaccttcttcactaatgtaacagtacacaatgacttcttttattaacaaacataataagaattctgtgtccaaatggaatgcttcaagcacaagaatctacccaataattaaacaaccattcaacccccgaatcaag

SEQ ID NO: 105021 - DNA, 439 bp, Glycine max
  unsure (1)..(439): unsure at all n locations
ttagctgagacaaatattaatattctgagaataaaatattattgagcaagctcaaaggcagtcgaacaggatgttcactgtataaagttgaagtcaacaacaggacccattcagacaattaatgattntgacaataaaaatgatagcattaataagaatagatgtgggagtttatacataaaanaaactactattgtagtataacatgagacggaagataaccctgatatanattaggactcccacaaaggcattcagcaaaagctccagcaaagccatctgtacccttgataaactggcgcaccgtgtctctatactgcanaatgcaagaattgcacattagattttgatagttcatgcacatcaccaccagtgcatgttatattcagaaaaattgtgagcatacaacatgtcatatttagttgaagagattacatac

SEQ ID NO: 105022 - DNA, 455 bp, Glycine max
  unsure (1)..(455): unsure at all n locations
agcttgtatgaatatggagtacccgtcatatgtggtactaggtggcgatcgggcgatggtgcaagttgactctccacatccacaaatcacacataaatccaccatccccagttgcccaccttcaactgagctcacgtactcccacgtagcctttatcctcgttcctctcaacaccgggtccccatcaatccctccaagcttccacaacatccaagcaattcaacatccaaacatcatgaactatccaaaaccaagaaaatagggcagaggcagaaaagtctgcccaaaacacattccaataccacagctttccttactcaaataccccagtaacattctcttcgttccgattcgttaaccggtggatcgactcgagaattntactggaggtccctaatacataaatctacattntgaccgttgggatctactagaaaacttccataacccaatat

SEQ ID NO: 105023 - DNA, 353 bp, Glycine max
  unsure (1)..(353): unsure at all n locations
gcacttgaccgtgattggtgccgacaacactggcagaacaacagagaagatgaaaggaaggaggacgatgcattctattttattntattgatgtattctttttataaaaaaattatttcagtgtatgtatgccttgtaaattaaacaggcactgatctaaacatgcaaattaatttaaatggcatattcagatcaaacagcggaaactaaatattatgagcgtaccccaaccattgcagatcgaatgcgaagcagcacatacacgacaatgaagacagttgtgctcttctagacccttgctcactctgaatagatagtgtattttttgaatagagaagtgggtttggtgatgc

SEQ ID NO: 105024 - DNA, 377 bp, Glycine max
  unsure (1)..(377): unsure at all n locations
caacagaatcaagccaacgctattgtgcaagcaatcaatggggcaaaacacaccaaatgattataatgatggatggctcannatctcacaaaggtaaaatcatcactttcaaattgagctttcaaaactatcatgacatgtagagaagaatcaagaatttcaagtcacataatgtcaagaacttttattttcaaaaacaatacccatttcttgaacatatcctataattcaaagaaaaacatgcaaagtcgtacgtgcacacaaaattgacccanaatattaaactgaatatccgacgaaactaacaacattaacaaattaacacaactaacaaattaacaaaaccaacaaaacttgcataaccaaagaacactccc

SEQ ID NO: 105025 - DNA, 440 bp, Glycine max
  unsure (1)..(440): unsure at all n locations
ctataagcgcgggtctgggagacataggtcaagtgttcgcaatatgcnaagatgatgttccgagtantttggatttggtacgaccatgccctcctgacttctagctgggaaattggcgagtggaggaacgccccggcatttacgcgtcgagcataatgtaaacctttacggttttaaaagctctatagttgggcctaggctttagagatattccttttgttaaagctttgtgtcttttgtttttgaatttataatacaaggatctttcttcatctgttcctggtctctacccattctcattcatttgcatggttacttctntttctgaaacggcagatccgatgacgagtcccccgaaggtactaatacctgngacccgcctatcgactttgagtcggaaatgaatcaaacggaagatgaacggaatgaggatgtgggac

SEQ ID NO: 105026 - DNA, 394 bp, Glycine max
  unsure (1)..(394): unsure at all n locations
ttggaatatccattctgatgttgctaagaatgaatccatacttgataaattccttagatgaagtttagaatgatcttctattctgaagtagcacaaccttatcactcttaacactttttcatagcttcaagcattatggatttaattactttagaaagacttagtggaagtttagttgatggtgtgttagtgttttgtccaaggtcatactgagtagtgctcttaagtcctttgttttgatgcttctcatcagtgcttctcatggacaacttcatcattcaacaatcttgcatctttttatgcaattagttcttactttctaatgtgcctccaatgattatggaagcaggtgaaaagtgaagaactgccccatntgagtcttctgatatttttc

SEQ ID NO: 105027 - DNA, 423 bp, Glycine max
  unsure (1)..(423): unsure at all n locations
atgaattatttgtttgtgtcgagggtagtagcctcgacaagtacgaaggtcgtgagtttattgagcccctaagcatggacaagagttgtccaatgttaagagtggtaacctcgacaagtgaaaaagttgtatgtctttgaggcttgtcaagcccccagccaggacaagtgttgtccaggctgcttttgtcaagttgtatggggtggacctgcttttggtcttgcaggaaaaatcagacgtgccatgtgaggngagtcttgtatttgaaaattctgcccttcttttgactattggagagtgcattgaagacaaacggttcatttgtcattttgctctaagcgagtacaatgctcgcatgttgctcttgcatatgtgtcactcacagagtgggcacgtactgaagatgcatnacttgggtgagta

SEQ ID NO: 105028 - DNA, 401 bp, Glycine max
  unsure (1)..(401): unsure at all n locations
gactctcagccacttatgatagccggcgatgatcccattacggctttccctaagctctctgtctttcttcacgccgcattccatgcctggcgaactccttggagtaccctcgcgttgtggtcacttgaaccccgtgcgatgaaagggcgtgatgcttcgtctgatggcactcctctcatgaggtagccaanctgtcttatggcgaggaccggnatataattaatacaaccccttggtccatcaatggaaccattggacatccgtcgtatgaagatagaataccgattctggctttcttcttggagaaaaaggtgtgaaaccagccacacatagagagccagtgtacaacacacaattctttgcgccactcttnntcacctcccggtcgaatgtgtatacat

SEQ ID NO: 105029 - DNA, 347 bp, Glycine max
  unsure (1)..(347): unsure at all n locations
gatcattctactangacgactgagaagactgtggcaaatgaagagggtgagaaagagggagaaacccatgctgtgactgccattcctatacggccaagttttccaacaaacccaacaatgtcattactcagtcaataacaaacctccttcttacccaccacccagttatccacaaaggccatccctaaatcaaccacaaagtctgtctaccgcacttccaatgacgaacaccacctttagcataaccaaaaacaccaaccaaaaatgaattttgcagcgagaaagcctgtagaattcaccccaattccagtgtgctatgctgacttgctcccatatctacttgataa

SEQ ID NO: 105030 - DNA, 181 bp, Glycine max
accgtctaaaggaagacatgctgagccatactacctgggtggtgtccaagatggatccggttagtatatcttcgagaagcctttcctcacgggacggatcgctcgatgccaagtgttgttatccgaatattactaatgtgcgctaagccagtcataagtgcgcttagtgcacgaacacgaa

SEQ ID NO: 105031 - DNA, 209 bp, Glycine max
gattctaaagaactagagttagctctcacacctttctaaagctaagctcacctcttgagatgagaggtagagcttagctacacccccctaaatagctaagcgtaccctatgccaaaaatatgaaaaaacaaaaaagcattgctgcaagactactcaaatgcccgagtacaagctaacctatactataaatggcaaatacaggccaacga

SEQ ID NO: 105032 - DNA, 374 bp, Glycine max
  unsure (1)..(374): unsure at all n locations
gtcatagtcatacaggatctcacaattcgtatataccacagtcaagcctagaanaggaccaataacatgtaagtcgtttaaagagacgaatgaactgaagtcactcgagggagaaagagaatagacccctggaccaaccaaggtgagtcataaacaccactgttggaggtttcactggggaggggccactacctctgtgtgaaaaaggcacctatggctaattcngtcgaccaatatggtttcgtggcagaaagcacccaacatgcttcccataacctttacgtcagatgacttcaaagagatcgacccagtacagaataactcaatggttattagtgtagagttagccaactgcataatcatgaagacccttg

SEQ ID NO: 105033 - DNA, 322 bp, Glycine max
ccacgcttcttttcattctctatctgcatcgcgataatttatcatgccattccacaatgatcgtaaggcaaatacacacttatcttttatactcctacctcttattcgacacttcctcaattagatgcatatgttcccttagtctggggtttccttcatttaggatctcgcttattaagacaataatggtgcttcagatcaaaggccttcctctcatttaacctatcgatttctccacacacacttactttgtctatatgggtgatcatccctaaggcatggactctactgacgtaccttctcttcatacatgcattgctca

SEQ ID NO: 105034 - DNA, 432 bp, Glycine max
  unsure (1)..(432): unsure at all n locations
agcttgcacgaacaccgctaactcccaccattaatattaagaaaacaaagccaaatggaccccaattctactttgatctaatctattgaacctaactcttgccggtccattcagtgagttgtgttcagatcgttcaagattgtgtttagatccatagaattggaagcgaataagtcaataggttgtatgcctagcatgataatgcagttttttgatttgagatatataagggttggtgtttaaatcgcaaagtggatgaaggcttgngtggagaagacactanggctagtcgtgctattcttatggctnntgtatctggacttcctcttttgaggagttggtgtagatgttataaaaattcaagtagttntgattggatgcggtggttcaaatgcaagcaaattgatgtgatggttcatagttgtgttcatg

SEQ ID NO: 105035 - DNA, 394 bp, Glycine max
  unsure (1)..(394): unsure at all n locations
tcacctaataagcactcactcttgtatttcttgctttcaanaataagccttggntcctaggcctaaggtatcactctagtcctcatgaaaactgcctacatactccaaaatggcaaacattcgcataccanattgntccatagatggttcttcaccaaaccatgcgcaaatgccattgagaacatttaacgagcacttggtgggcgcatgtttaggcatgaatagcaaaggaacgggggcaatgttgcattgccaaaaatttcagaataagacttaagccaaaggccattgcccacaaccttccaactcaaccaaaataagcatcaattcaaagataaagtgcctgacgggtttgagcataaatgggcaaattaagcatcaaaatacaccaatg

SEQ ID NO: 105036 - DNA, 351 bp, Glycine max
agcactgagctcagctacctgattagattaggttttttcttgaataaaggatgaaattactagaaatatttctgtaacagtctttcctaaagcaacctccgctaaggcatattggcatggctagccgagagctaaagcgcttagcgccacccttgatttgggctgattggtcgctaactggccagctgactaaccatctaattcttctgaatcactagcaacgctaaccgaaacataggattgttggttagcggctcgtgccccagccatttttgccgcaaactgtgttatgaactaacccatcacgggctagcgattcttgtggatttagccgtacggttcttttcctta

SEQ ID NO: 105037 - DNA, 310 bp, Glycine max
  unsure (1)..(310): unsure at all n locations
agaactgaaacataaaagctgaagattaaatgacatanatcataatataactganaataaactaaagtgtcagaatgcataaatttaaacgtcctgctcctcctgtggctggtcttcattaagatccagtgttggagctactgatgaatcccgtataagctgcttaggctccacaactagtgcaacatcctcaggtatatgtgcangggctggagatggctgtggagtctgatctggagtagtctcctccgctactggtgctggtggctcctcaatatcaggctcctgagctgcagaggcccaccccctc

SEQ ID NO: 105038 - DNA, 347 bp, Glycine max
tgagttctgaaatgcctgaatgcattcaaaactctcattggaaaagatatccatgtcaatgaatttatgatcgataatggaacgagaagagaaaaggtttgtgtactgtatctgttgttcttctgatgagaacaccgaggaagtggaaaatggagaagggaatatgcgtttcctgagcctcggaatgctgttcgcttcgactcgaagaacccttgcgcttctttgatggttccatttcatgttcctacaatctttcgaacaaagtggcaaaagacatagaataaagatctttactttcagaaatagcaggtacctcgggctgccattccctacttaagcatcttaaa

SEQ ID NO: 105039 - DNA, 438 bp, Glycine max
  unsure (1)..(438): unsure at all n locations
acttaagcgactgggctgcagcttattagcctctctctcgngggtattttctctgcgaagcgaatatttgtggcaagatatattgacaaccctcctaaccttataacgagatgtgttgggccacgtgggcctcgttctaaacctttactaacagagcccgatgaggcttggagctcatgagttactccacagctagaccctggccggggttttgttgagctgctccataaccttgaattcgctctgctgaattatacggaggaactcgctggcttcctctatcgacacctcctatttaccgtccttattctctggaagaccttttgacggaatatctttattcgaagcgaggggtatttcatcatcttgttcctccaccaactttgcttatcccttgacgttcgcgggttggacctggaaggacgggggagcaaacac

SEQ ID NO: 105040 - DNA, 273 bp, Glycine max
  unsure (1)..(273): unsure at all n locations
caacactgctgttgctcacgtccctatttgactcgtgtttgaggtcccttataaactttcttttaacttanagcgtgtttgagggctcggacgtggagaaagagtctataatccacgttaaatagttaaataagtgtttccacacacccattatagaaggagaatncggcaacatgtaaacatggatatttattactcgtgagaactgctaattcgcagtgaagttattatatgctgaggcaatataagaattctatacagcgcataatgatc

SEQ ID NO: 105041 - DNA, 372 bp, Glycine max
tcctcattgtgttctttatggtaaatttctgtcttgttgtaaccataattgtgtgagttaggtccttgagtttggattgcattcttgggctaaacatgaaccatacaattctacataaagattaaaggtgaagagaacctcacaaatctagagttacatgttcacctattgtagttttgtcatagaagtctcgtctagtcatgaaacttgtcacataagattctctatgttgtgctgaatatatttttcttgtgtctttgtctaattcttttgttcatgagtgtatgaaaattcttagcctattatttgatctgagtcagatcttgcatgttaattaagtcttaacatgttcatgcataattcttagagagt

SEQ ID NO: 105042 - DNA, 416 bp, Glycine max
aattcaaggaataaaagagggagagaaatggaactttgaagtgtgtctcataagactttcattcttcaaagttacaacaagtgttacacatgcttctattgatagattaggtagcttcattgagaagctttcttgagaaaacttacttgagaagcttctatgagaaaacttccttgagaagctagagcttagctacacacaccctctcataactaagcttacctccttgagaagcgttcttgagaagattgctacagaagctaaagcttagcttcacacacctctctaatagctaagctcacctctttgagatgagaagctagagcttagctacacaccctctattatagctaagctcacccccatgacaaaatacatgaaaatacacaataaattccctactacacagattactc

SEQ ID NO: 105043 - DNA, 289 bp, Glycine max
  unsure (1)..(289): unsure at all n locations
ccccaatgccagtaaaagagatatttccgggctccgtgttcgtaaaatgcattcatatcatgcatcgcatagcatcttttataacatcataatggacatatcctgcatttgtccgttatcatattccggcctcacattntgcatgagtcatggcatcatcatgcatatgcgttcaacaaactttttgatctganaaatgcataccatctgttttcatgtntgctcatccttgcgtttcctctacaaaacaaaacnaatagggggaagcgtgaacttccactacatttta

SEQ ID NO: 105044 - DNA, 375 bp, Glycine max
  unsure (1)..(375): unsure at all n locations
gatgttttatctttcgaaggggaaattggaaaataatacagacaattgatgaatggtttatttttgcgattgaaataaaaaaaggtgaatctaggatcttgttcatcacctcgcttgtgagtgttgcttggtgcctgattatttgggatattatgctccattcttgggtgggtttggtctgttctttgngcacatcttcttgttgttattatagcttgtcagatttattactcgtctgaatgatgtgaatgaaattgaatatttntatccttaacggattggttttacataacattgtgttacgatgctgcatgattggtggatccttcctttgcttatattaaattatttttccaaatctatgttgatggattg

SEQ ID NO: 105045 - DNA, 398 bp, Glycine max
  unsure (1)..(398): unsure at all n locations
tctgctggtttttattacatcctaaaattgagcttgtgctgaaagcaaacttttccaattgaacaaaattaaaaatgaatatttttgtgggaaaagggacataagccaattgcatctttcaccatcatctcccaaaatgagggtacacttgtctttcttgctttttgcggcatagcctctccaatccattctcaccaaaaatttgaacatagaagcagtttcctccatgatatgtaaaaagcaagaactcatcaagcaccactgaattgtctttcagaaattgtgaccaaccattgtccatatacacgttatttcctttcttcanaatagttacttgccacttatcaccagaagggcctataagaactgaattactccacaagtctttattcaaatgc

SEQ ID NO: 105046 - DNA, 348 bp, Glycine max
tcagatctatatatcaatgttctcaagaatgaagtggaaatgctcattcttggttctacccactatgagaggaaagcccacgtagtgtcctggttgccgcgtgtggtgaaactcgagaatggaagtgagatagttaatcttgcttctcttcacattcttggagcagaagaatattgatttttgaatgtttactttcagacccgacgctaagcaggaaattgcggaggacttccttgaccagtttaacttgagagacagtggctttggtaacaataagcaatcttcagcgaaaaaaagatgtgagatttgtcggccattcctggagacagtaattggaagttaaacacc

SEQ ID NO: 105047 - DNA, 460 bp, Glycine max
  unsure (1)..(460): unsure at all n locations
gatccttaagcaccgcggctgcagcgttggagaagtgtttcaccttctcgctaagccaatttgctggcttagcgagcatccgctaagcgcaacactccttggctaagcgtgaggaagaatccagaagaagatgagttgtacaggttcgctaagcgcatcgcttcatctctctaagcgcatcacttcaattcatccactacgcgagaaaggcgcattaagccaaaaatcagtaccgtgcgctaagcacacgagcacgaacaaggccacctatttaagcctgaaatcagattttgtgaagagagttaggactgggatttggagctttgcatgtctggggtttctagagagagaaaggtccaatttccaaagagttttgagagattttgctgtgtgaaaatctgtagagaccatagcttgaagcatgagctggtttgagagcttgagatgagttngtgagtga

SEQ ID NO: 105048 - DNA, 406 bp, Glycine max
  unsure (1)..(406): unsure at all n locations
ctaagcttctctttgacctttgacgagcacttaacttgttctctaatatcataccttcgactctggactagtccctcttagccctttggagctagagttcgctattgcttgcccataaagcccctcggaacttggttcggcctcattcctcttttacggccctctttgtttctcgttccaatgttgtggctgtagttgtgttgacatccctcagctcgtcacattcctttctgactctgatggctgccgtcttgaacttttcttgactacttgcgttcnttccagttccacttttaaggctngcacctcttcgctttcctcagggacctcagtctctttctcacttganaccnctagctttgggaaccaagttatctcttgcgtctgagccttcagccacatgtga

SEQ ID NO: 105049 - DNA, 404 bp, Glycine max
  unsure (1)..(404): unsure at all n locations
gctttttgacctttgcaaccttagttcatccttcaagatcaaactgcctactcgtgatnggtccctttcctctctctggagcttaagctcgctgttactgccccacagaacccctcgaaatttgttccggtcgtgtttctccctacgagccctattggtctcttgttccaaggccctggtggtagctatatttacatctctcagtttgacattctcctttcagatcttaagagctgctgatttgaacctttctttgactgtttgggcttgctcgagttctgccctaagggcctgcacctcttcgtcttcctccggtgcttcaacttccacccctttagtggttctcaaacttgggagccaatccaaaccttgcatgtggactntcaaccacctatggtagccgt

SEQ ID NO: 105050 - DNA, 465 bp, Glycine max
  unsure (1)..(465): unsure at all n locations
ggatccttaagcaccgcngctgcagctttctctactaatataacttctacgcaaacaacacacagaatattatgacctttcagcatagatacaatccgggttggaggaatcatccaaatctgagatggacaagtccttcacaacaacaacaatctatacctcctttccagaatgctgctggtcctagcaagccatatgttcctctccaatgcagcaatagcagcaacagtcacaacaaagacaactagcaactgagacccctcctcaaccttccgtagaagagttagtgaggcaaatgacaatccagaatatgcaattttagcaagagataagagcctccatttagagtctgacaaatcagatggggcagatggctactcagatgaatcaagcttagtcccaaaattctgacaaattgccttcacaaactgtgcagaatccgaaaatgtgagtgccatcaccttg

SEQ ID NO: 105051 - DNA, 271 bp, Glycine max
cgaggtacttaccgcgtgaagatcgaagagcgatgaacaacgaatgaagaacgtcgaataacggttgacagccttgcgagattcctcacggaatacgttaccgaaacgtttcggaagcgcctcggcttagattttcttcacggaaacaattcttcaagcaaattcaacagagagagaagtgcctaaggggctgggatcccttccttcttcatttcctcccctatatatagcaaaataggggaggtggttgccgcccagctcggccaggcga

SEQ ID NO: 105052 - DNA, 473 bp, Glycine max
  unsure (1)..(473): unsure at all n locations
ggatccttaagcacctgaggctgcaagcttgtctgagaatgctggnagccagatcaccgagattaataatgaaatcacagcaccttcttttgtatacctgaggaagaaagatgttgaagcattttattttacttttngaaaaaggtataaagaggctgacagcccaaagtcccaaaaagatggacttgcttaccttaattcatagcctcgtagggagctaccatcagcaagagcaatgccagaaatggcaactcaagttcacctagaaatgaaaaagacccagaagaaaatgtttctttccttcaatgttcaatcattatccaacaagtacgaaaaacaaaaaacacaacttatttttcttattacactccagaatcaggattttctttctcatgtttcgcagtttatacaaagagaagatatagagcccagcctgagttcctagaaaaatgctttgattacaccaattcaat

SEQ ID NO: 105053 - DNA, 366 bp, Glycine max
  unsure (1)..(366): unsure at all n locations
gatcctttgcttatgcttgggcacttgatgaaagttctgaagaaagagaacggtgaataactatgacagtggcttgtgctctatttgacacgatgagatatcatgtttgtgtgctcgattcccctggccataaagattttgtcccaaacatgatgtttggggcaacacaagctgatgctgctattctttgtatagatgcctcactcggttcatttgaagctggtatggatggcagcacagggcanacaagggagcatgcacaacttatcagaagctttggtgttgaccgggttatagttgctgtaaataagatggatgctgttgcgtactcccacgatcgatttgatttataggcagcagctggga

SEQ ID NO: 105054 - DNA, 306 bp, Glycine max
gcccaactctcctagagaataagacaccgctcagtctccattatgtctgaagtcacaattctactctgatctgtctacggaccatacaccacactcgcaccagtgtgctacaagcgaactccttgctgaatatgctgcttatataaaccgttacaccctctcaccgccaccgcggttttgccacgcttacaccattagatacacgtcgactcaatgtacactccaggaagaaggactcttgcaagcatatctgatcgtatattttaagctccatcagggtcactaaaggcatattatcaaatgctg

SEQ ID NO: 105055 - DNA, 455 bp, Glycine max
  unsure (1)..(455): unsure at all n locations
agcttgccttgcccctngatatattnganggtactatggtcactatgaatgacaaattccttgggataaaggtagtgttgccatgttttcaaagcacgtactaaggcatacaactccttatcataagttgaatagttaagggtaggaccacttaactnttcactaaaataagcaattggatggccttcttgcatcaacacagccccaatcccaacatttgaagcatcacactcaatttcaaaagatttttgaaagtttggcaacgcaagtatgggggcattagttagcttttgcttaagaacattgaaagcttcttcttgtttctctccccatttgaaaccaacatttttctcgagcacttcattgagaggtgctgccaatgtgctaaaatccttcacaaatcgtctataaaaacttgctaagccatgaaaactcctcacctcggtcacagactt

SEQ ID NO: 105056 - DNA, 417 bp, Glycine max
  unsure (1)..(417): unsure at all n locations
cgcgtactgatgggtaccatgaggtgtntgctgtggttngacccacgcgggtgttgaagagacagcatgggcatctccttccttcctttttgcccctgttgccccgattcatttggcattcgccgttgtggaggaaacgtaatcaaactttcctcttttcaatccaacctcgattcttttctcggcaaacaccagatccgcaaagctggacggcatgtaacccactagcttctcatagtagaacactggcagagtgtctaccatcatggtgatcatctctctctcaaccatgggaggagctacttgtgccgccaaatccctccatcactgcgcatattctttataggtttcaccctctttcttgacatattctgcagttgagtacggcaggagcctatcagaattgactgatactgt

SEQ ID NO: 105057 - DNA, 216 bp, Glycine max
  unsure (1)..(216): unsure at all n locations
ttagcacgagctgcactaccttctgctaaactgccttgtttttcctgagtctcactgtctcatcacatggcctttgtacacttgagagactcttcactgacnactgaacctacaactggtcacacacagttgtgacttcctcgaatgcacatatactgaaagtttctttgtactcttaagtaatcctgaatgaagtcaaatgactcttactttaca

SEQ ID NO: 105058 - DNA, 237 bp, Glycine max
tttactattctttacgtgtctctgggaatacatagactagagctaaatccctctaaatccaacactcatcgctacctaagaacccctgctaagatcctctcctaagatgtgctactaagaacctctctatagaaccattcctaaggtcccctcctaagggctctctggcatcctactaaggtctctcttaagaactctctttgaaccctcttagaactctctaagtccctcttagtc

SEQ ID NO: 105059 - DNA, 381 bp, Glycine max
  unsure (1)..(381): unsure at all n locations
acttcatcaagttgggcatagcggttaaatattgcatttanatatattactacacggctaattagaataagattaatggtgtctatgatttataatctatataaaactcaagaagtttcaaccgtagaaacatcaaatcaatcaacagtaatctntacaaaattggttttttttaaatattaccctaaaaatgagtactataataaaaatataaatatttatcanaatcagacanatgagttagaacaagtannaataataatcagaaattaaatcataaataaagtaattttataaccatgaataaaagccatctcggactaaatgcgcaaagaataccaaaagccccaaacaaaaactaagaaataatattcaattaat

SEQ ID NO: 105060 - DNA, 288 bp, Glycine max
  unsure (1)..(288): unsure at all n locations
ttctctcggttggaatnggctaagccanacagctcgcactaagcccaggcgtngttgtcatcaatcttcaacatgctccaattcaactccttgtgattntctccttccttgcctttgatgagtagnccatccttgatcttcttggccatctcttcttgtagaagcttggatctttcaactcatgaagcatttctaggtccttatgctctttggataactctctatctgaaagcttctttagcaaagttgtcacnaatttaaaaatgagattgtcatgttcaggtcaca

SEQ ID NO: 105061 - DNA, 304 bp, Glycine max
  unsure (1)..(304): unsure at all n locations
ctctttataatgtgattgccggactatgacatggattcaaagtacanggtcaaaaattgttgcttgattctcatgggcctaatcgccactgcaagtnntggtgatccctggcatggngattccactcttcannacattgttaatagtcttatagaaagtaatntannatcattatgattctttggctanaatcatnntgctcatttgtcgtatagctaaccaggtatttgttgacattacaacggctagtntgatcatattntgtgctgtaccctntatttgtacacaaatgtagtggatagat

SEQ ID NO: 105062 - DNA, 107 bp, Glycine max
acctcgcataactgaaagaatattgggaggtacacggagggtcgacatatatgggtgacatataatagtaatcccgcatgagacactacaactacagactcagtcag

SEQ ID NO: 105063 - DNA, 491 bp, Glycine max
  unsure (1)..(491): unsure at all n locations
atcctctgagtcacctgccgcatgcaagctntcactcntaaatttgatccagtttgtatcttctggtgtgggaactctgatcttagagctatgtgggtaaattgttgagaaaaatgagtagttgataggtaagatcattttcttttaaaagtttaaagacacaggccctagttggggttggctacatgcagctacatggattcacttttaatcatattatcttccatttcatctataaattatcttccatcacatagccaaattaattatgctagaccatgntgtgatacctctcctcaataggggctactgcatgtttctattgtcgtacaatgtacatttgttactaaactctctaatcatgcagctatactttcattcaagtctgacggccacttcacaattacaagacataagtatgaatctggaccttcgatcaactacagagatggagggaatagatcattaagagccacggatgactctacaac

SEQ ID NO: 105064 - DNA, 459 bp, Glycine max
  unsure (1)..(459): unsure at all n locations
aatgaattaagccctttgatatgggaatcttgatgatgctgcagcagcaataaacgactaacagtattagcaggttattctgaaggggttttcactttcacattgatactataccagctcggagctttaattaattaaagaggtgaagccaacagctattttaatttgttaataagttggattgtaatcaagtaattgaaccccttcacaatttaattagtttaaatatntgatttcttaacagatgctacaataacttanacatggcaattctaaatcacgtccttgcggaagataattaaatattgcagctgaaccatgccatgtttttattaataataatgaagataatanagccaatggcctactgtcctatctggtaatgtactataatccctgatcttcgtgtcatttgaaggctaattntcagtaatgatgaagttgngatcctttcacact

SEQ ID NO: 105065 - DNA, 468 bp, Glycine max
  unsure (1)..(468): unsure at all n locations
tcctctgagtcacctgccgcatgcaagcttgaaggggtgtaacccaccattntccataatagatcactagtaatatgtctactatcattgttattatntctttcttcgtcattgagggaaacacttgngctgccagatccctccacctttaggcgtattctttgaaagatgcgtgccccctttctgcacatgttctgtagttgcatcctatccgaagcgattatactgacactacctaacgaaggcaaccattaggtccttccaagaatggactcgagaaggttccatgttagtgtaccangtatcagctaccccagtaagactttcttggaaggaatgtatcagcaattcctcattctttgcgtattgccccatcttccgacaatacatctttagatggttctcggggcaagttagtcccttgtacttgcanagtccagcaccttgaacttgggaggggtgatgata

SEQ ID NO: 105066 - DNA, 292 bp, Glycine max
tcactgaacatgattgctcttggtttatcttttgtcaatatgaatggggattatgatgagtttttccctgattaagttatcccaccaacacttctctcaaatgactgtatgctcccaatgattaatatgatgtgacacttgacgaaaatatctgtgtctttaaacttatgccaaaaattggcaacccatgctaatgcgagaactgctcagattgtgttggtggctctgctctaatacttcctgttgcaacagtatctaataaatcgtgagatgacattgcatgtgtttttgc

SEQ ID NO: 105067 - DNA, 493 bp, Glycine max
  unsure (1)..(493): unsure at all n locations
tatcttctatatgaccncaaccaacaataacgagtgagtataaaatagaccagctttacaagatanaggaagaaccatctatcattgtatgcctcctgttatgatctgttattgcagaactttactgttagtttgttaccaacaccctatgatctagtaattgtttcaatactataagcctaaatttcccaaatccaaataactcatttcattagtgccacttgcaatcattttgagttctctctagccctcagagactcaagtagaaatagcagttggtctttgcaaaatttcatataactactatatcttcttagtagtatcaagaaaaattattttanaaataattggcaaactgttactaagtacttagaatcatgaaactgagttgtaatataaagtaaatgtaacagacgactctgatgggttaatatgttttagaattctagctaagcaataacttggttctcatgtatatgtattctctttatat

SEQ ID NO: 105068 - DNA, 359 bp, Glycine max
  unsure (1)..(359): unsure at all n locations
acactgatatacttttctgaaaccttttgntttccagcttgtctattgtattgtaagggaccaacaaaacaggtcttgattcacgacttaatccctcacnattatttattttattttaaaattttttcctacttttagttttatgtggctaaaatgtaatcaacctcacctctagtgtatacctatcatgtttagtttcctccaagaaaactcctnctaacgaaagagctacaagaaatccacattcagacaccgagcatacaattctgaatacatgcatgatcaaagcanaatagttaaccacaaaagccactttttttaactagttgtagttgattntatgactcctttcantgtct

SEQ ID NO: 105069 - DNA, 474 bp, Glycine max
  unsure (1)..(474): unsure at all n locations
gctgacttggtatacctctgntagccattgnggttacatcttcatgctaagaactaaagccagtgaaatnttgtgaactctcggcagatctttggccaggcttattggcagcaatctggcgctgcaacccattccactcaggttcacactctttacgttgctccggaatccaaacttgttaatgatcattgatgtaatggatggtgtangacagaatangctacagttngacacaaggatgtcaaagctcttggatacanctttgtgttcanaaggaggtctttgacaattctgaatagaaacgattcaccttctgcttgccccgcctcatgngaatcgtccgggggagctcatgaaccaatgctggcacgcangcctcgacgccaatgccagatctttccaacactttcaattcanagtctacgagttcagggtcaaanatgcacatntcannagtgtctatgatatgggagt

SEQ ID NO: 105070 - DNA, 392 bp, Glycine max
  unsure (1)..(392): unsure at all n locations
gcttcgtcttaactatatgaagatagatgtgtgtctttttactgtaagtngnatctaggagatgaaaaacatntggaggcctacaacacatgtggtacatctaggtggaaacctaataaaaagaataagatagccacagagatattacatttctctccattggaaccaagattgcaaagattgttcccgtgctttaagactacactagatataagatgccgtgctttggaaaacaataaagattggcggttgagatatccaacagatggtgaggcatgtaagacatttgtattaatccatcccgatgttgctttagattcctaaactattcgcttaggccctgctactaatggttatagtactactactaccctgagtgctaactatagcat

SEQ ID NO: 105071 - DNA, 382 bp, Glycine max
tgaagacaacatgttaccctagagtcatcactaggtgaagaagatttatgtcttgtgggtatggaataccagaaaatacatgcatgccctaatgatcgtatttagtacataaatcaatttgtcaaaatgtgcaactgccttacatgtggagtatcatgctacaaagtgaagtatgccacattcaatgatgatccaaccacaaacaacgatcgtctagcaaaggtgtgatggtatcttccaataataccaatgactaagtgaatgtatgctaatgcagatgattgaaaaaccttacatggcatgcacatggcagaaaaaatgatggattgctccgtcatcccgcatattctctccaatggaagactatctgatcggtgtatct

SEQ ID NO: 105072 - DNA, 373 bp, Glycine max
  unsure (1)..(373): unsure at all n locations
tctatggctgcatcttaanaccatatgatatttggtcttggatcattcatcatccatgttagtatgaagaaacgtctctaagttagacaagcttcttgaagacgaacactcttaatttaatcgatatcagtctatcgaattgatacaacaagctgtctgagcttacagagtgagtttgttgggttaatcgatactgactttcataattgatacaatgtagcttgaacactgctcgatcatcaggagttctacttaatcgataccagcgtttaatcgatactttttctcgttagcatcanagtgacaaaaccttatcgatactttggatcaatgttacttgccttaatattcactgtgaacacactttctgtca

SEQ ID NO: 105073 - DNA, 238 bp, Glycine max
accactggatttcctccttgtaaatcgttacaagttgactcataggcaaccatcttggtcaaaatcttacactagagactcatccttataatctttttaagagaagacgaaaaaatttctcttgagagaagatatacaatgaagtcatggaaaatcttatggattgctaggtgtgccagagttcttttgaagacattggaatgaatctctggatatctatatttgtgccagcacctat

SEQ ID NO: 105074 - DNA, 573 bp, Glycine max
  unsure (1)..(573): unsure at all n locations
tcagagtcacctgaggcatgcaagctnngcgngctttctgctgcgaatctctaccttgactctgtctctctngnccatcttcatgtatggcttctttcccttcttcggcttcaaagatctcaccttcgaattgatcgactccaccaaatttcccaactgcatcctcctacgattcttcatttactctnttccactctcatatataactgcctttcctcaaaatgccctccctattgcaatgaatccccagctttgccattatcttgtggaatggactatcgaccttcttaaaggagaaattatattatattatacaattggaccggcgtgctggtgtcggcgtacataaagtcatatatcggaactcatcacttcagcgcacgctgcctcattccttatccacctgtctatctatctacttcttcatttactcattcatttanataagttatacaagagatcatcaactcttctacatacctaaattaatattcgtatcanaatatanatntcatagatattaatattgtctttcaattaactctttgacaatatagataaattattctatta

SEQ ID NO: 105075 - DNA, 525 bp, Glycine max
  unsure (1)..(525): unsure at all n locations
tataccctcatggtctttatctatcttatgctaaatatgtgtccgaattcgtttatgttgcacacaaaagatactagcaaccaagaaaacaaggaaatacaattggcaggatcatatgggtacccncttcaagtggagagttattctacatgaggataatgctatcctccgctaaagggtcacaatcttagaaagatattagaacaataganaatgtggtctacaatacatttagagaaacatgntttgcataaggttttctaggaaatgatcaagaanttgttggtgttttacgagaagctaacacttgtggatctgaacactntcttagaaagttatttgtgaagctgctatttatgaataccatgaatagaccanaatatgtgtgggaacatacatgacaatggatgacagatgatattctatttaatcataaaagacaagtaatttcaacattctnataattgatatcatcatatanacaagtactactaacaataattctgtctattacaagcatcacta

SEQ ID NO: 105076 - DNA, 388 bp, Glycine max
  unsure (1)..(388): unsure at all n locations
acccgatgctgagaggttctatgattatggctacgcaagagtgcgtgagctcagntgaaaggtgggcaactggggatggtatgtntatgttcgactcgtgaaagcgggagagatgatttgcgccatcgcccgatcgccacctagtaccacatatgaccagtgccccataatccaacaagcttgatgtgagaaagcgtggaagagtcattcttccttacttttttgttgaccacagagtggtacctgcagatatgtcgtgtgggtcaggagacctttgggacgtcaggtggtgtgctattgcccaataccaagcttgaccaatcccgacctcaccctggcatatgtcagtcaatgagaacctgtgacgtacctaaacatgcgagctcct

SEQ ID NO: 105077 - DNA, 377 bp, Glycine max
  unsure (1)..(377): unsure at all n locations
gtcgacgcgctcagctgctgattacattcctcttctaagcaattcttcttgtatcanatcttatgattacattctcccncttcttgataatgacaaccacctgtaggttaggagcaacaacaaagaaaaatatctattgcatatagtttactcccccttggttttacaatgattgcttatatgagacaattgaagatctcatatntttcatatataaanagtcgtctcataaagcaatagataattcttcttactattgtatcttttatctttctctcccgctttgcaacatcaaaaacacatcatgaatagtaatgagaaagatgttaccacttgttgcagtgtatgagaatcaagtgataccaatatggcattat

SEQ ID NO: 105078 - DNA, 430 bp, Glycine max
  unsure (1)..(430): unsure at all n locations
atccctaagtcacctgccgcatgcaagctttgttccttntataaaagagaagttctgattctatcacgatgtctaaanaggccttgaggtggatccaagtgctctgatcattcatcancatattcatgtnttggtggcatgttcaccactgtttgagttcttaatggaactcaccataacttatatagctcaaagacacccctatacacccgatccggataagatggatactaataggagtgctataacagatgaatccnacctatccgctaaaagatagatggctctataccgatgccttcaaagattaaaaaacttttaaataatgctctgcagctcttcaatacagctatggagctgaacgggctcactcccaatatacttggctgaaaatactcactggttattccaagtatttctcaatttctct

SEQ ID NO: 105079 - DNA, 419 bp, Glycine max
agcactgagctgcagctctgggccattcgcgaagcatcattttatgtcattttaccaagaaatgcttctcttaatactataatggcatactacctcctccaataaacacaaacatctatgtaaatctagaacatatctcatgcaattactcttcttatagaacaatatcactcgtcacaatgatattactttctacactaaggaataaatagcacacattgcacatatcgattgcacactgtgtcaacctaagagtattttatatagtacatctcataagagtttgttgcgtcactacatctacatgcacttgtcttggcgtatattacatacatgcatactctaagcatcttggctactcaaaattgccacgtgcacatctgggcttcatatacatatgcatatgcaactttgtgatg

SEQ ID NO: 105080 - DNA, 520 bp, Glycine max
  unsure (1)..(520): unsure at all n locations
ctgcagcttatatttagtgatatgcacagcctgctttcatattatgattaagaccctagtcctagttcttagtcaacccatcttgcgcttcatctgaatacttatttaatggaaagttacacaaatntcatagcttcatttgagcagatttttttctattatccctttggtatcatgaactagcgagagagtgcagacgagacatccttanaatcttttggttctagaaatatcagttacggaatgaaattgagggaaagtttcttcatcattatgttcttgtgaggaaaaacacaattggtggagtgattcaagctcgtgggagtttgttgtgtactcggaacaacattacgagatatagttctcanatctcaagctcggcttagagagcagaatttagtcacaagttgtcaccanaacaccatgaatttggttgcactctcatctataactatttctcttaacttgnacacttgttatttgatagcaatgcttatgntgagatcgggattaacttaca

SEQ ID NO: 105081 - DNA, 250 bp, Glycine max
  unsure (1)..(250): unsure at all n locations
aaatacatgaaaataccaaaaagagtccctactacaaagactactcanaatgccctganatacaaggctaaaaccttatactactagaatggccaatatacaaggcccanaagaagganaaacctattctaatattacaaagaagagtggatccaaccttgacccatgggctcaaaaatctaccctaaggttcatgagaaccctanggccttctntagtagctctagcccaagcctcttggagtcttcta

SEQ ID NO: 105082 - DNA, 208 bp, Glycine max
  unsure (1)..(208): unsure at all n locations
tcccgtaatatatctagacgctcctaattgtaaactgacactctctagtaaattcaaacgacaataactgtttattcagatgcccgacggagtgtggtaatntatcgacggatgctccaaatataaaacagaagctctgatccaattcaaacgaccataacttttcactacgatgtctgactgagtctccgtatatatcgagacgctc

SEQ ID NO: 105083 - DNA, 454 bp, Glycine max
  unsure (1)..(454): unsure at all n locations
tactctgatgtctgattgagtcccgtcatatatcgagacgctcgaaattgaatggtgaagctctgangccaatcaaacgacaantaacttttactctgatgtctgattgagtcctgtcatatatcgagacgctcgaaatgaatgttgaagctctgagcaaattcaaacgacaataactttntactcggatgtctgatngagtcacgtcatatatcgagacgctcaaaattgaatgttgaagctctgagccaattcanacgacaataactttntactcggatgtctgattgagtcctgtcatatatcgagacgctcgaaaatgaatgttgaagctctgagccanatcanacgacaantaacttttactcgngatgtctgatgagtcctgtcatataacgagacgctcgaaatgaatggtgaagcttgagcaaatcaaacgaacataacttttact

SEQ ID NO: 105084 - DNA, 447 bp, Glycine max
  unsure (1)..(447): unsure at all n locations
ctgcagctttaagtggaggatggactcttacattcgaatttttattcaacgttcaagtgtactagtaatcgattaccaaaacattgtaatcgattacagctnntttgaaaataatggaacgttgtaaattcagtntgaaactttntcaacttcattttgatgcaagctccattggagcttgtaagcctaggatcttcttcatcaatggattcacttgcttcttggaagataaatggcagcgtaatggagaatgaagagagagaggagacgccactctaaggagaagatgagtctagaagaagctcaccaccatatgaagccatggataagagcttggaggaagaaggagatgaatgaatggagagggagagaagagcacgatatcttgtgctcaaaaggagctcttgaatctgaagtaatattataatgatcaaaagttgaaaaaat

SEQ ID NO: 105085 - DNA, 428 bp, Glycine max
  unsure (1)..(428): unsure at all n locations
aataagaatttaaacaacacaaacttgtgatatgaggtataagatataaaattaanaagcaaagttcaaaaatactaggttgcctcccaggatcgcttctataacgtctttagccagacgcatggttatggctgaggcttcgccatctcatcctccataattatnttctttgatcataagcaaatctgatcgtggacttagcacctgttggcatctgctctaatgccttgagaaaaagaacattaacatgcaaatgtttaaaacgctcgtactgcctttcttatctgtccctangtctactcaaggctcatgcgtggcgcctatcataacccaaataactntttcatttttntgcaaaactattagagatgataagatgcagtcgcatgcatgttngtattgaacattcannttagcgcaacaataac

SEQ ID NO: 105086 - DNA, 375 bp, Glycine max
  unsure (1)..(375): unsure at all n locations
gactactntccttagcacccttatgttcaatacgttcgataaatacatttttttttctgctatatgcatgagagtctcaatgctagctgtcacacanatgtgtgacacactctacccctcacatatattttaatacaggaatcaaaatgtatatattaattaacaagtatttctataatgattttaaatacacgcctttcaaatgggtaaaaggctcacattcactttcttctaatgatattcaaacttgtccaaattaataataaagtcatctcggctcagagaacgtcatctaagtttcatacaacttatatagaactcatatcctaatgtcacatcctatcagagcatggtgttcccgtgtcctctagcatg

SEQ ID NO: 105087 - DNA, 402 bp, Glycine max
  unsure (1)..(402): unsure at all n locations
atctctatcagacactatgctagatgcaacaccatgcaatctgacaatctcactaatatacatggaggataacttctccaagaatatctgatattaatgggaataaagtgagtggacttactcagtctatcaacaataacccacatagaatctaaacctctaggcggtctaggtaatcctaccacaaaagtcatgacaatacttatcccacttcactatggtatctctaaaagttgaacttccctgaccgctctgatgttctatcttatccgtatgatagactatgcatgcatagacatactcactnacctctctcttcattgttggccaccagaacatcatcnttaaatactaatacatcttggtagcaccangatggatgctcatattactgctatgtcc

SEQ ID NO: 105088 - DNA, 363 bp, Glycine max
ttgacaaagaatatttcaatagaacaacttaacgaatattgattccaattctaagagggaaaaagttttaaaaacaacacatgttagattttacgggcttatttattatattgttaaaaatttatacttgatatttggcatttttgataaatagaaaaatctactcatgtaaacacaactttgtagttgtattgaaaaaaattatggcccttctattaagttgcttgaatgagttaaaaaaactggtttggaaaactgacgttgtgttgtgcggatcttgctggtcatttggattgattcagtgaattggtttttgcacaccagattttatcattgttgacttttctttcgtagatctatgga

SEQ ID NO: 105089 - DNA, 423 bp, Glycine max
  unsure (1)..(423): unsure at all n locations
aagcaccgccgctgcagctggaaaatcaaccaataaagttaatatattaaatgtaatgtacaaaggtcaacttattactgatntaattgctnnntttttntcgttgattcccaaatcatttattattcaaagcatatatatcaaatattggactctntgttcacttcaacgtaggtgttgttgcattagtaggctggcaactagttatgcacccattatatgcttgatgcatcccattggaaatactaaagtacctgaatggactntntaccaaggacggagacggaggttacccctggtttttcaaaatattttttagtataaaaattatatttataatactatagtaattgctcttaatttattgataacgtttgaattttagagataatacataatatttcagtgctatttatatctttc

SEQ ID NO: 105090 - DNA, 507 bp, Glycine max
  unsure (1)..(507): unsure at all n locations
cttcttgcatctgctcgaacacttcctctgctttctcacatagtccttctctcgcaaatgcattcaccagagcagtatatgtgcaaatattaggtttgcaatcatggctcatcatttcatggaacaattntaaggccataaaggatntaccagcctgcatacatttcaaaatntacaaatattattatgttatgactgcactgtcaagagttttccatgctaaatctatctgttcattatttgcacgttatttctaaccatttcatcctacattatgttgtctctaaccaagcgtcaacctttatgacatgaaaaattgtcatttttctagttgtgaaggtcagcaacaattacacacatttggtttagttgaagaacagttacaanattgatgcctattttngtatctatcagatcagaatcatacagaanatgtaataagtaaattttagactgaaaacanagaatcttagtaagctcacctttccatanntaattatcaacatg

SEQ ID NO: 105091 - DNA, 346 bp, Glycine max
  unsure (1)..(346): unsure at all n locations
ctagaagcagttgtaagtcaggcttatgctgtgatgaattcactaacacatatattacatattgttgactagaattatatatatacatatatatatatatatatatacatatatatatatatgccagtgctatattatattacctatactatccntcgtttcatctgttgtgtggtgttgtgtgagtgaaattcttcataaacgatggacgatcagatgtngggttttttctctcttcatttgcacctttgagtaacagctcatgtaaattgattctagctatntattattcatcctctatttcttatcacaaaggagcatattaatactatctatttatatgtaa

SEQ ID NO: 105092 - DNA, 503 bp, Glycine max
  unsure (1)..(503): unsure at all n locations
agctttagcttaacaatttataatccaggtcaaccatatttatatattatttaagggcctgagttggtggattaattattattaccatatcaaatctaatgcaatacaagactgtataccaccaagtcctttattcaaagcatcacgtgatntatgtgtngattaatttctgctcttccagttgtagttgaatgtgagttatcaatatggaaaaacttattgataagtagagactgaaccaaaaatggaatatatgggaccaccggccattanatattcctgtatattaacattcaaattaactctccatctctcttgaattttcatcatatanaaaaaatgaatctgacgctggttagccggatcattagaaatattactgctaggaaatccatcaagatgccacgaacacatgctttatatactnagctacttacttaagtgagagattgaagattcttacttctgatgcggtctattagatatgacactaatgcatgata

SEQ ID NO: 105093 - DNA, 430 bp, Glycine max
  unsure (1)..(430): unsure at all n locations
cgctgcagctaagaagaattcatttccgccttgtatcaaaatatggttgattactaatttcaaaatatcaaattcgttaaacgtgacaataattgatatgatagtaatacgaaattntgaatannattattactcttgttgaaaaaaacgtggcagtagaagaactttgtcgtgttcttcatgagtagaccataatcgataatcctaatctgtttcggtgaaacaattccacttgggacaaaccagacaaacactaccatgtngctatattacgagtaacgttccagcacagcttntggttatgcctcttcttctctcggaagaagttcaattctttactcannacttgtggtcactctttctcctttttggtgttagttcggtgaatcatggagaacccaatcgacgggtggcgagtcgtgtacctttc

SEQ ID NO: 105094 - DNA, 464 bp, Glycine max
ctgcacgcatgcaagcttctgacgtgggcaatggcttgagcagtaatcatatatttatgtgtctattatgcaggtgaagccatcattgtgtggtccaccatatcgagaagtgaatgtccacagggactctgatttgaacaatggaccttcagttgatgaagtcaccactgaatcctcattgttttctctgcatgccaggagcagtgtgccatctcaaccgcttgtttctggacttaaggtgagtactgctgagccagtcaacttctcttggcttccttccagtggcaacacctattctgctgtcacaatatcttcaattatgcctgatagaggggatcatcccttttcaattgctgctccaaatgggccacacagagttgttgactcctgctgctggtggcaacccattaggacctgatatctatagagggccagtattgtcatcttctcctgcagtgtcatat

SEQ ID NO: 105095 - DNA, 541 bp, Glycine max
  unsure (1)..(541): unsure at all n locations
agcttctattanaatcattcactatgataaggtgtgcctttgtcaatacgaatcaactaacaaagctaccttgagactganaccncaattcgctataccgaggttccnctccactatggcaagtattagacatcagagatattacaaggtaaagaggcgaattcactacaacaaggtgtcaattcgctgcaacgatttcacccatacactcttgtctatgaattgtgcagaaattnttaaaaaaacttataaaggaattaaacaacaaattaatatccttgggttgcctcccaagcaacacttctttaatgtcattagctngacatgtgataggaaattcaaggatctcccaccacttgngagcttccactttatgaatttcccttcaagggttgtttgaaggaaaaatagcagcttctccctcgttatctttgatcttgagaaaatttatgtagaaagtttgctacagttcatccaccttgataagtgcttgaggaaggatctaccatgagatacatttctactacaaaatagaacaata

SEQ ID NO: 105096 - DNA, 372 bp, Glycine max
gtcttagcacgcgtcactcaaataagacatcagggatttaataagcagtgagtgcaagctaagactgcacgtatagtgaaactggcatctgctataagagtaatactgcccatacacacaagcgactcatgttctgttcagcaaaggacagaagaagtgtaatcatactggaaatatacgggaggtggtccttccttaatggagcaaagcttcagatgtacctaccacgcatgcggcggtctcactcaagaatcaggctcctatatgcaccgatgactagtgatgctacatatatgactgtgagcgtgtttatctgctcgacaataaatcttgtctacgatatgaatgacccctgcctgtaatgtgggggca

SEQ ID NO: 105097 - DNA, 503 bp, Glycine max
  unsure (1)..(503): unsure at all n locations
cacacattttttgtttgataaaactactgaaatttgcaggataattcaacatttgattttataaaacaaacatatatttagcctttgtttattggtaaaaaaaagagaaatgctactaacatactctttaacacactccttcatacacactttctcttatgtgttaaaatggtattacttgaagaacaagttccacacaatcttgaacctaccaagtgtgatggttgggattggtatgagtgggatcatntgccacancccttggttgggcctcttgagaaaatggtcacacgagctctcgacccatntccaatttgattctggtaattggtaatgattntttcgtgaggagtcttggataatcgtacgtctgggttatgataatatgtnttgtatggaattttgttagtctaactaatgtgataatacaattatggtttgaatcgcattcatgatgacataacttgcagatgtctacttctgaacatattgtattgttgatt

SEQ ID NO: 105098 - DNA, 462 bp, Glycine max
  unsure (1)..(462): unsure at all n locations
tttcctctgattgctctactagggttgtttagcgttattataaggagaaggattgaagcctcaatntcactatctctgtgcgaagagaatttctctctatacagacanttatttgcaatttccaatggtgggcatgtccaaaaatgattttgggaagtggtgtacaaaattcggaatgatccaactattaacgagtctaaaatcatagttttaatgggacaggtttgagtgtatacgacaaaataaatatgtttggcagaggaaagacnggagaatgaatntgtgatgaatngacctaatatatctctatttataactangatactctaaggctagtacttactatattnntctttattttataaaatggaacgtctatttactcttctattcaataaataaccaactaaaacatccctttattntctaaaatatcattttacttctatttatntctaatat

SEQ ID NO: 105099 - DNA, 462 bp, Glycine max
  unsure (1)..(462): unsure at all n locations
gcttatgcgctgtgtagcgcagcccatctatttttgtttcatggacgacgaggngttcctgganaacattcaagaaacaatgtaattgatacactcttgatctaatcgattaagtgttcttgatcactnttgggaacactttcaagaatgatgtaatcgattactatatcctcgcaatcgattaaaccagaaactcgaacaacaatcatgatctcaatgtgagttgtgtaattgactatgaatatatgataatcgattaaactagagacatgatttctctacaagttatcacagacttatgtaatcgattatacgcatgtggtaatcgattaaaccaatgagttatatagcacatatgatctttcttatattagaaactatcgtcctatctctatatgatgatgcatgatgtgcacacaaattgactaatgatgataataagcaatacacaatcctcaatct

SEQ ID NO: 105100 - DNA, 463 bp, Glycine max
  unsure (1)..(463): unsure at all n locations
agctngacaaatcgantggttaagtaataataatatctattatctataccatctntatgacattatgaatgacaggatgaagtgatatatagtgcttatagagtttactcgcatgtgacatatnttcaaaaagaacaagactaggaggataatgcaatcagattaatactttcaaagagaagaatgttgtgtaaagacattctcagacaatttagatatttctaattgactatattagtataaatcatctctaatccatatatnttttaatattatgctcctttcatattcttttgatatactttgcgttttaataatatgaattcaatatgatcttggttatacattacttttggatttctattataagtttctttttctagttagtatctcattanggtttaaaacaantaattggtcaaagacgtcttgcatgctattaaatagtctcgtaggtcaagtc

SEQ ID NO: 105101 - DNA, 338 bp, Glycine max
  unsure (1)..(338): unsure at all n locations
atctatanccatnttatggcattatgaatgacagaatgaagtggcataaagtgcttcgagagttcacttgcatgtggaaaattttcaaaaagaaaaagacttaagttaaaaggataatgcaaccagattaatactttcaaagaaaagaatgttntgtaatgacatttntagataatctaaatattcttatctggctatattagtataaatcatctctaatccatatactnnttaatattatgctctcttttcatttctctttgatatactcntatttaataacttgaattcaatatgattctgtntaatcaattatttttggagttgtacattactta

SEQ ID NO: 105102 - DNA, 372 bp, Glycine max
  unsure (1)..(372): unsure at all n locations
ctgcagcttatatcagcaagataacactggtttttatgtcattctctcgtgagcgaggagttgtgatnaatatcatatataattagtggcagaatattatagcgtaagcaagaaactaactgctcaatgataacatgatcacctacatatgcatgtataatggcttatcataacagcatgcaacatgcttttttatgtactactgacgtcaacagttggatacatcatcggctcatcaacattataatagtgaacaaggtcatctataatactgatgatctatctatatcttattctctatacgactttcgcataaataagcacgtaacatgttatgggaatgctgcatgcacttctacaattctatatgat

SEQ ID NO: 105103 - DNA, 506 bp, Glycine max
  unsure (1)..(506): unsure at all n locations
gatccttaagcaccgcngctgcagctgaactcaaggagctagagatgttttactttacatgccaactccctgagtggcattgattggtggtattgngtatgtttcatcttagtacatatgatatttgtattgcatcattcatcatcatggttagtgtgaagaaaagtntctaagttagaaaagtttcttcaagaggcaaaactcttttgtttaatttattacaggtctatngaagagttgagtctcgtatcagtttaatagattatcaatatcttgtaatcgattactattagtcgatgaatacgactaacttttgtgataaaacctgtgtaattgtatctacttccccaattatggtattctgagtgtataagtcttctgtaagataggaatnatactatacttcatttggtgttaaaatatttctctcattcacgtaatacgcactctgaaagtgtgtttactttcctaccaactgtgctacgagcgcgctaccacactatggt

SEQ ID NO: 105104 - DNA, 472 bp, Glycine max
  unsure (1)..(472): unsure at all n locations
tttgaagaaatcttcagaaacaagtcacttgaagaattgtgactttnggaaatgtattnttcataatcagtcactggtaatcgattaccattaaggtgtaatcgattacacatcaacagatgtgactcttcattntgaattntgaaaattaaaacgtctagaagctctcgtaatcgattacaagtattgtgtaatcgattacacaagtttaaaatgatgtacaactgttgaaatttgaaatctaatgttntaaaacactggtaatcgattactaccttctggtaatcgattaccagagagtaaaactcttcggtaatgattgtgtgaaaattcttgtgctactcaatgtnttgaacaactntttaatacttatcttgattgagtcttctcttgattcttgaatcttgagtcttgaatcttgattcttgaatctngaatcttgattcttgaaacttgattcttgaatctttgg

SEQ ID NO: 105105 - DNA, 515 bp, Glycine max
  unsure (1)..(515): unsure at all n locations
agctnggangggaatattgttctaacttacaaaacaatatattgtatgttatttccataattcttangtgctcaacatttaaagttgtcgaagttagttctctganaaattggctaagttcaacaagtggcttccaaataggttttggtaatgagtcaaatgcaattggaagcaaccattgcatganaacatgacaatcatgactnttcattccatgaatttttcccttgttaagatccacacaccaacctatattggaggcatagccatctagtaactttagttctttgacccatttaagaacagtgagtctctgggatttggtcattgcataagctggctttggttaaagaacttgccacgaccaacatctactagctcaagctccttctgatcacatatntctgctaaatccattagagcattgtgtgtatccttgcttttgccattgatgtccatcacaatgttaaagacattcatataacacattctttctgtgagaatgacataatgta

SEQ ID NO: 105106 - DNA, 504 bp, Glycine max
  unsure (1)..(504): unsure at all n locations
ctgcagcttttggagtnanacatgggaccactcattntattttatatatgaagtcatatctagtcaaggtctaagagacccttacagtttcctaacgaattctaattatgtgggccattaagtctatcatatgctgacaatagccgagaagcccgtgaatctcttcggcggcggagtaggtgtctgccatcngcttggccttggctaacaatcggggaaagtcttgactcccgttcaaggtaagagcaaaccgatccatccacatggttgcctcttggtgaaagagtcgncacccttcctctacctcttttccgcgatacttgggcatatcgtcgcatcctatgctcggggccgggtagattaactcttctggacttgggatgatgctncatgtggtctcgtctccataacctgaacaacttttgggacttgacaacataactctcttagaacatgcttggtccgactgctttctcctccactgagtatatgtacctaactcgg

SEQ ID NO: 105107 - DNA, 400 bp, Glycine max
  unsure (1)..(400): unsure at all n locations
tcattccaagtgtactggatngtcatctactagatgaaagtaatcaggtaccctcgtatagtctttgtctcaagcttgtgtctcttcacgtctggaatatgaatgtaacatatagatccaaagacccttangtgctntcctgatggcttcttcccgttccaagcttcaattggagtcttggtctttacagacttagttagacatctgttgagtatgtaaatagcagtgtagactacttcagcccagaatgtgttaggtagtcccttctccttgagcattgatctagccaatttcataactgtgcgattctttctctcggacactncattntgttgaggagaatatgccactgtaagttgtctctcaatgccttcatcctcacaaaaatcttcatactcac

SEQ ID NO: 105108 - DNA, 466 bp, Glycine max
  unsure (1)..(466): unsure at all n locations
ctccacccatatctggccttcacattatccatatctaacaccgncgacaacagcgtcaacaaatttgtgcaccccggatacaaacgcttctttcaatcactnttgaatgtatcatacatangggtatgtgctngctgaatagactctcgtccaaggtcacgaattatatcctccaagcgatntcccatttctacatcaaacagttcagattgtggcccactctacatgtctngttattcactatgccatatccatgtcgtataattcctcttaatccatccacaacagatggtccatatgtcgtaacttttgccgttcccgtcaacaattatgcatggacaaaaactcccgttcatcggcgactcttctgaacaatgtagaactgtccacttctataccaggctaacacttcattatcaactcatcattaaaatactcttatcttgaactattcatgctgaattac

SEQ ID NO: 105109 - DNA, 243 bp, Glycine max
  unsure (1)..(243): unsure at all n locations
ctagcttatgaatacatggttaatggaagcctacactcacttatngtttggtacgcaacatgaagaatgcttatatgattcgattaagaggactatgctgttggaatcgtcgattggctgtatacatgacaacacagacagcggctctctgacttgaatattgataatagacgacacctcgctatgtgagacacagacatatataaggttaattctggatcggctcagaacttcacataatat

SEQ ID NO: 105110 - DNA, 405 bp, Glycine max
atctctcttatcttagcgagagtgatcctcctcatatcttgagtgattcaggaacaccctggctgcatcagaagactttcacacctgtgcgagtagccctcctggacagagtgatcttctcctgctttcctatcacgcttgtctttggaccacagtccggatatcgccctgtgccatcatatgtcgggccctactccattcaccactcaattaagcgatctgaccgaacagattcagaacaaactcacctgtgtggatccctattggaccctgtgctcagtatagcataatattgtgtgtagccccttacctcgtataccatccatctcatttatgcagagcacctattaaacccgaatagcactattgcatctctctatcattcgatttcatacgttatctaac

SEQ ID NO: 105111 - DNA, 417 bp, Glycine max
  unsure (1)..(417): unsure at all n locations
tacatttgcttctgcactagaccgagcaacagtgttttggttcttgctcatccaagagataatattacctcaatggatacacaatatccagtagtggaccttctgtctatggggcatccagtctttaacttgtcctcatataacaatccttgtcctggagccttctcaatgttcctgagaatgcgaatcacaaccttctggtgatcaacatgaggagcttacatgaattgactaaccagtcttctatatctttctggatctgagtatggatcaccttggtctgccattaactttngatttggatctatangaatattaacgggtcaacagttagtcatgtctgtttcttcttaaatatcaagagcatacttnnctttgaagactataatgccttcattagatngagctacttcaata

SEQ ID NO: 105112 - DNA, 248 bp, Glycine max
  unsure (1)..(248): unsure at all n locations
gcctggttgctatatgcactccccttctactaaatgcacccacttctatatntnttgcaattctttatccgtaacgttacgaaacattgagaatatcgtaacgagacttattttccttacgcatgggcacgaatacatatggattatagatattctcttttttagctttcgaagaagttacggatactcactgatcgagcaagcctgctgttttatgatttctaagacgtctcgggacttcatttact

SEQ ID NO: 105113 - DNA, 374 bp, Glycine max
  unsure (1)..(374): unsure at all n locations
tttgtgaatctaaagaaattcatctatctgtaagtatggcatatatgatatatactttcacttaaaagactngatattcctaaattatcaagaaattaatggtgatgcactcacaatgtanagtaagcttgcattgtcaactaattaaaactgagtgttggtatgactnnttaaagtagtatcacaaaagtcaacanactcactatacatggtgttntgtgatngaatgataatggtaaaatactntaattgtcagtatataatccattttctcaactatcaattgcanagaannaatatcacttttggtgaaattgtcttgagctagtngaaaatgatttcggtgtgcactcanagatggagtatatatgatg

SEQ ID NO: 105114 - DNA, 251 bp, Glycine max
  unsure (1)..(251): unsure at all n locations
acaagtgttacacatgcttctatttatagactaggtagcttccttgagaagctntcttgagaaaacttgcttgagaagcttctttgagaaaactntcctgagaagctagagcttagctacacacacccctctcataactaagctcaccttcttgagaagcttccttaagaagattcctaaagaagctagagcttagctacacacacatctctaatagctaagctcaccttcttgagatgagaagctagagc

SEQ ID NO: 105115 - DNA, 393 bp, Glycine max
  unsure (1)..(393): unsure at all n locations
gacttcaagatcaagcatcaagaatccaatcccagattcaagattcaagagaagaatcagaagcaccagacaagattctatggatagtctaaagattttatcaaaaccaatgcacagtttgtttacaaataatttctcaatttctagttaccagaggatactcttggtatcattaccagtattagtatcgattaccgtgacagctggttntccaatatntcaatggtggcacgtccaaagatttcaacaggtacgatacctatttgtatcgatacaggaattgacgtgaaatcaatcatgtgaggcacactttataaagcatggaacgatatccttgtgtatgaactatgcagttgagaaagtagagttatctacatgttctaagcatctttc

SEQ ID NO: 105116 - DNA, 461 bp, Glycine max
  unsure (1)..(461): unsure at all n locations
tgtgacttgnngataagtggtggaatttggtganttagccaagaactatatgtaacctcggtggtagagatgaatcaatataaaattntcagtcttataattctttcctttcatctgtgtatttcaagtgacttagagtgtgtgaattcgattttagataaatgattcacgttttttttaaagtatgttttcaatcgtctgaatgtcattttgaacatttgttattctatttcaaacaattcttttatcataccattacaacttgtttttcttaanaaaacagtttagaatactaaatcataattaaccttcttcctggatattgtttttactgcttcttgatgctacgcacatangaacgacctgacaaatttatgattataattctgaaacctatagaatctaaaatcattgccattgagacggaccttcattgtctaatattgattgcaattattaaa

SEQ ID NO: 105117 - DNA, 60 bp, Glycine max
tcgtcctggcctactaccaatatcttatcatgagactgcatgttcttattaatgtcatga

SEQ ID NO: 105118 - DNA, 340 bp, Glycine max
  unsure (1)..(340): unsure at all n locations
tctgagtcgcctgcggctgcagctatagcttntgggagtcttagaagctttatctnnttttgaatactactagaagtaggagttttaaaaatggtgagctttagcttatagcttttcaaatgttctttcaatgttattatcgatacatctattcatttgtctaatttatctgttttaaatagatcataactttattattgttctatcattctacagttttcagttactggaacaagtagtcttatcgaatacttataatgtgggaagctagtttttcaacaactatagcttctagctattagctagtttcattgaacataggctatgttcaccaaaacta

SEQ ID NO: 105119 - DNA, 318 bp, Glycine max
  unsure (1)..(318): unsure at all n locations
acggcagtaaggacacgacttaactttcacagggtactagcatgcgacgctcacataagtaggaatgtcattctgcccgcacatgaattaatgttctccgatgtaccatgacttacagccattcatgtaatgaatactntatcaagctgaatgcatagttcttatcagatatctntgatccagctctctcacacacacacacacagagtatctttataataattgccgatgtagctcacacacatctcttgattttttatttaataaagctataactacattttagtgatttcatatcatgatctcatctctgagaat

SEQ ID NO: 105120 - DNA, 412 bp, Glycine max
  unsure (1)..(412): unsure at all n locations
gcgatggtgcacaacaaagtttccacatccacanatcgcgcattaacccaccatcctctattgcccaccttcaactgagctcacgtactctcacgtagcccataatctcatttctctcaacaccgggtgcccatcaatccttccaagttttcccaacatccaagtaactcaacattcaaacaacacaaaccatcacagccaagaaaacaggtgcatatgcaganaaactctgtccaaaacaccaaccaaaatcacagctnntctcacttaaagaacccagtaacaattccttcgntccaattcgttaaccggtggatcganctccaaaatttactgtaagtctctagtacataagcctatantttgaccggttggatctactactaaacatncagaaactcgtctacattac

SEQ ID NO: 105121 - DNA, 221 bp, Glycine max
ttactatattaggttgtgcatggtgtacacctgtagtatagaacataagatattcaattatgattgtctggtcatttttatgtaattgagcttatgaaacattgggctataggattactggaagatgtgctaactgatataaataatatctcaagactggatagttgttctattgacatagattgtctagttcacaagactagaactagtaatgtacttta

SEQ ID NO: 105122 - DNA, 443 bp, Glycine max
  unsure (1)..(443): unsure at all n locations
aactgttctggttcgacattgtaatgatgctacaatggctctacaacagagttgactctcttttcctttctcatttcttctaagaacgctttgctggtgtcaataccttgtagttaaagcaacccgtgtcaggtcttcaagttattattgctattatcaaccattagcaatacaaaccttgaatattagtgcctcacctgccaggtatccaccgtgtacgtagccataaatctttactagtggctctcagtgaaaaatgcactacggggctgcgttatctatcagaagacaatagctaaaacaaatgtacatggangatatattaaaacagacagataaaaggaactgtcccaatataaatgcgtaataaccaccttatatatgaaaagttatgattggaataatggngtagttgctgagctgcacgctgaatctgtattcac

SEQ ID NO: 105123 - DNA, 448 bp, Glycine max
  unsure (1)..(448): unsure at all n locations
cttatcgatactaccgcagtctttctttacatcgtctttgagtgttctccatatggtggatgaccactttgttggaccttgtggcctcttgtatcttaagaaggataggcttagaatgcagaataagcaacaccaatctatttaacaatgttctttaaacatgcaagacacaactgattgctacacaataaataatataatggaagagagaatgcatacacaattttatgctggttcggtcacttcctgtgcctacctccagtactcaagcaacccacttgagattccactatctttgtaaaaccttacaaagtctgaccacacagnacaacccatccttggttagatgcttacaacagagactcacatctcttactcatctcacgaatagaaaatggagaagattctctttcagaaagatattcaagagacatgtagaatctataat

SEQ ID NO: 105124 - DNA, 458 bp, Glycine max
  unsure (1)..(458): unsure at all n locations
atccttaagcaccgcggctgcagcttatagcgcggtctggagacaaggtcagtgtgttcaatatgaaaagatgatcgtttgagtacatcggatgtggtacgaccatgcnnctttcgattccagctaggaaattggcgagtggaggaacgccctgtcatntactcaacgagcataatgtatacctttacgattttaaaagctctatagttgggcctacgctatagagtttttccttttgttaacgctctgtgtcttctgatttcgaatatataatacgaggacctttcttcatctggtcttacgtctctacccattctcattcatttgcatgtttacttcttttgaaacggcagaatagatgacgagtcccccgaaggtactaatacctgtgacctcgttatcgacttcgagcaagacatgaatcagacggaagatgaacganacgaggatgtgggact

SEQ ID NO: 105125 - DNA, 381 bp, Glycine max
caaactcatcaaccgctcgaactcaacctcgacctcaagactcattcttctccaagaggcacttccactgtaccaacaagggtggaaatgaagaccacccaactcctcccacttcagaaacaatgtccaacatcatagaaaagacaccactcaaggaagagaagacaacagaccaaagatgacaggctgttcactcctgccctgcagcactttcagcgcacaacaagaaaagctccagcaggcaatctcaggctcgtctgtctactgtttcacagaacgtccaacctccttcgctcgctcaaagtgtggcacctttcgctccgcgtggccgtcacttccttcaaaggaccacctcaccgcttctatgactccacgcatcac

SEQ ID NO: 105126 - DNA, 360 bp, Glycine max
  unsure (1)..(360): unsure at all n locations
ataatttcaagcagggccacgaagatcacattcagctcgtgatacactttgagacatgacaacacagatcacaaccaacctgtgaattctctatcgcccgtgaaccaatgtagaactnccataattcagagatcancaccagctctggaattccgccgatcttgtgaataaactatggtgctctctgacactacgcactacagttcatacgtagcccatgatattgagtttactcatgaaacacctacaatctattntaatcttctaggggctagacttatattgacccatagactaatgagactttaggcatggtaacaattaactagctttgagtcacatagatttgatatactatct

SEQ ID NO: 105127 - DNA, 357 bp, Glycine max
  unsure (1)..(357): unsure at all n locations
cctcccctctgatagatacaaatctttgggaacttttacaaaagtctttatactatatatagccatttgcatatcaatacaagtcccgatttccaaccaaaaaaaacctnatcatattgtgtgatatgatgaatagataatcaaattagcagactttagaaaatttataataaatgtcttgagtttttgcattttacacccatctagtttattatatgcaaactaactactcccatattntattntctttaagggaaattatatctttttttctatataaactgctagtagctctttgctacactaaccctatcactggataactatattatatgagtatctaatttgggaatcgat

SEQ ID NO: 105128 - DNA, 446 bp, Glycine max
aaaggacagtgcatgtcatattgttctatccatcaagcatattcacaatctgcaacaggaaaaggacggcaatgaaggaagaaaaagactaatctacattatgttttcagtgtcactcacaaggacataagaataacatttgatgcaaatttaaaagaaatcataaacaaaaaatttgatgaagtgcatatcttatagaaaacagttaagaaataacaataaccaaatgaggcattttttggttgtgcttttttggtgtctgttgattatgctggagcataattctaaaacttttagccataaaagtacccttctccaccttttatgagacaggcttgtttccttagcttccttatgtggttttgcatattggatttttttagttttcaaaggttggccatgcaataggactatattgttcttttgaatagatcattttcttattt

SEQ ID NO: 105129 - DNA, 307 bp, Glycine max
  unsure (1)..(307): unsure at all n locations
tgagaaataaatggtactcttcacaaaatgtgtatcatctccatttcatttgtttttccaaaacagaaagaatgttcttagtagtacggcttatttgatctaattaccaaaattatgactaattctcctgttagaattattgcttgcaacaataagcccttgtgacccaaactcatgcccctcttgcatatcacataatgggatataaacacctgagccaaaattatcccaaacantgtgggaattggccctttgtgatatccttcgtactataacacttttccctttttcacaatacaatactggg

SEQ ID NO: 105130 - DNA, 418 bp, Glycine max
aattcgccaaggactaaccgcctgaattctatttgtgtctctcttctcccttttccaaaagaacgaaggactaaccgcctgaattcttttgtgtctctcttctcccttgtcaaagaattcaaaacgacacaatctgagaattcttttgattcttcccattccttaatacaaaattttcaaaagactaaccgcctgagaatacttttggatccccattcacaaagcgtcaaacgtttaacaacctgagatctttgtcttaacacattggagggtacatcctttatggtacaagtagatacatctacttgggtttgactgagaacaagagagggtacatctcttgtggatcagttctagtggagggtacattcactaggttcaaagagaacaagggagggtacatctcttatggatcttt

SEQ ID NO: 105131 - DNA, 405 bp, Glycine max
  unsure (1)..(405): unsure at all n locations
cacttttaggcagggtcgcggttaatgatgatatggtgacatatgcaatactcaatgctttttcgaggcttcagctttatttcccccttgaaaaacattatcaagtggttggtttgcggtctcaacccatctataaaccatattcatttgaattggctcgtaaaacccatgggtgggatgtctttttaataaacccctgaacctcttcaatgcttcactcagagattcatcacggaactgatgaaatgaagagattacagctnttccttctgcagtctaggactctgggaagatatttcttataaacctttcaacgacttcttccatggtgttcaattgttacccttaaatgagagaagccacctcttggcctctccttgccatgagaatgagaataggctgagt

SEQ ID NO: 105132 - DNA, 444 bp, Glycine max
  unsure (1)..(444): unsure at all n locations
tactaagcttctccctatttgctataatagggggagaagtgaagattattatggttcagccccttaagcacttctctctctctcgaaatagctgaggaaaattagttccgtgaagaanattcaagccgaggcgcttccgtaacgtttctgtaacgtttccgtgagtaattacacgaagattctcgaccgttcttcaagattcatcgttcgttcttcgntttctttagtcttcaacgggtaagtacctcaaaccaagcttttcaattcattctatgtacctgtggtggtccacattttgtttcatgtatcttttctctcgttttcatttactttttatacccccttttgacgtgcttaangccatttattaagtcatttctcgcttaatctaaagataaaataaatttccaccgatcgtttgaattgtatcatcccgttaatttg

SEQ ID NO: 105133 - DNA, 451 bp, Glycine max
  unsure (1)..(451): unsure at all n locations
catgatcatcagacgcactcggtctctatagctactatgtatcagaatcaccaaggtgaaactgatgatgtngacaaanaatggagacaaggaaagtcgtctgtcacacaatcgttctacaaaaaaacaaacatagaaaaccgactacatcttttttgtcgatggaatcatggaagtgtatctactgcctggatggaagacgctgaacataaattgctatgatggactatcgaagccagacgagcatgtagatgcattcataatatagatgaatttgttcaccaataaggatgttcttatgtgtcgagtgttccctacaacattgaaaggtgcaacactcattagtacacttgcctaccgaaaaacttgaanacttctttgcgacactcatcatgcaattcggaatgcaatacatgataagtagaccacttcacctaacagcagtagctct

SEQ ID NO: 105134 - DNA, 441 bp, Glycine max
  unsure (1)..(441): unsure at all n locations
atggtgccatggacagagaagctctanggtgtttccaatgatgggaatctcgaaacccaaaccattcttgggaagggttcaagattgcaatctcccaaaggtttcaagtgtctaacctatggaatccttttcacgcattgcagccgctgaaacaggaagaaacaatgcaagaattcacaggccaattctagaagtacgtctgataggtgaaggggtaggaggaatcgtttctggtggaggtgtttctcaaggggctaaaagaagaaatcggcactgaggtaaggcttcatgaaccaaaaaatttgatggaatctatggtcaaggctcgtacggtggaagataagaatcgagtcttagggaagttacccatgagtaatagtaaggggtataattctcagaaacccaattattcggatcatagatttgtaagggattggcaac

SEQ ID NO: 105135 - DNA, 495 bp, Glycine max
  unsure (1)..(495): unsure at all n locations
atcttaagtcaccgcagctgcagctcatccacttctgcatggatgaagngtgtatcttangaaacttgncaacaacaacaaacacagaatcctttccattcttgggtttgggcagcccccaaacaaaatccatagatattgtagtccaaggattttaggaacaagcaaaggagtatacaatccatgaggtttaaccttagattagcttgttacacacaatgcaatgaaccacaaacttatgcacatcacgcctcatatgaggccaaaagaaatgatcttgcagaatttccagggtcttttgaaccccaaagtgtcccatcaacccccccttatgtgattcactcacaagcaactttctaatggaacacttatgcacacataatatatttgctttatacaagaatccattatgcctatagtaacaattttcagaaaacttttcacatgcagcacaaaattcagcaaagtccacatcatgcacatacatgtctttta

SEQ ID NO: 105136 - DNA, 459 bp, Glycine max
gagctgacccatcaactgccctaactcttttgatctggtggccctaggctcttgaccttgacttgatagaacctctttttaagtgaaggcagctgacatgatctcatgttttactaaagcgaacaaaaatcggtgcgaatcaaaaccccgacatctatcatgggtggaatggatgaatgcataaagaaatgcatatggcacagatgcaatttatgaatatgggagcccgggaaattgtctccttcttggatacaacgtcttgcggtagcaaaatgcccgacgtatgtatttaagaaggtggcacggaccctccgttggtttgccaaagagagggaacagaatccgtgcgtgatgcatatgcaaaaggcgcaacacgggaatgtacagtatgaaaatataagcgaaagggtacatgacacttatgcatggcagtgtgaaaaatggcacgcagcgttcccg

SEQ ID NO: 105137 - DNA, 412 bp, Glycine max
aaacatatgtgcataaatgacaaataagtcataagtcatcaaaacacaaatcatttgtctaagtaacttgcatctagaagttctaattctcttctaatggtgtagaaagagtctttggttagtgagtttgtaaagatgtctgcaagttgggttctagcgtctataaattttttaaaacacaatcacctttttcctaagactaagcgctaattgactatcaacacttaccaagatgagtttttattatcataaaagggtttatcatatcaaaataattttgtttgaaatacaatataataattttgaaaagcataaaaaatattttgaacaatcaatcaagtaattctaacatatcaaacaagaattatacaaggattgaaggatatagatcacaggcattatccaacattca

SEQ ID NO: 105138 - DNA, 248 bp, Glycine max
  unsure (1)..(248): unsure at all n locations
ccaagcctagccataattaagggaaattcttgatttattgatgcctatatgaagattcttgaaatattctaatgtttagttataagcnnccctcttaatgacatctgtaatatattaaattactgtaccatctataatcatttattgcaattaagcaaaagatacatgaacacctaagatccacatcatacctttttacaaagcacttttatgacagaatgggtattcatatataaaactcttcttta

SEQ ID NO: 105139 - DNA, 288 bp, Glycine max
tgggttttggggtggcgtgtttgggattacctcccggtgattcgtgttctacaatgattaatatcacgctcccaccaattggattactattgcatatatggcgacggaaatatcatttaatcaccacaaacatgaccccctctgtctattcgataatataatcttacactcattattttatctctctatcctcattcggtaatggacacatgaatatgttgctcacattcgttgataacataaaataccacttagacacaattatgtcgcacacttgtacaacataat

SEQ ID NO: 105140 - DNA, 418 bp, Glycine max
  unsure (1)..(418): unsure at all n locations
tccttaagaagagcctgaagaaatatagcgtnagtatttacacctgtctaatagctacattcacctccttgacatgagaagctagagctaagcggcatacccactataataactaggctcacccctatgcccaataacatgagaatacaaaataaaaagtccttactacaaagactactcaaaatgccccgaaatacaacgctaaaaccctatactactagaatggccaaaatacaacgcccaaacgaaggaaaaacctattctactatttacaaagaagagtggatacaaccttgacccatgggctcaaaaatctaccctaaggttcatgagaaccctagggcctactttattagctctagcccaagcctcttggagtcttatatccaataccctcggggggtaggattgcatcact

SEQ ID NO: 105141 - DNA, 373 bp, Glycine max
  unsure (1)..(373): unsure at all n locations
tatagaaactcacgctcaaccaaggtgagacngaccagagtaagtgctngatatattcaangacggtgcttacaaagatgagctgcctggtgagtatagtgtcactaccaccttcaatgtctctgattaatctctttatgaagcatatggataatccgtattgacgacaatttcttcttaagacggagagaatgattatgacatgattttgacaatggcattgattcacttaaaggtattganagggcctattactatggctatgattctgaaagcctaagaagctcttttacaaattgctgccttgctattttattacacgcccaagttgaatgtaaagattcgaaggttgcgaattttattattgtccaat

SEQ ID NO: 105142 - DNA, 461 bp, Glycine max
tggatactttcttcaagacgagatccccttcgttaatcttgcaagagtgtaccttcttgtcgaaagtgttcttcacccagctttgatataaccatccatggctcatggcagccaatctcttaccctctataagatttagttgatcaaagcgtgcttgggcccattccgactctttcaaccctgactcggctagaattctcaaagagggaacctctacttcaaatgacaacatgacctccatcccgtacaccaaggagaacggagttgccccagttgatgtacgcaccaaggttcgataaccatgtagcgggaaatggagcatctcgtgccagctcttgtatgacacggtcattttctgaactatcttcttgatgttcttattagcagcctcaactgccccattcatcttgggcctataaggcgtggaattatggtgttggatcttgaaatactcacacatt

SEQ ID NO: 105143 - DNA, 253 bp, Glycine max
tcacctccttgagatgagaagctagagcttatctacccaccccctataatagcctaactcaccctcatgacaatatacatgatgaaaacaataaaaattcctactactaagactactggtaatgccttgaaatacaaggcttaaaccctatactactagaatggccgagatacaagaaccaaacgaaggaaatacctattctaatatttacaaagaagagtggattcaaccttgacccatgggctcataaatc

SEQ ID NO: 105144 - DNA, 454 bp, Glycine max
  unsure (1)..(454): unsure at all n locations
tcctcataagtcctaaatgacatttcacgctattattatctcactntaacctccatataccacacaagtcagacttaaccttccaactctcanagcctaactctttttccactcataacatcacattctcactttctaaccctatgttaactctaccattcatctctaacaattttccataagcaatttcaacaagctttcaacaaatgtcttcacaaataatcatcacacagcagaaacctagcaagactacccatcatatctccccaaaccccatacccacgaaaatcaaaggagaaagaagtccacccaaacctgaattttcgaagtcccactcgtagccacgcacttcacgaccccgaaaatgccctcctttcgcgatttgnggcagaaatgatggtcaaaggttgaagctttgcttggagcttcaatggagaatgaagaagaagaaaat

SEQ ID NO: 105145 - DNA, 342 bp, Glycine max
  unsure (1)..(342): unsure at all n locations
cttctagattgagtcaccatggtcaagaacaagattaagttcaagattccttagaagaaatccagaagattcaagattcaagagaagtcgatttctagattcaggagaagaattcaagaagacttcaccagggaagtattgaaaacgatttttcaaaaaccaaacatagcacangtttgttttacaaaagagatttctcanatttttctagttaccagagtattagtctctggtattgattaccagttcttgtatcaataccagtgataaatttgatttcaaaaattttaactggatttgcaccgtccaatgatgttaaatggttaatcgatacaattattg

SEQ ID NO: 105146 - DNA, 455 bp, Glycine max
  unsure (1)..(455): unsure at all n locations
cgcagtgctcttggaaacatgtgtcgtcatagtgcctatttttatagntcacttgtaagtattaaaaataatggtatttgccctcggagtactttataaacataacgaaaattaaaaaggaagaaacaatgatatttcgtttgatgaaagctacttcctgaacttttcatgatttatcctacctcagcttttttctctttctgtttataatttttagattgctgttaagcaattattcctttttcaatccctagatatatacaactctgtaaactagatttatactgcggctgttatctgtaaagaaaaataagtcttcctttctggatgacagagtacatattatattaaaatttctgatactcagtaaaaatgtgaaaaaacaataagtgatactctgctctcttctcttctcctattttgaattctcttaattacaatcgggatttccaggc

SEQ ID NO: 105147 - DNA, 389 bp, Glycine max
tcaaacttgaaatccttgtacacgcacaaaaaaaacatatctgttaggccaacgtcgactaatttacaagaagcgggacacatgcaggaagaggcaaagaaccaagaatcggaggacagggaagcaaccatggtcgaggtaaaaacgcaaaggatgtcggagagcgaaaaggaaaacatagagaagaaacccttcatggacataaaaattgagaccaagagattcacgccagatgctctcgagagaagacacagagctagagctgatgaaaaacacaattctacaggatccaccacatagcacctctgtataaagagcaactccaaaaacatagtcagcaacgttgtcaatggacatggaatgaacaaacctatacacacctctttcga

SEQ ID NO: 105148 - DNA, 389 bp, Glycine max
  unsure (1)..(389): unsure at all n locations
attgtgaacaaatgcattaaccatatcccggtgagagtgtgatcccttaaatttgagagaaacgactatcatttagtactgattgttgcgtgaatctttgaagtatggactgaatgcacgaaattgaagatgatgaaggccatgtttgattgagatagccacttagccaaaaacctgaccatgtgcttgaatgaattatcccttgtacctagttcgagctgaatgaattattgattgattgaatcctgagcctatacagtgttatcttctactacctcgacttatgttgtaggagagcatcatccacatgaagcgtggttcataagcaaattgtnctatacttgtgggagtaattataatgtaaatatgttcaaatttggggacgcact

SEQ ID NO: 105149 - DNA, 423 bp, Glycine max
  unsure (1)..(423): unsure at all n locations
gtgtngaagggtgaactttctgcttttattttttgccacagagtggtacctggagatatgtcgcgtggggtcangagacctctgggacgtcangtggggtgctattgcccaaaaccaagcttgaccaatcccgacccaacccgggcatagtcggtcagtgagaacctgtgatgtacctatacaggcgagctcctgtcagtcaacagataaaaggaacaaagaccacaaagcaagaaggcttgtggtggctggccagctgtgaactttgattgatatgtgggttatggcctctggtaatcgattaccaagggtgggtaatcaattacaaggcttaaaattgaagacaggaggctaagatggtctctggtaatcgattaccacggggtgtaatcgattaccaagcttataaaggggactggaaca

SEQ ID NO: 105150 - DNA, 461 bp, Glycine max
  unsure (1)..(461): unsure at all n locations
cgcgctgccattatgaatgggtcgttcttgtgacctaccttcttaatgtctacntaaagtaaatcccatttgtctttacacacacttgtatttccattgacccacttacatttgaagaaaggtactctaaactcaccataatcaagttcccaaatatcttcaatgactccatagtaaggcatgcatgcttcaatgggggtattgtcagaaacactananaagtaatgtgattcaccatccacactgacctcgcctttctgcacactacttttatcatcctgggactctgtgtagaaagaataatgattgatatcataccccntccaagttggaacattaaaaattggaccgacagctagcaatctaaatatcttggaagcactgtgattggagaagattgttcgtctaaaccattgtatgaaagttctattatgctcttgcaacaacctcatcatgttcat

SEQ ID NO: 105151 - DNA, 494 bp, Glycine max
atcttaagccacctgccgcatgcaagcttataaacatacttaactcatgaatttatcgtatatcctaatatattaattaagataataataattatttttacatcaattttatagtgtcatgacagcaataataaccggctgacattggatgtagattctttatatatatatagtttccccttaattgatattctgtttttttcccttgcttgctaatgttcaaccaccgcatcttatcgttaactctgttcttatttgttggccgttaggtcacttatttaataaaataaaatatatttttttggttacattaataaaacaaaatatgaaacaattaaaggcgaaagtgaatttaaaaataatttaatatatacagattaactaaacaattcatacaagagtcaaattggaaataaataatataagtgacgacaagaaatgtatttgatctttaaatctttattattaaaaagctagcacaaaaaaatgcgact

SEQ ID NO: 105152 - DNA, 408 bp, Glycine max
  unsure (1)..(408): unsure at all n locations
gctgagctcganaagacaagagtgtggaggattttctgtngtggcagtcactanggttaggaaagaatgtgatgagctaaaagatatcaacatgaccgcggctgaagcgttatagcgggacatgaagaacgccttaaatgaagagtggagcataaataagtctcgaggggctctgctaggcagtagtaatgagctctaacttataaaggccaagagggacacatcaaagatggaaagcctgatgttagaggataagntaaagagttgtcaaagttcgaagagaagtttgaaagaacagttgagaaaaacagaagataatatgttgataatcattgaccaatataaagagaaggtgaatctagctgctcgtcacgaacagatgctggaagacgaatatgaaaaagtgtt

SEQ ID NO: 105153 - DNA, 449 bp, Glycine max
  unsure (1)..(449): unsure at all n locations
gcgctcgagcgagacccattcttatttatagctntaataatatggccgggagctgtcattacgtgcgactatctccactatagaaagaaaaaagataagaacaagcaaatccacaaatactaatataataaatactataaataaaggctttctacatatacatatatcgtccaaaacaacgatttttatcagctgtagcacagaatgaaacttcatagaagtcaaaatatgaagaaatcaatatgtctagatacccccttttctatggataaaagatctaattgataaaggaagcatcgtaaggatccattaacgcggttttgaaccgatacaataaaaactgcttacttatctcatgatagaaaagtcaggaatccacttatgtaataaagtagatcccccgatattttgagcagcggtgtagtatcaaatcccaaagatagaaagtc

SEQ ID NO: 105154 - DNA, 412 bp, Glycine max
  unsure (1)..(412): unsure at all n locations
tctactatcattggcatcatttttttctccgtcattgacgtccacttgagctgccaagtctctccacctttgggcgtattcttttgaaagatctgtgcccctttttgcacatgttctgtagttgcatcctatccgaagacattatactgacactgcctaacgaaggcaaccactangtccttcccagaatggactctggaaagttccaagttaatgcaccaggtaacagctaccccaataagactttcttggaaggaatgtatcagcacattcctcatcctcttgcgaatgcccccatcttccaataatacatctttagatggttcttggggcaagtagtccccttgtacttgttcaagtccaccaccctgaacttgggaggggtgatgatattgggtactacgaacaactc

SEQ ID NO: 105155 - DNA, 409 bp, Glycine max
aagcctagtccaggtggtaccaaataaagggggtatggcaatcattcggaatgacaagaatgacctaatcccaacgaagactatcactggttggagaatatgcgtcaattaccgcaagctcaatgaagccacaaggaaagatcattttcctttgcctttcatggaccacatgttggagaggcttgcgggacaagcttattactacttcttggatggatattctggatacattcagattgctgtggaccccaaggatcaagagaagacaaccttcacatgcccttttagtgtcttttcctacagatggatgccatttcggttatgtaatgcacctaccacatttcagaggctcatgttggccatttctacagatatggtggagaaaagtatcgaggtattcatggatgac

SEQ ID NO: 105156 - DNA, 401 bp, Glycine max
  unsure (1)..(401): unsure at all n locations
ctttccttggtttgaagctcactacaagccttaaatgaagaaccatgatatcaccatatccttaagggaatttggagccntggaattgtttgggaataagtgtggggggttttgtctcattggataacatgtattgttggccatgcttcatgatgtattttgggccatacttgatgtacattgtttatnggataaatgttggacttgctgaatgagatgtttgttttcanaggctacgtacgctataaaaaaaatcgataaagaaaaaagaaaagccataaagttgagtgaataagatcttaaatgacaaaagaatgatgagactcttcggtctactctttatggtaaattttatcgttactttcttttactttctatttattcttaatatgcactattcc

SEQ ID NO: 105157 - DNA, 408 bp, Glycine max
  unsure (1)..(408): unsure at all n locations
gtatattcatggccaaaccggtgagcatanttatagatggtggttgcacacataatttcgtgcaccacagggtggttatgtccgtaggcttaacgacgactgtgactttaccgttgagggtcacagttggcaacggcgaagaactttagtgtcagcaaacatgtcctaacgtcgaggtaactattcaacgacaccccttcgtcattgatttccatgttttacctatctgtggtgttgatttaatcttgggagtacaatggttgaaaacgctggggccggtgttgactgattacaccaccctcaccatgaaattcatggccatcggccaccttgtggaactacatggtgaacacgatcaagccctataatctatctcttcctctcagcttcgacgcatgatacatacca

SEQ ID NO: 105158 - DNA, 232 bp, Glycine max
tataaaaattaagcggtggttttatccaatgtgcccttaatgtgtcatgggatgactaattaatttccggtaagatggaaaatacaaatttagtcccaatatgcgtgaaaaataatttgacaatttatattcaagaacacatatcacaatagtattatttttatggatcaatacgaatttgtcattaaattctctagaaaactaatcacatcttcaggacggagttagcatc

SEQ ID NO: 105159 - DNA, 451 bp, Glycine max
agagttaaacaagagcactgtgtggccaatatttgtctccttcctaagaatcctagaatcatgaatactcttcactttctccttgtaaatcttggagttctcatacacttttaagaggatctcctcaagttcttgcaaatggagctttctttccatacccgcttcatcaaatgtcatgttacaactcttcaccttccaataagcatagtgctcaatctccaccggatggtggcatgccttacaaaaaaccaccctatagggagacatcttccaaggtgttcggtaagtggtcctgtaagcccatagagcatcatcaagtagcctgctccagtcactcctatagggttgcattaccttctgcaacacttgcttgatctctctattgaaaacctgtacttgcccattagtttaaggatgataagctgtagcaactctatgcacaaccccttac

SEQ ID NO: 105160 - DNA, 253 bp, Glycine max
  unsure (1)..(253): unsure at all n locations
ttgaatttggagagaatcccacatccaccttaattattacaggggtaggtgagcattngcttgctacacaccattgccacatcatacaatcacactttgtgcatgtgcttcatgctttacatgactcatgacacctatgcacacttagtggagaatctttgacttgatcctggattaatgggttgaaccatagctaacattcgcttgtcataattagtgaaatcttggctcaaaaaattcgctcctcaaattc

SEQ ID NO: 105161 - DNA, 335 bp, Glycine max
cctctaaagcatcacacatttttcactcatatcactacattctcactgtttaaccctaggttaactctacccttcatctctatcagtgatccatcagcaatctcagcacacaaacatcacatagcatcatcataaaaccctaaaacaaaatgggtaagcttgactcacaccaaacatgacaagtgtaacatgcttttaacaaattccttcacaaataactaccataaggcaaaaacctaatcaaactacccatcatatttcccaaacacccaatacccactaaatcatgtgagaaagaagtctacccaaacctgaaatttgaagcacacaacgta

SEQ ID NO: 105162 - DNA, 419 bp, Glycine max
  unsure (1)..(419): unsure at all n locations
ttacntcaagatatgatatggtctatctaaagttgtcatcataaaacttactaaacatagacaatttttcaagcattttaactataagaagttaatctaatactcttcaacaccaagataatatggtattattttatataataaagacaacagcaatgataacctttataattatatacacaaatacacagatgtataggaatacacacactatcacaatacaagtacatgcttaggaaaaaaccaataatacacaaataattataacatatatttacagaaaatattacagaaaggattctaataagagttctccttatgatatattcctagtactcacaacttggggtggtacattttgtaaaataacatatataaattaaatcatgtttgtgataacaagatctaatttatactag

SEQ ID NO: 105163 - DNA, 452 bp, Glycine max
tttagtcttatgttgatgatgggctcccctatctctaacaatatgtagaaaaggggtgggattttatatttagttcacacccctgcactaagacaaaaacatgattctgcatataaaatatgaaatgaaatcatgattccatttcatattttgtatgcagaaacacattttcgttgtgtatttgtttcagcttaaacaaatattcattaaaaacatgattatgcatacaaaatctaaaatagaatcatgattccttttcagagtttgtatgcaaaatcatatttttgttgcgtatttgtttcaacttgaaaaaacacaataaaattataattttgttatgtatctcaacaatggtgaaagaggaaaagaaagggtgtgatgggttcgaactaagggataaatgttcttttccatggattttaaaagctggtataggaccgataacaattctt

SEQ ID NO: 105164 - DNA, 391 bp, Glycine max
  unsure (1)..(391): unsure at all n locations
tcttgtttcctttcttgggctaaactatacccttcctccttttctgcactgatattgttaatgtttgaaccttgagacttgtaaaattttctgcaagaggatagccaatgcttttgtagcattcatctaccgtgtggccagtaaaaccacaatatgtacatagctngcttcttcttcctcttgaggttcctctactaaagacactttggtttcctctttcttctctagaagcataactttgaggaacaccatttttctgtaacatctaccgataatatgattatctttaccatagtaggtgcttgaatttcctaaaataaatgagatggtgttgactgcggtaatcacgctggtgttacnattatatcattacttgcaagttgtctctctt

SEQ ID NO: 105165 - DNA, 446 bp, Glycine max
  unsure (1)..(446): unsure at all n locations
tctnnttggacttgaacaagccatcgactgctctntcataaccatgctatgtgctcgcgactggtccctttctttccttcgcaacttgagttcattattgctaccccatagagctccgcgaaatttgttccggccgtactcttccttgcgagccctcttggtctcttgttcaagggcttttgcggtaattgcattctcttcccgtaacccggcgcactccttccgaatgtgtgtagcagccaacttgaacttctccttggcgagttttgcctttcctaactcgcttttgagagcttggacttcctcgtcctcttccggcgcttcaaaattctcttcgctgacgacttttaacttggcgagccaatctaaacctcgtatgcgaactttcagccattcgtggtacccaccaatgatgccattacgaatgcctctaagctcttgatctt

SEQ ID NO: 105166 - DNA, 377 bp, Glycine max
tggattagacggggcctatgccagtcgaaagcctcggacgaaagaggtatgcctatgttgttgtggatgatctcttcagatttacctgggtaaactttatcagagagaaatcagaaactcttcgtagtattcacagaggtgagtctctagacttcaaagagagaaagacagtgtcatcaagagaatcaggagtgagcatggctgagaatttgaaaccgcacggtcactgaattctgcacatctgaaggcatcactcatgagttctctgcagccattacaccacaacagaatgggatagtagagaggaaaaacatgaccttgccgaggctgctcggttatgcttatgccaaaaacttccttaatcttgggctgagcca

SEQ ID NO: 105167 - DNA, 443 bp, Glycine max
  unsure (1)..(443): unsure at all n locations
cgctctanatttacattgatgtttgtatttatgggatgtggttgtacgccatctttgttttaagagtagtgtcccactggtaaaactaactttccaaatttttgccttctcaagaaatggccccgatgaagcttgcctcaaagaggtccaggaaggataatgcagccgaaggaactagttccgctccggagtatgacagtcaccgctttatgagcgctgtacaccagcaacgcttcgaggccatcaagggatggtcgtttcttcgggagcgacgtgtccagctcatggacgacgagtatacttgattccaggaagaaatatggcgcccgcggtgggcatcactggttactcccatggccaagttngatccagaaatattccttgagttttatgccaatgcttggccaacagaggagggcgtgcgtgacatgagatcctgtgta

SEQ ID NO: 105168 - DNA, 438 bp, Glycine max
  unsure (1)..(438): unsure at all n locations
aacttatataagtctcactttattatagcctatntactagantaattaagggtaacttttctttatggcttatattaactttggacactactaaataggtgtttatttattttaatcatatatttttnttattgctttaatgatttaaaatgtttcattntaatttttgctatcaaataaaagcgttaacgaatgatatatcaatgaaatttgacagttaatgatttatgacattatcaaagaatctgatgaaataatcatgtataacttttttagaatcaccaaaaaaatatgtaaatttttattaacacttaaattttttttaagactaaaagtattntaaaaaaaataaggattaagaaatattaaatcttatanttttttattcgtaaaaattatagactatatgtcaatgaaagattcaaacttataatcttt

SEQ ID NO: 105169 - DNA, 442 bp, Glycine max
  unsure (1)..(442): unsure at all n locations
atttgccctagggttntcttgcgtgggtatgtgatgcatttcaaaacaattgaagtcgtcaataagagtcttaacgacaagatagtacctaaggagagctgcttccttggtctgatatttgttcacaacttatccctagactagttataagtcgctataacacttgagctttcttgctcccacttgctttgctagttttaggcctactatgagtgcttcatattcaacctggttatttgatgctttaaaatcaaatttaagggcctattccaaggtaacattattgggtcctttaaaaaatgatgcctgccccgcttcctttcacattagatgcgccatctacatataagctccaccaatcaggggtggcttggacattactagcgaactttgatagaaagtctgccataaattgagatttcatggggccgcgaggctcata

SEQ ID NO: 105170 - DNA, 443 bp, Glycine max
  unsure (1)..(443): unsure at all n locations
tggatgaattagaaagaagtcatgatatgttgattgaagngnttcaacgccattgagatntacctcttcatgtgattctaattctttagatgttatgttaaccatctaataaaggttagcttcttcttttgtttctttgctggatgatgagtagtcctggtcttcccatgtgctcatcagcattttcttgtcctttgactttaagtactttttcttgttgtttaacctgtctagggttgggaattctgatttgaagtgttatggcttcttgcactcaaagcatatgatgaagcttttcttcttctccttcctttctttgtatgggctttttggngagcctttccaattatatatattcttcttctttcacatcttccttatctttcttgatattaaaggcagttgatcatcttcatctgatccttcttcattgngctcatcat

SEQ ID NO: 105171 - DNA, 468 bp, Glycine max
  unsure (1)..(468): unsure at all n locations
ctaagctacattataagagagcacaaatcctagacttatgcaaatatttcttccaatacaattagcttatttactggcctttcactttaatttgtctttgaccttattacaacaacacacattttctntgattgctcttttttttttaaaacacaacttatttgttgtgtgtgttgatgctctaccttttactttacatcccaatcaactcctccaaatttggggtaatttgccttgaactatctgctctcctagaatctaaacaaggtatctggagatattcattcaagtttagggttcaattttgaaaatgtaattcagctcacaaaggttgcaaaggatacaattataattcaaggtaagctttttggtcaattggcttgtatatacaatcatggccttcatcatgtcctcattcatacattttattctaaaattcagagattgatgcaaagactattactcaaa

SEQ ID NO: 105172 - DNA, 476 bp, Glycine max
  unsure (1)..(476): unsure at all n locations
gcttctggagggcccangagggcctgggtgctatatgcacccccatttttactaagtacacncncctctgctgtgttntggtgattcttttttcgtaaagttacggaaacttacgaatntcgtaacgatacttgttttctttccgtaatggtacggaaccttgcggattacataatcatcccctttttgacttacggaatgttacggaacctcacttaattatgcaacaatgcttccatttgatttccgatgtgtcacggaaacttacggattgtgcatcaacatatttttggtttttcggcatgtcctggaatttcataaattgcctaatgatgggtgccaagcacctcacaaggaccaaagaatggtcgcatgtcatcaagcaaaggtccccggacgaaattatggtatgacacaacacaatcctcaaatggtcttcatgctcctctctagtcttggagtatacccaaatatca

SEQ ID NO: 105173 - DNA, 452 bp, Glycine max
  unsure (1)..(452): unsure at all n locations
ctcatctnnggggagaagctccttcttccatggtttattccctagtggatggcgcctcctctcaaagagcttatgggaagtagtaatgggatcatcggcggctatcgtaaagtggctaagagtccgcacacaaggcttggattggctcccaaagccaagggctatgagagaggaagaggccgaagctccataaaagagtgaggaggtacaagccttaaaggcagagcttgagaaggcttaagcagtcaaggagaagttcaagtcaacaaccatcaaagtccaaaaggagtatgatgaactgaaggacattaacatggccaccaccgaagccttggaacaggaaaccaagagggcccggatggaagaacatggccaaaacaagttccgaggagctntatggggcagcaacaatgagcttaagctccaaagagatgaaagggatcagtcgcgtg

SEQ ID NO: 105174 - DNA, 347 bp, Glycine max
acatcatagatgcacagattttttgggtttcattcggtcatgggcccttggcaatcacaccccaaaacaacccccggatctgtcctccatatgctaataaatagaacatttgaaggtgcatatagtcttagtgacattgttcaactctaaccctatatgtcttgaaatatgctctcatatctctttgagtgcttttgaatgttggaatattctagagtttttatccatactacagagaaattcttggcattgaagacgcccatatgtaaacacttttatactaagctgttttgtctatgaaaccctttcttaccacttctagcaaatatccattattattatattta

SEQ ID NO: 105175 - DNA, 444 bp, Glycine max
  unsure (1)..(444): unsure at all n locations
cttgacaaattacagtcttatgttgtttttgatggataacaaagcagcaatcgatgtagctaagcatcttgtggcacatcggcagagtaaacatattgaaaccaagtttcattatctgcgtgatcaaatgaataaggagaagcttgaattggagttntgtatgtctgaagatcaagctgcagagatactaactaagccattgaagtctatcaagttcatggaagtgagagacacgttaggagtgacatctttgacaaatctgaattaatgagggatgttgatatatgctgtaattcagttagttagttagttacgagctagttcgcgattcattttgaagttagtttgacaactatgaaggttgttatagctacatgtgcagtgtgtataaaaataatagtgatcatgaatgagaagaatgagagtgcagaaggttttattcac

SEQ ID NO: 105176 - DNA, 471 bp, Glycine max
  unsure (1)..(471): unsure at all n locations
tctacttatgtggcanggcgggcttacttcaccttcttgtctcctacgcgaactntgaccattggtcttccttcccgcgatgcttcttttcatgtccgcctgagtgggcttataacctaaaccatacttcccacgatttccttgggtatttatcaggctagttatgccgccgttgttttttcctaaacccatcccgggttcataaccgttccccaacataactcgggccatcattaccgctgcatcggacagacaaggctgcccaaagagggagtccacggaggaaatgctgaccacctcaaaagactggaaagcagtttctaacgattcttctgcggcttccacataaggcatggaggatgggcagcttaccaagatatcttcctcgcctgacacgatgaccaagtgcccctccactacgaatttcagcttctggtggagtgtagaaggcacaactcccactgagtggat

SEQ ID NO: 105177 - DNA, 375 bp, Glycine max
taatggagaagtgtcttgtggagtcgcccaccaaattttgagaatatccaacagttacaaacgctgggcatcatctttaccgaggcagctccatgtatcctttctctagaagcttcattaagaggcgttcttgcttcctcgtggcttctttgagaagctttctcaacaaacttccttgagaagctagatccttatctatccacacccctctattaactaaattaactctcttaaaataattacggatgacaataacgcatcatataatccaacatcaaacataattactaacaatatatagatatatatatcacggttgtacaaggagtgcataccttgcaagctaccttggaaagagcccattatttatcaaca

SEQ ID NO: 105178 - DNA, 446 bp, Glycine max
  unsure (1)..(446): unsure at all n locations
tatatagacttcanagcttagatccattgagagatctctctagccgcnngctaataggttaggggccttacacgatgcatgttattatgcacagagagagtgtgggaccacaaacatcttctgcagtgtatcttcatagaagtacaacttgtcagtgtcgccttgtgctcaaagttgacttttagcatacaattcaaatacaacgttaatagcataggacaaaaggaataaagaatgcaagacaagacaatttgaaacttccctcttatgcactatggcacaaattgcttactgaaccatggaccttactttctgatgattatttcagaacttgagtattaagtaactattccatttcctttggactatgagccaagtgctaaagcacttgtcttcttagaactgggcactaaggcaatatcatccaatggctaatactttatcta

SEQ ID NO: 105179 - DNA, 399 bp, Glycine max
  unsure (1)..(399): unsure at all n locations
tcttcnggcttcaattcttcagtgggcttttcttctgtgtccagcatcttgggatgttcccagcctttgatgacagcttttcaggttctgctatccactgatttgaggaaggccaccattcttgctttccaatattcatagttgcttccatcaagaattggtggtctgttcactggtccgccttctttctccatgttcatcagaatatatctccctagatctcactcagcgatttcgagtgcctgctctgataccaattgaaattctgataccaggggacagatgtcgtaccggatgtcacgacatcacgcttcagaacatgtagattatatgtgttcgtatgaacagattaaacaagtaaataacacaagagaattgttaacccagttcggtgcaacc

SEQ ID NO: 105180 - DNA, 413 bp, Glycine max
tagctacctatatcctgaatcaaacatgaattataaaagaaagtttacttgatataaagattaaattgaaattgaaagatggcaagtataacacatctacttagtgtaaaaattcaataaatttgactgttccagagtgtatggctatgacttgttgactagcaggcaggcgaactactatggaatttatttctctatatgtagaataacaagtcaatgaggatgcaatatgatctgtagcaccagaatccaaaatccatgttgtagcctcaagcttgtgagcattacaaataagggatagtatatattacctatgcttgatgtatgagcagaacttgtaccaatctagttaacttgtgatccacgagagctattattgctggcagccagtaaagacgtaagtgcttgatact

SEQ ID NO: 105181 - DNA, 450 bp, Glycine max
  unsure (1)..(450): unsure at all n locations
aatgaggataagcgctgcaggcctatcctcttctttaccgatggccctaatgccggngaccaggtataaatttcttttaagatccattcatcacgtacattacaggtattcttacctgcttgaaacataatatataatccaggcagccatttgaaatttgaacctctatttttattaagagatgaagctacaaaacggctactaactttgctaggaactcaggttcctttcccagttggcattaacattcgcaacaaagctggaagagtgagaaacaacactcaggaggataacctgcaagggagtcggagtctgcctaatttgggaatcagtaagctctcatctgatggagacagtcattcattggagtcagactaaggaagctatctttctctcttctgccatgtcattaattntagtgggtgctaacctttggaaaccaaatggtct

SEQ ID NO: 105182 - DNA, 449 bp, Glycine max
  unsure (1)..(449): unsure at all n locations
gaaacttctaaggaaggtagcgaggctattttataagcatgcgccatacttgctgtaacgttgatgaatgagagtcttgtgagacacaactcacagctcaacttctctcccccttttcctccttcaattccgtactttccctctctctttctctctctttcttttcctctattgaagcatcatcttcaagcttcttatccaagacacattcttggtggcgaagctccttctccatggctgattccctagagaatggggtctcctctcacctcttctcctttatcttccgctacatcttcatggaggaaaatcaccattgaaggacctcattgaagcttaagatctagcctccatagaagcttcagaagcaagcttccatcataatatgccaccttntgctttgaagacacaaaaccatatcattgttgcttgcatggcaatacataact

SEQ ID NO: 105183 - DNA, 308 bp, Glycine max
  unsure (1)..(308): unsure at all n locations
tctctattgctctattatnantacgcaccgatgttctaacgcttcctactcatatattttcttcctttaacgctctatctgacagatgcattgcaagtttttatacatcttgtttaaatgatatgatgctttttaatttgccctacacccgattatgggctgcaattatgtgtttgataaatgctgataacttaattattaattctttaatatggttcctgagtggctggagaaatataacatggcagggcgatgctagatgatattgcttctaaatctattctgactctcatatatctcatttctat

SEQ ID NO: 105184 - DNA, 373 bp, Glycine max
atgacatacaatatcacaagatctaacttacttgatggtgtaatatgcttaacctgttgtaaaaaaatattataccaagtttgacttctctatatgaaaaatataaaaagatgaactccaacatgataacttttgtctttttatactaataacatcgaaaattcagaataaattataattttagttcctatttaattcatcatccacaatattactcacattgtttctagtgattttactttccatatttaacaaaatatgcgacttttgtcctttatcttaaagattattaataatgtgacatgagtatgatgagggggaaataacacttataaatcaaccaatattgtaattaattacaatgtcacacgaa

SEQ ID NO: 105185 - DNA, 362 bp, Glycine max
  unsure (1)..(362): unsure at all n locations
acttatacacacagatctaatggggtcgacaaaaacacctaattatagtggatgtaaatatactattgtactatgggatgattacactcgatatactcggctgtatttcctaaaggagaaaagtgaagttacacataagtttgttattttctctgacatggtggagaaagagtttgatgcaaaaatcaaatgcttgatgaatgacaatggaggtgagttcaactcaacagatatcacagttttttgtcatgtaaaaagggatccagaggcatattacttgtcgagatacactgcagcanaatgcagtggctgaaaggaaattagctcatctaacttcagtgagcttgtcatggatacatgac

SEQ ID NO: 105186 - DNA, 443 bp, Glycine max
  unsure (1)..(443): unsure at all n locations
acccatcacatgtggtactatgtggcggtcgggcgatggtgcacaacaagctttccacatccacaatgcgcgcataaacccaccatcccctgttgcccacctccaactgagctcacgtactcccacgtagcccatatcctcgtttctctcaacaccgggtccccatcaatcctctcaagcttccacaacatccaagcaaaacaacattcaaacagcacaagctatcacagccaagcaaaacagagcaaaggcagaaaactctgctcaacacatcaaccaaaatcacagcttttctcacgtaaagaccacagtaacaattccttcgatccaattcgttaaccgttggatcgactccaaaattntactggaagtctatagtgtataagcctgcattntgaccgttgggatatactagcaaacatccagaactcattctgcactag

SEQ ID NO: 105187 - DNA, 413 bp, Glycine max
  unsure (1)..(413): unsure at all n locations
attattgatgatgcctcttagaacataattttatgtgttatctctaacatgagttatctaaatatcttaataataaacagaacataggccagctcaacatcattatacttactggtactgaatccttagatgctccccttttttttccagcttattgctaattacttgtttatttgttgaaaccaaaatttaatttctgctcttgcaagaccactgcaaccatatcccatttctagtaaacgtatagtcccagatcaaattgattaacctgattgcgccgatgatgtaagttatctgacttcttcctatttacnatgctctgtattttatccgaattaactcattgtggcttaagattacttagtggcggttcattggtttctgatctgttttatttcttttgtgttaacttt

SEQ ID NO: 105188 - DNA, 439 bp, Glycine max
  unsure (1)..(439): unsure at all n locations
ccgctctgataaagggtacacttcagaacgcttatcattntttctttcatcttgntattcctttaacaagtttcattatgagtcttgatttacgcatgttcacattggtttcttgttacttggtgatatatgatttctatcaatactttttttcatgtcattataactattatatttagatagctttntcattacagaggcaatgtagttttgggacatncaatttaatggnncctcttgttggtgttgcctatgttgtgtcatgttttaattcatatttttactatgtttaacagatgtcttctcccttggaaattagtgaactaataacttccactcatacaaatgataatgaggtgaatgtacaagttcctgcaaattcaactcaagttgaagctaacaatcaagaagatgaacatcaagaatcagttgtcgagag

SEQ ID NO: 105189 - DNA, 410 bp, Glycine max
  unsure (1)..(410): unsure at all n locations
ctcaccccatgccaaaatacatgaaaatgcttagctacacacacccctctaatagctaaactcacccctataccaaaatacatgaaaatacaaaaaagtccctgctacagagactactcaaaatgccctgaaatacaaagctaaaaccctatactactagaatggccaaaatacaaggcccaaaagaaggaaaacctattctaatatttacaaagaaaagtggacccaaccttggcccatgggatcagaaatctaccctgaggttcatgagaatactatggccttctttatccgctctagtccaatcctcttggagttttctatccaatacccttggggggtaggatngcatcaatgaccatggaaaaatgcatntaatctcttttcttcatgagattaattgctcaaat

SEQ ID NO: 105190 - DNA, 463 bp, Glycine max
  unsure (1)..(463): unsure at all n locations
ggtaggattatggngtacccatcacatgtggtactaggtggcggtcgggcgatggtgcacaacaagttttccacatccagaaagcgcgcataaacccaccatcccctgttgcccacctccaactgagctcacgtactcccacgtagcccatatcctcgtttttctcaacaccgggtccccatcaatcctcccaagcttccccaacatcaaagtaatacaaaattcaaacagcacaagctatcacagccaagcaaaacagagcaaaggcagaaaactctgcccaaacaccaaccaaaatcatagcttttcacatacgaataccccaggaacatttccttcgttcccattcgttaaccgttggatcaactcgaaatttttactgaaattctctagtacataagcctacattgtgaccgttgggatctactagcaaacatccagaactcattctgcactactcttt

SEQ ID NO: 105191 - DNA, 397 bp, Glycine max
  unsure (1)..(397): unsure at all n locations
gcacatatccacttgtgattccaatgtgtcaaacctttcaccaacaaaggtttgaagaccatnnaanctgtncaaaatctttgaaagaagagatgaatcttctccatcatgggcttcttcaccaacatgttgagcacccttcttcacccaagagccatcatgctctttttgataaccaaaggatgctatgattgaagtgcctataaggaaggatctcttgattggaacatanggttcanaatcaagagggatgttgaagtgttgaaggaaaagggtaacaagatgagaattagacaatgaagcattcaatcgcaatgccttatgcatgtngtatctaacaagatgtgcccaatatatttgtagacctttatgagaggcccacataacaatgagatct

SEQ ID NO: 105192 - DNA, 452 bp, Glycine max
  unsure (1)..(452): unsure at all n locations
cttgtcagtgtctgcgccgggtcagagttccacaatgatactctttatatattaagagtcttatgcaattgaaggagcttaagctggtatgtttaaagtctcacgattgtcacgtgttgatgcaacaattgttagtcgtggccatacgggacattntgtctaacaaagtcaggttagccataactcgcctgtgctttttcttcaatgccatatgtagcaaagtccttgatcctgtcaagtttgatgacctggaaaatgaggccaaaattatactgtgctagttggagatgtattttcctcatactttctttgacatcatgatgcacttaatagttcatctggtcagaaaaatcaaatgttgtgatcctgtttatttgcgacagatgtacccagttgagcgatacatgaagatcttataagggtataccaagcatctacatcgtccggaagca

SEQ ID NO: 105193 - DNA, 413 bp, Glycine max
  unsure (1)..(413): unsure at all n locations
ccgctacctccttctgcactacataatgaatgatggagttgtgtctattatatggatgacttactggtttaggcccatactctaaatatatccgaggcatacatgcggatgggctgataccaagaatgtgcgacaagagacatcctataacacttattatgcttcatgagaatagatgactagctttcctcttgctcatcangactggacgctataagcattactggataacattagctatatccaagtaagcatatgataaattagatggcacaggcttcaatgctggcgagggtggctggacagaggtacaaaaatatggcatcgcactctggccctcatagtgagagttcaagatttatgagcttactgaagcatggttagcgatctctaactctagacaatctatctct

SEQ ID NO: 105194 - DNA, 400 bp, Glycine max
  unsure (1)..(400): unsure at all n locations
tattattttggggttataatcttaacttattttcaaaaaatactacttgatatgacatgtatggtcggtattttttgtgaatccctaatgaacatacgatatgcactatgtagtggatcatcaaatgaagggagaagattaattttatgctaatctttggaaatttaattgtagaatttaggagtagtggtagcatagtcttttaagccttgtaaaagccatgcattananatctacanatgagctaaattggttgtgtgtaacaacggtgcggactcaatagcaacattaattttaaataatggtgaattaaaacaagtatgaattatttcccgccaattaaagatttagctcaacgtaataaagcacatgtaatgcattatgcaaagcanaacatgag

SEQ ID NO: 105195 - DNA, 456 bp, Glycine max
  unsure (1)..(456): unsure at all n locations
ctctagaggtccaatgctggtagtgagggcacattgtctaagaatatggctaaattgctacttataagtcttgggcaatcctctcctttcaagttagctnttggggttgagttaatcccggtctgtttctaattggcagcctagtctacagtgccaaattgaacagagattttgaagagatgacagacatgtagaaagaggagctgatctagttgcctccaatcttggtggtcactagatagaagactccaagaagattgggccagtgatgcaggagaagtcctagggttctcatgagtcttagggtagattttggacctatgggctaagtatgagtccacttatctttgtacatattagattatggtttcatttttttgggccttgtgtttaaggcttcatagtgtaggggagggtaccccacaagtttagagtactctagtaatatagtatttt

SEQ ID NO: 105196 - DNA, 349 bp, Glycine max
gaataccagaggatctgatcgcccaaactcacattaaattgcgaagagtcataaccttacatacaacgctgtgtgcaatcgactacatagttttggcaatcgattaccagtgacaatgtctgaataaaaagtcaagagatgtaactcttccaatggctttcattttatctcaaggttataactcttacaatgagtttcttgaccagacctgaagagtctataaagctagaccttgacttgcaatttaataactatcatacatattctttcacaaactttgaatctctatgaacatctttttgaactgctacttcttattccttcttcgccaatagctatctgagggatc

SEQ ID NO: 105197 - DNA, 439 bp, Glycine max
  unsure (1)..(439): unsure at all n locations
aagaagaagaagttcgagagattcttgtttgtaaggattgattggacaagtaaaagtattgaatgaatttaatttgcaaaacaaagccttgctcttatagactcttcatgtctggtcaagaagaccatttagaagagctataactttttagaaaaacttacaaccaatttgaaaaagtcaaaacctttttgaagagatacatcttttgatttattagaaacagtcactggtaatcgattatcaaattaatgtaatcgattacacaaggcttttaagtgaaaggatgtgactcttcacatttgaatttgaatttcaacgttcaagggcactggtaatcgattaccaaaacattgtaatcgattacagcttttgaaaataattggaacgttgtaaattcaatttgaaaactctttcaaactcattntgctactggtaatcg

SEQ ID NO: 105198 - DNA, 171 bp, Glycine max
taccaccaactggctgacaatgaccctctaatatagctggcttgttataacaaattaccctattggctggtttgagtaagacactaagcatttatccgaaaattccaactatcttaatgcgttcccccaaggggaccatgaacacaaaccataatcattacattaccagat

SEQ ID NO: 105199 - DNA, 459 bp, Glycine max
  unsure (1)..(459): unsure at all n locations
ctagccaaatggacttaccttgaattaattcctttgatatctcctttgagccttgtgtccctctccttgttttgaagctgactacaagccttaagtgaaaaaccatgatatntaccatatttgggccatacttgatgtacattgtatattggttaaatgttggacatgctgaatgaaatgttgtttctcaaaggctaaagagtcccanaataaaaatctaaataaaaaaaaatcgaaaaaagaaaaagaaaagcaataaagttgagtgaataagatcttaaatggcacaagaatgatgaaactcttggttctactcttcatgtttaatttttatctttacttctttttatttttttcttaatatgcacttattcccctttgctcctctattcctttgggatttagccacttattccatatttctccataccttgtccttggccccattacaaccttaaa

SEQ ID NO: 105200 - DNA, 167 bp, Glycine max
atgatagatgaggctcatttttctcccgtcggtccttattttacgaatgctatgcactgagatttgcgctatgtagtgatcgtcaattaacgagagaatcatattatggttagcctcataagcatgttggagataaatcacgtgtgctgttacatataatttttaaa

SEQ ID NO: 105201 - DNA, 463 bp, Glycine max
cctctaatgagcatcaattcaatattagtaatcttgcacattttttcctaaattaaagttgaaatttctggattattaaactttcatcaacaaattgtggtctaaaatattataaaaataaaacataaattgatgagctatatcaaagtaggatctatctataaattttttcttaggcctcaaaacatttaaacacagctttgtgtacgtgcatgttgcttctcttaactaccgcttagcgctataagcacttttcctttcctcatctctaaaaccggtactacatctgggtaaattaaatggaaactaccaaacctacaccctaaaatagggtggaagaacacagagaaattgaaataaaaagagaaaatataaagagaaaaagtacataatagatgcgacatgtaatgtgataagaaagaacaacagaaataattataaaaaaaaaaacaaggatagaaat

SEQ ID NO: 105202 - DNA, 68 bp, Glycine max
agccttgtcttcaaagtaccttattcctttaatcctcctaaaatattgtttaaaggaacacattgact

SEQ ID NO: 105203 - DNA, 460 bp, Glycine max
tagatatttcctgattcgtgcttcagttggtgacattttcatacatccaaagttgaacttccatgctattcgagtaatagatgagatgaagacatttacatctctagaacgatatttgcagccaaaaaatagatatgatgatcaaaagtgaaacttccatgcttttttgggttagaattatatgtacaattctgtttgagttgaatatcttttagaatatgataagattaaatttgctagtgagtttcttttttccatatagttcaaatctatgtgtgtgtgtgtgtgtgtatttgataaatgtcatatccatgaatgatttaggtaaaaagagaaccagaggttatacacatatgctagatgtgtgggacttgctagatggagaattcatacttgttgaagtagatcattggggcaatcctattggttgggaagggaaaactctactgaatgtaattgg

SEQ ID NO: 105204 - DNA, 374 bp, Glycine max
aacaacattattgggacaacataattaaaaccaaaacttaatccgcagatccctcttgtaaactaaatattaatcctactttaatcaagttctaatgcaacagtacatttcccaatgctaaagtcatctaaatatgcacacaaatggatgatcagaccacaagcatacaaacattaagcattgaaggaagcattgaacacacaaaacataatcaattagatattaggtatttacatcacgtgttcattagaaatccccaactagggtgtttagctagccattacaaaaagaaaccctaacaataataagcttacaaaacctatgtatctctacaaaagctgctcctcttgcttgctccaaagctcttttcccaa

SEQ ID NO: 105205 - DNA, 455 bp, Glycine max
  unsure (1)..(455): unsure at all n locations
taacaactaacaacaactaaccattgtaattctgacagttgataggctgtcttgagaaagttcgaattcgtgcattaatgtctggaagagttagtctttgatatttaatttaggggattttagatttggaagtcctcttttcatccttaccggccccataacttttcaagttntgtagaatatttattgaatattcttgtcaggtagctaggtttcagcgactattatgcatattttttttttggctcaactgatgttttggcttaaatggatgaggtgtgacataaatgactgtgtattcgacagagttaaatatcacagaaattttacatcaatagattatgaacaagttaactctaatcctaagtaacaataggagcctcaaacttgatattttcaagcttgaagaagtaatataagcaagctaaaggttgagtaaattaggacaccaaaaa

SEQ ID NO: 105206 - DNA, 458 bp, Glycine max
  unsure (1)..(458): unsure at all n locations
tctgtgatcctaacagaatngattctacactaataacagacttcatactccactaatattactgacagcttctaatagaaattggcattatcctgaaacatcagtaatgctattcgatcctacagaggctacacaaaatcatcaagatatgaaggtctgttagtgctcctcttgggcctgctgtcatgggcttcctatcataaaacaacacatgttactaagtaacttattttttttttttcaccaacccttgtttgcatgtatctgaacctgtactaatttgtttggactcttaggctttagcaatgacttacgttccttttatggcaattgcttcctgcacttgcggaacattctgggagcaatatgaaaagtgcagaaaaaaaacaccctcattctatgtactaaattagcttttgcacccttgtgatgcacccgcgcatttaaatgaggcgtgt

SEQ ID NO: 105207 - DNA, 417 bp, Glycine max
tgaatcagaaatctgtacctgtcgcaaggggttgtgggttgtgctcctctgctgaccaccatacagaccttttgcccttccatgcagcaacctggagcaattgagcagcctgaagcttatgcagcaaatatatacaatagacctcctcaacctcagcagcaaaatcaaccacagcagagcaattatgacctttccagcaacagatacaaccctggatggaggaatcaccctaacctcagatggtccaaccctcagcaacaacaacagcagcctgctccttccttccaaaatgctgctggcccaagcagaccatacattcctccaccaatccaacaacagcaacaaccccagaaacagccaacagttgaggcccctccacaaccttccctcgaagaacttgtgaggcaaatgactatg

SEQ ID NO: 105208 - DNA, 257 bp, Glycine max
gagaacaatcatgatacgtcaatggaatcttgtaagccgaatgaaagacttcaaaaatatgacctgtgacacgattttaaaatccaccgagagcacattaacagtttgagcagaacaaatcaggacaaagtttgtgacctcctacgtattacatttctggatttgggacaacatgagtgcaccagaaattacctacctataaattacaattcattaactgtattttggggaagtgcgaagatttataagcataacct

SEQ ID NO: 105209 - DNA, 453 bp, Glycine max
tctaatacttctctgcaagatcgagcatacatattatttttaaataggagcatctaatgattattacttttcccagtagcttagttattgtgtttagctaagttcattgtatcttacgagcatttaatgattattacttttcccagtagcttagttattgtgtttagctaagttcattgtatcttaagaagtatgtttcttgaaatagtagtagttatttattatctttgtaaccatcgttattattataataaatagatcactctgctgagtggtaaactcaagcaatttgagaaaataaaatctgtttctctcttctcacacatatcacacacatccaagttattacaagtaaggtcaacctgaggaccgctaacttaggaacttagtaaatattctggcaaatctggttggagataacatagcctatagtaatatctcgagaggaccttt

SEQ ID NO: 105210 - DNA, 406 bp, Glycine max
ccaacgatactggcaatcgattaccaaaacattgtaatcaattacagccttgtgaaaatatttggaacgttgtaaattcagtgtgaaaacattttcaaactcattctgctactggtaatcgattacaacaatatggtaatcgattaccagagagtaaaaactctttggtataggttttgtcaaaaactcatgtgctattcaaagttctgaaaaaactttttaatacttatcttgattgagtcttttcttcattcttgaatcttgatcttgattcttgagatcttgaatcttgatcttgattcttgagatcttgaatcttgaatcttgatgcttgattgtagacttttttcttgagtctttatattttcttgattcttgaactcttgacttgttcttgatttacttg

SEQ ID NO: 105211 - DNA, 387 bp, Glycine max
  unsure (1)..(387): unsure at all n locations
gccctcctgcacaagagatatagactagtagtgtggctccagttttgttattatnnctaagaagaagaacatgaattttcgagcggagcattcttttctttttacaagataggaatgtggtattctaatattccatgcttgcttagagtcttacaacaaagaacaaacatggcttatatacttgggatctacttcttcccttaggatattatcctcttattttattttactagctaatgtttgcaaactcctatttttggtatttatcgtgagtcgagagatgccggtttatcacattatcatctaacgaatgatataacattctattagttcgctatagtattatttaacggatcaagactaatgatcaatattatatacaaaaat

SEQ ID NO: 105212 - DNA, 406 bp, Glycine max
gcattaaactaataatattctgtaaaatgaacctaagctattcttattaaatggaatatgttctcatattttaaagttttgaatatgcatatgtttatatttattatctttaaaataattatttaaaaaataagttacttcctccttttcatttttttatatctaaatttatttcacataaattaaaaatatctaatgaaactaaaaattgatatatttgaactaaaagatctttatttaatatactgatctataacacttacaccactaaataagagtttatttaagagaacaaatattaataaatcttaaaattctaaaatatctattatttcttgaaaaaaataaaaagctaagacataaaaaacagagttagaacatctttatttcccctcacattatcttc

SEQ ID NO: 105213 - DNA, 413 bp, Glycine max
  unsure (1)..(413): unsure at all n locations
tcggacctcagggggaagagttagtgagcatntgttatttctcaagagcttccgctggtcaattctgagcgtctcgatatgtgattcgcttgaatcggacatccgtgtgaaaagttatgaccatttgaatttctcaagagctttcgttgttcaattttgagcctctcgacatattatgcgcccgaatcggacatccgtgtgaaaagttatgaccatttgaatttctcaagagctttcggtgttcaattttgagcctctcgacatattatgcgcccgaatcggacatccgtgtgaaaatttatgaccatttgaatttcccgagagcttccgacgtttaatttcgagcgtatcgatatattataagcctgaatcggacatccgtgttaaaagctatgaccatttgaatttctcaa

SEQ ID NO: 105214 - DNA, 284 bp, Glycine max
  unsure (1)..(284): unsure at all n locations
gacaattgagaataggtgagaggaggcggcatccactacggaataagccatggaagaaggagctncacccgccaagatgtagccttggataatatgctcggagaggatgcttctatggagggaaagaaagacggagagaaagagagaggggggagcccgatattgaagaaaaaaaaggagagaagttgatcttgagttgtgtttacaagactctcatccatcatatttcaacaagtgttacaaatgcttctatttatagactaagtaacttccttgagaagctt

SEQ ID NO: 105215 - DNA, 442 bp, Glycine max
  unsure (1)..(442): unsure at all n locations
catctgaagtctgagagctctangctctattattctgctanagctggaggtggcgctaaagtataagatgcaaggatgccaactattggtgtaaaggaagagggaatatcagctgctctgagcttggtcttccttgtctctggaaaattaactatctggtcattcgcattccaacagttccttatgatataagctaagtcaatggccggtcttaggttttcataggaggtaagggcatcagatcccactcccctcgatctacacaaggctgttattaatgctgggaagcctaatcgagaagagttggactgagcgatcatggtcatttgtccagagatcaaaccgccaatgttcatgtccatccttgtgattaagccatagaccaacctaactctgtctgtgctcaaatctgaagtgtgtgaggtaggatctaagcttgagt

SEQ ID NO: 105216 - DNA, 393 bp, Glycine max
gaagcgtgcctattcttatagattcaacttccatcttcacaaactgcgcatgtacaaaattgctatttgcaaccttatgtttgctatcttcaatcccacatgatcttttttgttcaaacaatgattgttgaacgcgattaaaggatcgaaagtctatatcctgtaattaaattaacgtgaatgctttgatattattcggaccatataatatatgtatatgtcacatatctgcttgaacgcatctgaatgccaaaacctacataaagataattatatccttatgtgctggaacaaaattaaattaatggctatgaattgttattacctatatatttgcacacgccatatatattagacttggaataaatcgtatgtaaatctgataatcaccaa

SEQ ID NO: 105217 - DNA, 401 bp, Glycine max
cttaatggatggcgcctcctctcaccttttttcctttggcttccgctgcatctgcatgatggaaaatcaccattaaaggacctcattgaagctcaaagatccaaccttcatagaagcccccacaagcaagtttccatcaagtggttatcagagcacaatagcttcaagtaggtgctccttatacctccattaatttatttttctttaacttctcttccattggtgcttcttcatttttctccatgtatctcctcacatgtcttgttctaaatgttgttaacatgaatctttatagtttccaccgattaaacttgctatagaagttagatttgattttctatggctcaaatttcttgttcttgttctagaaccatgaattgtgatgatgttaagtccctttg

SEQ ID NO: 105218 - DNA, 204 bp, Glycine max
  unsure (1)..(204): unsure at all n locations
catgccagcttctatactntatacaataatgaagctcttataccacttgttgtacaagnggcctcagatatcttaagaaaggcggggggggggcgaattaatatataacaacttatttcccccactaaaattctatttcaccttctattcaacctataaactccctctataatgactttcttaaatatttattcaactacaaca

SEQ ID NO: 105219 - DNA, 455 bp, Glycine max
  unsure (1)..(455): unsure at all n locations
gtatgtatggcaaaactgtattactgttgttcaagacatacaagtgagcttgtaacaaatcttctagacttggagtgatcacatgcagtgctcttgaacccttaccacccactttgtcatcatttcgagacttatgaaggccaaaagtttagccttctcaatgtattctgaaaaaaattcaatggcttcttctgcaatgtactgctcaacaatagatgcttctggatgatatagattctttgtatactcttttaagatcttcatgtatcgcccaaccgggtacatccactgcaaataaacaggaccacaacatttgatttctctgaccagatgcacaatcaagtgaatcatgatgtcaaagaaagcaggggggaaatacatctccaactggcacagtataattgcggcctcatttntcagctcatcaaacttgataagatcaatgancttgctag

SEQ ID NO: 105220 - DNA, 368 bp, Glycine max
  unsure (1)..(368): unsure at all n locations
tctaaaatcatacatactatgcaaataaggcatgctaccccccaacattattgcattntgattccatctttggacattgtgattttgaaaattaaaaaacccaaagtttattanggcatttcatcaaacatacaactcccaactgatctggcaaaagaaatagtgagtagaaaatggaacttgcagacaaaaaacaaataaaagaaagatgattntctctttatcattcgcagaaaagaaaaatngaggaaacacactgcacacaaatgtntagatttccttatgtgacattatactaactagtgaaaaattagcagttaatntatagttaatagagatgccgaatgtaaataattaaaaaacgaatt

SEQ ID NO: 105221 - DNA, 430 bp, Glycine max
  unsure (1)..(430): unsure at all n locations
tctcggaggaccaaatngcaaggaagctattctcgaactatatgcttcagatgaaaggtacatttttgtaatttctcaattcagttttcaattctggacgatttcctgttaatttatcctttcacttttggttatagatgacttgctccacggttgaactcactgttcaataggtggagaagttgagggaaatgagtccactttatgaaattgtcaaggaaggtatcaacatcaaggacattcaatgggcacagcactgattattatcaagctctcagattgcaatgcaagtgatgggaagcaattgtgattgaactccagacgtagctgccactcttgcaattgcagattcttcgaacttgctgattanttagtaatttgtatcttgaggttacattacaattaaaaatttactctggccgagctattt

SEQ ID NO: 105222 - DNA, 412 bp, Glycine max
  unsure (1)..(412): unsure at all n locations
agcttgtatatggcgtcgacatattattgatcattatggcccaaaatattcccctccttttttttttactatatgcactgatgttaccctttgacctaacgagctctttntgagaacccaatacgccacacataggattttttatattttttcttttcatgttcgcttccttttttttctttcttttccttctcacattgatatgtcattctttcctttttacaataattaactatgcatctttatctaacttatttcctttccttctctattattattattattatatatatatttttaattacttttctttttactttacttttttatatctgagttaacttttatagtttcggaccacaacaaaatagatctgacattgtcggaatctaattggtcatgctgtcttacc

SEQ ID NO: 105223 - DNA, 429 bp, Glycine max
  unsure (1)..(429): unsure at all n locations
tgaggcagaactgacaccccatagaactggcagatgtttatgatcaagggtgaaaaccccagtgccctgttggacttcttcangtccactgggtgtctgggaggtgtgatccctgcaaatttataaatggcatctgagatcaactgagccacatgaacactcacttgggtcaagatggcataaaccagctggcactttggcagaggaaggtcagaattatgatcgctggggaggatgctgctgagaagcaatgtcatccagaactatgatcgcacctgtctctctgtcacactttngtagacaaaggatcaagctgaatgttttgatgatgccaaagtttcacatgcgtctcanagtctaaaagctttattcaagacaaagaaattaaagatattcaagatggatgatcaagacagtctctagagtctt

SEQ ID NO: 105224 - DNA, 379 bp, Glycine max
gttatctgttgcattattccacatcatacatttacaacccaagatttgaagatgtgagattgttgtgtttctgccattgaacaaaacatatggaggtttctttaaaatgggtcttattaaaaccctatataaaatgtaacatgcagtggtaacgtgctccacccaaaagtatttttggaagaggaggatcaattaataaagttctagcaatctcttccaaagatctatattttctcttaacaacaccattttgttgagggggtcttggtgagaaaagatatgctcaatcccatgcttatcacagaataattcaaatactttattttctaactcacccccatgatcactcctaatagatataatcttgagaattttctta

SEQ ID NO: 105225 - DNA, 459 bp, Glycine max
  unsure (1)..(459): unsure at all n locations
tccatacatcgttcttctgatacatagcgtagctgtgcgtgcattgctntgacccagtattcatcagacatggcatcatctatgtgtcttcgctcaatctcggatattattgttgagttcttaaaagagttccttatttggactttgtccataggatcacatatgatgtaggctctagatattgtttcatcaacaagcatccaattggttctctaacctcttcaggttgattgtcaactggtgagttggatgaaagttggttctgactcgacgcaacagtagacttaacaatatcctctatcttcatctctgcaaaagacacatccaactttgacattgtattgtcaagcttattataattaaatctctcatgaatggcctcttctatagtcaaggttctaaagttatacactctatatgccttggacaatctatagtatccaagtcagatttctaaat

SEQ ID NO: 105226 - DNA, 407 bp, Glycine max
  unsure (1)..(407): unsure at all n locations
aatctgaaatcngnccgaattcccttcccacgtacatatatggcatatttagcatccgcgatcattggnncctctcttgattcctttatgcttgccctctgctaggattcaactccaatcacaacctaaaccacgattcggattgctctgtaaaaaaaattctaactgttacctttaataagaacgtatntataatattcgtaaattcaattgtaataggtggttcatctacaccgttcattaaaacagttatacatcccactggtctaacatggagccactttattttatccttttgtttttctttctttntaccaaaggaccactttttatcttttctttatctaaaaaacccatgctaaacgctgcttattaattatatatcatatatttttccttagatgaca

SEQ ID NO: 105227 - DNA, 453 bp, Glycine max
agcctataagcaattgagttctacttagtcaaatctttttctgcacgatacgactaatgaacagagggctgcaattcgaaaccaatcttctgggcatcccgtggtggttctctgaccaatttccataaaagaggaagcgcgaccagtgttgaagtagaattgatgaagttggaaacaattccaaatggatgcctttcaaaacacagtccacaaccactaatatggccgtgtgcctggtatacaccggcaggcccacgatgaaatcaatggagagatcttcccatggctagaatggaacaagtaaagagcaaagcaacctacctgcctttcttgtgacatatttcatatgtcgataatcaacacaagccgctatgaaacttcaacatcctttatgatcccacgccaattgaagttctcgctataacatgccagagacttggctactctcatgtg

SEQ ID NO: 105228 - DNA, 453 bp, Glycine max
  unsure (1)..(453): unsure at all n locations
tactcactgaggttggatatgatcttgcatttgttacacagaanaagagcacacatcatctaatgagcatcagagttcacaaattccacattaagcctaccctgcctttctttgattctgacatgtgtcaaaaggataacaatgggcgtagcatcttcaaagtcattcaagttagctaagaactgcaagcagtaattttcccacagagggcaagatagcacttggccactatcagaaacaaacaacaataaatgtatcagtatatcagcttataatgttcataaaatacaaataaaaattacacgaatttaaaaaagtcaaattgtagaacataacctcaagtccttgattttgaaaacaaccctggtattatttgaggagacatgccagaacaccacttcatcaaccacaccaataatatctgaaggaagcataaagcatagatacgtcatt

SEQ ID NO: 105229 - DNA, 294 bp, Glycine max
attccatggtcacagctaccacagggcacatgtttctttgtgctcgcttcattgtccttgacaaaagcactctcaaatatgtaatactctgttgccctgtttccaggccaaacctactgaagtgagttctgcatactgcaaaacctcttgccagctatccacgagagacttcttgatgtcccttctatttctagaagcttacttaatgaccttagaacttgcattgggggcactgactccggcacatcacgaaatacatccattgcggagattagcttgacacgagaaatgata

SEQ ID NO: 105230 - DNA, 451 bp, Glycine max
tgtgctcgacgacccgcgatggagagtggctattgtatttatcctagaatgggcacagcctcgtagattgtctcgttgaactctgaacaatatcagaaatatgaggttcatgaaaaaatagcaacgaagcattcaaaaaaaccacataagatcagacaaataaaaacataaacaccgttttaataaaatcaaaatagaagaacctctatcttcctcttaacttcttcgacaacttctttgccaaagccgacattgttactgtagcctgtcccaaaaataaaaccacaaaaaatcagatcaataaaagaaaaagaaccctaaccaaaatcacaaaaaataaaatgaagatggaagctctcagcagctttaaaactgaaccaaaaacaaaagaaaaaagtggaagtgaagaggacaccaaaatgaagaagaaagaatggaaacagaggaaaca

SEQ ID NO: 105231 - DNA, 321 bp, Glycine max
  unsure (1)..(321): unsure at all n locations
gtaaagtggagtggaacaggcgagcatcaactcaagagaatgtctactcgtccacacacattaaatatggacttattgcgcacgagattacaaaactgcctctaataaaataagtactctatgtgccctaatagatcaagagcagaacaatgctacatttctacggtaccttaccgatattatggaaccttatggccctagacagcagggatgaaaccttaatcttatatgtacaaagataagcgggctcatacgtaannnntncgccggcaacataccctaatgcttatgaaaaccctatggccatgtcttgcatttctg

SEQ ID NO: 105232 - DNA, 411 bp, Glycine max
  unsure (1)..(411): unsure at all n locations
ctagnccaacaagagggatctgaggatgaatcttattttaagttactctaaacctatgagggctgtctaaattaagcctattccaaccaaggggatctgaggatgaagcttggattgattcagtctaactagggatcgagatttattaatttaagctacatcgtagaacacataagcgtgattaattagagaaacatcgttatatacatcagctggtttgttagaaagacccaacatctttacctactactgtcaatcttacttacttgcatgtttactatttttagcctagacttagtttaattatgttctatatcatcaattatcaatgtttcattcaacaatgccttatttctaaatttaaccctgtctaagactagttccctgagttcgatactcggattcatccat

SEQ ID NO: 105233 - DNA, 361 bp, Glycine max
cccgaacccacgttttcagaggtatgataattctatcagaagcataccaagcttccattctgcatatataccattgcagcacttcatgaacaagttcttgttgcctgtataaagctttgtcagttatatcactcgattgaaacttcaagtttcggtgcttatacactatatatgttcttaccaatttcttaccttagctctggatgtctatttaacacaattgaaattgcttggagaatatgcatgtcatcaggatgctcatccctcacttttgctgtctagatttctcaccagaaagccattatattcttgttaagataacccaaccggattatgattaaagaagcatcaaagccctatg

SEQ ID NO: 105234 - DNA, 399 bp, Glycine max
  unsure (1)..(399): unsure at all n locations
cacatctaattaacataacatgttagctagtcctttttggagtgtagagaaaactaattgatttcaacttgtggaactcagaagttcgaatttaactagttatatatggttggttatatgctcagtattgagaanatagtgctagtattctttatttatgttctatattatctatttaattcttcatatactagtatacttgattgttttctttatatagtggagataccgatggaagaattcccgcgacttcaacaagatacactcttataaagttggggcttgggatagttgaagaatggactccctggtataccaccaagcaggtaataacaacacctgagctttttttgatacccaagctgtacttttttagaattgtatcataaaatatgactc

SEQ ID NO: 105235 - DNA, 446 bp, Glycine max
  unsure (1)..(446): unsure at all n locations
tcactatgcaactggactttcattttaaagctcactaacacgtgatttctattatntttttntatcaaacaatggattntatttaacatcaaattatctattcaacttattntataaaatcaaatagacgaatcaattcaattntaatcccaaaaaatgttaggtatatataggctgtattttccaattgtaagataccatatttgattgggaatgtatgggatctaatactggatactgtggcccccaccttccctcttctctccatttcttgccttgcattgtgtactagttaacaaatcaatattgtccaataatgttgttgtgaatttttcctaacaatagtatgatgtcgacgaacttgatcattaaagtggaagtgccttaagaatgttcatggttgctgcaatttgtgtggttgatataacttcaactgaaaatcaaat

SEQ ID NO: 105236 - DNA, 369 bp, Glycine max
  unsure (1)..(369): unsure at all n locations
ccgctcccgagtatgacagtcatcgattcatgagcgctgagcaccagcaccgcttctacgccatcaggggatggacatttctccaggagcgacgcgtccagctcacggatgacgagtataccgacttccatgatgagatagcttgccggcggtgggcatcgctggttaccctcatggccaagttcgacccagacatacccctcgagttatatgccaatgctcggcctacanaggagggtgtacgagatatgcgatcctcggtgacgtgtcagtggattccattctatgcggatgctctcatctagttcctgggatattctttantgctggaagagggctatgagtgcgagtatggccataggatgaact

SEQ ID NO: 105237 - DNA, 328 bp, Glycine max
ctgcagctgttgatatgggattctccatgttgtctagggcggcggcgaggtacagtcactttcacatccaataacataaccccatccagtgcccccttaactaaactacgtactccacgagcctatccttgtcttaacacgggtccatcatcctccagcttcacaattcagccatttcacttcaaacatctgactttcaaaccaacaaaacgggggaggcgaaaaatttgccaaaacaacaaaccaatttttttatcaatcccagaacatccttcgtcaattgtcacggtggcgctcaaatttatgggggctaacataaatacatttg

SEQ ID NO: 105238 - DNA, 448 bp, Glycine max
  unsure (1)..(448): unsure at all n locations
tgaaggcaaactggatgcattggttaacttggtaacctatctggccttgaatcaaaaatctgaccaccatacagacctttgcccttccatgcagcaacctggagcaattgagcagcctgaagcttatgctgcaaatatttacaatagacctcctcaacctcagcagcaaaatcaaccacagcagagcaattatgacctctccagcaacagatacaaccctggatggaggaatcaccctaacctcagatggtccagccctcagcaacaacaacagcagtctgctccttccttccaaaatgctgctggcccaaacagaccatacattcctccaccaatccaacaacagaaacaaccccagaaatagccaacatgtgaggcccctccacaaccttccctcgaagaacttgtgaggcanatgactatgcagaacatgcagtttcagcaagag

SEQ ID NO: 105239 - DNA, 408 bp, Glycine max
ctgcagctactccgacatggtggcgtttggaatgtatcgctatttcttctttgtgacgctggacacttatccttgacccaactcaattcgtgcgaaaagttggccataatcaacaatgataaagaatgagattggatggctcgaaccatctgagcaccgacaaaaatgtagtagatgtggagctgaagagcacaacaaacgtcgatggtcaatgcaatctgaccatgggagttgtcatttaattgaatatgtatgtagacgaccgaattgattgattgaagtttcttgaatgatttaattcgtgggcttaatgaaatcgtagatataacattaggtactttggttctttataacccctaaccttaacctaaccctaacctaacccaacctaatccaacctaatcctta

SEQ ID NO: 105240 - DNA, 458 bp, Glycine max
tattctgaaaaagaaataagcttatgaacctaactcaaagattgttcgattggtagattgcatgattaatagggcatatcgtgttaggttgatgtttagaagcttaaaaactcattcgtggatcttttagggtgacgttagatggttggatcactacaagaaaatacggttttagaagaggatttttagcggcggttactctaatcgtcataaacaaatgaagctaacaaaggtttataaagttgtcgttatctacctacgcttattagcgaactacaagtaattttcgacgcgttaggaaaaaccttggttagttttatttgtctttatttttttatttgaaaattttagtttatttcttttagcttatcatatattgcatcttcaaaacctagtgtttgttataggatttctattgtctccaaatcctttgttctcactctcttctttgttgacat

SEQ ID NO: 105241 - DNA, 89 bp, Glycine max
gtctgatccggatccccaattattaatcgtgaatgcctgtgtgttcctgaacctacacaaatgttaaaaagcagcaccaactatccggc

SEQ ID NO: 105242 - DNA, 411 bp, Glycine max
  unsure (1)..(411): unsure at all n locations
taatgacagaaaatatgaattaaaaattgccgcanataagggtgttgaatatggtcagactcgcgcctgttctttcctggtatatgccccgtaatcaatgattctggttggcgattgatgcggatatttttatttttttaatcagacactggtcgaaagtaaggcctttctgtggcttggtgcattgaccaacaatcgcgccttcgacggttgttcactgctggcgatgggtatgttgatgctgagtttctggctgaaagaaaacgcccctggcagacgacgtatcgtgattattggtctggtcatgctattaactgcagtggtattaaaccagctgggtcaggcattaattcctgtaaaacgggccagcccaacattgacttttaccgatattaaccgcgtcagcgaact

SEQ ID NO: 105243 - DNA, 455 bp, Glycine max
  unsure (1)..(455): unsure at all n locations
cgcaagtttaacacaaccttatatagaatagctgaacattttattttanaagcttanntcgtgtcaagaaccttttggaaaataaagactattaaaaaataagcacatgttgtccaatgaatcaattatctagatgggaaaaccaaacaaaaaatatactgataaaatagtataccacaatcatattcttaatgtaaaattcgatagatataatcttcatgagaagaactttctttcaatccacaaggaaattttgagataaaattatttaattgaaaattattaaataatgtaatattaattaatacatgttacactagtgtcacttgattctaccctatattatacataggaaaagagtaaatcttaatcatctaaatactcatagccacagtccacattcgaacattattgcaccacatctcattatgtacgctccctatatatatgaaaat

SEQ ID NO: 105244 - DNA, 463 bp, Glycine max
  unsure (1)..(463): unsure at all n locations
tatgagtctctatatctttntcatctttctgtctcatttttgtttgacgatattatgtgttagagatctgatttacagctttggctgggattccaaaagatacatcttcatcatcctccaatctcattataaggggaataaacggtgttgaaaactcattttgattaaaactcattactaaaaatttgatgaaaataagagtcacgatgtaaatgtccattgttagttgtagaaactgtgtggaaaatattatttgattataggacgaaagaggaaaataaggtattttattattaattcagcatttacttttttacaacatacatgcacttatttatttatttgtgtaagtttgcagaaaatgtgcaaaagaaatattganaatagatctatgctcacaatgaatcatattgatggatataaataaaaatcacaagaaaaatggccaaaagatcataaatag

SEQ ID NO: 105245 - DNA, 335 bp, Glycine max
  unsure (1)..(335): unsure at all n locations
catgctcaactcctttgagtggcatttgtattggttggtaacttgattgttacatcttattacatttgatatttgtgttgcattgtgcatcatcatagtgtgagtgaagaaaattttctaagttagaaagatttctcagaggcaaaactctntttttattgattacagagttttcataatcatggcacaagttgctgaacttatagttaagctatatcagttaattgactcggagtatttaatcgactcattgttgttgagacatgactgatttttaagagtcctgctttatcgataccagatggttaatcgattattctttctgtctagttttc

SEQ ID NO: 105246 - DNA, 260 bp, Glycine max
  unsure (1)..(260): unsure at all n locations
atatcacaaaaaatagagcatcattgaacatgaatctcagtccaggttttggattcttttctactttacttaataaccacagcttaagagaagaggttctctaaccttgttctcaaatttgtgcctaaatgaatatgaacaagaaatagccgcagggacattctcaaaactatattacaacaatacaagaaatagccgcaagcacatacataatgataattatcctcanattcatatgtatgaataccactaggagaaag

SEQ ID NO: 105247 - DNA, 377 bp, Glycine max
  unsure (1)..(377): unsure at all n locations
cggattgattgtgaaggaatgcatttaccatatccccgngagagtgtgatccttaaattttgagagaaatgactatcatttantattgatttttgcatgaatctctgaagtatggattgaatgcatgaaattgaggatgatgaacgccatgtttgattgtgatagccatttagccaaaaagctgaccatgtgcttgaataaattatcccttgtacccacgttgagctgaatgaattattgattgattgaaccctgagcctatacaatgttattctcctgctaccttgacttanatgtaggagagcatcatccacaagaagcgcagttcaaagcaaatttgtcccacatttggggagtaatattaatgtaaatttgtt

SEQ ID NO: 105248 - DNA, 454 bp, Glycine max
  unsure (1)..(454): unsure at all n locations
ttgagaagctnttatggaggctggatcttngagcttttctaangnccttcattggtgattttcaaccatgaagttacagtggaagataaaggagaagaagggagatgaggcaccatccattacggaataagccttggatgaagaagtttcaccaccaagagattgtataagaagctaagagaggaagctttaatggaggaagtgtcgcaacctaccctttggcgggagggcgacgcgtgactcgcgggatgcatcttccaagataggaatatgtgcggagtcgccaccaacgtttatttgaggaaaacgttgtgaaaaaccggaaaagacatggtctacaaactctaattgaaaggttcgggagttgtatttacgcacggggaaggtattaacaccccacacatccgtcacaagggatggcagcctttaatcaaatgtgcaaatatgacttcaa

SEQ ID NO: 105249 - DNA, 355 bp, Glycine max
  unsure (1)..(355): unsure at all n locations
atagttgtgagaacatagngaaaagaaaaataataaatttggagagtgtgaggaaaatataccggcataaggataaactctataactntctgatactgttaaacacaatattcaaataaaaaatgagtttgacaggaaacagtatattatatctcttatgtgtgagagagagtaaaaagaatattattatgttctttaatacagtgaactattttttgaagtttgttcaatgggtttttcctcgatattagaggggtcttgacattatatattgatgttcatttttatagttactggtggttatattattggcttcgtggcgcacaatttttaatttaatttacactgatcacgt

SEQ ID NO: 105250 - DNA, 407 bp, Glycine max
  unsure (1)..(407): unsure at all n locations
ccacaccgnattagcgcatcagaaagacagaatggaactttaatggatatggctaggagtatgttaatcaattacactttatccgcatacttgtggatgcataccttgaaaactggcatgtacatgttgaacagggctcctagtaaggtgtttccaaagacacctcttgaactgtggacaaataggatacctagaataaggcacctgcgtgtgtggggttgccatgcagaaataacgatttataatccgccagaaagaaaataggatgcaagaacaatcataggatatttcattgtgtatccaaagaaggaaaaatggaagatgttatatggcactgattatagtatgagaattgacaaaactgcgaatgcatggattattggaaatgatgatatcagtgagagtac

SEQ ID NO: 105251 - DNA, 354 bp, Glycine max
atcttctccactgaatccttgatgagatatgagaatccgctctgttaaaggttcctcttggcgtgggggttctgccggtagcaattggggcttcccgcatccaccaattgtcgcgggtggtggaaaatgaggtgttatggtttgggtggcatcctggacaagaggaaagtgaaaaatcatgttctttctcgttgagatatgtatttataaactgcagatttcgtttatcgagcccgtttcgctaagtcgaagtccacttcttgcgtttagcgcgataatctatgcttatcgcagccccctctgcctatggctcacttaacgcgctcttcttgcctagctagatatcatacgttc

SEQ ID NO: 105252 - DNA, 421 bp, Glycine max
  unsure (1)..(421): unsure at all n locations
gtcatgcatattcccgatcagaatggcgatgctatggccatctttcctgttattcgggcgcttgaattgcataaaattaagcatcttttaattgtaacgtcgacaattaatttaaaagtctttaatgcgcttaaacttgaacagactaaattaacattagtcacaatgactatgcaggatcacgcaacattaaaagatataaaagatttagcaaagaacataacacagcaatacggtacgccggatctttgcattgaggggatgcgtaaaaagaacctgaaaacgatgttatttatcagtcagttgaaagcaaaaacgaattntcaggttgttggtataaccatgaattgcttctcccctttgtgcaagaacgcgtccagtatggatcagaaactccgggctcccgtacctatgacatggg

SEQ ID NO: 105253 - DNA, 459 bp, Glycine max
  unsure (1)..(459): unsure at all n locations
aaaactcacgctggttgctatgcgacatgttatgaaacctgtgattttccgttataatttcttaaagagtgttccattcggggcactcttttttacattccctctacagaactagcccttctctcacagaaaatgaataaataaaaatgcggcaccgccagaatcgcgttcgatgtgactatgatcattttcggtgagtactgctttgatctaaaggctcggtttctgtgatgattgaccagcctcagagtattgatgacaccaccgttcataacagatcggcattactatgcataagtactgtctcatattctcgccaaaacactttttaatgcctttgcgaattcatccagacttatattgtcaattntttgcccaacgacgactgactccgagacatcggccattgcgggccatcgcgttgtgaatcagcataaattgcaacaacacgggtattat

SEQ ID NO: 105254 - DNA, 397 bp, Glycine max
  unsure (1)..(397): unsure at all n locations
agtattatatatatatatatatatgggtgtatatatgaccntaatagccaaaaacagataaagcgaattaaccacttattttttggagcaagtgtggtagaaatccaagctgaaattgcttgcatcaatgccaaatggaatcaatatcaaaggaggtcacattccaattgttgcggtttaaataaaagagttgaaacagggaatattatacaactcacaaaacagtaagaaatttaacaacttggaacagggaacaccccaatttatattataattctccctttctgtgcacagtagttaacaactcgacaccccatatcagattgaaaactcacanaacagtnagaaatttatagatactgaaccccaaaaccaataactcaatcaactagtcacg

SEQ ID NO: 105255 - DNA, 411 bp, Glycine max
actataccaagctctaggaaccagagaccgttaaagatctatatatacgctcgctgagggtccagagaggaagactaaagatctggatcaagtagacgtgtgttaacgatgaagacagcaaagacttagtgcatgaaaaagatatcaaggaaaggtggaaggcgtatttccacaacttatttaatgatggatatggatatgacactagcagttctacacaccagagaaaaggaccggaactataagtactatcgtcggattcagaaacatgaagtaaggaagcgctgaaaagaatgagtaactgtaaggcggtggggccagacaacatacctattgaagtatggaaaactcttggaaatagaggtcttgagtggctcaccaaactctttaatgaaaatatgaggttcaaac

SEQ ID NO: 105256 - DNA, 429 bp, Glycine max
  unsure (1)..(429): unsure at all n locations
agcttgaccaatcccgaccctactccggcatagtctgtcagtgagaacctgtgatgtacctaagcaggcgagctcctggcagttaacatattaaaggaacaaagaaccacaaagcaggaggcttgtggtggctggccagctgagaattntgtgtaatatgtggtttgtggcctctggtaatcgattaccaagggtgggtaatcgattacaatgcttaaaattgaagacangaggctaagatggtctctggtaatcgattaccaaggcgtgtaatcgattaccaggcttgaaaacgaaatcaggaaacttacggagcctctggtaatcgaataccagcctgtgtaatcgaatacacagaggaatgggtcactggtaatcgattaccacgcatgtgtaatcgatnacacagcgtattattgcatattcatg

SEQ ID NO: 105257 - DNA, 461 bp, Glycine max
  unsure (1)..(461): unsure at all n locations
ctctacagttntctggttntccataccatgaaaacaatatttgtgctattcatccatttcattctcttctccctttgccaaaaaagaattcgccaaggactaaccgcctgaattctttttgtgtctcacttctcccttttccaaaagaacaaaggactaaccgcctgaattcttttgtgtctcccttctcccttgtcagagaattcaaaacgacatagtctgagaattcttttgattcttccctttcccatatacaaaagattccaaaggactaaccgcctgagaattcttttgtatccccattcacaaagattcaaaggtttaaccgcctgagaactttgtcttaacacattggagggtacatcctttgtggcacaagtaaagggtacatctacttgngttgttgactgagaacaacagacggtacatctcttgtggatcagttctagtggagggtacat

SEQ ID NO: 105258 - DNA, 458 bp, Glycine max
  unsure (1)..(458): unsure at all n locations
tatgtcaaggcgcttagttataaatgatttctaaattaatatgatggtcaatggataaattgaaggaaaagaacgctaatgatcttatttggtctaacacgtctcaaatcctagaataatagtgattgtataatactgctttcactaatgtttcccctggtgaaatgcaagactgcaatgttaaaaaaacatgtgttgtatggttgtgtgatgntgcagatggatggatcaaaacaatacgattagaattatagtctaaacacaatacacaggcttaagctaacagacagtctttctcaaactcacttggtagttgatacaaactactgacaaaatactgaaactgccaagccatgccatatacatttttgtagaaagtgagttatgagtctaactcaaccctacaaaactgacttttaatgtgacaaatacatcccacttatataatttatacacta

SEQ ID NO: 105259 - DNA, 458 bp, Glycine max
  unsure (1)..(458): unsure at all n locations
ngacatgttnganatgacgagggccctcatggttgatcacaacccttgtgattgacgaaggccctcgtggttgaccacgaccattgtcagaagttgtgacattgtgggacatttcaaactaatcagacttttatgatgttgaccacgtccattatcaagtgaaaataacataagatcttcatgatattgtgtattttccaacttttccacttgattgagcagttgtacttctgcaaggtaaaaactaatgtccaaacatgagttttgactagaaaatacatgaaatagcacanaaactcacataaaatatcactcaaattatggtttattaacctcttcaaattgaagcattgcttgtcctcaagcaattattctaactcccaattaaacaaattctttcaagtcataactcatgcataaaaaatccctatttattcaaaagtaaaactcacacataa

SEQ ID NO: 105260 - DNA, 405 bp, Glycine max
  unsure (1)..(405): unsure at all n locations
ctgcagctctacactagaatctttctgcaatcacaccatactctaaccccataaatgcgtggaccacaacgaccaagacacagaccatatgtcgcacccacacgttgtctaaacataccctccacgatagcaacaacgaaccaaatctgttaccctaatcgccttctgtggagaactttgatggaaacctagttagcaatagagaaacatgtttatcttctgaagcaatgttgttacgccctttctatatgacacaaacattgtcattttttaacctatagtgccttcattcaaacgacattgttntctttgttgttttaaaaaataattaatccaatgtgtataaacattaacaccaaagattacacttggcagcatacatgttatcttacgtctccagttaac

SEQ ID NO: 105261 - DNA, 469 bp, Glycine max
  unsure (1)..(469): unsure at all n locations
aaaactaagctgagtagttgaacacttanaacagcagaattcctgaacttgtgttgcacctttatcttaaaagcaagttcataacccaacagcttatcaagtgcttggggtgaagcatttaaatcaacatcaccatccttgtgcaaagagaataattgtatcacacaaacaaaaaataacatatcaaagataaagagttacttttgaatccaaaaacgtacttcaattntaagcttattaactgcatcagctgattgaccaattaattcactgcattcacggtcccaaagcaggaattttgtgctttcatcttcgtggttgatcatcatctcaagcctatacatgctaccatatgtaccaacagtgtaatggtgccaaaagttacacaaacaatttcctgtgtgaacacaacatacacatcaaatgctaaaaaaacatcagatggttgggggtaaagaattaaaatctg

SEQ ID NO: 105262 - DNA, 467 bp, Glycine max
gctttaagatgtgcctcattgtataaacaacatctatatattggtagtagctcaggctcacgtaaccacaagctgtaataatatgtgaacatggatagtgaaacgcagaataccttccgcattgacaataatgaccattcaagttaactgcccacttttgtccgccacgttgcgtaataggattgaaggtcttctctacttcaaaccttgtggagaggatgtcatacacgcgaacgatgtgcgaacaagcttgttcttgattttttctaagttctttaacaagctttgaacaatatacttgcccttcatttaactgtctctgggcttggcggccacgctcaacaaagtactttcgacacctattgtacattgatttgaccaatgctgttatgggaatgttgcgataatccttcaaaccttattgatacattctgagaggttggttgtcatgtggccatatccacatc

SEQ ID NO: 105263 - DNA, 381 bp, Glycine max
  unsure (1)..(381): unsure at all n locations
tgatccctcgngataatacgataaactagccatgtgctatcaagttctaagaatcagactatttcccactgttgaatgatcctaacaaagcatgcatctatgtgatcaaagcacaagcatactataatgacgtactaatagcacaaagaacacacnaaacatcattaaatagataaaatggtatttacatcaagtacctacaaggaagaaccaacagaggatttagctctccatatctaggaaagcttctttataacaaaaagaagagaaaaatgaaggattgaagaaatacaagtagtggggatgtctcctccacctctagaacctcacaatcactcacatactcatcccaagctatcaggatgacttcctcttaaactc

SEQ ID NO: 105264 - DNA, 464 bp, Glycine max
  unsure (1)..(464): unsure at all n locations
ccttccactccagttcccattcgagtacctaacgggtgtgatttttttacgttaaaaaccagaatacacaatacccttaagctaaccgacaagtaatttttggataaaatttactaccggcagcctttcacgtatgcaggtaatcaattttggtttcaatgtatgcaactaaaagatgatgctgatgttaacacaatgttaatgtgtaatcatgaattttcgtttattggtccgattgagttattatgtaacattgctagaaccccatatggtattntaaacttacttgaaactactatgacccctactcatgatgccctgctatattacaataggaagtggaacatgtcatgccaaaatcaagttgttggttactcgttcacaggaaaaaatcccaaaaactttgacattcccaccggatgtaccatggatgaactgaaggatttgatcaaacaagttgcgcc

SEQ ID NO: 105265 - DNA, 401 bp, Glycine max
  unsure (1)..(401): unsure at all n locations
gcttgagatgttcagaaaattatattacacaattttttatgatatanctnaagggccgaaggctcgtcttaaaatgcgttcattgagttctcatcaacacatcatccatgcccgcatcctttaatggcaaagcagatctctgatcataaaatgggactacattatgaagactgtctgtatacacacatgccaataactcgtgtatctcacaactgtaaatttatcaaatgccagacagaggtttaatatttatataaacaataatcttatcaaggcaatgatgacatgcctcaagatatctaaggtgtaagcattcatgtacatgtcgtaagcatataaagatgctaatccctaacatatatcctggatattacagcatataaattttatttgacatttac

SEQ ID NO: 105266 - DNA, 362 bp, Glycine max
gaaccacaaatattggagaactattcttgttatgtgcaccggataatcatactaatttgtatgtctactagaataatctaaatatgactcgagatattttctatacatatactaaatacctaaaatctgtcatagtgataattcctgaaatactcatatatgaaagggcatatgtagttgccgtgtagagagaaaaatagtacttggcattgatgatgaaagaacagccgacgaaatcatgatcacgaccaatgaaatgacttaaatcacggacgaatctgaatgatcacacactgaaatgcaactactgggcttactataaatagagttgctggggaagtaaatggaccttaatgagacca

SEQ ID NO: 105267 - DNA, 306 bp, Glycine max
  unsure (1)..(306): unsure at all n locations
tgatgaacaataagttcttaagattaaagtacaactccacgtgaatctataaacatctcaagtgaatcaagagcacgtctatgagttcatgaatgtacatgatatcacgactctagaagaaagtttacactctagaatcatgattcaggattcatgatctctaggaatcaagactcaagattctagactcatgattcacgagtgaagaatagactctctcaagataagtattaaaaagttctttcataactgtgaatagcacatgagtttttgacanaacctctaccaaagagtttttactctctg

SEQ ID NO: 105268 - DNA, 449 bp, Glycine max
  unsure (1)..(449): unsure at all n locations
ctacaggttgaagaagcnatgtctgtatacattcccaatttcttgagtgacatttgtattgatagtggcgtcttagacttaatttatcttcatgtgcatcatgcatcatcatgtggtagtaagaagattgtgtctaaagatagaaacctcttcaatgcataaaactctatgttttaatccactaccagactattcgtaattgattacacaagtcgtttaaagcttgtaaagagatcttcattctgggttaattgattactgattatttgtaatcgattacactattcagttgagaccatgtctcattttcatgagtctctactttaatcaattaccaagtgattgcaatcgatgacatcggccttgaaagtgttcccagttttgatcaagaaaactttgatcgattaaatcaagagtctaatcgattacattgtgctggaaagctatct

SEQ ID NO: 105269 - DNA, 353 bp, Glycine max
aaaaccattattaccacctcttttgcttttcatctaccacggaatcaattaattctatgaagtaatccaatagacatccttttaattgataaaccattcttcgcaaacctggaacacttcaacatgtacaacttatctctagaaagatgagggcctgtcactttcaacaccttaaaaaaaagactcgagccacactctgacaaaatagcatttgtctcaaaaacaccctgttgtatcgattatgattaggcttgtatcaattaaaacctatgagacaataactcttgcaagctttatacaacttgtgtaattgatacatggtcactgcaccccatgtccatcacaacatacat

SEQ ID NO: 105270 - DNA, 464 bp, Glycine max
cgcctctaaaagaactaaaactcagcttggcaagttggtagatgacatgactaaagttgtggacagaagagaagaagagtatgccaatattgaagcacatcaagaaagcattcttcaagttaccacaatccatcatcaattgatcaacgaagaagaaaagggtgaagtttccagtactccagaatatccttgcatggcaactgctggttatgttgtaggtatagataaaggttgattggaactcagtgtggaggatcaaaaaatctcttttgacctctttgaagccatgaaacactcagatatgggtgatgcctattttgaagaagaagagctggagcacgaaatagcatcatcaacttcaaccatgatactatagtttcctttggaaaaagaacctgacaatgtgatagattgcttagtttatgatgaagagcttgatgatccaaacaacaattatgttagtc

SEQ ID NO: 105271 - DNA, 312 bp, Glycine max
  unsure (1)..(312): unsure at all n locations
ctcctaatgcatgaatcttgacatagcttaaccagataacattgtttgaatgacaactgtgtattcgcccgcaatcacattctttgaccccatgggatgctgtatgttcctattggctatagtttatggaatgctctatgttccttcggttatcgcttggtggtagaatggttaatttggagttcacaagaggaggatctccatatggcgctggagtttttgctggagattgtataagacaagcaagtgaaatggagctggagcttgcatagtatcatggcnagtatatattgaaatagcccattaattcca

SEQ ID NO: 105272 - DNA, 464 bp, Glycine max
  unsure (1)..(464): unsure at all n locations
tgcttctcaatctncccctttgtgatgatgacaacttctgaaatcaagaaacacacacacacacacacacacacactntttcttgtcgatcactcacataaatttccattctccccctttgtttttgaatttatgcttctcttaaaattaagttgattactcatgtgagttcttgatttaatccctatttctctccccctttggcatcaacaaatagccaaagtgtgtaataagtttgaagcatacaaatacaactaagcatccatacaacattcatggaaaaatataaaccaaatcatgaagcaagaaccatgaatagatcaaatatatataaaccacattgtcaaataacataattaatatttgttcaaacataccatgccaataaagaaatagtaaattgttcaaatatcataataatatagccaaatacacggctggaaatcaaagtactaataatatta

SEQ ID NO: 105273 - DNA, 461 bp, Glycine max
  unsure (1)..(461): unsure at all n locations
actcagcttttatccaggctcatcttggtggtgaagctccttcttctctggcttattccctagtggatggcgcctcccttctcctcttctcctttgccttccgctgcatctccatggtgaaaaatcaccattgaaggacctcattgaagctcaaagatccagcctccatagaagctccacaagcaagcttccatcactccgtgacaaaattaaaccctccaacatccctaaatcatcttaaacatagccagacctgcatgaaaaatcccgaaattgagactcaaagaagaagcttgatgaacttgattttcaaagaggaagagcattatcaatgagacttagcgtatgtgtcatcattgttgtgatcatgaaggtgtcacgtgtagaagcatatgtaatatgaagttttgatgatgccaaagatgaaagctattcaagnttgatccaagtcaagaatcaag

SEQ ID NO: 105274 - DNA, 398 bp, Glycine max
gacagaagagaagaatagtatgctaatattgaagcacattaagaaagcattcttcaagttaccacaatccatcatcaattgatcaacgaataagaaaagggtgaagttttcagtgctccacaaaattcttgcatggcaactgctggttatgttggacgtatatataaagagtgattggaactcaatgtggaggaccaaaaaatttcttttgacctctttgaagccatgaaacactcatatatgggtgatgcctcatttgatgaagaacagctggagcacgaaatagcattatcaacttccaccatgatactatagtttcctttggagaaagaaccccgaaatgcgacagactgctcagcttatgatgaagagctcgatgattcaaaagacaattatgt

SEQ ID NO: 105275 - DNA, 252 bp, Glycine max
atccttaagcactgcagcatgcaactcacaatagaactgagaagtacgaatattggtcttgttgttctcttcttgaagatgtgtctcaagtgactacagctatatataactaactcttccgtcaaaagcatggtataatacacaaacattggtatgagtatgatctataatcccattactcccacatgagtgtcgaagactattcagttacctcaactcctctgtgagatctattccttcgttgtcatgctt

SEQ ID NO: 105276 - DNA, 346 bp, Glycine max
tcatctacttgttcttcatttctaggcggattaatatctctatggggctgttcatgctataaaggattacaaatactctgattgccttttttcagactgctaaagggcatgccgttttctgatgtgtactggtgtggagatatgcacatactgggggcacctgtgtgccatttcacaatttatctttccgaaattgctttaaacaaaataaatatcttcaaagagctattcagcaaagaagaaactacttcttattctaacaaggaggattgtttaatgtactaccacatctctgttcaactagaattagtgtatattagacagagtctattatccataaaaatgt

SEQ ID NO: 105277 - DNA, 421 bp, Glycine max
  unsure (1)..(421): unsure at all n locations
tttattcttcattttctcaatacaggcacaaagggagatcatatcttaactctataatcaaggattaatatgctaaactataagcaaangtaatcactaacattttagaacaccaaagctgttgaccaccccctggaccttgctcaaattaaaggtgagcataacatgtttaagatcacagctcaatctgtcaccactcaccaatgatctgggttattgcatattcacatataatatgaataagtccggtctgaactatattttaagggctataatacactataagtatcatgggcgcaagaaataatagaatacccaattatatcttatagccgatacaatgagaccattctagtttgatgtgaaaaatgatactgccaaagacagcaatttcaaccaaatatttgaaatataataatca

SEQ ID NO: 105278 - DNA, 385 bp, Glycine max
ttgactaaaggacataatcctgcggaagatctatctcatatgcgttctctgatattgatttaacatgcactgtagttgattcgtccgccatcttggctgaaattgctatattgacggcgccaaaatctgatcagaatcagcctgaagatcaaattgttcggatgttatcttctgacctcaagaatcatggggtttttatctaacagtttctgtgagatgacaatgataaaagctatgctccgaagatgttggtgttcctgtttcttacagagtctaatgataggagagttgtttgctcaacttgtaatggcttgacttgtgttgaggaacattcatataagaatgctatgtccgacacctttaattgaacactgaatataggtat

SEQ ID NO: 105279 - DNA, 251 bp, Glycine max
  unsure (1)..(251): unsure at all n locations
ccatcgcttccttctgagtaatcactctatatatttagtaggaagtagttagttatgttctttatttcgacaaaaatatatttagttacttgttggtcaagcttatgatcaaactctcttctctatatgtctctcaactattcttcattcttcttactcttttcacttttgttcttactatgtgctgcacanagtatcttggctctcactaggacatgatcatggaaagcttgagacaccctcttccctta

SEQ ID NO: 105280 - DNA, 200 bp, Glycine max
  unsure (1)..(200): unsure at all n locations
acccggtgatgagaggaacgaggagaaggttatgtacttntacntgagctatatnntaaggtgggcaactggggatggagtgcttatgcctgcgctcgtggaaatgggatgtttgtattgcaccactcccccatcgccgcctagtgccacatatgacgagtgcgctatatcccaataagctcggtgtgagaaagcgtgga

SEQ ID NO: 105281 - DNA, 231 bp, Glycine max
gctattaagggtagttttttttttttcactatcccctctagttgtgcctgtcacaaaccttttttcgtaaaacctcagatgtctaccccccagcagggaaaggaaatccgaaattttaaaaagccctcaaaggtttccaacccctaagggctttaatcatttttagccgctaaggttttttaaaataaattgggttccgttggcaatctttaaatctaaggtgttttaaaa

SEQ ID NO: 105282 - DNA, 219 bp, Glycine max
ctaattaaattctggcctctcacgatcatggtccaaagctccacactggcacatcatcatactttctcatatacatgagccttcataaatattgagaaacagtgctctaaacccatggtagggcactggacatagttttaaatcttccacattcatacagctttcatgagtgttatactgaaaatctctatactggatctggagcagaaatgttttaaa

SEQ ID NO: 105283 - DNA, 491 bp, Glycine max
  unsure (1)..(491): unsure at all n locations
gatcttaagcaccgccgctgcagctcaaagcagctccatactctactatgatatttgttcaaggcaaggcacctgtgtgccagcaatnccccatggtgacagcttgagtcacaaggatttcaaaccgaatgacatacccctaagtacaggtatgtttcttcatgaaaaactacaagtacttactgaaagagtttatactatgtccatacaatatgaagtatgaaacatgggcaccatcaatgtactgatcatggataattaaagattctaagccatcccccactagagatgcttaatactctttaaccactctatttctgccaccagagatatacaacttgtcactgcatgctccatgtacatacatagcatacaccatcacaataacattattcacatcaacatcatctcatcagtaatcacattcaacacacacacatacacacatatgtgggtatatatatatatatatatatatatatatataaaaa

SEQ ID NO: 105284 - DNA, 210 bp, Glycine max
gaattccgggcagaactgggatcagggggcttgccaaacactgacatccaccccccgcattcctcatgaaactggagtcctagctgcagctctgcaggcgcagataaaggaacatgaccccaagcaagaggcttgggtggctggccagcttcaatcttgtgtatatatgggttttgtccttggcatcgataccaacggtgggtatcgatt

SEQ ID NO: 105285 - DNA, 445 bp, Glycine max
  unsure (1)..(445): unsure at all n locations
aatcaaatataacacgtggtaaccaatgctcatgtagtacatgtaacatgcacatctgtgttccatgatctaatctactggattgagcataaatggngtgctaaattctttaattaatttagatgacgacttaaatctagattggagacaattacgcggaccacatatacaactttacttattattaaatgataaaattactctgacaatcaaggaatgtgtggtaatgcattataatccttctggcttttattaaacaataacacttaatatgttatgggatagatctcagcttgcaatgcagaaaccacataatgtttctatattattaatattatgataaatactatattgtgacatatactattatacattgtaattcttcaacatattgaattaattttaaaatagactgatgaaatataaaatatcttaaaaactattt

SEQ ID NO: 105286 - DNA, 437 bp, Glycine max
  unsure (1)..(437): unsure at all n locations
ctcagctgctagccgatgagcanaacaatcttggaaagcttgaggattttcttctggtgaataaagaaacgagccttacaattcattttcttggattctctgaacgtacctctttgtgcttcccctgcatctttctccaatacttgaagtccaatcgtgacaaactcaagaacatcctacattccanagatgattttcatttgaatgcaccatgcatcgtagttctttccatcaaggattggaaaatgcgctggaaactcgttcccattcatctctacaacaatgaagcttcaaagatcccacactanaaccaatcaagactctcccaacatcgatggaacctgaagctcgtgataccactgtcgaacccgattgctcgctgtacaagcaaaccagaaactttgacaatttggatgaagttgagtcttgaatgatga

SEQ ID NO: 105287 - DNA, 337 bp, Glycine max
  unsure (1)..(337): unsure at all n locations
gcaagcttnnatcttacaccaccacctagaccttcttatattntagtntctaatnntcgtctaagccgtgtctttcggctatggtatttaagctatcattttctgcactatatatatcatatggtatctggacctttgtcttttatgattagattctatgtggtctaaaattatgactggttggattatattctgatctatgacttatttatgatttgctcaagattggttgtgactcatgattgatccttgtccacttccttctcttatctaatattgattcccatgaactttggctttttgatgttgccaaacggggagaataatgaggtggtag

SEQ ID NO: 105288 - DNA, 330 bp, Glycine max
  unsure (1)..(330): unsure at all n locations
ggggctnttggggctggacgagacttttgatgtccttctgggatctccaccgggatgcccaaacacatctgaaatggagagaggcccatcactcggaatagccatgagaagagcttaccacaaatgaccttgatataagctggacgggcttactcgctgaaacataagggaaccacacacaggggcgatcaacttgacgatatagagtggaaagggacttgaatatgctactaactctattatcaagctcaacagttacacatgttcttaataactggatcttcttgaaacctatgaatacttctcggaacccacttactcacacccctt

SEQ ID NO: 105289 - DNA, 368 bp, Glycine max
tgatatgtgtatctaatgactgttacatggcactacatggtgcagatacaaccaattaccgtgtcttaggattattgcagagaggtacagtgggttgacttattatattgcttattctgaaaaattctatgtaaatacatataagtgactatggcggggaacaatgtgtcaaagcagcaagtgtattattgacaggagaaggtgttctatgattatgatacgggcgacagaaacagatgtatcgcttcgctgctaccaaacgactatataaccttctaaagtcctgcaaatatgtcatggtatgtttgtgtatgcaaagaatgcaattcacattcttttctaaatgaataaataatacattttttgat

SEQ ID NO: 105290 - DNA, 266 bp, Glycine max
  unsure (1)..(266): unsure at all n locations
ttaaagaactatacaaaacgagaacatgggtgaagagaagaaatgtatgtctatatatgaatacactgatttgatgatgctcaagaagaattatacangattgtgtcataggataaacattacttctagattagtacaaagttgtttcaacacacaaagcattgcttcaagattaactcaagatcaagttttgcctcataacaaagtgtntccaaggcattcaatgctctgatgatcgattaccacacagtgctatcgattactat

SEQ ID NO: 105291 - DNA, 240 bp, Glycine max
  unsure (1)..(240): unsure at all n locations
ctcttacctcacacaagtctatgacattaatctaaacttgctcaaactgggtttacgcctaaaattccaccgaatcaaatattgactcctcacacccaatttaccctagaatggctcttgttcactatggcactcatattctcatttgacagtctaacttttcttaatcctaatgacattctaactaagataactcactttacccccaanaccactgaatcagattagccttcaactctc

SEQ ID NO: 105292 - DNA, 465 bp, Glycine max
  unsure (1)..(465): unsure at all n locations
gctgaccacgttcgctcannatagtttccttctggatctcatcctagctccattagataagaggaggaactaagcaaaatgaagacatgggaagccacatccacttcaacatctaaatcaattggcactggcctatccttacttgaagatttatatatttgcttggaagatcttcttaatgtggcatcaacgcaaaaagtgatttctaaccatcaaggtgagaaatgcatggaagaattgcttgatgggtcagcgggaattttggatatttgtggcattacaaggaacaccatgccacaagttaaggaaaatgttcaagcacttcattctgctcttataatgagaaagggggattcgagtattgaanaaagtgtagctgaatataacttcttcacanaatagatgaagaagaatgccaagcagntgatgacatctttganacagatggaaagcaaatttggagta

SEQ ID NO: 105293 - DNA, 451 bp, Glycine max
  unsure (1)..(451): unsure at all n locations
ctgcagctttaataaaaaggcgtaatctagcattcgttatctcgtctagcgatccgtatgtcgncgncaacatgggtgatcaaggttgaatctgcagttagacgaaattctgttcttctaagcgtgtttgatntacacgaaaggaatcaccacaaagattgttttatcaagatagatagtaagagatgtggatcacgagataccacgagatattgngtacattcttttcgttatatacatcgccctttgagacacacaccacctgaatgaggatntggtgaactggggtagttcgacctgagagaccggagcaaatcacacaaatggtttcttgatacaactattntttgaacatcttctacgagaatanttntgatattctgtggattatgggcttcctaatatattcttttgggaaaaatattactgaccttgtcacccaagttttgtc

SEQ ID NO: 105294 - DNA, 407 bp, Glycine max
  unsure (1)..(407): unsure at all n locations
atgtaccatttattatatctggttacanatatgtcaatatctntgttcatgacttggattaggtatagtaaaacgaatgatatttataggtatcttttatctatgaaatagactcttatcattttactaatcgagtttatgagactgttatgcgtctaagtaaaaattcaactttgataatcttgggtctaccaatgattcatatccgaaaactttagttaaaaaagaacaatttgacaccaattaatccacgtgatatatgtactagagtttaatattgaataattcagaaacccagcatattgcctttaatctcctgaataagcggaatatattcctcaatattattctgtaagacacctattagtngcacgtatggaattaaactatatattagtcatacttct

SEQ ID NO: 105295 - DNA, 453 bp, Glycine max
  unsure (1)..(453): unsure at all n locations
tccctttccttgttttgaagctcactacaagccttaagtgaaaaaccatgatatcaccatatccttaggaatttggagcttggaattgtttgggaataaatgtggngggggttnntgtttattggattacatggttttgtggctatacttcatgatgtatttctggccatactcgatgtacattgtatccttggtaaatagtggacatgctgaatgaaatgctcgttctcaaaggatatagaataaccaaataattctaacattaaaaagaaaagctatacagttgagtgaataagatcttaaatggcacagaatgatagactcttggttctctctttatgttaatttatcttacttttttatttcttattttcttatatgccctatccccattgctccctttcctttggatatacccttattcatatttccatccttgcctgtcccatacaa

SEQ ID NO: 105296 - DNA, 251 bp, Glycine max
gaagtctcgactgtgtcatcatgttcatgatcaagactatggtgtatacatcagctagattctatattggctacaagatgattactggatacgatagatgaacgctcctcgcacaagtcaagactctcgactggaatgttgacaagaatttctagaccatcatgcacagtttgttctcctaataatattgtcagatattctaaggtaccatgacttactctctcgtaatcggtaccgacacctgtgtcgat

SEQ ID NO: 105297 - DNA, 353 bp, Glycine max
  unsure (1)..(353): unsure at all n locations
gcgctatccgcagactcaacagaagtcaggtgggagagagatatactatgtgtatgaatcttacacccagcggggtattgataggaccaagagcattggcctaccctaccgcttacctagatacctatcgtccaccatcccaccatcatcctatgctattccctttgatactaatgaagagttncatgaacaatttaccaaagaaatgcacgaaaaagaaacttggtagaggagatgccacgagctcgagcctgagaatgagactttgaaggtgaagatatcccaacagagccgtgagctnttattcacactctaggatgatcggaatgacgactgcttttcggaagacgctt

SEQ ID NO: 105298 - DNA, 434 bp, Glycine max
  unsure (1)..(434): unsure at all n locations
catctcttacaaacctcaagtgcattgtgtttctgttttcccgctggccacacgaagcagtcgaaggtaaccttcttctttgtggagcctctctaggaagttgcgacagtggtggcaataagcgagtggtcttaagcaacacatcagtggttatagtctctgcacttccaactttaacagcactcgctctactagtacttgccgtgataatcttcttgagaaacaagcaataattnttcacgagaggcagtgaattgagtctggttntctcctcttcatcacnagcacanangcggacattgatccctctaactgtgccaggaaagagagatttcacgtgtgaggatatcatggatgccacggactatctaagtgaagagttcataattggttgtggatgctctgcgacagtgtacagagttgtatttccactg

SEQ ID NO: 105299 - DNA, 370 bp, Glycine max
  unsure (1)..(370): unsure at all n locations
ctaagctccgcttcacagtgcacgtgcttcttcctttcactttcctganattatcacaagatanaggtgaaggtcatangatgactaanatcactanttattgactatttctgtatgtgaagcctccaaaattatatataagaaagttccattcatccaaaatagagggaaatattttggaaaagcaaattaccgcctgagcaactntaggtaatagctgcagccatttcttctcannattttcccgcatgtcttggcataatgtggatatagtttttcatcatttatttcattgattcttaaaaccaggggacatcagatatatctgacgcacgtcttataccaaaccatcttacatcattntctttta

SEQ ID NO: 105300 - DNA, 332 bp, Glycine max
  unsure (1)..(332): unsure at all n locations
tctaaccctcgcgtatgaactcttagccatccatgataaccaccgatgacgccattacggatgcccctaggctctntgtctttcctcaatggacttctccacgccttgtggactctttgtataaccttgagactntgcgcgctgaaatctctcacaaggaaaggcgagaggctctcttccattggcgctcctctcatggggtaccctagctgtcttatggcaagtgcaggattatagttaatacaacccatcgtccctatcaacggaacattagggtagtccccacatgagaaaagaactccctcctttcctttcttccatcgaggaaacca

SEQ ID NO: 105301 - DNA, 467 bp, Glycine max
  unsure (1)..(467): unsure at all n locations
gctctatctaggcactctctnggtggtgaagcttctccttccatggcttattctctagnggatggcgcctcctctcaccttttctcctttatcttccgctgcaactccatggctggaaatcaccattgaaggaccttattgaagctcanagatccagctccatagaagcttctcaagcaagcttccatcacatgccatatctatgtcgnataattcttcttaatcccatcacatagtagatgttcccatatgtcatcgagtatttgtcgtctcccgttcaaacaatntatacaaggacaaaaatattttccatcctcatccgatcgactactnttagaggcgaattccaagaattgttccacgccttcctcatatataagactcgtacgactnggttcatccaactntgatccatctaattattaactctgcgatactcacaatggtnttcgatgcatanaaatctc

SEQ ID NO: 105302 - DNA, 161 bp, Glycine max
ctaatctcacgcctgtcttgtatccatttctgctcagaatatcttacaagacaacaaacaaccatgtctaccagttgtgttggaagtcatgcgtctttatgcttctaatacagtgaaacctatatcttgcatattttcagtaatccgtgtgaaattaatct

SEQ ID NO: 105303 - DNA, 404 bp, Glycine max
  unsure (1)..(404): unsure at all n locations
gttgtggatggcatgtgcgtgaaatgcaagatcaaccctattgtcatcatgatgcaaagaaccgaaccactacgtgctatcgctcctatatgtccttttttctgttattaatttggtttcgtctacagataatatatactacacaagaacattgtgcctgcgtgcagttaactttcacactcacccacattactaatttacaacacctgtcgcggttcgggtcggtctataatgggtcactcactcataactattcgtgtgctgtatcggatataattgtctcanacgtggttatcaaactctcacatatactcattatatcctacgagtgtatgagtccacttgtcctctacgagtagactctcgagtatactctattctaatagactctgngcacactctat

SEQ ID NO: 105304 - DNA, 364 bp, Glycine max
  unsure (1)..(364): unsure at all n locations
agctntccaatatccgacatcatgaactaccctatttctgataacagggcagaggcaataaaactctatccaanacacattccaataccacagctttccctgctcanataccccagtaacattctctntgttcttattcgctaaccgttggatcgactcngcaaatttactggaggtccctagtacataagtctacattgtgaccgttgggatctgctataaaatgtccagaacccaatatgtactacctttcccataaccagcaatgcacaagcatttcctgcacaataacaaaaattctgctgcacatttcaacagcaattttctgcataacagtgcagaattttcaaatctctcttgcctc

SEQ ID NO: 105305 - DNA, 484 bp, Glycine max
  unsure (1)..(484): unsure at all n locations
ccttgatactcagctgctactggctaccaatgcattnngnacctaggtatgaagattttgggttcgtaagcattgntggattaggagaacctntgtctaaagcctatagacttgtgagtgcctttttccttatccacttgatttctggattaaaccttcatgtttnttttttgcacagcananatcagataatattataaatgattcagtactaagtgtactgaagataagctgaaatagataccaaggcagagaactgccgaacccaactacatatgataaaagcacagtagttggagggttaagtcgatagaataattctgctgagtactcacnttggttttttttttgctcatcaaaaatagataatatatattgatagagtaccagtggtacgaanatacaaggtactgggttgcccagtgcagtggttctactacagactaanatggagtctggattgaaccataactgagctacccca

SEQ ID NO: 105306 - DNA, 515 bp, Glycine max
  unsure (1)..(515): unsure at all n locations
atcctctgagtcacctgccgctgcagctacaccataaacattcctgtacgttctgtntattatagcagcttatgagtcaagaactcaggcattatntgaatttgtgaactgcagaaagtaaaacttctagttgaaattagatgatgtcggcattcaataaatttatgcgtactcaagcatcanatatgtgtcctatcctggtgtgcgcgcgtgtgttctgtttttagttttttagtattttgcatttttactgctttaatatttatgtcttccttactcttaattattttaaggaattaaaagtaataattgtataaaaaattaggaattaaaatttaattagtaaagtaaagactaaaaaatcatgattaaacataattaaattgggataaagatataataaaccctatattaataaagaggatgtgatactatatctctacatatctgtgtccttttatctttcacaaatactacttctatcaactaggacccttgatgtcttgctatatcaa

SEQ ID NO: 105307 - DNA, 429 bp, Glycine max
  unsure (1)..(429): unsure at all n locations
gctcctcggacttcttgngaagctctctcaagaggcttcttttatattattaacgctntaactactaacacccttttattaactaaattcacctccttgaaaataataacggataaaataacacaacaaatataatcaatcatcaaacataattactcataatatatagatatatatatatatatatatcacggtgttacacgcttatggcgtgacgcgcgcncaacgcgcgactgacctttttgcttgtacactctcagttttatatcggcagtcaaattaacaaacatcaattctttatattaagcacaataactattaataatattttaaaacaatttatctatctctttatcagataaattattaacaagtttccacgtagagaagacaagattataaaacatgctatacgtgttctgatattta

SEQ ID NO: 105308 - DNA, 495 bp, Glycine max
  unsure (1)..(495): unsure at all n locations
acttccttgagaagctagagctttgntcatactcncctcttattactaagctcacctccttgagaagcttgcttaagaagattcctaaagaagctagagcttatctacacatacctctctaatagctaagctcacctccttgagatgagaagctagaacttagctacacaccctctataatagcttagctcacccccgtgacaaagaacatgagaatacaaaataaagatccttactacaaagactactcaaaatgccccgaaatacaaggctaaaaccctatactactagaatgaccaaaatacaaggcccatacgaagganaaacctattctaatatttacaaagataagcgggcttatacttagcccatgggctcgatatctaccctaatgctcatgagaaccctangggcctccctnggatctctatgcccaatctactggagtcttctacccaatggcctagcggggatgattgctcattccctcacctt

SEQ ID NO: 105309 - DNA, 406 bp, Glycine max
  unsure (1)..(406): unsure at all n locations
catcatgcactatcatatacaagattaatgggcggatggcagaaaatctgcccaaaccacaaaccaataccacaactntccttactcacatactccagtaacattctcttcgttccaattcgttcaaccgtggatcgactcgaaaatnttactggaggtccctagtacataagtctacantttgactgttgggatctgctagaaactgtccagaacccaatctgaactactctntccacaaccagcaaatacacatcattttctgcacaaagccaaaattctgctgcacatttcaacagcaaaattttgcataatagtgcagaatttcgaaatcacacttgccctcgtccaattttgcccaaattgaatcctacaagtcctanatcatgtataaatcatgtctaaa

SEQ ID NO: 105310 - DNA, 398 bp, Glycine max
  unsure (1)..(398): unsure at all n locations
gacacaagtcgttcaattctattcttagaaatatgacctaagcgtntgtgccataatgctcctgagnttgtattatcaattctacgcttagtaccacacaattctgcattaaaggatgtaccatangaagctacagtatcaagtaaatatagattatcattaaccacgagtgaaccagttccaacaatatatgaattaaaagacatcttgaacacgtngtttccaaatgaacacaaataacccaatttgtccaaataagaaactgaaaccaaatntcatctaaatgacggtacaacanaagtgtctntcatatccaaataaaaatcagtacataataataatctagagtgccatatagcttccacttctaccaatntaccatctccaacatagattca

SEQ ID NO: 105311 - DNA, 470 bp, Glycine max
  unsure (1)..(470): unsure at all n locations
gccgacgatacacagtgaaagtcanaataccaatagctgttactgctattgttagtacaacaatgccaactgtgatagatgtcgcttgtctggatgttgatgaatcttggcaatgagttgtattgcaaggcaactctacattagcagtttctgggatatctctagaaagaccaccaactccagctccataaggttctggtcgagtgagattgacatgatctgaagcagcgcaagctttcaaggatgaagacccaacgccacataaccncatattatgttcaaacacaaatccttcctctagtctctttagagcttcattaaaccaaggaaagcaaaatagacttattttagtctgaacattntcaatgatgaaacaaaacatatcaatgaagaaatggacagcagcaataaaataaaatgaaaggagtagcatcattattaccaggaggtacattccccgagagagtatt

SEQ ID NO: 105312 - DNA, 337 bp, Glycine max
  unsure (1)..(337): unsure at all n locations
aaaaaatatatatatatatgggttntctaggttttacatgtatatagttgaaatatgtacaatatatggtattttaataagattntgtattatgttaagtattaattatatttcttattgatatgttatttagaaaatttcggtatatatatttgtattaaattattatatcacatatcatgcttgtatgtaattgattattatttagttgattatatgatgcttcaagtgtttttatatttttaaaaatatattatattatcattattatctttagtccatatatatatatatactatacatttttattatagtatattatttacgtgatgtgatg

SEQ ID NO: 105313 - DNA, 374 bp, Glycine max
  unsure (1)..(374): unsure at all n locations
gcttctgttcaacctcctccttactaatggttttgaagcacatgagaggaatgctcttttangcacataccttaagtcctcaagaacattccctacctcaaacctctccatcacctccctagctactccctcagcattggccacaccctcccctacaataactgtgnttttcctcctcaccaactcactcagcacactagttacatcattattgttaacatggtctaaattaagcttcgtgaaagagccagcagcaacttgaccaaaaggtccagatgatggagacacattattactaccaccaagaacaacatgatggggcttggtgatatattctttggcatggctcctatcagaagaaagcctttgtgaac

SEQ ID NO: 105314 - DNA, 434 bp, Glycine max
  unsure (1)..(434): unsure at all n locations
ctgcagcttctgggtggctggcttatagaaagtcattgttggtatttctanattgtcatcgccnctaactaaattgactcgtaagaatgagaaatttgtttggaatgagaagtgtgatcaaagtttccaagagttgaagaggcagttgacgacagctccagtgttaattttgcccgaccctaagaggacatttgaagtgtattgtgatgcaagcgggcaatggttgaggtgtgtgttgatgcaagagggaagagtagtggcgtatgcttcacgtcaattacgtcctcatgaacttaactatccgactcatgacttggaactagcagcggtggtcttcgcctctaagatttggacgcattatntatacagtactcgtgttgaagtttcagtgatacaatagtctcaatacttgttcgatcagaagaactcatatg

SEQ ID NO: 105315 - DNA, 374 bp, Glycine max
  unsure (1)..(374): unsure at all n locations
gtctagtgattctagagagagaaaggtccaagttccaaagtgttttgattatatttgctgtgtgaagatctacagagaccagagctngaagtggaagccgttctgagagcttgagatgagtctgtgagtggttgtgagatcctagangtgaaggagacatccttaccacttgtattcttagaatctttcatcttgttcttctcttttgtgaaaacgaggcttccttgttatggaaaagtaaaatcctctgttggatcttccttgtacgtacttgatgtaaatatctttctatctatttaatgaatgtttgtgtgttctctgtgctatcagctttntattctagtatgcctttacctttgtcacgtagatgcatg

SEQ ID NO: 105316 - DNA, 344 bp, Glycine max
  unsure (1)..(344): unsure at all n locations
aaatatcttggtcatactgatcataatgatgtcgttgctgctctntattgtcattgtccagtgacgatattttcacgttaatttgattatcgtgggtgaatagatctttttatttgaagcatttgtgatgacaagaagttggattgtctattatcttgttttttgtcctgcgttcttgaatgaatattgcgtttatggcaaatttggtttcaagaactcgattctcttcttatatgtggtgttctgctctatgatattttagtaattacccacacacattaaatgaatgtgctgtgtgcttnttcctttataatacacagatgtggataggcttgtgaagtttg

SEQ ID NO: 105317 - DNA, 359 bp, Glycine max
  unsure (1)..(359): unsure at all n locations
tgcacgcgaagacccgcacaaacatctgaaagaatttcacattgtctgctccaccatgaaacccccacatgtccgagaagatcacatatntctgaaggctcttcctcattcattanatggagtggcaaaggactggctgtattaccttgccccaatgtccatcacgagctgggatgaccttaagagagtattcttagaaaattttttccctgcttccacgaccacagccatcatgaaggatatctcaggtattatacaactcagtggagagagcctgtatgagtactgggagagatttagaaactatgtgccacctgccccaccatcagaattagaacaacttcttctcaatattttat

SEQ ID NO: 105318 - DNA, 456 bp, Glycine max
  unsure (1)..(456): unsure at all n locations
agcctttcaaatgggttaaaggctcacattcactntcttctacatcatattcaaacttgtccacataaataataaagtcatctcgactcagagaagtcatctaagtctcaaacaattaatatagaacctatatcttaatgtcacatcctatcagagcgtggtgttcctgtgtcctctagcatgaggttcttcatagtcattcacctattcatctgctcccccgaacacaaagttcaagatcatcacatgatccaaacacaaacagcataccaggagtgagttatcacatttctaactactagagagaaacaacacaacatatagtagcccaatataatttacttagcatatatcacattatttcatcactttgtcattcatcaatcacacttttcatccatcaatcacacctttcaatcatcaatcactatacacaggaatcacacactccgatca

SEQ ID NO: 105319 - DNA, 350 bp, Glycine max
  unsure (1)..(350): unsure at all n locations
agctngatgatatagtcttcaccgacgttatgantatattgggtctaaanagaggcanatatgatcattatgcttttattaatgcacaacacaaaacacataactagggctaatgaagagggtgagaatgatggagaagcccatgctgngacttgcattcctattcagcccaagttcccaccaaccccacaatgtcattactcatccaataaacaaactctcttccttcccaccgcccagttatctactaaggccactccttaatcaaccacaaagtatgtctaccacactttcaatgacgagcatcacctttagcacaatccataaacacccgcccagaaatgaatttt

SEQ ID NO: 105320 - DNA, 308 bp, Glycine max
  unsure (1)..(308): unsure at all n locations
gatctacggagattggagatttgatgtgcgcctccaccaaaacgataccatctcccttggtttatctcgaaaaaccctatatctgcaatgcttaactggaaatggcgagatgccatggtgaagaagaacgttaggatgttcacattagaaatttcagagcanaagacaaatcatgcttattattatgttcgttctacattatgctcgttttttattataatttttaagtacttattggaatggtatattatcaataattaaaaggcggggggagatgaagattaacacatatnttgagtaaatagtca

SEQ ID NO: 105321 - DNA, 89 bp, Glycine max
tggacatgggatatatttgcgataaagtgaatagcttatatttgatgtgatactactcatggtgtgaatcgtgaattatataataaccc

SEQ ID NO: 105322 - DNA, 443 bp, Glycine max
  unsure (1)..(443): unsure at all n locations
atcttctttagcaatgggccctaacatatgattgttacatatagattctaaacttgatggtggttntnntnnaccctaccaatgaaaataatatgtgatatatctagattactccttatgatcaaggttggtatcccttaacatggtttattttaattttatgtcaccttttataaccaaatattaattaagaattgttcagttatgcaaggagataacattggtgcgataatttgcatacacttatctatatctttgtatccaagttgatagatggngaggtatacatgttatataagttcgctgtaaattcaaacgggaaaaagtatcacgcaataagacatgcatatannattgagtttgatattaaaaagtattggtgcacagccacttaaagcacgtggtaccacaaacatatgtacagtcacccctactgatgtgta

SEQ ID NO: 105323 - DNA, 341 bp, Glycine max
  unsure (1)..(341): unsure at all n locations
ttgaatttgctcataggttcaacattcaatttcgagcgtgttgatatattaccggactcaatcatacattcgagtgaaaagttattgtcgctcgaatatgctcatatgttcaacattcaatatttagcgtctcgatatgttacgggactcaatcagacatccgagtcaaaagtcatcgccggttgaatcggctcataggttcaacattcaatttcgagcgtctcgttatatacgggactcaatcagacatccgagtaatagttattgtcgctngacttggctcagacgttcaacactcaattttctagcgttcttatatattacaggactcaatcagacat

SEQ ID NO: 105324 - DNA, 496 bp, Glycine max
  unsure (1)..(496): unsure at all n locations
ccttgtactcggatgtctgattgtttcccgtaatatatcnagacgctgcgaaatgaatgttgaagctcagagcaaattcaaacgaccataactgttttctcggatgtgtgattgagtcccgcaatatatcgagacgctggaaattgaatgtttaagctctgagcacattcatacgacaataacttcttactctgatgtctgaatgagtcccgtaatatatcgagacgctcgaaatcgaatgttgaaactctgagccaattcatacgacaataacttcttactcggatgtccgattgagtgacgtaatatatcgagacgctcgaaattgaatgttgaacctctgagccaattcaaacgacanataagctttactcggatgtctgattgagtcccgacatatatcgagacgctcgaaatagaatgctgaacctctgacgcaattcagacgaacaataacttttactcggatgtctgattgagtcccgtactatatcga

SEQ ID NO: 105325 - DNA, 304 bp, Glycine max
  unsure (1)..(304): unsure at all n locations
ctgcagcaccggctccgcttccctaactgtactggaggcggttgcggtggctntatcctctatggttttctggaagtttaacatgacctccgagatggaagccatttgatctttcaaggccgatagatcgaccttcatctgttcctgcacgccctcttcattatccattttcctggatcgagtgttgtangggtgccttggtgttttcttagttatgatgaaattcctaaagaaataaacaacggtgaagtatgccaccaaacatgagtatgcaaatggatgatcggagcacttggatccaccc

SEQ ID NO: 105326 - DNA, 361 bp, Glycine max
  unsure (1)..(361): unsure at all n locations
atgggagctctcgttctagcagcctctaccttcattgngctcttttgcttgcatatntgcatgttcgatcatctcctacaagtaagtaccatctcccttcaaatgatggcttttcattgtggcatttaggtggtctagtgtcatgttctttgcaaatttcatgagataatttgtttatgaatccatgctttgattgttcgattggtgctgtaccggatgaccctatgcctacctttgatcgtactatggatgtgcatgtcatattattctccatccctcattttttacatgtntaaacatgcgcccaccaactgttctgtgaaatgcatcaatgaccattacatgtgttattgtgaaatga

SEQ ID NO: 105327 - DNA, 170 bp, Glycine max
cttgttcgactgtgacaaccaatggtgggttagaactacatctattctagcggaatacaaagagaacttgtggaattctatttctattcatttggatactttatagcaccaactaatgtgttggtccttggaggcgctaatgatacgaatgacaatgtttacaaatggta

SEQ ID NO: 105328 - DNA, 354 bp, Glycine max
ctatctatgggatgcagaatcactctcattaattcagttatatcagcctcacctatgtatttactatctatggtgggcaacatggaagcaaataagcctaactattgtgtggctggcggataatttaactctacaaccaaaatatcctactttcgtattaataagcaatcaacagacctttctatttctatgtttacacatttaaaactctaacatatcaaactaaaaatatatgacacactaacaaagattaagacaaagaaaaggagatatgaactcacctcacttggtgctggctgccatcatttcactctcacaacaaataggaatcatgtacctgcatggaagaaatat

SEQ ID NO: 105329 - DNA, 318 bp, Glycine max
  unsure (1)..(318): unsure at all n locations
gagaagtagaactttgaagtgtgtctcataagactttcattcatcanagttacaacaagtggtacacatgcttctatttatagactaggtagcttccttgagaagctttcttgagaaaacttccttgagaagcttctttgagaagacttccttgagaagctagagcttagctacacacacccctctcataactaagctcacctccttgagaagcttccttaagaaaattcctaaagaagctagagcttagcaacacacacatctctaatagctaagctcacctncttgagatgagaagctagagcttagctacacacc

SEQ ID NO: 105330 - DNA, 291 bp, Glycine max
catactaagctccctgttaattcaggtctcgatatttatacgcctgatcgttctcgtgtgatagtatgaccatagaattctcagagcttcggtgtcaattcgagcgctcgattatatacgcctgatcggaccttcagtgaaaagtatgaccatttgatttctcgagagattcattggtcaatttcgagcgtctccatatattatgtgcctgaattcgaccttccagttaaaagtattgacattttgatatctcgagagcttccgcttgtcaattgcgagcgtctctatatg

SEQ ID NO: 105331 - DNA, 455 bp, Glycine max
  unsure (1)..(455): unsure at all n locations
atgtnntacctctactttctgaatgtntccaagatttctttctttgcctcttccatttttttgttggaaactactcttggagggaatggaaggagaggaatgtgttgcttctgcaaatcagaattaccagtggaagattcacctgcacaaaaattgttaggtaaatntttgtcgttacctctttctggagtagagtgaagtttggcaggttcatttgcagatgaggaaggtgttacgggttgaggtccttgacactgctntcccgacctcaatgaaatggcactgacattnttgggaatttggacagcttgngaaagcagcttgtcataattctgggacnntgtgtgattcaatcgtgtaaccaattatctcatctgattggtaagctctgaatggaagctcttgtctcttgtngaaaactgcatgtctacatagtcatttgcctcacaagttct

SEQ ID NO: 105332 - DNA, 150 bp, Glycine max
  unsure (1)..(150): unsure at all n locations
actcacaacacatatgtataaatcatactacaaactttgctcttgttgctcgtctaaaagcaatacacanttctctatccttcgttgctcatcatggcatgattgttgatcaaaatggacataaaagcaatattctctaatggacttatc

SEQ ID NO: 105333 - DNA, 398 bp, Glycine max
  unsure (1)..(398): unsure at all n locations
cttaagtcactgcagctgcacttgttactatgattcatcaattttgatcagtattgtacttccatgaatattgatattgtatcatgcttaattatatgccattgcttattctgatcattgngtgttgngtgattatttcttccatgcaagtacatgattcctatntgttgtgagagtgaaatgatgggcagcagcaccaactgaggtgagnttatatntccctttttttgtctntatctttggtaatttgttatatagnntttaatttatatgcttgaagtttaaatggtgtaaacatagaaatagaaatgtctggtgattgcttangaattccttgctgttcatggcatctctttgacctcaaaagtgcttatatggccttgataaattctgatata

SEQ ID NO: 105334 - DNA, 350 bp, Glycine max
  unsure (1)..(350): unsure at all n locations
catctaagctgcaattttaataaagacgcagcagattggagtgacattatttattgatgatttctaattaaggggagatgttagaaataataataattataattagaaaataaaggattgtgagttaccattagaagatgaatatgagttaataagaattaagggacattattttttgttaccattatgtattgaaagggtcatgacattatgttcatttagtgtcttaattgaataattatgtaatacttatgggattgtatactgtaaaatagagcaccattgtaccaaataaagagaatcttctctaaaatctctagtgtcttctctttntctaacaaaatttacct

SEQ ID NO: 105335 - DNA, 380 bp, Glycine max
  unsure (1)..(380): unsure at all n locations
gtcacctgacgctgcagcttgaaaaatcnacgacataactttaactcgtgatgtncgattgaaccctgtaatatatcgagacgctcgatatngaaaacggaagctctaagacaagtcaaacgacaatatactttgactcggatgtccgatatagtctcgtaatatatcgacacgctcgtaattgaaatcnnaaggtctgagcatattcaaacgacaataacttttgacacggatgtccgattgagtcccataatatatcgagacgctcgtatattgaaaatgaagctctgagcaaaatcgaacgacaataacgtttaactcggatgtcctattgagccctgatatatatcgagacgctcaaatatgaaaacggaagctct

SEQ ID NO: 105336 - DNA, 477 bp, Glycine max
  unsure (1)..(477): unsure at all n locations
gcgtctcgattatatgagactaatcttcgtttgattacaaattatngncgntggaatnttctcagtgctttcgtttaaattacgagatctttcgacatcaagtanaagttattgtcgtttcaatntgcttaaacccttctgtattcaattatgagcgtctcgatatattacgggattcattcggtcatctgagtaaaaagttattgtcgtttgaatttgctcagagcctatgttctgaatttcgagcatgtcgatatactactcggatgtctcaggactcaatcggacantccgagtaatgttattgttgttgaattgctaccgcatccgtttcaaatacgtgcgtctcgatctctacngggccaatgaacatcgagtaaaagtattgccgttgaattgtcagactttgtttcaattcagtgttaattatacggaccttggacatcagtaaagtatgcgttgattctcaacattgtt

SEQ ID NO: 105337 - DNA, 471 bp, Glycine max
  unsure (1)..(471): unsure at all n locations
ngcnttagctcactgggtgggagcgtgactatgatgtttctgatttgcttcanttccacaaacgctccaccgtgcacctaatttctctcccaagggatttcaacaagttcaggtccatgcacatgtatgacatagttgtcaagaacaagaactacttcgaagttatggatatgtaataaggatttgtggaaaaaactatgcatggcccanattgggcagggtatgtataaccttcttgatgtgtctcactcgatgtgtgtcaaccctacaaaatntaattcttgggagagcaattttctctcttaactttttcttctgattcttatatctacatgtaatggtggtgtgattctgtatatgtggccgcggcgggtgggtgtctgtgtctaaatgatcgggacattaatctgtgtaattcgtatatgaagttgtggcatgatatatatgtatgcatataagtacggtctgatc

SEQ ID NO: 105338 - DNA, 367 bp, Glycine max
  unsure (1)..(367): unsure at all n locations
ttcttttcatattcatacagattgttcacattcatgatagcaacacgcctaaagggtaccttcacatgaagatgcaaatattgtaataattctttaaacctgttatgttcaacaaaagagaatggaagatcatgctcaataatcatcatagatatcatctcatataccacactttgatctatttgtttatttcttaatctcccagcatgatcgagaataatatctccaacatcactattagaacacgtcttcaaatatacatcacatntcctcatatgacgttgtagggtgaagctcattctattgcaccgccacataatctttcaacaatatttgctttactctcactttctcacactatgcatac

SEQ ID NO: 105339 - DNA, 428 bp, Glycine max
  unsure (1)..(428): unsure at all n locations
tgaagcaagacttatagcacatntattatcacaaaataacatcatagagggcacatgaacttacaagtgaagaagtaacttgcttaaccaaacacattcactagtaacagaagacaagacacgatattcaacttcagtggatgattttgacacagtgggttgnttcttataatgccaagaaagaagggttgttcccacaaagacacnacagccagaagtggatcttctggtatcaacacaactggcccaatcatcatccgcaaaggcagtgagggtgagagagtatgagcatggaaaaacaaccttgtcacgagcaaattgattattgtgaaatgatgacaacatgtngtgaagactcttgtgcttcataactgactatcgattcacaccaggtgtatatgcctgaatggtcaataacatctacaata

SEQ ID NO: 105340 - DNA, 487 bp, Glycine max
  unsure (1)..(487): unsure at all n locations
cctctcagtcacctgccgctgcagcttaacatcagaaccacttcagagtgctggaactatcttacatggtcttgatggggcctatgcaagntgaaagccttggaggaaagaggtatgcctatgttgttgtggatgatctctccagaattacctgggtcaactttatcagagaagagtcagacaccttcgaagtattcaaggagttgagtctaagacttcaaagagaaaaagactgtgtcatcaagagaatcaggagtgaccatggcagagagtttgaanacagcaagtgtactgaatactgcacatctgaaggcatcactcataagttctctgcagccattacaccacaacaaaatggcatagttganaaganaaacangactttgcatgaagctgctatggtcatgcttcatgccaaagaactatcctataatctctgtgctgaagccatgaacacagcatgcttcattctcaacagagtcacact

SEQ ID NO: 105341 - DNA, 409 bp, Glycine max
  unsure (1)..(409): unsure at all n locations
ntatctatatataaattcagaaattntaaagtacccactttcactttttcttcaattaattaagcaacttacttccttcccaaacctncttgaactgatgagaaggctcattgctcagcttgtctttgtaagcctcgtatttcactatntcccttgtgggttctgaattcaaatntcactttagttaatgaatttgttgttacgcatacgttgtcatntagtaataatttcttctgttgccgccacggattcatctttgtggtgaaagtgagctagagagagatattgntgtattcactcatgcgttgatggaagactattttttattttaactcgttagcaatatatggttccgttcagaagaaagccggagtagtattaattcatataattctggntattattctga

SEQ ID NO: 105342 - DNA, 336 bp, Glycine max
  unsure (1)..(336): unsure at all n locations
ctaagctacatcanataaaaagatgtcatatactaacagaanaataatgttaagcattaagattaggattgcctctatattaattaacaacatgatatacatacagtgaaatctatttctatactaatggatatccataacatgagatgatcatgatgctttaacatatacttaattctacttgttgaattgaagtattccaagactgaaaaaacaagctgttttcattgcttaaattattttattataatcttgtgataaacattattgtatagattaaacatgctacaattgcttggtatcaagagaagttagatctgaaaactgaatactgca

SEQ ID NO: 105343 - DNA, 391 bp, Glycine max
tatttgagggaacctataaccttcattcaaattatataaattctcacaagtggatcaacccagcaatatgactcgtttttcaaattctactactagaaaagcagattaacattggcgcattaacattgattttctacaaaaccgatgttaacataaatgcggtgacatatattgtaataatgtgtatccgttacatcagtttgaagaaaaaaccgatgtttacgtatgatcagctaacatcgtgttgttgaataaaatcgatgttaacgttcacatcaatttgttaacatcgggtctttattgaagaccgatgttgactttacatttaaatatatttgacgcacctatttgctatgcttcttctttccgtgtccctcatctccactctctt

SEQ ID NO: 105344 - DNA, 495 bp, Glycine max
  unsure (1)..(495): unsure at all n locations
tgacgcatgcaagcttgaaagtttagttttcaccttctctctaagttcatctgctggcttagcgagcgtccgctaagcgcaacactcatgggctatgcctgaggaagactctgaaagaagatgagctatacaggttcgctnagcgcactgcttcatctcactaagcgcaccgctntagtccatcaaagcgagaaagacacgcgctaagccgacaaaaagaacatacactctgagggagttcccggagagatntgcaaanagataggatgaggttgcatgaattatcaccttctttaaaatgacagtcaatctgtgtgttcctaataaaatcaaatcaaaatcanaatcacataatatggaaagaatgtatgaacattgtacaacttccattacattgcatgggtcatataaagtccgcatttacccaaaattcacaactaagggtgcatgcatgtgcatccctctaaatcatgtttactacatagaattcctaca

SEQ ID NO: 105345 - DNA, 354 bp, Glycine max
  unsure (1)..(354): unsure at all n locations
atccctcttggtggactanacttagcttatatagcttatgaaagtntagactaatntagcctaagctntgtcctcagatccctcttgttgtactagacttagactaaacaacattattgtgatagcatacataaaaccaaaacttcatccacagatccctcttgtaagactaagtttcaattctgcttcattcaagttctaaggcaataatacatttcccaatgctaaattcacctaactatgcacacaaatgggtgatcagaccaagagcatancgatattaagcactgaaagaagcattgaatacaagaaacacaatcaatagatattaaaataattacatcagctgttcat

SEQ ID NO: 105346 - DNA, 147 bp, Glycine max
  unsure (1)..(147): unsure at all n locations
cttcattnttctccatgtatctnctcacatgtcttgtgctgaatgttgtaacatgaatttttagaatttccaccgattaaacttgctatagaagctagatttgattttctatggttcaaaattcttgttcttgttcttaaaccatga

SEQ ID NO: 105347 - DNA, 276 bp, Glycine max
  unsure (1)..(276): unsure at all n locations
tactaagctcgccgctggactgcccataactgccctactctttagactggtggtccctaagctcttgaccttgacttgatagaacctcttntaagtgaaggcatttgactngatcccactgtttactaaagtgaacaaaaataggtgcgaattaaaactccgacatctatcatgggtggaatggatgaatgcatgaagaaatgcatattacacagatgcaatttatgaataccggagcccgagaaattgtcttcttcttagatacaacgtcttggg

SEQ ID NO: 105348 - DNA, 241 bp, Glycine max
  unsure (1)..(241): unsure at all n locations
atcctctgagtcacctgccgctgcagcttaatttnttggaataaatatataataaatatgtcttatattgtnaaaattggtcaaatcgtgtctaatagaattaatgattgatctaatatgtattnaaaaatactcaatacgaaaagattcttcatgtgaatgtgtgatctcattattaatactttcatcanaaaatgagattttcaatgaatgttagatttttcacccaaatttagctcta

SEQ ID NO: 105349 - DNA, 158 bp, Glycine max
tatgttcattggagaatgtttttttgcctgctgagatgattttgctgctgagttattatatgctaatgtgctattttcaggattaaaagttcaatgttctgctatacaacaaaaaaagaagtgaataatgagcttgttgagacttaacggctgagact

SEQ ID NO: 105350 - DNA, 400 bp, Glycine max
  unsure (1)..(400): unsure at all n locations
tgcagcttgctatgaaatctgccttaaacaagcttttgctttttcatctgaagncngagagctctaggcagantagtntgctatatctggaagtggggctgaagtaaaagatgcatggatgccagctattggtgcaaaggaagagggaacatcanttgctctgagcttggtcttcctttcctctggaaaattaactgtttggtcattcgcattccaacagttccttatgatataagttaagtcaatgaccgaccttatgttttcatatgagataagagcatcatatccaactcccctcaatctacacaagggtgtgattaaagctgggaagcctaagcgagaagtgttagactgagccatcatggtcatttgtctagagatcaaactgccaatggttatg

SEQ ID NO: 105351 - DNA, 411 bp, Glycine max
  unsure (1)..(411): unsure at all n locations
ttgcagctaatgaacaagtttcttatctatttgtccttcannatttactggttttttttcttatatgtaatttacaaaacaaaagttgaaaggaaagatattgacctgatagacgaggaagaagcacagattggtggtgatcgttctagtgcaacctcgaataaagctgagatttataacgaggaggcacggaagataacacagaagcataaaccaaatagggtggggagtgtcaatgctgatgcagaagcctttggtgatcactcgaaaattctgattgctntatgcattctgaagctaaagcactagaacatacgaagaatagagatacaggccatcaaagtgtggcattggacaatgagacagggagnnntcactatgtgaagatgggagattcagctaaagttgtga

SEQ ID NO: 105352 - DNA, 268 bp, Glycine max
gaagcatataataacctagactagaactatgttatgagacatcataacgaatgatacttataccagaaatttaactatacaattatctacaaattgtgacatttttgcaataagattttataaatatagcatacgttttagatttgccacctgcttaagaacaaatgatcctatgacttaatgttattatacatgataatacatcagttctattacaaaaattattattaatccttcaacttacaattgtccaatatatacaattaca

SEQ ID NO: 105353 - DNA, 474 bp, Glycine max
  unsure (1)..(474): unsure at all n locations
tacccatcacatgtggtactaggtggcggtctgtcgatggtgcacaacaagttntccacatccacaatgctcgcataaacccaccatcccctggtgcccacctccaactgagctcacgtactcccacgtagcccatatcctcgtttctctcaacaccgggtccccatcaatcctcccaagcttccgcaacatccaagcaaaacaacattcatacagcacaagctatcacagccaagcaaaacagagcaaaggcagaaactctgctcaacacatcaaccaaaatcacagcttttctcacttaaagaccacagtaacaattccttcgaatcaaattcgtaaccgttggatcgactccanaantttactggaagtctatagtgcataagcctacattgtgaaccgttggatctactagcaaacattcagaactcattctgcactactcttttcacagccaaacacacacaaacattt

SEQ ID NO: 105354 - DNA, 365 bp, Glycine max
  unsure (1)..(365): unsure at all n locations
tgggatgagctgnggtaagccaaaagacggcttgccttgtaccgggttacaaactcccaaaagcagtacgaaacccctggttttttcatgctatatgacaagcgtgtctgcaagtgatgagtggaaagagctcatatctggccattgagagatttccctgcttttgcattgatcactgaatgattggcaaaaataatgtgggctgtattacgggagaccgtggcatcaaatacttaaggatctaattatatctcaaaattatgtgaagactgctaaaccttatttgtaaactaaaagtaccgtgcttcgatctgtgaaaagggggtagtcaagacgttgaactcagggacttgtcagtactgttc

SEQ ID NO: 105355 - DNA, 403 bp, Glycine max
  unsure (1)..(403): unsure at all n locations
ctaagcntctgatgatccgatgtgccatcatttcttctatattctagaccctttttgccctatttaattatggattggtcttaattgtcaattaattacgcagttttattatttgggcccattaagctaatttgatggttttaatctaatttcaagaattaatgaagcattgggcttgaatctagcattgggcttgaatctagaattgggcttggacttgaagagggcagactaatttattctatataaatagatcttatcttatctagatattatttagatttgatctcatctagatattatctcatctagatcttatcttatcttatcttatctagaattgatgtgattttacttatgggcttggattaaaacatatctgtagcttgggggctgaaaaact

SEQ ID NO: 105356 - DNA, 335 bp, Glycine max
  unsure (1)..(335): unsure at all n locations
agagaaaaggcagttaatattaataatagcataatatatacatgagtnaatgtacctgctacagcataagcaccagtcaacatagcagaagcatggggagccttatcaataccacctttgcctttngctgcaagcaaattaaattacttattccaaccatggatgctatttttcatgccaagagcatgtgtcaatcaataatttaagtaagacacacccacatctaacaataatcttaatacaatatgttttgtaatgatcacagaacagatatgtgtgctcttccacctataatatctgaaattatgatagaagtgcccatcatatagccatat

SEQ ID NO: 105357 - DNA, 301 bp, Glycine max
  unsure (1)..(301): unsure at all n locations
tcagacttgcatatatatntttgtgctacaacaaaacggcgtgcttgtgctaatatctctgagctaacatgatcatgcacttcacataggtttcttttatagatttccttgattcgagctgagaagatggcaccaccactcaagcatctggctatatattggatgatcttgttgagggtgcgagataacaacatctctctatatcacggtgggcgatttatcatctctttaagcatcacgtctgagacatttaacataatggtatccaacagacagccgctgtatgcactggctattgagc

SEQ ID NO: 105358 - DNA, 376 bp, Glycine max
  unsure (1)..(376): unsure at all n locations
aatatgtgatattcttggacaaataaaaagaatgaagcgaacctgtgaagttattggaagacaagtctagataaacaagttggctgagttctgagaatgaactatgaagtgtaccattaaattggcagtaagatagatcaattgcagataactgcttcatattggaaatagcacctggaagctctcctgagaaatttgtatagctaagatncaggtcatgaatagaaccatgttgtgggaagtgtggcanagaacctccaagatcttggttgtctgatgatgtccacgaactacaacgtgatatttgtagatatctttcggaagataccactcagccacatcttctaactctagtgtgactaattggaaaattaca

SEQ ID NO: 105359 - DNA, 479 bp, Glycine max
  unsure (1)..(479): unsure at all n locations
gctccttgatgtgtaaaaaacaacctcctgagaacgaacttgtatctatacttggagcacttctattttagtgttgcatgtccttattgcttggagttagatattgaagaaaattataccacaattggagcaagcatgaacaagaaataagtgttcatacaaaggacaacaatgtaattttgaaagctattagatctgatatgatataatctatctattanaaaactaatattttagctaatggttaaaactatgtggtgcactaatgtatccaaaaatcttatgtgcatngtagaaagtagaaatgtccaagagtttgaccatccattcaagntacaattttacaagatgcagttagaatgatataaaaatntgattaagagaatagtggataacatctgggcataggcattgagttngatacctgtcgttagaacaaccataatacaccgaattaaaatacacatatgaacatcata

SEQ ID NO: 105360 - DNA, 109 bp, Glycine max
  unsure (1)..(109): unsure at all n locations
acgaatgaagaacgtcgaagaacggtcgtacaccttcgcgaaattcctcatgggaaacgttactganacgtttcggaagcgcctcggcttagattntcttcacggaaac

SEQ ID NO: 105361 - DNA, 279 bp, Glycine max
tatttctatgagggactctcctcatggagaggagtgtgattgatgctgccactggtggagctcttggtgatatgacccttggtgaggctaggaatctgattgagaagatgactactcgctcctatcaattcaatgcattaaatgatgctatttttcttatatgaagtcgtgatgtggccacagattcatactcatctactgaaaataaaaagcttgaacgagtactcgatgccttggtaatcttttacgtcttctgtcatgaatcagaaatctacacct

SEQ ID NO: 105362 - DNA, 455 bp, Glycine max
  unsure (1)..(455): unsure at all n locations
gtcacctgacgcatgcaagctctgcttgcatcgcctcattatgcatttaacagatgtatggtcatatcaatanacatggggtatattgaatatggataatgaaaactaacattatcttgcaatacaaacattaatttatgatattagagatcctacatcgacttatgataatgtcaaatcacagtatgttagttgagggcatcttttctttgtattgttaagtatagcccccatcaatattctaaaatatggtctcagactatcatataatntcttgatcattgtagcatttacttcgataccatgaggatgcatatatggatatgaagagtgcttaatccaatattcctattcattccgatgtcctggaattctatcttatatatacctgcttggagtgtgaagaaaagtnctttgacacttaatagataactaatctctttggcgagtatatg

SEQ ID NO: 105363 - DNA, 419 bp, Glycine max
  unsure (1)..(419): unsure at all n locations
gaatcatgacacataaagagaactcganactttatggaattcggcagcgtcttgtcaagagctggtctcaaatgatggtatcactctaataccatgtcgaaattatggggttctaagttttgaatgaggaagagagatcaaagaggatgaaacactaattgctatattacaatatgtcgctgtgttttatacaacctatagcactaacccttctttatactaatcataatgctgactaattaaataaacaaatcatgattagtaaatatggttactaatcctaagagatatgcaggacatcacgaaactaatcctataagataatctacgatatgactagatattcttggatgtgtccatatattctaacagtcgtatgctaggtaaaattggtctcttaaatgacctacatcactata

SEQ ID NO: 105364 - DNA, 347 bp, Glycine max
  unsure (1)..(347): unsure at all n locations
atgaatacccttacgctcggcagatatataaagtgacattttatgattccattttctagtaccgtggccaaaatgaactcctgcttccatcatctcttgcaagattatgttccaatatctttatgtcatttatatgtatccncacactgttctttcatttcagaatcgaaattctataatatttttgaaatgaaagaaagagacccggtatactgaaatagaaataagtgttccaaaggaaccttctcttctaccgaagattggccgttgataaatgatcgggccatcttntctatttaatatttaatatgaatattctcattattatctttcttttattatacaaa

SEQ ID NO: 105365 - DNA, 407 bp, Glycine max
gagctatatatcctcgtgtaattctggtcattgaataatcgagactttgatgaataactatttgatgtttcaactattcttttcttcttactagtctattaataacaaaaatggattcttccaatgtataaaaaataaattccaatggctcttgctactataacctccccacaacgaatgtatatatatactgtgttgctaaatattcaacctctaaataataaattgtattgaactagatatcaaaaacatgtgagtcatataagtaatttgacatttataaaatgggtggtccatcagtctatgatttttagaacggcaagtcttctatcaccgagcttcttctttcatttattattaatatgtatgttactgtcagagcactcttggctacctccatattatta

SEQ ID NO: 105366 - DNA, 326 bp, Glycine max
  unsure (1)..(326): unsure at all n locations
acctttctgtcgctcattagtatagactntnggaaaactcaacacagtagtatctgtggtgcgcttattaataagatgatgtaaattcattggatcaagtgattaataagaatatgacttatgattattgctatattcaataaagttgggtggagatatattagcaaaattaaagttaattataatctgacagctatatgaaatgtgaaggaattaanagacaacttatattggaccacacaatattatctataatataacttatcaaacaatattatctctgttggtaatgtnntgatacggaaagatcatcaaattgtaatgtc

SEQ ID NO: 105367 - DNA, 305 bp, Glycine max
  unsure (1)..(305): unsure at all n locations
cacaagagacactctttctcttgctcagttaaagtcctatgaacaacaaatatctctctctcatcgaatatataactgtgtatgtcagactgcaacttgacactactaatgcaatcccgacgctcggcgtgaattaaactatgtactgagatacacaccttattttctacgttcaatttactactatactacaatgacgatattcagagaggattattatatataaatgagcagtggaactaatntcaatcacgacaaccaagtcttactccactaattaagtcacttacatggatatggtcaca

SEQ ID NO: 105368 - DNA, 514 bp, Glycine max
  unsure (1)..(514): unsure at all n locations
gcacgcagagactaacgtcgtcttctgcgctcttcgtcaatcgcggtcgacaagcccgttgacacgcggagatntacgtcatcttccgcgctcacaagatctgtcatactgactnttgagtcatgctgacgggcggagatacccgagtggttatccgtattaaaccttttgctatctgtaagacgaanagcctgatagcacgcagagactaacgtcgtctcctgcgcccttcgtcaatcgcggccgacaagcccgttgacacgcggagaattacgtcatcttccgcgctcacaagatctgtcatactgacttttgagtcacgctgacgggcagagatacccgagtcgttatccgtattaaaccttttgctatctgtaagacgaanagcctgatagcacgcagagactaacgtcgtctcttgcgcncttcgtcaatcgcgggcgacaagcccgtngacacgcggagaattacgtcatcttccgcgctcacaagatctgtcatactgacttttgag

SEQ ID NO: 105369 - DNA, 423 bp, Glycine max
  unsure (1)..(423): unsure at all n locations
aagcttcatgcccacnaggactccacttcataagtggtggtgcatctctctcacgacagagcactccgaagtagcatttcgtgcttccaattgaagcattcgagaaaatcacaatctgganaattggcattggcaacatgcccgtagagtatcgcgggttctccttcatgaactatatcattttctcccttttctaattattgcaatgttgttcatgttatcatatagtattagtacttattttaataattaaaagatgaaaactagtttaataatgtgactaagattatatactacaagtttatattctatctaaataaactattntgaanaatctcaatgatggctcgcaagaacctcgagaagcgaaaggctgcagctaagggtaatttctctctctgtctttttttaatacctcacatt

SEQ ID NO: 105370 - DNA, 545 bp, Glycine max
  unsure (1)..(545): unsure at all n locations
cctncattctggataacctgtccagacanttgtacacaattagtcaacaagacagatcttcataacttagtatgtatgtagtacataccaatttcaagaaaagggattatgcacattacttggagattcattgtatgtaataaaaatgaactataaaaatgacacgatagaatgattggtagcacctttaaaatgagaatgtgcattccatcaaatgaagaatgaccattccctccataaaggagagcatgtctaaaatactattctctngggaatcattctaattatattntttacctcttactcttttcagaccaaaaaataccctaacatcacaaaccgcaaatctcaaatcaactatacttccacaatgttctaaagtagagctctcctggtaagtatagcagtattgaacctaaccaggcatctaagtggttagtatgttagcttgtgcagatatgtatccagtgttcacattaggtgctagacacgtatactgagtcagcacagctgttgtactgaattaactgtactgatctgtccct

SEQ ID NO: 105371 - DNA, 492 bp, Glycine max
  unsure (1)..(492): unsure at all n locations
cttcatctaagctacctactaattaactntctgctntcactagctnttcaacttaattttgtcaaatatgcatngntaccttgtcaaagaatacaaattctatcaaataaaataaactctgatgccaaatattactcgtgaataaaaactaacagtgtgtctggatgaggaaatttaaaattctaaagaattntatattctgagaatctcaaatgcttcaatataaattccttcatttctaaaatattgtggttggataaaaaattagatatcttcatttttaaaactttgtggttggataaagaaattaaatttcttcattttcaaaattgtgtgtttgaataaggaaattgaatttcttcatgtttaaaatttcttattctgataaaataatcaaatgcattctctgttaaaatttatatctatttaggtgaactgctcttaaataacaaaaagagaacctgagtcagatcctttccttcttcattcatt

SEQ ID NO: 105372 - DNA, 296 bp, Glycine max
  unsure (1)..(296): unsure at all n locations
accgagtcatggcatgccatataactgcatccctngtcctctcctcaaagaagccggtgctctctggctctgacaagtaaacccacccaactaacgctatctaagtataatataacatannaaatatatatgagagatgaaaatcaaatggtttattaaacagcgtntattattattaatattatcatacgaaagggatgaagtggtccttttgtgaatctcttcttctttcattccatattggatacactactactactactacttgcagcagcagcagcagcaagctcttactg

SEQ ID NO: 105373 - DNA, 373 bp, Glycine max
  unsure (1)..(373): unsure at all n locations
ctaagctcgtacanatgtggtaaacncgatagaaactaaaggtagttcgagttgtgtggtttgtccanataaacatggctcggnggcagccaacgaaagctcgcaatgacgatggagaccaatgtgacgctcgccggatatggtcacgcattgtgtgcgtgaacttcatgcgctctggccctgcgtgaggctgcgtgcagtggtgtttttgagttggctgcacatgtggacgacatggtggtctttggcgatgacgactggtactgctcacccgtgaaaaagcagaaaggtccgctggggacaccttgaggcataaggagagaagataagtgtgatgcttgctggagatgtgtcatgcgtcgtgtgcatgaac

SEQ ID NO: 105374 - DNA, 338 bp, Glycine max
  unsure (1)..(338): unsure at all n locations
cttctctctctttcgaatnttcttanaaaaattgtttccgtgaagaaaatccaagccgaggcgcttccgtaacgtttccgtaacattttcgtgagtgaatttgcgaaggttttcgaccgttcttcgacgttcttcattcgttcttcagtcttcaacgggtaagtacctcaaaccaagcctttcaattcattctatgtacccgtggtgggccacacttggtttcatgtatttatattctcagttcatttattttttatacccnctttttgacgtgcttaagccattttatttaagtcatttctcgcttaactaaagataaaataaatttcaccgatcat

SEQ ID NO: 105375 - DNA, 394 bp, Glycine max
  unsure (1)..(394): unsure at all n locations
aatccgttcanaggtccaacaccttaatggtctcttttcactttgtcggntaaaatgaacatttcataagtctaactgtgtaatcgattactagaaacctgtaatcgattaccagtgaacaatttcagacaaagatatttgaaaagacacatctcttcaaatcattttgaaaaggaacgaacggcctatatatatgtgtttgttttcacaatgcaagagagagatattccaagagaaattcattgtcaaatgctctctcaacaactcttgtgcaaacacttgcatatctattgagagttcatctaagaatttcaaattgtagtatacactctaaaggatggcaatgtttctgttcttctcataaagtcaactgttatcaagagactggttgtct

SEQ ID NO: 105376 - DNA, 419 bp, Glycine max
  unsure (1)..(419): unsure at all n locations
gttcaccctcctanaaatcagaccacttgaattagtgaaatatattggttccgtgaagaaaatccaagccgaggcgcttccgtaacgtttccatgggtgatttcgcgaagatcattaaccgttctttaacgttcttcgatcgttcttcatcgttcttcggtcttcaacctgtgagtttcctgagatctaactattcaattcattctatcgtccttaggtggtctttatcttgttcacgtgctgttattttcatttcatttcgtttcataccccattgtacgtgcttagacattgcttaatcattctcttcctaatcaaatatatattaatgtccaccgacattgaattgatatcgcaattctgtaaatgatcgacgtcggcggcctacacgtggaccaaagagtaatatattatattaa

SEQ ID NO: 105377 - DNA, 414 bp, Glycine max
  unsure (1)..(414): unsure at all n locations
cacaacaactaacaagtattattattgtaatatatatnggntntaaggtttacacacgaatggataataataattgtttgtgttttacaaatgcagggttaagtttgcacattgggccttaaagagactactaccgaatagccttggagacctatgtagtgtttgagaagccatgaacaatatgatcactctacaacatattgaaattaacgcatcgtttgagacaactacacatgttggtgggcatgnttttaaagttaccttatacaagaaactatttggcatggtatcaaggtatgtgttaaaccaaattgtgctgagtttgccatgtaaatatgctacattgatagtctcatataatatatactgaaatactcacgcttcctgtcacgtactatctgattgtcttgttct

SEQ ID NO: 105378 - DNA, 405 bp, Glycine max
  unsure (1)..(405): unsure at all n locations
agcttgattatgacaatgtcgataccatatcaaagctactataggtaagggacaacggtctcttacaaatacctatcacatagagacatacacatttaaattattataacacattctattacataagccctacacaaacatgatgatgatgtttttacttgaacaaaatgattgtcatacacataaccgatacatataacgcgatgataaaataatctcttggtggttgactnctaagaagaaaaaacatcatgctttgttggagagaaagagaaacaaggatgaacatatacctcgatgcaatcacatattccatgtcggctataatcatcaacttattcatcgtaacatgcaagtatcagcacaactacatttatataaagcagattaattcttcaaatgtac

SEQ ID NO: 105379 - DNA, 412 bp, Glycine max
  unsure (1)..(412): unsure at all n locations
tggagctgacccatcaactgccctaactcttttagactgttgatgcctaggctctngaccttgacttgatagaacctctntntaagtgaaggcattagacttgatcccatcgtttactaaagcgaacaaaaattggtgcgaatcanaactccaacatctatcatgggtggaatggatgaatgcatgaagaaatgcatatgacacagatgcaatttatgaatacgggagcccgggaaattgtctcatttntagatacaacgtcttgtggtagcatagtgcccaacatatgtatttaagaaggtgacacggaccctccgttggtttgtaaagagaggggatctagacagaatccgtgtgtgacgcatatgcganaggcgcaacacgggaatgtacatagtatgataatattcac

SEQ ID NO: 105380 - DNA, 266 bp, Glycine max
  unsure (1)..(266): unsure at all n locations
ctcttanagaanaaagtccaagctatgtcttgatgatgagataagttccaatgaaaaagctatccttcttaagaactttcagaagttggaaaacaaatganaaatctgcaaaacggtatgaaggagctgaatgaacttcataatcataaaaaagaaaaagatatgatcattggagagaatgtgcacaagcacaccaagattatgaagacctcaaaatgaggaaacataatctttgggtggaatgtgaagaacataagaaatatgtg

SEQ ID NO: 105381 - DNA, 382 bp, Glycine max
  unsure (1)..(382): unsure at all n locations
agcttctaaggaagctacctagtctatatatatanacatgtgtnacactcgttgtaactttgatgaatgagagtctngtgagacacaactcaaagntcaacttctctccctctttcttccttcaattatgtgctcccccctctctctgtctatccctatttcttttcctccattgaagcatcctctccaagcttcttatccaaggctcatcttggtggtgaagctccttcttccatggcttattcactagtggatggcgccgcctcttacctcttctcctttgggttncgctgcatctncatggtggaaaatcaccactaaaggacctcactgaagctcaaagatccagcctccatagaagctccacatgcaagcttccatg

SEQ ID NO: 105382 - DNA, 452 bp, Glycine max
  unsure (1)..(452): unsure at all n locations
taatatgaagatcttagatagctctcccaaagtgtatgaactcttaacgganactattcaagaacgtagtattaaagtaggatctctgcagtttcgtatgtgtgaattacccctntgtgttgttttctttccgtttcatgcatacacatctgcatcataccgtcacacatgcgttgtatgtgggtctcgtcttttgtcatgggaagccgaaagattcatatcgtcttcttaactgcacacatggnggattgtgcccccaaatgcgcaagtaaagaaagatgatattccgggctctcgtgtctgtaaatgcattcatatcatgcaccgcataaacatctcttcagcatcataatgaacatatcgctcctgcattcgtccgttatcacattcncattttgcatgagtcattgcatcatcatgcatatgcgttcaacatactntcttgtctacat

SEQ ID NO: 105383 - DNA, 431 bp, Glycine max
  unsure (1)..(431): unsure at all n locations
agcttctcanatccagtcatggaaagacttggtcacttgtctcattatgcnataccaatacaacacggatatggctcctgatcganaccaacttcatagcatgaccaagcgggaacatgagtccattaaagaatatgctcaaaggtggagagacctagcggcccaagtcgtcccgtcgatgactgaaagggaaatgatcacgactatggtagatacgttgcctacgttctactatgagaagctgataggatatatgccggctaactttgcagacctcgtcttnccggagaaagaatcgagtccggactgagaaaaggcaagttngaatatgcctncaacgttgcctctaacaataattgaagagccctagtggtgggcacacgtgaaaatgaaggagatacccacgcggtcaccaccgccccgacgtggat

SEQ ID NO: 105384 - DNA, 356 bp, Glycine max
  unsure (1)..(356): unsure at all n locations
tctnctatgctgcctctacatacataaaacagtcccaccatcccaattgtgcaaaaccatattcatatatcattgnggaatatcaccgagcacttggtgggcacacgtttggacatatattgcaagagaatgggggcaacgtggcatgccccattgcttcacaatacaacataagcctaaagccttctcattcaaatcctcaactcaagatatcaagcataaaaacaaaacagaactgccccacaaatataagcatgttctcacaatttaaagcaccaaaagatgaagaaaatactccaatgggaagcataacactcaaggattgaatacttacttcgctggagtgagtagaaaca

SEQ ID NO: 105385 - DNA, 175 bp, Glycine max
ttaatgctaaacattaaagacctatacttcaccctttgtgcaccatttgaaggaccccatctttcaaataatacagacatcactgtcacagcaacaccgatgggatcagaatcattgactacagcttctagatctacatcagcctctctagtgaccttggacaaaacctcatgga

SEQ ID NO: 105386 - DNA, 361 bp, Glycine max
  unsure (1)..(361): unsure at all n locations
agcnttctgagatgcctttcagtaatttcactcgactcttttggtaatccacaatctcattagagacatcaacatttaagtagtcaatgaatctagatgcaagtacaacataagtgtcacaacgtgggccacgatgggatgacaaatagataacaaaagatgtcttccacaaaggaagaccgacggagtcgccaccaacgtttatctaaggaaaaaacanggaaaacaaanaacgataaggaatattctatagtgtaagaaaaaggattcgggagccgtttatgcatggnggaatgtattatcactccacacgcncgccatgaagacgaacaatcttaatcgagtgtgttaaaaataaagt

SEQ ID NO: 105387 - DNA, 316 bp, Glycine max
  unsure (1)..(316): unsure at all n locations
aaacgttcagtaactgctggttatcgaatacttaatatgtgtaatcgattacacaatgcagnatttgaattcacatttaatagctggtgtaataattntggcactggtatcgattacatcctctggtaatcgattaccagagagtaaatctcttgagaaagacatttcttaacttaaatttcttggccaaccttgtgctacttcaattggaatacccttcctatctaatgtaatactgctaagactctagagaactgactgatcatccatctngaatatctttgatttctttgtcttgaataaaactttgagaaac

SEQ ID NO: 105388 - DNA, 297 bp, Glycine max
  unsure (1)..(297): unsure at all n locations
atcctcttagtcacctgcagctgcagcttctaccaatggcttccttgattatccttgatccctttgaccttgttcttttcttgttgaagctactacagccttaatgaaaaaccatgatataccatattcttaaggaatttggagctttggaatnngtttgggaataagtgtggcggggttttgtttcattggaataacttgtttgttggctatgcttcatgatgtattttgggccatacttgatgtacattgtatattggttaaatgttggacatgctgaatgaaatgtngtttctc

SEQ ID NO: 105389 - DNA, 378 bp, Glycine max
  unsure (1)..(378): unsure at all n locations
tggagcttacaccatgtggtatcaagagcatcttcatctaggtgatgttctcttgcttcctctatctntttggtcggcgaattctctttaattccttgttcttcatcttattctccatgtatatcctccattttcttgtggtttggtgctgtttagagtagattcaaataataaataaaccgactaaatcttagatctatacttgntcttgcatttctatggttcaaattttgtagatctactcttgaatcatgtctttgtgttgaatttagttctatcatttttcatcataatattcatgtgctgaaccttagatctaaatattcttccagaatattgattataacaaaaacacacatctaagtgtaaatcacttaa

SEQ ID NO: 105390 - DNA, 426 bp, Glycine max
  unsure (1)..(426): unsure at all n locations
cgctcgtgaagcttgtatggagaccacagctctgagctgcaaagatgttctttctatggtgcattttcaccatcgagatgcagcggaagataaatgagaatgagtgagatatggcggcatgcactagggaataagccatggaagaaggagcttcgccaccaataatgtgccttggataataagctacgagaggatgcttctctggaggaaaagatagaccgagagagaatgagagaacgcggagcatgagattgaatgaggactatgtgatgagaagttgaactttgagttgtgtatcacaagactctcattcatcacagttacaacaaagtgttacacatacttctatttatagactacgtagcttccttgagaagctntcttgagaccactctctatagaagctttcttgagagaacattcttg

SEQ ID NO: 105391 - DNA, 441 bp, Glycine max
  unsure (1)..(441): unsure at all n locations
gctatctggctcttggcactggcaagtaaagatccactatgaaataatagttcagtattagatacaaatntaggaaggagtaatttaaggtatagagtgttatccagtgcatgttggatatgacanaattcttataacatttgtaaaaatcacatagatccattctcaacattgacttgtgtgttcanataaggaatacaaagtgaatactagtaaataccactaaacaataaagccaagactcatatcatttcatgtattccacatgattcaaatttatgaggtgtgtataaagagacatttaatccataccttcaatcttggattcttggaagtaacgccatacataccacattgtatagaagccatagtatatgcttactanatatagtgtaggagtagaatagccacatatccanggtattggataaataccttgga

SEQ ID NO: 105392 - DNA, 379 bp, Glycine max
  unsure (1)..(379): unsure at all n locations
cctatttgaatctcctatgttgtcctacatatattttacagncccaccatcctaantttataaaatcagattcatacgtcattgtggcatttcaccgagcactcggtgggcgcatatttagacatatattgcaagagaatgggggcaatgtggcatgccccattgcttcagaatacaccataggcctaaagccttctcacacaaatccttatctcaacaaatcaagcataaaaagcaacccagaactaacccacaagcatgagcatgttctcacaatntagagcaccaaaatgaacataatgcaccaacggaaagcacaaaaactcaaggatngaatacttacttgttggagtgagtagaaacaatgacaatgaaagca

SEQ ID NO: 105393 - DNA, 408 bp, Glycine max
  unsure (1)..(408): unsure at all n locations
agctngctaacccatggaagctcctaatatctcccacactttttggtgtgggccattcttggatggcctngattttctcagggtccacttggaccccatttctaccaactacaaaacctaagaaaactatattatctacacaaaaggtacacttctctatatntgcatagagggtgtttttcctaaagactgaaagaacttgtctgagatgtcctaagtgatcatctaggctcctactatacactaaaatatcatcataataaacaattacaaatctacctatganatcccttaagacatggtgcataagcctcataaaggtgcttggtgcattagtgagcccaaaaagcatcactagccattcataccaaaccaaacttggtcctganagcagttttccactcatca

SEQ ID NO: 105394 - DNA, 437 bp, Glycine max
  unsure (1)..(437): unsure at all n locations
atctgtcgntaacccacagatgactgattatgatgagtatggcactcctctggatctagaaacatntatgaaagagcttgagactttctacagacnaacaatcctggaatttaagcctcttaagttntatagagagccactcaattgtcttaagtacgtataatatcccctgtgatgcattcatggaatttaagcctcttaagctttatactgtaggtgtgcttttagtactactgattgttatgctttccctttgtttgatggcctaagtagtgtttatatactcaagagctacacaaacgaatgcagacactagttgtaggctatagcacatagagaactaatgtcgtggaagtcaagcattntntgactntgtcctcagtcctcttgtcaactttacaaagatcctatcgattagtatgtgtcattcatctaat

SEQ ID NO: 105395 - DNA, 447 bp, Glycine max
  unsure (1)..(447): unsure at all n locations
ttctaaacctttacgtactcttcttatcttgatttgtataagaggtggcacctttatgcacaaagtttccgacacagcttcatcagtggcctaaaccaaggttgatgttctttgtttctttgtccaagaacttatattctcgaatggctgaagaatgtataagcctgcttgacggaacagtggcataacactctcattggattgagcaatgttaagcacaaagtaaatgtatatctctaaaaggtttcaacattatttgtatgtgtcatatacacaacaaacgtaactgaaaatatgttntataagtcaatccaatcacctatgtaaggatggtatgttngtacagttctataatgattatcttnaaaatcatatgtagcatgatctctatcggttgattgcgtcaaaaatacactgatagtgtatgaaaattattctctttaaact

SEQ ID NO: 105396 - DNA, 385 bp, Glycine max
  unsure (1)..(385): unsure at all n locations
atccttaatcagctntacatcagcaggatcaaccttctcaagcccaaagagctctattaagttgaaagaatcaacttgaaaagtgttgtatgctggtccaagcgatgacaaagacgactgaagaagtaaaatgatgcanacatgacaatcaataatcacaaccgattattcacatgcataanatgcaacagaatatatgttactaaatagaaaatgcagcactcaaactcttccatcaacttcatatcagtccatgtatttaaaattactgcttttgggtttattctctaatcatagttgaaagtttcccttgataatctntgttgacctttaatgcaaacttacattgtgcgaactactgagatganattccaattctaattga

SEQ ID NO: 105397 - DNA, 249 bp, Glycine max
  unsure (1)..(249): unsure at all n locations
gattatcctacttcgacgaatgggaagcctcgggctaatggagagaataacaaggacggaagaatccacactgtgatcgtccntcccatatgaccaaatctcctactagctcaacaatgtcnatactcagcacaatatcatgccttctcattacccacgcatctatcagccaataacacctaatcatgcacaaacgccgcccttaaatctgtcacataacctgcctgctgcatatctgataccaaacac

SEQ ID NO: 105398 - DNA, 326 bp, Glycine max
  unsure (1)..(326): unsure at all n locations
atccagccgtagatgtgtctccataacctctacaggagacaccatgcctggagtccatctccgctcacatgcgaaggatagagctncagatgcacacgtatatgcaacatgtgactggccagcaagcggtcaatcattgcggtcagatgcaactaaatgtgaccttcactgatacactatgcaccatatgatacctatcacctatgttatctacacaatgttactcttacctattatcggatatgggcacttgcacgaggttgtacgtcaaagaagtcaaaatcaaaagggaaaggtatttgggattataccctggccctagacta

SEQ ID NO: 105399 - DNA, 416 bp, Glycine max
tctcagctatgctttacacaaggttcatcaagtcaggttgaatatggaagttatcgtcttgcattattggtgcaaaagatgaatcgagtcatatcactgcttcgtctactgccgaacatatctatgatagttgatgtccttgatacttccagtttcaccttgacaaagatgtcatggaccatgttgaaaatctaaatagattcaaccccatatcctgcgtagagattctgaatacttcaactatgcatcattcgcatacatccatacttttcattggatgcattgctcattacattctttccttgagaaagaaaaaagagaacttactcattgttataaaaagaaaacacatgctatacggtgccctcaccgaacttgtgctaaagctagagtaatgggtgaagtagatgagatac

SEQ ID NO: 105400 - DNA, 352 bp, Glycine max
  unsure (1)..(352): unsure at all n locations
aatngaagctntagtgtgttcttctagctatctctgcaaaccaatagcatgcaagaaaactttatgcattgaaaaccgcaacagattggaataatataaaatgcataagacggtgagggtaaatgaagctcatctacgtccgagcaacatagaaaacaccccgtactcatcagaatcgcagctgtagtgtgttcatccaccttctctgccaacaaacaatagacgaagcataatggaaaaaacaaaaacaaaatacgcataatgcgggtgggcaaatgataacttactaagggtccattcatcanaatcgcagccttagtgtgtttgtcaccttctctgcacacaaagaaca

SEQ ID NO: 105401 - DNA, 365 bp, Glycine max
cgacagagcgcgggtagtcaaagagaagttcaagtccatatccatcttattctgaagagagtatgatgaactaagggacgtcaatatggccaccgctgaagccttggatcgagaaaccacaaatgtctgatatgaagaacacgaccataacatattctgaagggctctatatgtgcacaatagtgagctcaaactccgaagaggtgaaaggaatcatcacgggtcataagcatgatctggaatgacgagctaaaggctcgccttttgtcgaaataaatattgtctcaacagttaaagtgagactgaaggggatatgtgggccatcatctatgagtgcatagagaatcataatctagcggcgactc

SEQ ID NO: 105402 - DNA, 410 bp, Glycine max
  unsure (1)..(410): unsure at all n locations
atggattgngttatacacacaacaagaagtagaaagcttacataaatntctttaacttcacanaagcttatagctcacccttcacggtatgccattattgtatgaacaagggatattcttctttcaagtgcatgataaaaagatatggagttccaagtgggaaatataagttggttcccaaaggaactagagaggttgctaaccaaaaaggacccaacacaactntggtacctaaatctacattctatacatgtttgtaggtgaacctagcaacagataaacaactatggtatcttgataacggtngctcaaggcatatgatangagacaagtcanatgttatgtctctaaaggctatagaaagaggatntgtaatctatggtgataacaacaaatggagaattcttggt

SEQ ID NO: 105403 - DNA, 411 bp, Glycine max
  unsure (1)..(411): unsure at all n locations
gagaaagagagaggggggagcacnaaantgaatgaagaaaaacggagacgaagtgaactctgagttgtgtctcacaagactctcattcatcanagttacaacaagtgttacacatgcttctatttatagactatgtaagcttcttgagaagctctctttataatacttccttgagaagccttcttgagaaaacttccttgagaagctagagcttagctacacacacccctctcataactagctcacctccttgagaagcttccttataaagattcctaaagaagctagagcttatctacacatacctctctaatagctaagctcacctccttgagatgagaggctagagcttagctacacacccgctataatagctgagcgtcaccccatgaccagaaacatgataataca

SEQ ID NO: 105404 - DNA, 274 bp, Glycine max
  unsure (1)..(274): unsure at all n locations
gagaatgtgtatttcanaaagaaatatgataccatatttcttaagtgggttacgattgaagaaatatgatacatgggaaggattgaagaaaagttcaagagaatatgaaattgatatcatgttacaccaaactagaattntacttttgtaattgacggtgattttacttttggcaaatggttatggtagaatgcaagcttctcctcgagaagatatgcttctgatcctaagatgatgaggttgatgagttttacacagtagctatatatgaaca

SEQ ID NO: 105405 - DNA, 353 bp, Glycine max
  unsure (1)..(353): unsure at all n locations
agagaagaatgtngaagcctcttccaacaatataaagaaacgctatccaccccattgactntgacaaagccaaatccaagagaaacattgtacttatacttggctatagctagtaagaaaactacaaaaatatactctaagatatgtnnttggttttgcaggaaaaattgtgtgacacatgcaccgcacatgtatccatntcatanaggacatctgtcattccctaanttcatccgaggacgaatcattgcaaacatttggattcttgccagccgaattgagctgcttaacaccaattgtcactcatttcgtaagatnnttcgacgtttcagaaagaaatgtgcanattactc

SEQ ID NO: 105406 - DNA, 254 bp, Glycine max
tctcacctattcttctttgtcttccgctgcatcttcatggtggaaaatcaccattaaaggacctcattgaagcttcaagatccagccttcatagaagccccacaagcaagtttccatcatagtggtcaaccattattgcaggaattaaaaatgtctttcctaagaagatttctcatggagctaccaccttcagaggcatagaacatcaagttgatctcctctccggagcttcattgcctaacaggccaacttac

SEQ ID NO: 105407 - DNA, 404 bp, Glycine max
  unsure (1)..(404): unsure at all n locations
gatcttaagtcacgccgctgcagctatcctttggcttgcctncggacttcacccctcgtgccaccccggaagatntaagccaatcccctattttcgaggggcaactcccaccttatgacgtactatcccgggcagacgatgangaaggagatacccatcttggccccctgctccacctcanagatctgtccccccatgaactaccncaaccgaacatagtctgccatatcccggcttcacccacacccgtaaaagaatatgttcccttctcggaagataaggggaagatggatgcgctngaagagaggttaagagcagtcgagggccttggcaatacccattctcgngatttggcggattatgtctcgtgcccaacattcgtatcccttccaagttcaaagtac

SEQ ID NO: 105408 - DNA, 142 bp, Glycine max
  unsure (1)..(142): unsure at all n locations
tagcgacacttagatactcagctgagataggaaggttgaagggaaacttctgctttattgttaccacanagnggtacctggagatatgtcgcgggggtcaagagaccttgtggacctcaagtggggtgctattgcctcaaac

SEQ ID NO: 105409 - DNA, 482 bp, Glycine max
  unsure (1)..(482): unsure at all n locations
cactgccgctgcaagctgacttaaaccaatattttttttctaccaagccactactggctatanagaatcaacaagaaattttgaaatnttgcacaccgactaaaccatgtgaacatcttatagatggatatatcactcaatagttntggtcttttctctcaaggtatacaaagtgtcttgagagccttgtatctttacaagaatntacagaaagatttacaagaaagaatganaaaatgattcatgtcttggttcttcaatgcttcttctatatatagatntcatctccaagtattcattatctcttaatggttgaattctntactntgttcttcgtctgaagccttgangtttgtgaggcatttagtgcttgcattaaatgcatgtacattcttcatgcaaagttcatgttgataggatagtgtgtcttgtacttcagcaaggaaatcactaatttcatcatagcanatctgcaacaatat

SEQ ID NO: 105410 - DNA, 467 bp, Glycine max
  unsure (1)..(467): unsure at all n locations
tctacttatgtggcagggcgggcttccttcactgtcttgtctccaacgcgagccttgaccaccgctcttccttcccgcgatgcttctcttcatatccgcctgagtgggcttatagcctaaaccatacttcccacgatttcctttggcatttatcaggctagttatgccgccgttgtctttngcctaaacccatttgggttcgtaaccattccccaacaaaactcgggccatcattactgctgcatcggacaggcaagcttgcccagagaaggagtccacggaggagatgcttaccacctcaaaagactggaaagcagtttctaatgactcctctgcggcctccacataaggcatagaggatgggcagctcaccaagatgtcttcctcacctgacacgatgaccaaatggcccctcactacgaatntcaacttttggtggagtgtagaggggcacaactccactgagt

SEQ ID NO: 105411 - DNA, 380 bp, Glycine max
tattactgtagtggacaatgtatatggcggattgaagtatcattagaatactcgagataatgcatctacactctctttatgaaataaagaatagaagagaatgccaggttccaaattacattctaagactaataaaactagagaatatctggaccaatggaaaggagatacttacacatccccaaccatgtctgggtaactcttgacctacaatgctgatatcacaccggctcgaaaggaagagctctatgtaagcacgctcgtcaacatatgcagcaacaccacccttctggggacctttcttaagtgcttctgcagtttcttctggtgtttcagaggaactagtctcgattcatcaataccaatttcatcaattaaat

SEQ ID NO: 105412 - DNA, 445 bp, Glycine max
  unsure (1)..(445): unsure at all n locations
gctggtctgcacatggccaccatattataactataatntattatagtagtagtactagaaggagccacatcaatggactgtggtggatgatggaactgatgcanacccacatactgtggttgatattggttggtaggtattggagcatatccagaaattgatgccatagtagagctaactgacttggtggggtaaataggtggagtaccatctttgtatgctgctgatgtaacaatactttgtggcattaatgacctgcttgaagctaccacattatgatcagctatattgtgctgcaatgccatgttgtatggatgtgttacttgtgtaagtccaactggcattacataaactgngtactgttgttgaccaattggaaggtgaacttgttgaggttgtggtggtgcataaactgggtagtatgatgaaactggcactggacctg

SEQ ID NO: 105413 - DNA, 404 bp, Glycine max
  unsure (1)..(404): unsure at all n locations
atactcagctacacattcaacttcgagcgtctcgatatattacgagtctcaatcagacatccgagtaaaaagttattcgtttgaatatgctcagagcttcaacgttcaatnttgagcgtctcgttatattacgggactcaatcagacatccgagtaaaaagttattgtcttttggattggctcagagattcaacattcaatttcgagcgtctcgttatatcacgggactcaatcatacattcgagtaaaatgatattgtcgcctgaattggctcagagcttcaacattcaatttcgagcgtctcgatatatgacgggactcaatcagacatccgtgtaaaaagttattgtcgtttggattggctcaaagcttcaacattcaatttcgagcgtctcgatatatta

SEQ ID NO: 105414 - DNA, 339 bp, Glycine max
  unsure (1)..(339): unsure at all n locations
tgctctatttaccacgaaaatgacatgctcatccctccggcttataacgaactcatgtaatctaattatgcacacgcgcatgtgtagaaaatatcctactatntatgtcaccatacaaggacatccaacacattctaattgtcctacacatatatgcatttgaagagaacatacattctcacgcgcaaggcattgcgtcaaagatcacacttaattatatcctatacatttactattacaaactacctacacacatttggaatacatatcatacaaaatatattgtttctctcacatttatttatatgcatattgaaaagctaatacatactcacacac

SEQ ID NO: 105415 - DNA, 415 bp, Glycine max
  unsure (1)..(415): unsure at all n locations
ctcaagctatgcgcatattaccttacgaacgttcgtcttgcctagacattcgttctactaagagaaaaaatgcacgcatattcgatcaaggcagcttcattacctagattatttacatgtacttccaaagcgtgtgtgtnacttacatgacacacgtttactcttgctaatttacatacatgcatactcatagcatttcggggtaccaaaaattgcacatgtgcacatctcggcatcttgataccgattcaaattccagagaatattgactatctcactataatatgcttcatctttcgcctttacattgtaagtaccataagcccatctagtaccgtatatcttctttgctactaaattgtattaaaggatatattctcttgtaatgattttctctcataaatgcacatatttt

SEQ ID NO: 105416 - DNA, 316 bp, Glycine max
  unsure (1)..(316): unsure at all n locations
atcaatttgtaagcatttatcacagagcatactgcatatgtatgttgagtttccactaaaaaaaaaatagttctgattaatacaagtttcatcattaagtgatcgaataagataaactttcaaaacagatnttcaaacaagtactcagtatgagaagaatgataaaaaaatgctacgagaatacctcatatacctaatagatagataaacaacataacaaatgttcatctcactaccctaaattaatattttaacatctacagcgggaaggagatgacgatgatgacccaccatgttcattcattctttctcccat

SEQ ID NO: 105417 - DNA, 318 bp, Glycine max
  unsure (1)..(318): unsure at all n locations
atatgacagccatcgttttatgagcgctgagcaccatcagcgcttcgatgccatcanaggatggtcattccttctggagagatgtgtccagctcatggacgatgagtatactgacttccatgaagagatagttcgccggcggtgggcatcgctggttacccctatggccaagttcgacccagacgtagtcctcaagttttatgccaatgcttggcctacaaaggagggtgtgcgagatatgcgatcttgggtgagtggtcagtggatccctttcgatgcgaatgccctcagccagttcttgggataccctttagtgct

SEQ ID NO: 105418 - DNA, 391 bp, Glycine max
  unsure (1)..(391): unsure at all n locations
agcttataagtgcgggtctgggagacgaaggtcatgttgtctctatatgtgaagatgatgttccaagtaccttggatttggtccgaccatgccctcctgatttccagctgggaaattggcgggtggaggaacgccccggcattnacgcaacaagcataatgtaaacctttacggttttaaaagctctatagttgggcctatgctttagagtgttcattatgttaaggctatgtgtcttatgtctctgaatttataatacaaagatctctcttcatctgttcctggtctctacccattctcattcatttgcatgtatacttctntgtctgaaacggcagattcgatgacgagtcccncgaaggtactaatacctgtgacccgtctatcaact

SEQ ID NO: 105419 - DNA, 405 bp, Glycine max
  unsure (1)..(405): unsure at all n locations
tgtagactataccttcgaccgaacacagccgtgtatctgtctaggcttctgttcaaggcgggctgcagcaccggctccgcttccctaactgtactggaggcggctgcggtggctttatcctctatggntttctgaagttttaacatgaccttctagatggaagtcatttgatcttttaaggccgatagatcggccttcatctgttcctgcacgccctcttcattatccatatttctggatcgagtgttataagggtgccttagatgtgtcttagttatgatgaaattcctaaagaaataaacaacggtgagtatgctaccaaaacatgagtatgcaaatggatgatcggagcacttggatccaccccaagactttagataacgtaatgagtctataacttctcat

SEQ ID NO: 105420 - DNA, 302 bp, Glycine max
  unsure (1)..(302): unsure at all n locations
aatggtataggtccagtgtatatactagtttacaaggctcagaaattccatcttgaaaaattaatcttcaattaccaaccaatttcacccagtcccgaggcagagatgaagtgtgtgatcacgttggtagaactacaacaagtactgctacactctacaaggcgacaatttatacatacaataagcatgtatgggtctggattttgtgaaatcatcatacagttcagtgtgagaacatggtaatgagcaaaaccatgttcccaaaatgatgagctttntatntatagtaataaattattcat

SEQ ID NO: 105421 - DNA, 382 bp, Glycine max
  unsure (1)..(382): unsure at all n locations
agtcccgtcatatatcgagacgctcgaaatngaatgttgaatctctgaaccaatccaaacgacaataactttttactcggatgtctgattgagtcccgtaatataacgagacgctcaaaattgaatggtgaagctcagagccaattcaaacgacaataacttcttactcggatgtctgattgagtcccgtcatatatcgagacgctcgaaattaatgtngaagctcttagccatttcaaacgacaataactnnttactcggatgtctgattgagtcctgtaatataacgagacgctcgaaatngaatgtngaagctctgagccaattcaaacgacaataactntntactcggatgtctgatngagtcccgtcatatatcgag

SEQ ID NO: 105422 - DNA, 350 bp, Glycine max
  unsure (1)..(350): unsure at all n locations
agctntgagccanaatcctgactcaccataaaccttgttccagagtgagaatgtcaattcttaccctcggaagcannnaaaaaggggagagggaaaatttccaatcaaagaggaagcannaaaggagagaaggaagatttccaatcaaaggaaaaaaagagaggaaagggaattcccaatcaaagagtgggagaaagcaaanagaaaagaaagaatattcccaatcaaagaatgggaganagaaaaaagagaagaagaaagggaagatagttcccgatcaaaaaaaaataatatgcagaaaggtctttggaccggacaatatctgaacaatacagaattgtcaccaaatg

SEQ ID NO: 105423 - DNA, 306 bp, Glycine max
  unsure (1)..(306): unsure at all n locations
catttctgctccatatcgtggaaagagagcattttctgngtcgtgaagtgcgtggctaccagtgggacttcgaanatccaggtttgggtggacttctttccctcttgattntcgtgggtatggggttntgggagatatgangggtagtcttgttagttctctgctgtgtgatgattatttgtgaagacatttgttgaaagcttgtcgaaattgccattgttgggtgagttagatatacccattctgttttangggttntgtgatgatgtttgtgatgtttatatgctgaaantgctgatggaaatc

SEQ ID NO: 105424 - DNA, 266 bp, Glycine max
  unsure (1)..(266): unsure at all n locations
atatctttattctaagaaaagtatgctcttgaggtatcttatatgaattangaaatatttaagataagtttaatattataaattaatcgtatattatattattaatgcgcctttatttgtttattaatgatatcattgacattaccagagatatatgtgaaagattaattagaatcacgggtgaaacttaacattataaatattgttgtaacaaaattagtagataattattatgggaagaggaagttgacgttaatgaacttatt

SEQ ID NO: 105425 - DNA, 456 bp, Glycine max
  unsure (1)..(456): unsure at all n locations
tcttaagtcaccgccgctgcagcttatgaatctttatattctgataganttattactacttagttatactggtntgctcaatctgagctacgtctaattctgctntacaaaataataaaggagtccactaattaaagtttgatacaaacaagtattctaacttgccactcctagcattacaagtattctntacgccattactggcacaacccttagactccttcttaatataagaactcccaagtaatgttttgtcactaagccactcatggctttcacaaacatatagtttgaagaatcacaaattctaacactcatagaatgtgtttaccatgaagtatgaatcattacaagaactgttataagtagaggataaactaattaagcattgtgtgtcactcaataatatctctgtagaagtatttntcacttctgctatatgtgtgaatgttgtca

SEQ ID NO: 105426 - DNA, 409 bp, Glycine max
  unsure (1)..(409): unsure at all n locations
cagctgtccacaaaaaagtactaaaaagggttgaaagtgtatcatctctatttttcttatcaagtaaatggagtcattttaaggtccaacgcctctaaatgatcacctttcaagtaaaaagaatcgcttgattcacgcttaagaaagaactacgtaggttcgatttcctcatcgatggagggtacgtacgagcaaaagccccgctcttgtcgacctcaatatataaaaagaaataaaagttaaggtaatacaatttccacaattctaaanaataggttgttgtcctttgagacaaacgtgagaggtgctaataccttcctcatacgtaaatacaactcccgaacttagaaatattcatttgatcggttcccttcggattntctgatgtttntcacaaataaacgttggt

SEQ ID NO: 105427 - DNA, 448 bp, Glycine max
  unsure (1)..(448): unsure at all n locations
ggtgtcacaattcactgtgacagtcaaagtgtcattcacttagcanatcactttatgtaccatgagaggacaaagcacatagatgtgaaactacacttcatcagagatgtgattcaattngagaatgtgaatgtggagaaggttttaacacaagaaaacacgactgatatgttcacaaagtccctctctagtgtcaagttcaagcactgcctggacttgataatatttgaagatgcctaaagcaaattggtagaagtgcagccctgaatcgcaagatatacactcgttgatttggagtcaaggtggagatttgtggtgtatgactcacaatanaaaatggcacaagtgagaaagctctaagaggtgctgtcataactgaattcagtataataactgaatgggtcttggcaccacagcatnagtagagtgatatatactctcgacatgt

SEQ ID NO: 105428 - DNA, 205 bp, Glycine max
  unsure (1)..(205): unsure at all n locations
gctatccnacancgcgtcagttctcttatagtaagtcgtatccaacgatgtgtaactcttgctaagagaaacggtatcaactgacaccaattatactattaacgtgctacatcacggtgatttctaaatacacaacttaaccccgcttattagattaataatatagattaacctctagtctggttaaccatgtatatacatcatc

SEQ ID NO: 105429 - DNA, 526 bp, Glycine max
tatgcctcttatccgactcgtgcaagtcggccttggtgttggctcgttcttgtcatgcatttgtctgacttggtggacttcattacaaaatctgaacatttctttcatctggatgtagcccttagctcgctcacgcagctcgtccatgctactgagtggttttttgcacagactgtctgcaaacttgctgaggtgtaacgcgaggagcatggaatgcaatgctacctcggtgctgagatatcatatatgggttggtgtgtgcccaaatctgtctatgaactctttgagggactcgtcatcagcttgtcgtagactggccaacgcaatcgaggtcatgtggtgagacttggtagtggcgtactgcatactgaatcgttcgacaacggtgctgaagatgtctactgacctatgtgggagtccaccataccaagtcaatactgctcccttgatggatgtcgggacaacacaacatataatcctgtcatcgttgaatagaggtcgcctatgtaggaaacacaacattaat

SEQ ID NO: 105430 - DNA, 133 bp, Glycine max
tgcattctattctacaaggtgatggtggcgaacgtcttaacacatcacaacacgactgatatgttcactacatggtctctctacagtcaaagccatgcctgcctggacttgataaatttggagcatgcctata

SEQ ID NO: 105431 - DNA, 351 bp, Glycine max
  unsure (1)..(351): unsure at all n locations
cttactgctgttattcgctgaccacagagnggtacctggagatatgtcgcgggggtcaggagaccttggagacgtcacgtggcgtgctattgcccaaaaccaagcttgaccaatcccgacccaacccgggcatagtcggtcagtgagaacctgtgatgtacctaagcaggcgagctcctggcagtcaacagataaaaggaacaaagaccacaaagcaaggaggcttgtggtggctggccagctgagaatctggtgtgatatatgggttnttgcctctggtaatcgaataccaaggggtgggtaatcgattacaacgcttagaaatgaagacatgaggctaagatggtctct

SEQ ID NO: 105432 - DNA, 345 bp, Glycine max
aaaaaaaagaaaaaaaagagaaaaaaaaaagaaggaaaaaaaaaaaaaaaaaaaggagagaagaggaggaggaaagagaaggcaaaaaaagaaaagaaaaggaaagaacacaaacgaaaaaagaaagaaaaaaaaagaaaaaaaagaggaaagaaacaagggagagaaaaaggaaacagaaagagaaaagggaaaggggagagaagaaaaacaaagaaaaagaaagagaaagaaaagggaaagaaaagagagaaaaagaaaagaaaaaaaggaaagaaagagaacaaaggaaaaaaaagaaaagaagagaaagaaaagaaaaaagagaaaaaaagaagaaaaaaa

SEQ ID NO: 105433 - DNA, 394 bp, Glycine max
cccgtgttgagagatacgatgatatgttctctttggagtacgtgagcttagatgaaggtgggcaactggagatgatggatctatgtgtgatttgcgcgatgtggagagtcgacttgcaccatcgctcgattgccacctattaccacatatgacgtgtaccccataatcctactagcttgaagtgagaaagtgtggaagagtcagtcttgctacttttattctttgaccacagagtggtacctgaagattgtctcggtggtcaagagaccttgtggacgttaggtggggtgctatttcccaaaactaagcttgaccaatcccgacccaactccggcatagtcagtcagtgagaacctgtgacgtacctaaacatgcgagctctcggagtcgaccg

SEQ ID NO: 105434 - DNA, 285 bp, Glycine max
  unsure (1)..(285): unsure at all n locations
atgatctaggccagacaccccaatgctctgttggacttttctgagtccattaagtgtctgtgaggtgtgatccctgcanattgataaatggcatctgagatcaactgcgccacgtgaacactcacctgagtcaagaaggcatatactaattcgcacttctgtctgggcacgtctgaactataaatgctgcagaggactgtgctgatcatcgatgtcatccacatctgtgttaagggtgttatgctagtgcgcatgatctgcactcgactccctatgacacttctg

SEQ ID NO: 105435 - DNA, 374 bp, Glycine max
  unsure (1)..(374): unsure at all n locations
ccgatacgagacacttctgtgctagcgtganacctacttgtggtatcgattattgctagggtgtattccattgaaacaaacagtcttgactactgcacacaatgtctaactttataaactctctccttactcctaaatgatgatgcatgatgcacgtctgaattgatagagacttagatacaacgcaccttacaacaatcaatgcgaatgcgactcaagagagttgggcatgtataagacaagacttcttcaagcttgaaggctaagacttcatgattctcccctatctgtaacaccaactaagaagggccattgagggtcacaactagcctgtataacggagcatactgactacaacaactggatggtatagc

SEQ ID NO: 105436 - DNA, 452 bp, Glycine max
  unsure (1)..(452): unsure at all n locations
tccggtccagtttacgaccgatgcgggctattgttttctgtgcaatccctcgaataattnttgatgatgacgactatgaactgttcggttggcttcatccggtgatgctctttggtatacctcgactggtaatctttcttggccgatgtcgcatcggattattttcgatcaatgtttgtaatggagtcttttctctgttgaggtcggttacatttntgtttgcctattcaattaccgcagtccaatgtcacccgacatgaacatcggttgagtgtgcacaaaataccatatgcgaccttgacggataactctttgagcgacaatgaataagaaaacatcctcgatggtacgatanatattatctgccgacgctgatgganaataaaacattgacaatgtctgccgaaaacaaacattctttgcaggattccggtgaggctgtcacaatgtca

SEQ ID NO: 105437 - DNA, 383 bp, Glycine max
  unsure (1)..(383): unsure at all n locations
ttctcgngagtctntccttgcttctccttgtgtctctcagactatgtcttcttctagaaattcccttggttctaatttagtgttaaacctcttaaccattctctgcatgcatgcttcaactattatctttgcctgatcttgagcttcttcaacaagtccaagttcgaccatcatgctctccacgttgtcggtcacgtcataatgtacttgccacaatgaaggttctcttatttccacttggatcacggcgtccatgacatatgttaatcaaaatcgtgtcatcgttgttattgactgcggcatatactggagttcctatagaacatcttacaactcttccactgcgatcaactatgtgttgtagntaagctatgaacaccttg

SEQ ID NO: 105438 - DNA, 398 bp, Glycine max
  unsure (1)..(398): unsure at all n locations
tactcatgctaggataaccttgccctctcttattatcttctctgcatgtcatgtgtaccatactgtattgccagcttcaaatatgcttactatttctgatgggtgggataanagcctccattgattgatacagttgctagatcattgtcctgaaatgataagtcatcgctagctttggttatgaatgatgattacttgaccaatattgctaaggtatcctcatttgaaagagaatgatattgctgacaaatgtgctgtgtgtcgggtaattacaattgctaacatgcttgtgctgtgatcaactcatttatcgttatgacttctcccttctacattgacttagtgcgcgtaattctggtgttctacattagaaaagataccgcgtggcgtcctgttgc

SEQ ID NO: 105439 - DNA, 475 bp, Glycine max
  unsure (1)..(475): unsure at all n locations
gaagctctgataccactagttagacaatgtggtctcatatatcttaagaaagagggttgaattaagatatcacaaactnttcctaattaaagattcaattntgattntaaccaaaatcccaagattcctttcaaaatgaactcctaaataattatgcaataaacaataaaagagtttaagggaagaacgattgcaaactcagatntatactggttcggccacacccttgtgcctatgttcagtccccaagcaactcgcttgagagttccactatcttgcaaaagccctctacaagttttgaaccacacaaggacaacccttcctttgtgtcagattgcgtacaacaagagaccctccgtctcttaatccctntttagagataagatgaagagaagaagatatctctctcgatagagatagattgaacaattgagcactcaaataatttcttatttgaatgcaagtngcatacctt

SEQ ID NO: 105440 - DNA, 301 bp, Glycine max
  unsure (1)..(301): unsure at all n locations
taagctccgagaggagtgtgagggtgaacttctgctttattgttattacttancggcacctggagatatgtcgcggaggtcaagagaccttgaggacgtcatgtggagtgctattgtccaaaaccaagcttgaccaatcccgacccaacccgggcatagtctggcagtgagaacctgtgatgtatctaagcatgcgagctcctgtctctcaacagattacatgatcatagaccacatagctatgaggcttgtggtggctggccagctgtgaactctgattgatatgtgggttatggcctct

SEQ ID NO: 105441 - DNA, 469 bp, Glycine max
  unsure (1)..(469): unsure at all n locations
cgttctgttgcacaagacattctatttactaatgaaaatgcacccatacacaatcaatgcagcttcgttacctagattatttacacgtacttccaaagtgtatttgttacttacatcacacacatctccttggctaaatttacatacatgcatactcacagcattttggggtaccaaatattgcacatgtgcacatcttggtatttctaatacctatacatacgcagacttcatgatgaatcttgactatcttcacaaaaaggtgctacattacatgctcttttatcaaagttttgctacttatagccgcatgcatattcaagcatattttccttngctgactaaaattgtatacaaactaaaaggtatatatactcttgtaatatgttgtcttcacataacatgcaagcatattatatgatattcttgtgagacacttttgactaccaaaattatattacatacattc

SEQ ID NO: 105442 - DNA, 438 bp, Glycine max
  unsure (1)..(438): unsure at all n locations
ccttgatactcagctactgctcagggtctcttnncattgtggnttaattattcattttaattgttgattngatgttntcgggtatgtaattctatgtttgattcttaaggtgcaaagaatgtcattaatgcttgccacgaacgtagagtgagatgttgtacttggtggttcgcatgatggagataagtggttggcatattcgtggatagtaacgattttgtttaaccaactttcttttttgtgtgctacatgttaatggatagattagatggtttcgtttcgcagatgaataagcattnttaatatgggtgtgtgaattatatactatcaacacattaatngaccttaaggctctagcggaatgcttgatcctgagtgccaatgacattgatggcctattgacatgctgtctttgtnctactaacagttttggacctg

SEQ ID NO: 105443 - DNA, 361 bp, Glycine max
cactgtgatgcctttcttctctctattctgtgaatgctttctgtgtttttattaatattataatgattcatccatgttctggtttgaacattgaacaggcttgtgcaggtactaccacatacaatagctgtgagtctgtggttatgagtggtcaataccaacatcataacccaacacctcagcatcccaatatggatgcttacaatccagctgtgtagtaacataacatgtgcttttattgctttcatttaatatttcatcagaagaatataagtggttggtgttgaagctctcatacattctaaaaaactactattacatgtgagatcaaacataatatttcatcagtaatagtatacat

SEQ ID NO: 105444 - DNA, 441 bp, Glycine max
  unsure (1)..(441): unsure at all n locations
cactaagcttgagaaatggtcgcagccatnggtcaatatgggccacatatgcctattcctatctatcatgacatcagagttccactcttgaagaaggaagttgaatatactaaaaatctgatgaaaggccatatggagcaatgggtcaagtatggtcgtactattatgtccgatgcatggactgatcggaaacaaagatgcatcattaatttttttattaactctcaagctggtaccatgtttttgaagtctgttgatggctctgatttgtaaagacaggtgaaaagctatttgagttgctcgatgccattgtggaggaagtcggagaagagaatgttgttcaagttgtaaccgataatgggagcaactatgttttatcgggtatgttgttggaggagacaccgaaacatatttattggactccttgtgcagctcattgta

SEQ ID NO: 105445 - DNA, 408 bp, Glycine max
  unsure (1)..(408): unsure at all n locations
acactaagctctcttcaatctggctcgtctngttcggtagctgggtctctatgctgttagnttgcgccttgcttatgcagtntcgggcccacttctggtatccaccaggtgatcgctatcatacgccgtccactcctccgctgtcttaggaagatattcttgccaagtggtggaacacggatgacaatctaagcgtgtgataaagctactagccggatatagcgctgcttgcttctggaatgacactcgctccttcatgactgaacttcaacacgaatatttcactccgatcacctctttcagaggtaataacccttcttttcactcttagctgatcaaaagcatatcttgctatattgttactatcatcgttgattgttatcgaatgtgatttgctgggaggattgt

SEQ ID NO: 105446 - DNA, 129 bp, Glycine max
tgttcataaagaagaggcgactggtatctatatcttctctggaatcgattccagagagaaatccatacttttgaaacacacaagctcttgtaaatatactttggcgaacctgtgcacataatcaatgaa

SEQ ID NO: 105447 - DNA, 387 bp, Glycine max
taagcttcaatgctgtctctctcttgatcataggtgtcgtcgctgacgctcattccatatatgaggaccacaagtggtggatcatggtgaatcgttcaccggaacacaaaggttaactaggatgcacaaaacggtgacggaacatatacaggtactgaaaaatgattaatttagaaatatcaagagtagaaaatgatttcttaatatatttattatgtaaaatattaaaaaatgtgaaacatatgatgtgatcattaccatttccattacttgctgtatcttttaaaaatagttatcattttaaaagattaaaatctgtaatatttattcattggactgattgtgttttctattcttaaataattaatacattaaaagatcatctct

SEQ ID NO: 105448 - DNA, 280 bp, Glycine max
  unsure (1)..(280): unsure at all n locations
aaaaaaaaaaaagaaaaaaaagagaaaagaaaaaaaaaaaaaaaaggaagaaagnnnnggagaacaagaaagaaagaangaaaanaaaaaagaaaaaaaagaaaaaaagaaaagaaaagaagaaaaaaaaaaagaaaaaaagaagaaaaaaaaagaaaaagggaagaaagagagaaaaagaaagaaaggagaaaaaaaaaaaagaaagaaaaaaagaaaaaaggaaaaaagaaaaaaganaaaaagaaaaaagaagaagaaaaaagaaaaaaagaaggaa

SEQ ID NO: 105449 - DNA, 251 bp, Glycine max
ccccccgcccccacccccacccccccccccacccccgcaccagcacgcacccaccccacccaaacacacccaacaacccgcccccccccaccgcccccacacccacccaccaccccacccacacccccccacccacccccccaacgccccccccccccccccccccacaccacgaacccacccacccccccccccccaaccacccaccccccgcccccaacacaacaccgagccacccccccacccgcacc

SEQ ID NO: 105450 - DNA, 393 bp, Glycine max
  unsure (1)..(393): unsure at all n locations
tactaagctgcgctccaatcctgataggatgtncatatgttctttatatttactgtttcatttgcttccaaagtttcatggccttgcatgtgaagacccgcacaaacatctgaaagaatctcacattgtctgctccaccatgaaacccccagatgtccaacaggatcacatactgttgaaagctatgtctcattcattagatggagtggcataagactggctgtgttaccttgccccatggtccatcactagctgggatgaccttaagagagttacttcgaaaattatttccctgcgtccatgactccagccatcangaatgatatctctcgtatattacaacccagtgtagagagcccgtttgagtctgcgagagatttaagagactatgtg

SEQ ID NO: 105451 - DNA, 288 bp, Glycine max
aactaagctcgaaacgattctatcaaagttgtcgttgagcgactaattgttttcaggagaggcgtctatagtcgtatctctatagatcttacgcgttgcatagagagttcttagctttgttcaagccctgcttatccgtgatgtcatctcctagagtagaattcttctcctagagacctatatcttcttctcaagaattgtcctatgcaatacagttagtgtcatgggatactgcacgtgcaaatctactacatatggaggtcgttattgaatactctatatgtctag

SEQ ID NO: 105452 - DNA, 263 bp, Glycine max
ccccacctggcatcgggttcttatggatattgtatagacttgctcttatgcctctatatggagggatgatcagctctttgatgcatttctggctttgagatgtcgttatggtaaatcagcttacttcatagtgtccatggagtcaatttcaccacccgtcagcctcacttaccaatgctctcatatccttgatgcatataatttgccaggcattggaaattctcaattcgcttatgagccctgggtgaactctataaacaaat

SEQ ID NO: 105453 - DNA, 495 bp, Glycine max
  unsure (1)..(495): unsure at all n locations
gctagtccgtagatccctcttgtagactaagcttcagtcctgcttctatcaagttctaaggaacaatacatcttccaatgctaatatcacctaactatacacacaagtgggtgatcagactaacaacatgcgaaaattaagcatagaaagaagcattgaacacataacacataatcaattagatattaaagtaattacatcagttgttccttacaaatccccaacaagggtgtttagccaaaccattacagaaaagaccctaacacaattgagatagagagtacaaaataattgttccttacacaagaaggaggatccctcctcctcttctcaacatctcgcaagcactctacaactntataatctctctccaattgaagaacctacgcttctctgcacaatggctactctgttctgcctctagagtactcttctcacagtcagtgcagaatatacagctctggtctcttcaaatcgtaccctattctacaattc

SEQ ID NO: 105454 - DNA, 383 bp, Glycine max
  unsure (1)..(383): unsure at all n locations
acttcttatattatctttganaaatgttaaattacttgattggttttataattgtntgataaaatttaattaagtccctaaatttatatttattcttttaaatgaattttttgtttaattatcattagttntactaacaaanaaattaatcaaagacttaattaaaaaaattgttgaatatattggcttatctcccataggaggggangaatggaggattaaatctctttggtagaaaacctttttattggaaaagtctcttgcaaatattctttgatggatccaaaatttgaagatcactntaattgatanagagatatgtgatgctttgtgaataacctacttggttcctacgttcaattntatttaatatcaaataatta

SEQ ID NO: 105455 - DNA, 558 bp, Glycine max
  unsure (1)..(558): unsure at all n locations
ctcagctgtcctcgggttctggaattctattctcttaaagcactctatcttcacacaaactcattcttttaactaagctatgaacaatatgattgataaccctataaaccaacttccatgtgcttgtgtcaaaggtgactccttntccatcgagatattggtggagcaatatangctaaggtaggagggttgaaaaaataacctacatgaatgccttattatatgcaaggatgatcgannncatcangtgcatgatttgcgtgcacaattgactatactttgaaaaccccttatgcaatgacagatgaattcattgggaagggggttctattgggttagttctgcagtgtctaggtagtgggtgcatctaggtcttctttgtctactaccatggacacctaacttcaaccctaatatgcanaaacaaacacatgcctagtgcattgagtaagaattcatgatctcccatatgagtattggcgcnctatacattngttaagaatgttaggactatangtactcttatatcctacgataaagctacacataatcaaatgt

SEQ ID NO: 105456 - DNA, 404 bp, Glycine max
  unsure (1)..(404): unsure at all n locations
ctctaactaaatgagcaacattccaatggtctnttatatggtgtaatctattattatatattggtnatcgatgaccagcgtatctgaacgtcgaaattcaaattcaattgtgaagagtcacatcttttcatataatgctttgcgtaatcaaatacatgggtatgagtatcgattaccagcgacaagatttgaataataatcaagagatgtaactcgtccaatgtgtttctcacaaatttctcagggtgtgtacttctctcaacgggcttcctgaccagacatgaagagtctataaatgcatgaccttgacttgcatatcatgtacttgaaaataactattcacatattcttttactaccgtttgaatctctttgaacatctctttgaacttcttcttcttcata

SEQ ID NO: 105457 - DNA, 316 bp, Glycine max
  unsure (1)..(316): unsure at all n locations
acactaaaagattatgatgatggatngctctaattctcacaaaggtacaaattatcactctcatattgagctctcaaaactatcatgacatgtataggaacaacaaggatttcaagtcacaaaatgtccagagacttttattttcagaacaattacccattacttgaacatatcctataattcagagacgaacatgcangattaacacaacagaactaacataatttaactataacccacccaaataacataattaactaatttacacaacttacacaaccaaaccaaagacacactccccccatctgaacaacca

SEQ ID NO: 105458 - DNA, 67 bp, Glycine max
  unsure (1)..(67): unsure at all n locations
aacccccccaacaattccctcccncaaccacaacccaccactaaaaaaaaatcccccaacaaaacac

SEQ ID NO: 105459 - DNA, 403 bp, Glycine max
  unsure (1)..(403): unsure at all n locations
ttccggatgttgngttatgtgtcggccctgagatatagtttacatattgtcaaacaangtncanattataacgacccgcctcttcgttacaatattaccactctaatccgtgataattcatattttaaatgagaattctcgttatttgcctatgaaaaattaaagtataattctcaatttaatctcaccatatacattcccaaacaacgcaccattactttaatgaatatatatatatatatatataggcatagtaacttattacacattattcacataatggaaagtcaattgttcatacatatgtataagaatgtgagttacatcctcaattcaacaaatgataatgtgaccactattgtgagttgtaacaaacacactctgctaaataaactgtctctct

SEQ ID NO: 105460 - DNA, 498 bp, Glycine max
  unsure (1)..(498): unsure at all n locations
gctccctgtcaaacatgtaaaccacccaatgaatggattataaaatgagggtcaaagattcgaaactaattatgtcaacaacgaaaatatcttcttacatatattgtttaaggatactcctaatattaagtgggtgagttagtgagtcagctaagtaagcattgtggctaaaactaaattttctgttaatgttgtcttggtcattgaattataatgaagcactcaactcttaatngattngcaactgatattnntgcagcaacacctaataccattttacattataaaaacaataaccttgtattcatttttttgggagggagtctggtcaggtaaactgctatcacttctggtgccgtatagatatcatgttcagttagaaaacaaatattattactctttctttgtcaacatgtacaaatgttaaattcgacattctatgatctctaatttctattgacgtgtttctctacgctactttgtattgaagtggatact

SEQ ID NO: 105461 - DNA, 316 bp, Glycine max
ccagaggctttctttttctcaacacaactcagaagtaatataatcatactaagagactcgggacttatcacattggtgtctaagtccataacctttgacatgaatggatccaggattataaattaattgcccctataaatgaattgctttataataataaatcatctcccttctcaccactcgttattttatcagcaaaaagagtgccaagatgcctccacattccataaactaaatgtcttaattctgttatgagtctctttttgtacgagcagaaattattcttcaaaaccattttctaacgaatctccaaaaa

SEQ ID NO: 105462 - DNA, 317 bp, Glycine max
  unsure (1)..(317): unsure at all n locations
atttaataatcctgctctgatgaatgagaatactgaggcacatgacgagtgtgagaatgaaggagaaacccttgctgctactgtcantcctacatgtccaagttttccaccaatcctcaatgtcatactcaccaataacaaccttcttctatccacagccatttatcataagggtagcttatattgccgctaaacctcactaccatataatcaatgcccaaacaccacccgtatcgaaaccaaaaaggaatattgagcaaacagcctgtataattcaccccaattccggtgtctatgcttacttgctcccatatata

SEQ ID NO: 105463 - DNA, 212 bp, Glycine max
ctcacagcacatcttttattaggtcttaatggcatcaaggcttgatgtatgtgaggtgagacaccaatcttgatgagagttttgaagaacacagacgacttatcctcttaacatgcataagtgatttatcctcttaaaaattccttggtcgaaacactcgtgattcagtaaggtattatatgagtgctcgaattgttcacctatctcttcaa

SEQ ID NO: 105464 - DNA, 394 bp, Glycine max
  unsure (1)..(394): unsure at all n locations
ctcaagaggcttctntgagaagctagatccttatctacccacacccctttattaactaaattaacctctttgaaaataattacagataaaaatatcgcaacaaatataatcgaacatcaaacataattactagtaatatctagatatatatatatcaaggtgttacacatcctgaacctgttggggtactctgtcgtgtgggacctgttccttttagcatgtgcaccggattgtcaagtagtataaaacagtaagaatacctatcatactctcagggaacttgtgttacttggaaagttatctcacagagaacgcgtctgatgtgaatagagatgtattaatatgaatagatgtgtaaactaactatctaaagtggaagatacgtgagagatat

SEQ ID NO: 105465 - DNA, 412 bp, Glycine max
  unsure (1)..(412): unsure at all n locations
gcttataatanntttttcagaaaaatattatgaattatttctttctccccattaacacaaaatcggatccatcactgatatcgctcatacaagtcttatatttaactcagataaaatgttcttccattacatgtggtttctatcaaaataaataaataaataaatagatgctgatgtaccgaacaaaaaaaaaaaaatggtgcatttcctcgtaacaattgtgttggtgaaaacttattttgtgtcaacagctcatttgtcatggcaagatccgaccactgtgtatgtgtgtctattgcgcatgtcagacaaaatccgagtggaatatcaagactgtcattgctctcttgcacctaacttactgtcttaataatcaattgtttctctcttttaaggccgtatctactacaat

SEQ ID NO: 105466 - DNA, 331 bp, Glycine max
  unsure (1)..(331): unsure at all n locations
tccgagttatgttggtgatctgntactaacccggaatgggtctatgcaaagacaacggcggcataactagcctgatatatgccacaggatatcgtgggaagtatgggttatgctatatacccactcacgcagatataaagagaagcattgcgggaaggaagagcggtagtcaaagcttgcggttgatacaacaaggtgaaagaagcccaccctgccacataagtatgagctttatatgcgcgggtctcggggacgaatgtcaagtggtcgcgatataccaagataatactcctgagtcattgtgattggtacgaccatgccctcctgattt

SEQ ID NO: 105467 - DNA, 452 bp, Glycine max
  unsure (1)..(452): unsure at all n locations
cttaagagagtagaggctatatgatggtctcttcattatcaatattcaatctctggtttattcaccttccaactcttccactgctcttaccattgtagatctctcttcanataagctcacattctcaacatttcaactgttgtcaaactttattcttaatcttcacgagctctatcttcgagataataacactgatgtgtcatctcctctgtgcccaaactatccttctctcggtatacatgacctttcctataataatatgacatcatcagtctttcaaagtggtttctacttcagctcataactctctaatcttcatttgccaaattgcggcctgacggatgagacgattcttatcgcatcctctttcattatgagttcatcatcttctcttgttcccttgatctctcctcatatcctttgaaatcatcaactatattatactggcttct

SEQ ID NO: 105468 - DNA, 495 bp, Glycine max
  unsure (1)..(495): unsure at all n locations
tattaagtaattatagaantntccttagacttcacattattgtctctaactnttacaaacggantttgaattcaatattgtcactcttgaaggttngtactgagtattcttggctttttaagtaaatatatacatctcttcagacctatacttcgctttgtgacttccgaacttatcaactattgtagttcttgaatgtatatttacctctacagattcacttaaatattcttatacaagtctttccaagaaatcctacaatacccttatcgtaaatcacacaaggtaactcactcaatgatctttcctgctgttactatcaaattcaaaagtgaagaaaatgtgattggcaaactattatgtgagtagataccccctgtctaaagcgatcgaatcaatccaatacactagttattgcatcaatccatcatacataaatagagtgttcttcatagtctgacttaccatcctatatctcaccatcacgcactatcc

SEQ ID NO: 105469 - DNA, 452 bp, Glycine max
  unsure (1)..(452): unsure at all n locations
atgtggtacncatcacatgtggtactatgtggcggtcggtcgatggtgtcacaacaagcttccacatccacanatcgcacatatacccaccatcccctgtngcccacctccaactgagctcacgtactcccacgtagcccatatcctcgtttctctcaacactgagtctccatcaatcctcccaagcttctccaacatccaagtaattccacatccaattcatcacatactaacaaaccaagcaatacagggcataagcagagaactctgtccataactcataccaanatcacagctntttctcacttaatgaccccagtaacatttccttcgtcccaatgtgataaccgatggatcgactcgaacatttactggaagtctctaatacataagtctacattttgaccgtngggatctactagcaaacatncagaactgattctgtactactc

SEQ ID NO: 105470 - DNA, 394 bp, Glycine max
  unsure (1)..(394): unsure at all n locations
gtcttgactagtgacttctctttatcttcatagngaatccaatatatctccctatatttgtggtgtggacaaatacacgtatataggagaactcggtaatcttcctattagaaatattctttgacccccatgacaaaagactattgaagattgattntcaaacctgaggctagacagaattgttaaatagtattctttcacaatcttacttgaacacaaatagctttcacaaaaaagagacactcatcatttatgaatagatgacagataattggaccatgtttggaaatntgaattggttgccaagcatcatcactttgaatcttttcctacatcaatatagcaagtgttccatgcatataagaggtaaggtgatanaagatctccctgtcgt

SEQ ID NO: 105471 - DNA, 286 bp, Glycine max
  unsure (1)..(286): unsure at all n locations
aaaaaaaaannnnaaanaanaaaaaaaaagaagaaagaaaaaaaaaaagaaaaaaagaggnnggagagaaaggagggggaaagaacaaagagncaaaaaagaaacaaacaaagagaaagaaaaaaaaaaagaaagaaaaaaaacgaaaaaacagaagagagaaaaaaaaagaaaagaaggagaaaaagacagagaaaaagagaggaggagagaaaaagaaaaaaaaaagaaaaaaagaaaaaagagaaaagagggaaaagaagaaaaaaaagaaaggaaaagagag

SEQ ID NO: 105472 - DNA, 308 bp, Glycine max
gaagaagctatccttcttagtagctttcataagttggataacagatgaaagatctagcttatggtgtgatggagctgaatgaacttcatcatcatttaacataaatagatatgatcattggagagaatgtgcacaagctcacatcgattatgaagacctcgacatgaggaaacataatctccgtgtggtatgacgacaacactagaaatatgctaacatcttgaatggtgagcttttgaagaattaagaatgtaatgggcaacctctacatgttgctaacttcatgaggaaatataaaccttacagac

SEQ ID NO: 105473 - DNA, 331 bp, Glycine max
  unsure (1)..(331): unsure at all n locations
ccaccatcccaatattgtgaaaccatattcatatatcattgtagaatttcaccgatcacttgctgggctcacatntggacatatattgcatgagaatgagggcgacgtggcatacatcattgctacagaatacaacatatgcctaaagccttcttattcatattcttatctcatgaaatcaaggcataaaaacgtaaacgatattgccctacagatattatgcctgtcctcacactttacatcaccatatgatgatgaaatactccgatgtgaatccataactcaacgatcgaatgctttcttgttggagtgtgttgaaacacctataatg

SEQ ID NO: 105474 - DNA, 428 bp, Glycine max
  unsure (1)..(428): unsure at all n locations
tcttctcaatcaaattcctagcctgaataggagtcatatcaccaagagctccaccactggcagcatcaattatactcctctccatgttgctaagtccctcatagaaatattgaagaaggagttgctcagaaatctggtggtgaggacagcttgcacacaatntcttgaatctttcccagtactcatacaagctctctccactattntgcctgatgcctganatgtcttttctgatggcagtggttctagatgcanggaagaatttctccaagaataccctcttaaggtcatcccagctgataatggacatgggagcaaggtagtacaaccaatcttttgccactccctccaaagaatgaagaggagcctntagaaagatatgatcttcttggacatcangnggggttcatggtggaacaaacatatgg

SEQ ID NO: 105475 - DNA, 292 bp, Glycine max
  unsure (1)..(292): unsure at all n locations
ccttgatactcagctcgaacttctatatgcatatctntcgttatacctctggattgatacatataaggagcaactcgacttgtaggtgtacatggtaaatataatagatctcagaatgactttgttaatgattgtactgcgtatgtaatttttatagctggcatgtcctgataagatccttttataggccttagcacggatgagaatgaacttcattttacgcgtcgctaattattatcggtttcgatgtctgatgcgctcagagagtgcttatctcactaagccaatcatg

SEQ ID NO: 105476 - DNA, 340 bp, Glycine max
  unsure (1)..(340): unsure at all n locations
atgccncacattatntccatgacacanatgcaanaatgatgatttggaaactctatgcaaaactggtcatgcatgcatctatgcggacactcaaatgtcaaaattttatggtcatgtgatgctagggcccangattcatttcctctattttatatcaacccaatgtttccaacatatgttcttttatccatttgtgcattcatccaagtccatttcgggcgtccgggaaaattcacagcatcacccttcatgttacacacatttgttttgccaaaactagctatgattagcgaatatttcttcaaagaaaagatggaagtcatctcttttcanaagcatg

SEQ ID NO: 105477 - DNA, 390 bp, Glycine max
  unsure (1)..(390): unsure at all n locations
ctcagcttcaaaggacaagaaatgcaatttggttgtggcagctgatactcaccatacccatcaagcanggacaaacatgactaatatacctgggcatgaagggactccctccatcggacaaccatattagagagcatcatacgctggcacttagtcattgacgggattatggaggcacaactcccacctgaatggaagacgctgaccatcgatcgttcacgaatgacgatgcaatcatgtgttgagtgtgtcctacaancgtgaacgatgcatcctccattggtatacttgattgttgataaaattcattgacttattcgcgacacttatcatgtattgtggagctcaatgtacgatgagcataccacaccatctgacagttgtggcact

SEQ ID NO: 105478 - DNA, 426 bp, Glycine max
  unsure (1)..(426): unsure at all n locations
gtcacccagccgtgttactcacgcacctagtctcaataatgttggacgtgaagagatgtgttggataatactcatgtctcatgttcaacactaatcataaaggaccacctaccatagttgtataagcaccaagcccaacaattgttggacgtgaggaggtgtgttgaataaaacttaagtcacacatcgcatagatattagaccaangacgaatatattattgattggacacactcaccacttgagctaacttttggaactgagttaagcctacactcatataaatctaagaaacatatttgcagagatgatatattatgagatataaatgtttgagaaaatatgaatcatataagatgctgtgaatatctagaatatataacacatatatatagtttagccgtaaagttacctctgatccaatta

SEQ ID NO: 105479 - DNA, 430 bp, Glycine max
  unsure (1)..(430): unsure at all n locations
gctgcttctacgcaccatcagaggaaggcctcacaccttgtattgcactatgtttatatagccncaacgcaagggtgcttcatgtggtccgcaaggcatgggaattggtgcacaagaacgacaaggaacttataggaagtagcaatgtggccgtccgcggctaccgtatgtggttgatagcctacacacaaagtttgtgatggctcacgaagttgagagccaataaagaggtggtagtttgaactctggaggaaggcgaataggtacaagtcctcaaaatggagctcatgatagcccaagcggtcaatgaaatgttcagtcaacagccagcctctaggatccaataagagaacgccgaactgagagacgtctacatagccaccaccaatgccttggagcaagagaccaaaatggcccgcatggtataaca

SEQ ID NO: 105480 - DNA, 480 bp, Glycine max
actaagcttcgaacatggtctgaaactagtaaatggggcagaatgagacaatacacagtctgaatatacaaatatcaagccaggtctaaagagttgtggttactttctccggaagggtgaggaatatgatctgaaataataataagtactgctggaagtgcatatattcaacatatatgatgaataaaagtccttaacacagaacatcctacgacgatattttagacatgataggatttcatgaccccacctaaaaaaaatacacattaggatttggtctagctactgcgacttatctgtaaattctctgacagcacaagaacatggagacacatctcatcatcaataacagattatcccaattaagaatacatatatgtatacagtataactcccaaaccacgcctagtttgaagcttatttagatactatatgcttgtgaatgataaatatactgcagattggattactatcagctca

SEQ ID NO: 105481 - DNA, 240 bp, Glycine max
gattatcctactctgatgaatgggaagccttgggcaaatggagagaataacaacgaaggaacaatccacactgtgatagtcgttcccatataaacacatttcctactagcttcaacatgtgcatacacagccaatatcagcccttctcattacccaccatgctatgatccaataacacctaatcatccacagaggccactcttaaatctgtcacaatacctgcctgctgcatatcttata

SEQ ID NO: 105482 - DNA, 413 bp, Glycine max
  unsure (1)..(413): unsure at all n locations
gtatcatcggagcttaaccgttggttattgcatgtcaattcaacacanaaaaagagacccacataaacattattattgtttaattcagaggcaacttactatataatcaaattatcaaaaggggagataacaagaggaccagtcattaactcttacaaacaatccaagacttgatctctcaagaacataagcattgtcaacaaaacccagtttatacaacggcgacgaatcaacaataggcatacacattaacgagtcaatctaatttgactgcgtcacaattgtaaacttacaccactcgttcaaagccaacccatattgatatttgaaacaatttttgacacataagagagatgccttaagcaccaatctcctcttcttgctcctcttcctcatacgtctgctcatcagca

SEQ ID NO: 105483 - DNA, 435 bp, Glycine max
  unsure (1)..(435): unsure at all n locations
cttgctctttannttgtgatggaggaagcttaccaatgttgctagttcattgttagngtccaaactgagtntggatactaagccccatcctatgccatacagacttcagtggattaatgaagatgaagaggtaaaagtgactcatcacgttgaggtgttgttcaccattggaagatacaatgatacggtgatgtttgatgtggttccaatggaggcaactcatatactgttgggaagaccatggaaatatgacaccacagcggtgcatgatggattcaccaacaagatttctttccagcaccatgaccagaagattattcttaaacctttatcccctagaatagtgtgtgatgaccaaatcagaatatgagactagagagaacttgagatagaatagagtgatgcacctaagacgaatatgaagaagatgtgtga

SEQ ID NO: 105484 - DNA, 487 bp, Glycine max
  unsure (1)..(487): unsure at all n locations
tgtgtcattaagcgatattccacttttggcgttgagcacgacctcttgtattgatcgaattacctcctcgggttgccattgcacttatcgcacatgtctcgttaagatagtagttcaaagatgttattcgaataatctcaatagtaaaaaatgtatgcatgaatcaagacagttgcagctcatgtttgaaggtgatccaacggctaacgagtctgggatcatggttttactgaaatangctaaacaaactccacataaccttattgtcacaccacgcaccgcacacaataatcacacaacacctcactaatcaacttatcaatgaatgcagattatattaacatctttttcagtataatattgatgctgtacaaagactttcttgggttcacccaagattcatatctgggatagactgctggaccctgaaaaacatctcttgctatatatatcacatagttaccatgacttacttcctgctagatgt

SEQ ID NO: 105485 - DNA, 339 bp, Glycine max
gctgcccttctagtgccaaaagatgatggacgtgtacttatagagtatgggttgatgatgccgctcttcatggcatctgctagcagatttggtggattagactgatgcactttgccttttcccttttgatcaatttcaccatgttgttggtgaaaaccagtttctgcagcagcaacaagagcatcatcagcccagccatgttcagcattttggcattcttcttctaagactattattgttgggaagatattatgcacttccttttccttgtcaatgggctgatcatgtacatcacttgctatgcatggcgttgaactttcttcattcaaaagttccctt

SEQ ID NO: 105486 - DNA, 348 bp, Glycine max
  unsure (1)..(348): unsure at all n locations
cttactgcttttattgttgaccacagagtggtacctggagatatgtncgcggggtcatgagaccttgtggacgtcatgtgaggtgctattgcccaataccaagcttgaccaatcccgacccaacccgggcatagtcggtcagtgagaacctgtgatgtacctaaacaggcgagctcctggcagtcaacagataaaaggaacanagaccacaaagcatggaagcttgtggtggctggccagctgtgaaacttgattgatatgtgagatatggtctctggtaatcgattaccaacgtgggtaatcgattacaatgcttataaatgaagacaggagactaggatggtctct

SEQ ID NO: 105487 - DNA, 462 bp, Glycine max
cttacctcctgatctgatgactaattctaatactataaatagtcctatgatgacaacattgcgtgttgttatggctgtactctatttagactcgctatatttgctaggatctctagacaaccgagacaaactaatgttagaaacttgacccaatgcccagatatcatcagttgtgtttaatatactcagctgacgactgtatcgatagatagttagttagttagaacagtgaacaatgtacattaataataagagggaaacaaactatagacggtaggtttaatctggaatagagaaactaagtctctctatacctccagagagagagaggagagaaagtgtactcttgcttctggtctgttgacttcagctggagaaagataaatcttctattactctattttggccactttatcacaaatacatggtctgatgtgacaaataatctcctgtctcacatct

SEQ ID NO: 105488 - DNA, 450 bp, Glycine max
  unsure (1)..(450): unsure at all n locations
cactaagcttctactatgtggcacggcgggcttccttcactgtcttgtctgcaactctatctttgtaccaccgctcttcttcccgcgatgcttctcttcatatacgcctgagtgggcttatatcctaaaccatacttcccacgatttcctatggcatatatcaagctagctatgccgccgttgnctttgcctatacccattgtgggttcgttaccattccccaacagaactctggccatcattactgctggatctgacaagcaggctctgccagagaaggatgccacggaggatatgcttaccacctcaaaatacttggaagcagtttctaatgactcctctgcggtcttcacataaggcatataggatgggcagctcaccaagatgtcttcctcacctgacacgatgaccgaatgctcctccactacgaatttcaacttttggtggagt

SEQ ID NO: 105489 - DNA, 407 bp, Glycine max
  unsure (1)..(407): unsure at all n locations
agattagtagatatgtgaccgtgacgtgagtcttattatcatccttaagcgatcaatcctcgatcgtcttcgaatcatctactcttgctatcgtgtcaacatcagctgttaacatctttcagtacatctgtcaactctctctacagaagtntctgatgcaattctctacatctgtctacaagtttgtgatcaacactctctctttcacgaaaagatctttgtacaagaacatgcgctattagtcttttcattctccgtccctttgccgaagaacgaaggattgaccgctactgctttcggtctctcttcttcctacaaagattcaaggactaccgctgagaattcttcgatcttcctcccctaagcaaaagttaaggatacccccgaagattttgatcctttcaaga

SEQ ID NO: 105490 - DNA, 428 bp, Glycine max
  unsure (1)..(428): unsure at all n locations
ttcagtgctctgtgtcacacacccacatcactacatgagagagctgagagtatttcnggttttactaaggaacgtaatttggaaatttcgaccacgccaatgtgaccggagttcagtgtatgttactaaaataacatacattccatgataagataatgtttacaaagtctctctctctaatggttttcaatggaagcataagacatgctatggcggttccaagtccgaaaagatgcacatacaagatgaatctacaagatacaatcatagaccatgatttccttaagaaacgaatatcatatatggtttcgtctctaccaaccgaagccagtggaattctgtttcgtgaaggtctctcttgtggtttaatgagacaatatagttgtggggtatggggattggtatgataagactcgacatataatgat

SEQ ID NO: 105491 - DNA, 290 bp, Glycine max
  unsure (1)..(290): unsure at all n locations
atgacagccatctgtttaggagcgctgagcaccaccagcgcttcgaggccatctaggatggtcattcctcngaagatggccactcaggacagagttactgcttctgaaagatatcgcggggggcatgctgtaccccttgccagttcactccaacgttgacctcatagttattgcctatgcgtggcctacaaaggagggtgtgcgagatatgcgatcttgggtgagtggtcatnggatccctctctatgcgaatgctctcagcctgttcttgcgataccctttagtgctgg

SEQ ID NO: 105492 - DNA, 211 bp, Glycine max
tgtgactatgccttcgaccgaacacagtcgagtctctgtctaggccttgttctaagcgggctgcagcacctgctccacttacctaactgaactggacgcggctgcggaggctttacactctatcgtactctgaagatttatcatgaccttctagacggaagtcatatgatcttgttacgccgattgatcggccttcatctgatactgcacg

SEQ ID NO: 105493 - DNA, 455 bp, Glycine max
cagctgacaattggctagcacaatgccctcggttgagatgtgcttttgcacttcttgcgctacacaagaggtcaacaattgttgttttgaaaatcccaacgatcaattcgtggggacatggattatgaacccacagtccacatttgaagaccatacaacggttaacgaatctatgatcatgattttacttgaataggtctaggtaaattttgaaatctcataatttcaacttatctcaataaagaactctacataattcaacatccacatcaagagaatcaaacattactaattcacactataccttaattcatccaagtcaatcatataatcaaataacacgataaatacatttaaatatcgatttatagttagcgaaatatctgggtgtacaagaacactcaacagaaggaatattctctcataactgttgtagtcaactagtggagtcaaaa

SEQ ID NO: 105494 - DNA, 273 bp, Glycine max
  unsure (1)..(273): unsure at all n locations
gagacatacttcatagaagcacttgtctgccgtttttattccttcaatgtggtgctgtcgcctatctctctatctacctcatgtttttgctgcattgaagcatcgntgcagcatcttatcaaggctgatcttggaggtgaagctacgtactccatggctgattccctagaggatggcgccttctcttacctggatttctttgtctttcgctgcatctccatggtggaacagcaccattaatgacttcatagaaactctagatccagcctccat

SEQ ID NO: 105495 - DNA, 396 bp, Glycine max
  unsure (1)..(396): unsure at all n locations
aattgaagcaaactctcacctcacacaagtctataacatcaatttatacttgntcaaactggatntacacctaaaatttcaccgaatcaaaatttgactcctcaacacccaattctaccctagaaatggctcttgccttcactttggtcatttgtgtttctctcttgcacagcccaagctatctcataagtcctaaatgacatttcgaactaagattaactcattttaacctctatttaccactgaatccagatttagccttccaactctcaaagcctcactctttgtccactcataacaccacattctcactttctaaccctangttaactctacccttcatctctatacagtttcatatgcatgtcagcacatagacatcacaagcatcatcat

SEQ ID NO: 105496 - DNA, 359 bp, Glycine max
  unsure (1)..(359): unsure at all n locations
ctcagctgtatcgataccacatctatatcgttaccgaggagtatttctataatattctcagcaatcacatcttttcattnggttcttgaatggccatcaaagacctatatatatgtgactngagacacgaatttgctaagagctttcagaacaaaaaggtcttatcctcttacaaagcaaaatcgttctatcctcttaaaaattacttggccaaacacttgtgattcaataaagaattatttgagtgctcaaaatgttcaatctatctctttcaagagagattcattcttcttctctttctaattcactaagggattaacagaccgacggtctcttgttgtgaaagaattctatacata

SEQ ID NO: 105497 - DNA, 392 bp, Glycine max
  unsure (1)..(392): unsure at all n locations
tcaatgcaggaaaagattttaactaaagaataccatcctcacgacactataatattataatataatataattgtataaaaggagaaatatgcgatgatattttggtggtgcgtgcctctctgtttcgtccttatttctctggaagaggaaactatatataagcaaannaaaaaatcctcattacatgtgcatatcattgttgactttttggaaattgatgggtaccttaagaaantctaatctatttttcatctatctaatgaacataaatttactaaacgaaatattctatttcttctacaatatatataatactaccgcactagctgatntgttctatngntattgatcctaccatgcttgatcatgatatttttctgtattgactataa

SEQ ID NO: 105498 - DNA, 254 bp, Glycine max
atcagagcgtgtgattcttgcgtaatgggattgataatttgaaagcgtgattgatggatgaatagtgacctttgaatgacaaaggttgtggaattacgtgaattacgtggaagcaagattatttggttatatatatatatatctacgtggcttgcttctctattagttaggaatgtgataactcactccctgtgtattgtttgtgtttggatcctatgttgatcttgaaccttgagttcggggagcagatgatt

SEQ ID NO: 105499 - DNA, 346 bp, Glycine max
ttatggtttacaaactaaggttcctattagacaccacgccaacccttattgtatatgaaattcaacctaattggctggggagacattgcaacatcagttctaacaccaatgagctgttgacagtttcatgcaacgaagtttcgcattcaaaatatgcgaaataccaaggaggcaaaagcattttgactttaaaccctgctgccagctagcttgttactggcaccaatactatgaaagaacactcctagcactagtggtcaatgaaatctcctgggactagtgctgggacacttaccaatgttgttgttaaagagaaagtgcgaaggtctaagtctgatcaaggcat

SEQ ID NO: 105500 - DNA, 386 bp, Glycine max
  unsure (1)..(386): unsure at all n locations
gggaatctctctcaaagtgactggcattaaaattgattatcacaacctcgcttgatacatgtgtgtctacagatggattgtctaccacataatataataacactaccccttaatataattacacacgaagaagaagaagatgcttgggatattattttgctataacttgtgcancgtggaacacttgcaagactttccctcatgtgctatagattgcaagatctgttgtaatgaatgtgatggataccactcgcatcagtgtgtggctcgaccatgaagggaaaatgaatccatggggaacatcattgaaaactgacaatcgaaaggagaaagtctaacgactcaacgactatacattaatgaaagactccaaatgttctaggctg

SEQ ID NO: 105501 - DNA, 495 bp, Glycine max
  unsure (1)..(495): unsure at all n locations
gaccgcgatccttaagcaccgcggctgcagcttgcttaggctgacctatactttttctaacttacctatcgccctcacagcttagattgggagctaatcaatcttgtggtcgactctcaccactatgataccgcgagatccttctgttccctaaccttctgtctttcttcacgccgcaatccatgccttgcgaactccttggagtacccctcgcgttgtggtcactgaaaccctatgcgatgatgctttcatctgatggcacttctctcatggggtagccaagctgtcttatggcgaggacgggnnatataataatacaaccccttgtcccatcaagagaacatttggacatacttcgcatgaagatagaatcctgattctttctttcttctagcgaggaaaccaantaacagacgcccctccatgctagccaagagttgggcacaacaacaattcttgcccgctctttcacatcccggtcgaacgtgtatacat

SEQ ID NO: 105502 - DNA, 216 bp, Glycine max
gcttgtgtaatcatacactggttggaatcgatactagtgatgtttgacaacacaaaagtactttcaatgggtttgcttttcaattggtttaagttttcttaaagtattactcttctaaatgcgccttctttgccagacatgaagagttatataagctagacttctggttgcgtcttatatcaagctttctcatcattccatcaatcttatacaatc

SEQ ID NO: 105503 - DNA, 297 bp, Glycine max
  unsure (1)..(297): unsure at all n locations
cacttttncacctacaacactaccacttactttaagttcaccccccttttcgtactttatgggaaaggtaccggagccttataggaagttttcggagttgaatttcatctttttttctcttccctttcaccaatgttaagagaaatatgcttacccaagggtttcagaaatttacggaagcattcggaagcccagaaaccatttttaacaatgtggnggagttgccgcccaatgcttctcttaacaacccaacttgataatgtcccgagggctagattaaattctattaccccctat

SEQ ID NO: 105504 - DNA, 417 bp, Glycine max
  unsure (1)..(417): unsure at all n locations
atagctctccaaaaaaattatacacattattcaacccctctcttggagcgtatctttatttcattcattcttttgtcttggatccgattatatatattgatacttggttatgcttcgctgttggattatgtttccttgttcatcttcatctagtaataaactctgttgctactcccttatgtgctgattccttatatgctcagggatgaaaaggatgggttgatgtgaaatatgaattcggatatagtgatcttcaaatgtacacactatttaatacttaatatacacttcacccaagcaatttctatctattttaaacttccataanatgaactgtcacacaatgcaataaaataataatcaaattaatgtcacattctcatttaacaacatatagtggtcataataactataagt

SEQ ID NO: 105505 - DNA, 123 bp, Glycine max
tcgtcttacagaatacagagagttttactgttttccactctggtatttccgcccgccagcgtgactcataagatcagatgacatatcttgtgagcgcggaagattacatatatcttcaagtgt

SEQ ID NO: 105506 - DNA, 367 bp, Glycine max
  unsure (1)..(367): unsure at all n locations
ttctatctgtatgctttcattccccattatgcacattgtttnttttagaaaaaattgtgtgttgctctgatcggattgggggtttgtttctttaccaagcgtcgttcgcatttagtgaaagatgtcaagacttcaatgtcttatgtctctacatttcacgacttcaatgtcttctatctttatatttcaagacttcaatttcttctgtctntacatttcaagacttcaatgtcttctgttgtacatttacagacttcatgtcttttgtcttacatttcaagacttaatgtttcagtctttgtattaagacttcatgtctctatcttacattcaagattaatgcctttgcttacattcagactcatgc

SEQ ID NO: 105507 - DNA, 243 bp, Glycine max
acttctttattataattattgattagagacaccatattaaaaatattgtatttaatttttcatataaaatatatttttatatattaatccttatatattatgaagacacatatctgaaataactatgacgattaaattaatttggacacacaatattttatctattttatctttcttattgcgaaacactaaatacatggatgatttaacagactatatgaagctgaatatcattatgagcta

SEQ ID NO: 105508 - DNA, 481 bp, Glycine max
  unsure (1)..(481): unsure at all n locations
ctgcagctatcatggccacaagaactaaatagagatctcggtcttatgaccactacaaatcaagtcccaataatattcgtctttctctttgcctaacacatgatcaagccttgagcataacaagcacggtatttgccatatgaataaccagcaaacttgttttacataagacaaaaccagctctataaacacggataagaatcagcaaccattcaagaatagccgacgccgaggtcgtggtaacactcggagagagcttacgccactcagaagatgagaatntaggggtaggcatcatccaccaactcaatcagcttcaaaggagaaaccgattgctgaaagtgaaacagataaaactttgaccttcttccaggagatatgaacaatcaggcaacgggtgaagaactgacacacttagccaggaaaaaagtaatcaaatcagaatattgttatctatagcattctcatccatatctgaatt

SEQ ID NO: 105509 - DNA, 280 bp, Glycine max
  unsure (1)..(280): unsure at all n locations
tatctntcgcaagggctagtctatttcaacacattccctcactagagatctcattctattattctgcaacaaccacatgaaatgatgagggaaagcaaaggcccgaatgggtcanaatatagactatgatacctgtcttatgggtccacactagagacatctgatatgaatgtacctacggtctttgaaaagtgaattcaaaatagtaaacggaagcttgccactacgcactcaaaaatgtggatggtattaataaactagtgttcacatcctgggacat

SEQ ID NO: 105510 - DNA, 247 bp, Glycine max
acgagtgagtgaatgagtagaagattggttgttttaatggccgcaatagaatattttgtgggtatgttactggaggaaaatatatagagtttggaagatttacatttttgtctgttgaaggatttaatcttatgagataattatggtatagataaaggtatgtgtggttttggtgttacgaatacatttaagaatggtggtacattgaaggatgtgatataatttttatttgaaataattataaaat

SEQ ID NO: 105511 - DNA, 275 bp, Glycine max
cttcacttcaattcataatataacactcgattcacaaacccttattagctttccaataggaaaccaataattacccattctatgaaggaaataaatgtggcagtaatcggaacctaaggacgcccacaaaataaatattagcggcttatcgcaaaatactcctgataaagactgtttacaattgattcaatgttttgttcttatgaaattcagcaatgagcacatgttaacccatgatgaacaactgttacaattttttattgcttgacaaaaaa

SEQ ID NO: 105512 - DNA, 351 bp, Glycine max
  unsure (1)..(351): unsure at all n locations
atcctctgagtcacctgcngctgcagcttgtgtattcaaagagactatgtcaccttattatgactgaacatgcattnttatctaattgattcattatgcgatattatttagctgtagccattaaaggataattattaaatactcgttgcgttaagaaaaaattagttggtgcaaccacaatcaattacgcatgtacgatacatcattgtcataattgataacatataatgatatgcatgcatattaaattttgagcgtaacacgacattgactgacttgacaacacatcttgatgcacgacattggttgagtaggaaacataaacatganacatgttcacgcgtgttcttt

SEQ ID NO: 105513 - DNA, 322 bp, Glycine max
aaaatccatgatgtgaatttttattcagcgaacaagagactctttttttttaacaatttcttattcctatttattaaatcaacttatccacttgtgagctaaagttaaatttatagagattgaaccttttgataatggaaacttattcatgcttaccgaactattactggcctgctagagggggtatatatatccaccaggtgagtttatttattgttttctgactcaagacggacagaaggatgctgatggtacttgacaataagacaaaaactatggacgatgcaaggaagtctgcatatatactattgcatattggata

SEQ ID NO: 105514 - DNA, 322 bp, Glycine max
tagttcctgatgtacaccttcaaatggtgctcgtcccctctttcttttctgcaaacagaaaatcaaatgctgtcaaaacatggatgaagtccctcagaatatcaacaatcaagaagacatggatgaaatcaccaattaaaagcacaactacctatctttcagagagcctttgagtaattttcttgtctccttatgtggtggggttttgttactaatctatactttgccttcaaaaaaacttatactatcctctgtcattaatcaattttgatggtattgataaaagacatggttctcacctgctcactactctcctctctct

SEQ ID NO: 105515 - DNA, 229 bp, Glycine max
atacacattagcctgagagcttgacacaaaacaatcattaattgaaatatacatactattcataaatcccacaagggttatcacctttaataacctacatatagctacaaactagattccaaattgtctctgtgctcaacttttctaaaagattggggctgatgtgaaattgtgaaatctgcctatctaagaaattaaagttgatcaagtgctaccccctgctatgaga

SEQ ID NO: 105516 - DNA, 158 bp, Glycine max
ttaatttgtttgatttgagaaagaaaaactattatcttaatctttaatagacagtttctcatgtaatctggtataatgaattagtctcgggcccttgtgtaccgcatagtatgaaatgtgaatataaatgccttggataagcatgagatgctcacata

SEQ ID NO: 105517 - DNA, 159 bp, Glycine max
cttaattttaggagaagattattgcccttttttagcgggtagttaaattttgtagccgaatttgaaaatttttgggggctaccaatataacaggccatttgttgggggagctgggtttaaaaaaatttttttttttttaaaaaaatatttttatatatt

SEQ ID NO: 105518 - DNA, 405 bp, Glycine max
  unsure (1)..(405): unsure at all n locations
agagtaagaatgaatcttataggactatgttacgtcctgtatattgactgaaacttannatcgtagtgccacttgcgagttaagacgtaagagaataagctttgaagttagtggagaagaatatatttataagaactaacatctctaagagaagattttaaatgctgtcagctacttgtacatagtggccggtagtgacctctggttcttatgataaatataattcgctttctttgtctagataatagaaaattaaaataaattacttgatcgaatgatatatctataccagtaagacacccccatgactacaacagactcgtgggtataatatcgtgatgacctacaattgagttagcttgtaggaactctgcttaacccgttagtactcaaactagatttgat

SEQ ID NO: 105519 - DNA, 392 bp, Glycine max
  unsure (1)..(392): unsure at all n locations
atctcagagtcacctgcggctgcagcttacacttntgaaggattaagctttcatatctctgataaacgcaatctcatcggatagcctatgactttatatcacactactggatagctggggggttccttttagaaacttggtgtgcccctctatcatctagatataatgtatggcactatgctcccttgtntctcagaatactggcctgattcagaatggagcacgaagctttatctatgcangtaagctaagttgacacaacatttttcaggaattggaattctggagaagatttttcttgcctaatctgtctggaccgatcaacgctcatgctgtaatttctgtgggcaagcgaatatggcaaacagctctcgttgttggtagtatttgtc

SEQ ID NO: 105520 - DNA, 226 bp, Glycine max
accgagcaccgagctgcagcttaaggaagctgattgccaacatgtcttatctgtctattacactccatccagactagaattgagcaaaattctactcacgctagtcgttactccaggttaagaatacactcttcccggttgggccagctttcttctcaatatactatcactgacaacaatttcattgcagctcacatcttggtcttttttgtctaatataaacact

SEQ ID NO: 105521 - DNA, 298 bp, Glycine max
  unsure (1)..(298): unsure at all n locations
tgtattataagtgactctattgaaataatgtcaagcaggtagtcattgtgatgacgttcctacgcattgttaagattataaatttattctcttaagtaantttacaatgacaaacgcgactctattaacggcacaacaattcatttataggtcatatttctattgctaggaagttaaatcaagaagatactatacctcacagtttaatcacttgacagaaacacaatagttaatcatcaagagcagatgtaaatctatacttactcactcatgatagaagcaaaataacaatttattg

SEQ ID NO: 105522 - DNA, 203 bp, Glycine max
  unsure (1)..(203): unsure at all n locations
cgctttatgtgaaggatgtgactcttcactattctgtattngaatttcaacgctcaaaggtactatgaatctattactgatcgaggccgtacccgaatcatataaacatgataatgcagtatctatgaagtgatcctatgtcgttttccgacgagcagngacaagctcaatgttcataatatacttgcagttacagtaacgat

SEQ ID NO: 105523 - DNA, 402 bp, Glycine max
  unsure (1)..(402): unsure at all n locations
agatgatgcgctncatgagaggttggatcacatggagaatagagatccaatgaagaacaaacgatgagaatacggaatgattgtgttcctataccaaaaccgaatgatggtattaaactcaacaatccttcatttaaaggaaagaatgatccggagggctacttggagtgggagatgaaaatatagcatggttttctatgctacaactatgaagaggaccagaaagtgaagctcgccgccacggagtcttccgactatgctcttgtgtggggaacaagctacataaggagagagcatgaaatgacgagcccattgttgattcatggaccgagatgaaaaagatcatgatgaagcgcgttgtgccggctatgtactcacgggacttgaattcatctccaaaac

SEQ ID NO: 105524 - DNA, 308 bp, Glycine max
  unsure (1)..(308): unsure at all n locations
gtaccgcgatcctctgagtcacctgcggctgcagctttgctcaacattatatttgcctcctcacttctaaccaacaagagcagaatattatgatttttcaagtaacagatacaattccgacatggctcccgaccgcacccaactgcagaatatgttcaagaaagagggcgaaacctttaatgaatacgcgcagcggtggagagatatggtggcacatgtagctcctcccatggttgagagagagatgatcaccatgatgggtgacactctgncagttgtctactatgagaagttagtatgttacatgc

SEQ ID NO: 105525 - DNA, 507 bp, Glycine max
  unsure (1)..(507): unsure at all n locations
gctatctctctncttatnggatatatatatgnntattgaatgaaatacagccaagctagtgagtgaacagttttctttctcacacaatcatagcttcaagtgtatcatcaataacctcaataagaaataagcaaataaattcccaaattgagtagaaaaaaaaaaagaagaaagattaattgatgcaagtaacaacaaataaaccaaaaataagtcattcagataagcaaccagcaggaatttacaagaattacttaaatacagtgcattatacttaaagagatnnttgtgaaatgctagaaaacactgtgagacatctctttaggataaatactcattctgatccttgaaagtgtgaagcagtgacaaattatatctgaanaatgaaaaatcatattagtccctaaggtcaaaaagtgtacagatggtcttgtcgtaaattgtgaatcatttgaatgtgcaaataccatttgcactgctatacttgaggacaaagattaccttctt

SEQ ID NO: 105526 - DNA, 332 bp, Glycine max
  unsure (1)..(332): unsure at all n locations
gagtcatcctttggcactttagtctagcttctaccaactacccacacactcacaatgtgcaccaatttggttcgcaagcttaagtccaccaaatcatgcgcaaattccattgatgcatttcaccgaacacttggtgggcgcatgtttaaacatgaaaatcaaaggaatggtgcaatgtggcatgcnccattatctcagaatgcaccctatgcctaaggccatcctctacaacctctcaaatcaacaaaaacaagcaataattcaanggataatccctcatgntttgagcaaatacatgctacttatagcaccacaatacatcaatggaaagc

SEQ ID NO: 105527 - DNA, 126 bp, Glycine max
tatacctccaatgaaggttgaaatttgaagtctaatttctcagatgatcacagttggaaagttcacacacaagcctctatttatatgcttagtgccacaccacattggaggagaatttgattttta

SEQ ID NO: 105528 - DNA, 475 bp, Glycine max
  unsure (1)..(475): unsure at all n locations
ctaagaagctttcatgatctcctagctataatagaacatgtggacacttgttgaactatgatgaatgagagtcctgtgagacacaactcacagttcaacttctctccctttgtcttgcttcaatgtcgtgatccccactctctctgtctctcgctctatcttatcctccattgaagcatcctctccaagctctctatccaaggctcatcgtggtggtgaagcctcttcttccatggcttattccctagtggatggcgcctcctctcacctattctaccttgcttctgctgatctccatggtggaaancaccattgatgacctcattgagctcaagatccagctcataaagcccacaagcagcttcatcagtggaataaagccaagacttcactagggctcctaacctcataatngtttcttacctctcttcatgtgttctcatatctcatgatctctgctgctgtctaagtgaac

SEQ ID NO: 105529 - DNA, 210 bp, Glycine max
cggaccaaggacgcgcgcactgtgaaacagaaagaaatgacctcttttgtctcccacaggagcctcaaataatagctattgaaaaataaaagtgaggggcgttcgattaagaagaagataaaaatcctttgttggtaagaagacaaagacccccttggtattttatcaccttattatattggcggcaatgaatggcgtaacggagtacta

SEQ ID NO: 105530 - DNA, 278 bp, Glycine max
  unsure (1)..(278): unsure at all n locations
aattgttatcagaagaaaaccctctaatctactgtgacattattatgtaaaattactcgacanattattattcaaaaggcagtgatgggctctcttgcttgctttctttcaagatctgaatcaaatacacataaatagattanggaactcttgattttcatggagaaggctntaactacattataaataacatacgccattggctgtgatntgtacgtatcccacgacaatatatggcttataagtatttatactacncgacactatgtacatgtgta

SEQ ID NO: 105531 - DNA, 454 bp, Glycine max
  unsure (1)..(454): unsure at all n locations
ctctaagcaccgccgctgcagctataacaaatgcttattattcaatattctggaatagacgctcacagaataagccaggctattgngcaagcaatcaatgtggcacaacacaccacatgattataatgatggatggctcacattctcacacatgtgaaatcatcactttcaaattgagctttctaaactatcatgacatgtagagaaaancaaggatttcaagtcacaaaatgtcaagaacatcttatttcataacaattacccatttcttgaacatatnctataattcaaagaanaacatgcaaagtcgtacgtgcacatgaaatcgacccacaatattatactgacgatccgacgaaactaactacattaacaaattaacacaactaacatattaacaaaactaccnaactatgcaaaccaaagaacactccctccatacttatacacacat

SEQ ID NO: 105532 - DNA, 369 bp, Glycine max
ttccatcacatgcgcgctaaaccacattcctgttgccacttcactgagctacgtactccacgaggcatatcttgtttctaagacgggtcccatcaatcttccagcttcacaacatcaagccaaacacattcaaacagcacaagctatcacagccaagcaaaatagagcaaaggcagacgactctaccaaaacaccaaccaaatcacagcttttctcacttaaagaccccagtaacaattccttcatccaattcgtaaccgtggatcgactcaaatttactggaagctatagacataagctacatttgaccgtgggactactacaaaatcagactaatttgactacttttcacagcaacaccacagcttt

SEQ ID NO: 105533 - DNA, 454 bp, Glycine max
  unsure (1)..(454): unsure at all n locations
tgaggctgcaagctgntggttgacaagcttgctctaaatattctatgcttatgnctaggcaatactagtgtgatctgcactaaggatctttttgtacaccttcttgttgatggaccaaatggtcaataatggggtctaatcaacataatcgaatatgttgatttgacttgctttgatttgaacttaaaaaatgattatggagtaatccgctagttcttcttgtgcgttatattttcactcttctgtgatgcgtcttgtcactaagtcacttttccttaactcacaacttaaaatgatgtatatgtggattctgagtttcactccttattgctcagtagcacaataagaatcatgttgtcattttgataaaacatgtctcatagcacgtgattggttaagattggagtaattcaaacatggacttggctatttgaaagaactgctacttacacac

SEQ ID NO: 105534 - DNA, 343 bp, Glycine max
  unsure (1)..(343): unsure at all n locations
gctcaccttctggncctactcataggtgtttgatgatattacatgctctatttcatctccactccaagacgcctccggatcattcttctctttatatggaggaatggtgagtttaatacgcatcaattcggctttgtctaggaacaccaacattcnctcttctcctcctttcttcttcattatgatctctattctacatgtgatccaacctctcatggagcgcatcatctcnngtgttcattaacctctccaaatggtgcatcacagcttgcatatggaatngcgaacgccncactccatcattaggagtagtacctgacatctcacacatacacatcaaacg

SEQ ID NO: 105535 - DNA, 258 bp, Glycine max
atgccacagtacatgaatatataataaaaatctctattacaaagactactctaaatgccctgaaatacaaggctaaaatcctatactactagaatggccaaaatacaacgcccaaaagatagaagagccaattctaacatttacaaagaagagtgtaatcaacctttgacccatggctcaaaattaccctaaggtcatgagaccctatgccttcttggagctctatcaatcctttggagctctatccatcccttgggg

SEQ ID NO: 105536 - DNA, 503 bp, Glycine max
  unsure (1)..(503): unsure at all n locations
ggctgcagctgagtgaccacctaagtgagtcatttgtttcacatccttgtgaccctactatcattctgtatagtggaagaatctccatattggagaatataatcggacgctcccatactaccttaatactatgctatctacactcacgaagcgcaaaggtcgagaattcccaacaccttcctcttagacgctctcctttacgggccttcgacctcgacacaactatcaccaccaccatgcctaaactccttgcaccgtcattggatttcgatctccagcanatggacgatggaacatgttcatccaactgaatctcagtattgggagcaacaccaccactntgtgacactaacttnttatttgtacatgtatgcgatcgatctatctctgaattgattatataagattaataaagttttctacttgaataaggccgttacataatacaaacattgtttcactaatgcccaacaaatcaatctattactattgtgatagcggct

SEQ ID NO: 105537 - DNA, 149 bp, Glycine max
tcagccacaaccttagccacatgagagagagcattcgtatcacccaccgctaaattcccgccattgctgctgtcttcttctgtgacgaactcgttatcttcttgggccatgtctgcccatgatatcctctagctcggagtcatcacatt

SEQ ID NO: 105538 - DNA, 367 bp, Glycine max
agcactgagctgcacatgttgatactaccgatttttgtttctaacctgctaacctagaagctatgtcagacaattctttatattggggagaaagtgtaagatgaaagaaagagttagcatcccccacacacaaatagttgttgtttaaaacaaaaaagaaatatgtgtgttttacaaagagttgtagaacttttagacggatagcggaggcttttgacaaaaagaaatatctcggattttctagattggcttctatacacactaattattttcattgttcgaaactcgcgccttgttgtcccttataaaaaggaatgaaatgattatgaaaagacgatgcatgcttctgcctacgatttatgttgat

SEQ ID NO: 105539 - DNA, 285 bp, Glycine max
  unsure (1)..(285): unsure at all n locations
ccctacccaagcctctggagtatatgaaagaattatccttaatacctttataatcttccttgcttgcttacatgactaccaaacattctataagctgctgaaatgcctcccacaggtacaacccatttgatttagaagctcacattgctctcgaaattgcttctttcctatcactgataaagcagaatatgagtctgtcactaactcctgtaggcttntttctctttgcaccactttcatctggaatagacctgcataccattggatatccactgttggtgcggg

SEQ ID NO: 105540 - DNA, 269 bp, Glycine max
  unsure (1)..(269): unsure at all n locations
ttcgtaaccgtcggatcttctcgaactctggttcttaacttcacaagacacttgtccataatctgacccgtgagatcttcgagaagatgattggagtgtgatagaagcctatccacgaagcttctcgaggaagcctcttaatgaagcttntagagataatacatgctgctccctcggtaaacacgctgcccagcctttgttaccgatggatcttctcaaaattggatgcgactcacaagacacttgtcatgatctgaccgtcgtatcct

SEQ ID NO: 105541 - DNA, 479 bp, Glycine max
  unsure (1)..(479): unsure at all n locations
tgcagctatattctgtcaggggattnttgtttttctcatagcaaagaatctattcgcgcaggagacatccgtggttacaatctagatgtatgtatcattccccattataattntggtttctattggctactgaatttgaaatgcttttggaattctaatataatgaattgttgttattcaccatcatggctttgtacttaagtaagaaatttatcgttgacatgaatatgttttgtttttcatgaaaacattatgatatctattataaatttataagtgtttattcatatcattgatctcatttaatgaaatttgatctataaaagtggtaaaatcgaaaatacctncaatattacatggcaagacacattgacatgttgggactagaatatattttagtgtaaaatctaanggattcctagataccaatataaaaaccacatgatcttgaactatgatctcacaacaccaataacaat

SEQ ID NO: 105542 - DNA, 234 bp, Glycine max
gagagcgaataacgaatgcttaaacccgaatttccaatctaagatcggaagaataaaaaaggtgaaagaaatgaaaagaaagataatgatgaaatgaaacgaaagataagaacaggaatagaatgatttccgatcaaatattagaagaaagtaaaaaggaaaagatcgaaggataatataattattctcaatcaattaaggaaaccaagaaagagaacagaagatcttctgacc

SEQ ID NO: 105543 - DNA, 309 bp, Glycine max
  unsure (1)..(309): unsure at all n locations
gctttctntacaatcatctgctactgactacaattctattgcaagtacattcttgtctttcttgtctaaatacacacttgctcaactcatggaaggaacacaactccatacaatcatgaatcaattcaaataaaacataccgcattttcacaaaataaaaataaanaataaagtgtctactgcatgtctagaaacagtcaactattcaaagctcagatgacaactactctaataataaactatatgatgtaactaaggaatatgtctaacctaatatatataacccaggcaaagttcacaaaataacat

SEQ ID NO: 105544 - DNA, 389 bp, Glycine max
  unsure (1)..(389): unsure at all n locations
ttctatcaagacctccatcttaatggagagggtaccactactggacacccgaatgcanattnttatcgaggcaatagatctaaatatcttggaagccattgtaatatgtccttatatacccaccacagtagatagagtttcaatagatggtagttcatctagtgaaagcataaccatagacaaacctatagatagatggtctgaagaggatagaatacgagtacaatacaacctattagccaaaaacataataacatctgccctacgaatggatgaatattcagagtntcaaattgtagagtgctatggaatgtggacactcttctattacacatgatggaactcagatgtgaaagactaggataatgccctactatgagttgaatatt

SEQ ID NO: 105545 - DNA, 293 bp, Glycine max
accccttcaggaaatgatagagaactacccctatgagcctggtatactaaagaggtaaataggggggaatgtaaagacacaatttggctaatgggctgactttgaagatttaatgacagggaaaaagccacctgatcttttatgcttggtaccaaatgggagaattgatttttctattcactgattgaatgattggagcaattcctagctggaatcatgatcccaaacaatctttagtgctaaacaggctaaagttatttgggccacttcttggcctttcagccaatagaact

SEQ ID NO: 105546 - DNA, 203 bp, Glycine max
  unsure (1)..(203): unsure at all n locations
gcttacgtangatctgggacctagtcatggtttaagtctccacagaggccattgcctcccttgctcagtattatgagcaagcgctgaggtgctacatctntatggacttgcaactatcacccatggtggaagaatctgaggagacactangatgtgctctatgggggaggaaaccatacctcttcacagggttgtatccctca

SEQ ID NO: 105547 - DNA, 443 bp, Glycine max
tactaagcttcttatatacactcgttgctcacacacacaagaattcctttcttcgcatcatttacacacaagaatccttctatacacattttccttttacatacatgtataaataaaaaccttttttcttttctttatgaacatgacttttattcacagcgcttctttctttttattaggattttggttcatttttttttatgacgacgttcctaaatgaaagactctacacggttccggaattccaacatacattattgacaacaacgaaataagtaccgacgtaacaactcaagcgatatgtatgtacaaaacaaaagtcgaaacatgaaacaaacgtcagtcccttagtcaaacacaaaataagatgatatgtgacagaaaaaacaaatggaaacaaaagaaatatggatcaagagatctcccaatcatgtggccccgct

SEQ ID NO: 105548 - DNA, 250 bp, Glycine max
aattctacctctgataatggtaacaagaacagaaataaatcaccacatggatcttgtgcagtatgatgcatacttatgcaaactcatagggaactgcatctagatttgaggttctctacttattttttagaattatgttagtttgcgaaaatcagaaactcagactactcccatctgtcgacaacaaatacaagataatctttcagtatggattaattgtcctctacgggactgaagaacctggtaactc

SEQ ID NO: 105549 - DNA, 387 bp, Glycine max
ctctacattacattgatgtttcgatatattgcagggagttgtatgccatttctgttataagggtagcatttcttggtaaaaactaactttccaaatgtttgccttcgcaggaatggccccgatgaatcttgcctcaaagaggtccaggaatgacaaggcggccgaaggaactagttccgctccggagtacgacagtcaccgctttatgagtgctgtacaccagcatcgcttcgaggccatcaagggatggtcgtttctccgggagcgacgcgtccagctcatggacgatgagtatactgatttccacgacgaaatagggcgccggcggtggacatcactggttactcccatggccaagttcgatccagaaatagtccttgagtttta

SEQ ID NO: 105550 - DNA, 470 bp, Glycine max
  unsure (1)..(470): unsure at all n locations
catcatctgctagatgatgctgccctgcctaacttcaatgcatgtgtccatcccaggaatacctaatgtgtcaccacacttcattagaaaacagcatagtgcaagcacctgtctgccagcactccccccccctcccacgggatacctgatctaaggagtccaaccgatggatgccccagacaagattctcctacagaactacagattattgcaagttatctattnctgcatatgagataaaccggacccataatgcctgcagtggatataaagatntaaccatcccctcaagatgttaaactcttactactctattcccaccagatatcaacaggcactgaccctatgccatcacacattatatacatgcatttcacatatcacattcattatgcatatcacacacatgtcattcatgcttctatatacatatctattaaatatctacatacatttatatctatatatac

SEQ ID NO: 105551 - DNA, 385 bp, Glycine max
gttctaacagggtgatggagagtagaatttctgaatgtgaaccacatgtataaagttattataatacactgaagctccattaaaaactgaaccatgagtacataattattatactacattgcagctgcattaaacatgttattgttatttaatttcaggacctaaaggaccccttcccttatttttgagaaaactagcttaatataatctacttctataattaactaaggagttgagagaagctaacccaaaaacgcaatatcaccttcttatgtttgttcacaaagttcaattagagaatcttgataaagagaatagtatataatcactaattaatagtaaatattatagaggttcaaacctagtttcagctttcacaatgatt

SEQ ID NO: 105552 - DNA, 379 bp, Glycine max
  unsure (1)..(379): unsure at all n locations
ctgcagctgatatcttctaagctgctaagacanattataacaacanatcanantcttatattgntcaatatataanatctgagcaaaantatatgtagcaagcagttcattatggaaccataaactatagctactgctacttctatcaacaagtcagtctctttagaatctataatttataaagaaccaacggaccggaatgaaatcaatgaaaaagtattcctaaaaaaggttctttcaatcttaaaaacacagctcggttatataaaacactagtaccatacatgantagttnntagaatctgagttagataactcaattaccaaaatagctctgagtgtgngggtggtcttcactatatacttatggaatctatct

SEQ ID NO: 105553 - DNA, 436 bp, Glycine max
tccgttcccgagagcattccttatttaagcacttcatcctttgctttcgtgtatcttatgaaaaacgtcatttcttcttctttatttcttccaaagccatttctaaagttccaagcactttctccatcacccacagccaccattatccaaaacaaaccatcgttgttctccgttgaaaccccacaccgagaggaacccttcaaccgaagcggaatcttccaacttggcttgcggtttcggtagagaacgaaaccctaatctgacctttcattttctttcgaggtaaccatggttctacgcttggttcttgttagtttcatcttgtacttgcatcttttctgactttggaaccgtcattgcatgtcttatgcttccttcaaataaacctagagaaagagactttgtaaacgttatcctttcatgaaatgcatgttat

SEQ ID NO: 105554 - DNA, 284 bp, Glycine max
  unsure (1)..(284): unsure at all n locations
tacttaacagaaatacttataacactacanaataaccatatatgggaagagttngatacaacttacacaagttntatacacnaaagttagtcgtattcaccgactaacagtacacgaatctggaaggaaagtagtagtagaaacatgatggcaggcaaactcaaaagaaatggcattatgggcaaaaagtagttgatttctacaataccaaataacccanacaaaattcacaatgagggtgagaacaactnttctagttgggggcactccatttctatcaagta

SEQ ID NO: 105555 - DNA, 413 bp, Glycine max
tgccccactgcactaagtgagttcatcactttgtgatgaatatctggagttccagatgaactcggtaagccagccctgtcccactaagcgagttcatcttttctgatgaatgcttgaatgtttatgaactcgctaagtgcagttgtgcgctaagcgagtaatgtgtttcagacactcagaaatttttttagtgttttcgtattcgtggctaagcgagcctgctcgctaagccactcatccctgttggttgaataagcctgggctaatcgagcccatctcgcttagcccaaggcacttgtgattttcttatgtttcgacatgcgctaagcgcacctcattgtgctaagcgcaatttattctgtttctgtaattgttggaattgggcttagcgagcctgcttgctaagccatttt

SEQ ID NO: 105556 - DNA, 426 bp, Glycine max
  unsure (1)..(426): unsure at all n locations
tgttgctaatgctgacaggcaaatcctcttaggattcctggtttgtctgagaggggagatttcttatatggactgtagattcattnttttgttgtggactctcttctaaaactaaactttattacatgctcaaattcatgtagttatggactcaataaattgcttatagcatgagaatgatgaggagattgaataactatttgatgattctccctgtaccttagtaattttttcattttgttgcaacaacaaaatccaaaaaaaaaaatcaaaacaaaacataatcacttatcaactcctttcacacttcacaggaaaaagagcctgaaaccttctttttttntttttggaagaaaaagagcctgaaacttgcaaattagatcttctccagtcaattttgtgggcatataaaattcaaccaaaatc

SEQ ID NO: 105557 - DNA, 434 bp, Glycine max
tagactatattgtagaatctcgagcctttgttctcaatgatttagttggtcttatcatagaggtggtctttatgctttcttcaaatattgagaatccattttgtaagtacaatgtttttcctaaagatatgatcgaggcttcacatcaataatgtggacttatcatttactaaaagtattaggattccagacaaggaaaaattaccaccatatacatcttgtgtaacacccaatttttgcataatataaattaaaaaagattctatttaaaaataaatagagttttaggaaaataatgagattttcgtaattaaataaataagaaaaaataattgtattactaaaaataatgattttaaggttaataaaataattatatgttcttataaaataatatgaatattttatttattcatttgatagggagtaaaata

SEQ ID NO: 105558 - DNA, 351 bp, Glycine max
  unsure (1)..(351): unsure at all n locations
acgaaacgtacgagccctcgctaatttttacaaacattttcagcaatcaagaaagaatgcaagggtgacccttcttttcttctccttttacaaataggagggtgcgccactgccagcactcactgccgcgaccagtgttctcaaacacacctttgagaattttgaggccgtggctgggctttgccccatttctaatcacctctttttttgggatttttcgaagtccgactacaattgaacatctgttcttcgatgtcgacctgcgtactacctcctttgctacgatgtcgactactatatcacatctcatgattcgggacgaactcgtgcatatatnttattcgctgctga

SEQ ID NO: 105559 - DNA, 427 bp, Glycine max
  unsure (1)..(427): unsure at all n locations
tctagatgggtataccatgctacagctgctccggccaagctgtcttgaaagaaatggaccaacaacttttcgtccgcataatacgcccccatctttgggcaatacatctggagatgcccttttggacatgtcgtccctttgtacatatcaaagtatggtactttgaacttgggagggatgacgatgttgggcacgagacataaatccgctaaatccgagaatgggtaattgccgaggccctcgactgctcttaacctttcttcaagcgcctcaatctttcccttatcttccgcgaagggaacatattcttttacgggtatgggtgaagccgggacatgacggactatgtttggttggggtagttcatggngggatggatctttgaggtggagcanggggctgagatgggtatctacttcttcatcgt

SEQ ID NO: 105560 - DNA, 420 bp, Glycine max
  unsure (1)..(420): unsure at all n locations
caactgcactaggctcttaatattngaagagtatccttgtggaaccttcacccgacgaagacactgacaaaaacttatgttctccttcttggacaaagtatggcaggctgggggcaagtaaattttcttcccatcaaaccttggatgcaactgtgatcttatacccatatcagctagatcttgacgggtattcaagccatccttcatcttgccttgaatgttaaggagcgtcccaatcacactgtcacaaacatttttctccacatgcataacatcaatacaatgtctaacgtcaagatcacaccagtacggaagatcaaagaaaatggacctcttcttccatatgcaactctgacttttatccttcttttgggtcttcccaaatacagtgttcatgtgttgaacccgctgatatacctg

SEQ ID NO: 105561 - DNA, 298 bp, Glycine max
  unsure (1)..(298): unsure at all n locations
gcgtgaagagtcactctttgctactttgttttgtgaccacacagtggtacctggagatatgtcacgagggtcangagaaccttgggacattatgtggtgtggctattgccaanaccaagcttgaccaatcccgacccaacctcggcatatgtagtcagtgagaacctgtgacgtacctaaacaagcgagctcctgacagtcaaccaatataagaacaaagtccacacagcatggaggcttgtgtggcggctggccagctatgaatcttgagtggtatctagaaatggtctccggtaat

SEQ ID NO: 105562 - DNA, 414 bp, Glycine max
tgttgccatgtgctgagtgtgtgaacaagtcgtgtttaggggttctatggaacctgtatttatattacttgagtgtggttgttggtccttatttgtaggggctattgttaccttgtaaataattcccaacttgtaaataatagccgggaattattactgaatttgtagtttgattttgatgatatattgtagtttgctacattaatcatttaatggtaatttaaatgttgttattaccttcgttaaaatatactacattttatagtacaatagggttttaaaatatttactgaacttgttagtttcttgtttttattaatagaatgacaaaacaatttgtaccacatatatgatgaaagtaactattatttgacaatgacattaattgtattactgctaaatttggagatatta

SEQ ID NO: 105563 - DNA, 425 bp, Glycine max
  unsure (1)..(425): unsure at all n locations
tccatcacactgtcttcttaactccgctatggcttgaatactttgattnttgagctgaaattttaattagataaaatagacatttggacaaaatcagtggaaaaagaatgaacaaaaacgaaaaataaatgagaaagaaaaagttataaatattaacatcaaaagacacgtgcagaagaacaaaaaaaaatgtgtatcttgatttgcttaaaaattgttcattattttgagttgtattacaagcctattttgctttgagtcttttttttttttaatttgtcaatctaatctagtatcattctaggacttcctttgtgttccaccttggcctgtggtgttgttcttttgctttatttttccttgaatctcattcaattaatgtcatgttaaatttccttttagtttagctttcatttcatctttgg

SEQ ID NO: 105564 - DNA, 345 bp, Glycine max
  unsure (1)..(345): unsure at all n locations
aggctcctatatctgattcttgacctgtcttctgttgactatcacctaatgaaactattaccttctaagattgacttgatgttgaatatgggggtttgttatgaaatgttgtacatctatgatgattgcctctgagcatgatatgtaagtgactctaagaatgtgttaagaaaaaaaaaaaaaacatagtatgataactaatggcgatgaaacttgtcacctatgtatttactacttnattctattttaatcctatccttgtctttcttgataccctatcattttctcttgctgccatcactaaacttgacttgctggtagtgagattaactccatagggtgttt

SEQ ID NO: 105565 - DNA, 267 bp, Glycine max
gcctaaagtcgaagatagcgcgagacttttcgtctgattactcacgtttagacgcttacacacacgctaagccataagaggcgttctcgacgacctcactcaggacacattacgattcagagattgtcgcgcgggcatactttccccatggcaatcatccaaatatccaatttatccatgctgccacaagagcggcggaatgagctggtaagggagggatcgtgagcatcttcgcactctggattcgttgcgaaagcctatgcattg

SEQ ID NO: 105566 - DNA, 375 bp, Glycine max
  unsure (1)..(375): unsure at all n locations
tttggtgctattcagaccacaacattattcccaanggctcttagntttgatttattacatgttgtatgctngatcgtgagaatngtaatcaagctctgagtagtgaatcttttcatttgtcggnggtggataggctaaacttaatntcgtgtaatactcttttttaatatnagtattcatatntattactcttcttcttctcttaatggctggtttagatggatcacatgttatgtaatattacgaatngatagtnntagtggtagacactcgtttgattcttgaactgagaataatacctaatgggatngattctagacatatgtcaattntaattagaactccttaattcttaaacattannatgtagtattt

SEQ ID NO: 105567 - DNA, 410 bp, Glycine max
  unsure (1)..(410): unsure at all n locations
acgttgtgttgaatgcattaaaggtaaacagaccanaatctagatattatgtgcatatagagttacagacatcttggaattgatacatacagacatttgtgggccatttcctacaccttcatggaatggtcaacaatattttatatcattcatagacgattactctagatatgcatacttgtttcttatacatgaaaagtcgcaatctttggatgtgttcaaaacatttaaagttgaagttgaaaatcaactcaacaaaagaataaagtgtgtcagatctgaccgtggtggtgaatactatggcatatatgacggttcatgtgaccaacgtctggggccttttgccaggtacctagaggaatatggaattgtcccacagtacaccatgccgaggtcacctagcatgaatg

SEQ ID NO: 105568 - DNA, 229 bp, Glycine max
  unsure (1)..(229): unsure at all n locations
ttgctgttcatctactttcaattgctctttttaatggagcttacacactgcatgattttctcctctagtcgatgtcaacttgtgctatctgactatttttggaataactgggagagactgttctgagtgtcatngaacagtgtccttgactgtgccttattaaactcacttttcattgcacaacatttacttgtaagttacatgatcttatacacactgactgtctgac

SEQ ID NO: 105569 - DNA, 378 bp, Glycine max
  unsure (1)..(378): unsure at all n locations
tggtaattcgagatcacttgaaattagtgaaaanaatcttttgccggaagaaaattcaagccgatgcgcttccgtaacatttccgtgggtgatttcgcaaagattttcaaccgttctttgacgttcttcgttcgttcttcatggttcttcgatcttcaactggtaagttcccgaaatcgaacttttcaattcattctatgtacccttagtggtcctcatttgtttcgcgtacttttattttcatttcatttactttccataccccattttgacgtgctttagtcatttacttaagtcattttctcgcccaatcaaaaataaaataaatttccaccgatcgtttgaattgtaacatcccgtaatttctgttaaaatgaa

SEQ ID NO: 105570 - DNA, 421 bp, Glycine max
gatagagaagacgacgcaacacaatcaagggaatgttggtgctcttcacaacagagaaaagaaggcaatggggtgctatggttggctgagagagacgaacgtgtgcagtatagggaatgaagggcatttaagtccattcggggtgttaaattttaattatggcttgcaccaagtaaaaaattgagtgcattaagtaattgttctcatgatggactggcccagcgtaacatattgtgcctgcgctttgcctataatatttctttttatagctggttttttttttcatgaagatatgccaagagttatgaaaagaaatattttatagttgcactcttttgccttcatctgattactacaaaggtagatcgatcttatattacatggttgcattgcaatttacatggttttgaattacatgttt

SEQ ID NO: 105571 - DNA, 106 bp, Glycine max
  unsure (1)..(106): unsure at all n locations
ctatgaacttccatanattgacatgacatgtcaatctgataaacattgacctctctcggatgtgatcaatctaagccaatcatacactcatactacttaacatgca

SEQ ID NO: 105572 - DNA, 372 bp, Glycine max
taaccaagcgatggggtacagccacttaatatgttgatagtaaacatccaatccgctaagtagtatctgagtttgatttgttgcggatataattttttattgaattccatttaactttcattttaaattaatcaatgtctctttatatatataatatttctctggaaaaaatttataatattatcgttggttgaaaatttttttaaagtaattttactaatgtgtataaacttttttttacatgaatgtgatcaattgtgatgaatttactggtaacattgatatgaccctatttttagattggagttataatattgtggagttatgaggaattccaagttttctattattgcggccttgttacatttataa

SEQ ID NO: 105573 - DNA, 436 bp, Glycine max
taagcttcttacatgtgatgccatagttgctacaatgatctcatcacttgtttgcttgtagtttatcaaatttaaaattaaattcatgattagccattaaaagttctttttttatggatttaaagtttagaacaacaccatatacaaaagtagagattaaggtgactttttgttttatcattattatctctttgcatattactgtatgctttacatgcaagctatatgtatcacatctatattaatgaagagagtgatttatgaacatgaaatatggtgatagtcctttatctatttttcctattttcctctgatagtcctttaactatttttgacactttggttgatattatttgatgggtggtagaatggtattaacaccattcttatttattaaagcaatcattttgttggaaattagtagtacattgatgtg

SEQ ID NO: 105574 - DNA, 218 bp, Glycine max
  unsure (1)..(218): unsure at all n locations
gatcaagcatcaagaatccaatccaagattcaagattaaagagaagaaatcaagaagcaacaagtcaagacttcatatgggataagtattaaaagaatttnntcaaaaacaaatagcagaagtttgtttacaaaagaaatttctcaaactttcannagtaccagagtgattactctctgggtaatcgattaccagtggctgtaatcaattaccagtga

SEQ ID NO: 105575 - DNA, 431 bp, Glycine max
  unsure (1)..(431): unsure at all n locations
ngaatgattctcgtctcaagatctaacttttagaattaaatatattatgtgcaactcaaattcaagattatagagtaatcctcattcctcaaccatccaaaaatttagagttgtccgatgcaatctacctgatcctactgtggctttctaaagcttctactcctctccttgttttgtttgaattcgcaacctaagcctttctctttagaggggcacatgtatcttcaccttgtgtcatacattacagtaaatgctggaaagataattcaagttgctgctcttaatttattaatcttactgtcgatataaaaaaaattactcaagaaatgttattataactattgttgtacgaacaaaaaacaaaacttataactatggtacaagaaaccaaacgcatacaatgtacaagggagtaaaaaaatagaaatcaa

SEQ ID NO: 105576 - DNA, 241 bp, Glycine max
ctgcagctgtactgtggcattcttatactgtactaaaatgtttacttgaaaatctcaaaagatggactttgaatgatttgaatcgcactgtatcatacataggtgatcataccatacaagtactttttttatttgaataaacgttaacttgtatcatcagatgtgatcataccagttaatcttaacatattacttgaattgaactactttaaacctgtatcatacactttgtatcatacaa

SEQ ID NO: 105577 - DNA, 403 bp, Glycine max
  unsure (1)..(403): unsure at all n locations
tcatgctgctcaattgctccaggttgctgcatggtatggcaatggtctgtatggnagtcagcagaggagcacaaaccactaacccttgcgacaggctcaaatttttgattcaaggccagctgggttaccaagttgaccaacgcatccagtttgccttcaagcttcttaatttcaaatgattcaaatgggtgtgtaactacctcatgcactcctcttatgactatggcatcatttctggcgctaaactgctgggagttggaggccatcttctcaattaaatttctggcttcagcaagagtcatgtctccaaaggctccaccactggcagcatctatcatacatctctccatattactgagtccctcatataaatattggagaagaagctgttctgaaatctgat

SEQ ID NO: 105578 - DNA, 123 bp, Glycine max
ctctatagtacttgacgttgtatgagagtccatcattctgatatttctcatattgccgtgtcatcaactaaagaatatgaaatgtgtgaggaggcatgaaaatctcgacttaatccatttgac

SEQ ID NO: 105579 - DNA, 421 bp, Glycine max
  unsure (1)..(421): unsure at all n locations
gttgacaaacttggtggaactggatctttacatgaatggcattatgactgaaacagtgaatctatagttgtagacagatttttgaaacgttgatctgttgacttttttcattttaatgtaattcattttactaagcctggtattattaaaatttaaaactaaaactcttacaagctaattataaactttctctagtttactttgaaatggtaatgctctatcatacaacccctttactttcatttttgtccttttgtgtcatcattttgcttagcgaaattcttgcttagttgatattagtcactggattaagattgcatgccttcaaagatcatatttattactcccgtggctagaagaagcaaacttgtgtgacatggaatgtttgggctatgattngatttaccttttattatgagcc

SEQ ID NO: 105580 - DNA, 273 bp, Glycine max
  unsure (1)..(273): unsure at all n locations
cttatgtgcttcaagtgagaagaaatgcttctttttccacttgtgaagatgttcannagttggctatgaagatgggtcanactgaganacatttggtatttccattggtttatataacttattgagctagcttgatattgccggtgtcgacagcatcccgtgaaagaagcttttcagcaatgaagattatcaagtctaaattgcgcaataagatcaacgatgtgtnnggtcaatgacttgatggtatgtacaccgagcgggagatattcaagt

SEQ ID NO: 105581 - DNA, 391 bp, Glycine max
tgtggttttaagggtatacggaagaaagcacaggatatttatattttcaatgattgcccccacgtattgtctcgtaggggttatgaacatattgacaagaaacttatggacgagaagaggaagcgtcgagatcagcaagatgagtttactgaaaacccaacactcaacctcgaccctccatccccagtgtcgagacacctgaagtggaagatggcccgcacaaagcgttatggccaaatgacttctgaagcggcacaacaaattgcaaacaaaattgtgagttcatgtcttcttcacttacagtgattgtcaaataatcgttagctaacatttaactgtattttattgaaattcaacaaatatatctgcatgtaggattcattaaaggaac

SEQ ID NO: 105582 - DNA, 345 bp, Glycine max
tagagttatctctttatctagtgagaggattctctaaattttgagtgttcagaacaccctgctgttcaaagacttccaacctttgtgtgtgcctcctggaagagtgattcttcttctttatcttacccttgtcttcaacccaattcaaaatcaccttgccaaatattcgggcatactcctttaccctcgataatgatttgccaatgcttaaacaacctccctgttgatcctattgacctgacttatatgcatttttttgtcccccataccacttactcatctcatttgcaaccctataacacaatacctattctctctacattcgttctagtaacccactacact

SEQ ID NO: 105583 - DNA, 425 bp, Glycine max
tctgttttcatttacaagcgtctcgatatattacggtactcatgctgacatccgagttaaaagttattgtcgtttgatttttctcagaccttccgttttcaattatgagcgtctcgatatcctacgggacacaatcggacatccgagtcaaaagttatcgtcgtttgaatttgctcagagcttctgttttcaattaaaagcgtctcgatatattacagggctcgatcagacatccgagttaaaagttattgtcgtttgatttttcatcagagcttccgttttcatttatgagcgtctcgatttcctacgggacacaatcggacatccaagtcaaaagttattggcgtttgaatttgctcagagcttctgttgcaattacgagcgtctcgatttattacgggactcaatcggacttccgatttaaa

SEQ ID NO: 105584 - DNA, 385 bp, Glycine max
  unsure (1)..(385): unsure at all n locations
gaccgcaccttagcacgcgctgcacttatagnctaagcttaagcagatactacttacctcatacaaaatcaactatcttcaccctaagctacttttcactatacatacatttactttaaccagtagctacttatttacgttctagcattcacttaactacaacatatcaaacctaaacaatgggtgtaatatcactggattacagttacaagttccaatatctcacaaaaccaagactccttattccaccctcccaaaaagaaagagcccaactaattcagcctggcccctacatcaaagctctccatgacaaaagcaagtgactgtgactatgaagaaaaaatgactagaaaaaacgctaaagggcagaaaaaacttgtttaaa

SEQ ID NO: 105585 - DNA, 413 bp, Glycine max
  unsure (1)..(413): unsure at all n locations
cttgcctgtgtcaacatgttaagttgtactagttgagatcttttatattgtttttgcgtttgagactaatggagttgtatgaatattttctntctccttgggggttttttcacaaagttttttaaaaaggcaattgagtagagtgatagttgatatgatattagcataggtgttgtttcgttaggaaaaattagactataagggaattagaaggtttcaacatttttttttattttttaagcaaatataaataattagtttctattttataaataatgtaaattacatatttttttaattttacaaataaaataaattatataatttataattggtatatctactagtaactatttttattataattttttttgttacctaaatttcactaccatatatcactttgaataaaa

SEQ ID NO: 105586 - DNA, 357 bp, Glycine max
  unsure (1)..(357): unsure at all n locations
gctcacacaattatcctctcaaaactgagttgtggaataccaattactaagtcttttctttctagatganngagatgatgcatgtttatgtgtgcatccctaccatgccataaccaagaatcatcaattttacttaccgaacaacttagctcacattcactgtgccttcatgagtgacttcaaacatattccatattttcttttgactctttgaccccgcgctgtgaaaaaaatcatcttaagatataccacaagtgtaaaagcgcttagagtttttttataatatctcacacttcttttctcatcatttttcatatcatcccactctttatctaccacaataccattcacctcttt

SEQ ID NO: 105587 - DNA, 207 bp, Glycine max
  unsure (1)..(207): unsure at all n locations
gctgcagctttttttaaaactnggtttgtgtacatgatcaaatatatatatgaccttnntttggtcagtgatcttattaaacatcttgtgagtgagtaaacacctgtgtagttttttgatattaacgcagtcatcacaaatcaaccaatcatgtagtggatattatgcatgatctgccttatattatatatattgtatcatcaaatg

SEQ ID NO: 105588 - DNA, 438 bp, Glycine max
  unsure (1)..(438): unsure at all n locations
tgcttgtgtcatgtangggcagacttgctaggtacaatgttgaccaaggaagtgtcttccttgtatggtaaggaaatggagaacttgttgtgtgatgtggaaaaggatgctgaggattttatggttcgggggaagatgggaattgtgaagaatgaggaagcaataagtggagtgccagtgcctggaaggcctgtcgtggagattggaaccattttgtttgctgaggttttaggtaggactcttagtggccggccattgctttccacaataaggctctttcgccggattgcctggcatcgagtgaggcaggtttttctctttcttttgttcctcttttccacaccagtatgtttagtttagtagatgtttcaacttccatttttgaattgtgatatgaggcatcaatacatacttgcatttgctttatgtatctatgta

SEQ ID NO: 105589 - DNA, 211 bp, Glycine max
gtcacaggtcctgttttttacagactctgaagctttgaaactctgtacttttgaactctggactgactactcccctcttatactactactctggagctctgaaatctagactgagtctcccccttatctactccctgataagtgatctccccctttctactccctgcatctaatcaaaagctctcaacctagctgacagtaacttcttttg

SEQ ID NO: 105590 - DNA, 414 bp, Glycine max
  unsure (1)..(414): unsure at all n locations
ntaaccgatcgtttaagtcgttatctcgcctaataaatgataaaatgaatgtcaaccgaccatttgtgttgtaatgtcgtttaatcactgttaaagcaaaatctaaccgattgttcacactataacctcagttaaataaaaaaaaggcaaaataataataaaataatcaaaatatcttgaaaaaaaaataaaatcaaaaatcaaaaaaatcaatcggacatttttctttgaaagtttccttgaatgaattgactaataaccaaagtgaaactaaggctaaaatcaactcacaaaccaagctttgtccgtaaaagtcacttgaaaccgttttaatgtccaatgccataaaacggtcctctntgcttttatcggttaacatggaccgttcaaaagcataaaatcaacacataactt

SEQ ID NO: 105591 - DNA, 424 bp, Glycine max
ctcagcttttatccaggcaattcttggtggtgaagctccttgttccttggcttattccctagtggatggtgcctcccctctcctattctcctttgccttccgctgcatttccatggtgaagaatcaccattgaaggaccacattgaagctcaaagatccatcctccatagaagctccacaagcaagcttccatcatagggtatcaacttggggtctctagtttccccttcccctctcagctggtagatcactagtgctgagtccccgtacactttgagtagcttgacattggagtcaattgccacctgaacggctagggcgcacgcttcatactcagccatattgtgggtgcagtcaaaccccagcctggctgtgaaaggtatacattggttgtctggagagaccaatactgctccaatgacat

SEQ ID NO: 105592 - DNA, 124 bp, Glycine max
  unsure (1)..(124): unsure at all n locations
cactccctgagtgtatcattaagttccaggacaactgacatcacgcacttgaatgtaaggaagaaatctggcaaatattttgtgtacttgtcaacggnggacatcaacataagagtatgttaat

SEQ ID NO: 105593 - DNA, 419 bp, Glycine max
tgacatccaaattatcctacttggtggcctagctaggaaaggggaccctattctaacgaagtcaacgtatggagcaactaaccacatcaataaaaggaagattaaaggccttatggtgaaagagggaattaaagcctagaagaaagagtttcatcaatttcaaacccaggtataactgttttattcacaaagtcccaagaaacataagcttttggtgcgcatacatgggacgttttgagtgcccatacccacctaatcgtctcaggggagaataaaaaaagtgaatttactacttgtgtgggctttgttatgagacgacaaatgcattcgaagggatgtggtaaacatgacttaattaggagaaagcaaaaaatgtgtctctaaaggggttagatcaccttattcttcttctcatcttg

SEQ ID NO: 105594 - DNA, 205 bp, Glycine max
  unsure (1)..(205): unsure at all n locations
atgaagatganatatttgaattaatataactatattatattctaaagatagtggttattaatataaaagtaaaaataagtaattatttatttgactgagaagataaactaaaatttgtcatattatatatatatatatatatataatataccggagaacagtactcgagataatcttaagcttaatatatacataatattattta

SEQ ID NO: 105595 - DNA, 391 bp, Glycine max
  unsure (1)..(391): unsure at all n locations
ctctcaccattgcaaatctatctaataaaattcataagttatgggtggggaagccncatgaagaaacaaagaaacaggtttcacagatttaaatcatcccatatgcaatatatgtatcatttgtttataacagactgatagaaagccataatttgatatcatagtcgaggtgactgttgtctgccatcaccatcatggaagctatgtcactgatgcggcttgtcacaatcaccaccggatggttgacctgtacggcttattttccattaaggtttcaacatggcatggcaaactatagaagaactaaagtatacacattggggtcaccagatgatgactccaagccttatttcaatccataaacatacttgcattagtgctgaattggaat

SEQ ID NO: 105596 - DNA, 477 bp, Glycine max
  unsure (1)..(477): unsure at all n locations
ttatactaaatttaactttaanatanaacaatcaacatnaatactntaaactttattaacccaaatanaaancacaaaattatttttatctaanatcacggcttaattattattnntagttaataanatttgagatatgtgaatttcttgtcctaaaaattaaaactgtattntttaatcactaannatttgataaatatttttttaatctctaaaataataaataatantttatgaataattntaactgatataaaataatnttatttttaattgctaaattatatttaaactgcataaatataaaaataccaagtaaatcatagaatatcattatatgcaaaaaaaattataaattacactaataatatttaagtagactaaaatcaataaaactaacatataactaatcattcgatcccncatgtaatcttaatgcagtactaatttcatgcaaaaaaaatagactttatgttc

SEQ ID NO: 105597 - DNA, 422 bp, Glycine max
cttgttctttttgtgtgtgtgtgggttgtactgggttcattcacatgtctcttctaagaaaaaagctctgataccaattgtaagttttatagcagaaacactataataaacaaagaagaagagagacaatacgtatgcgaaagaaatagaatgattttattctgaatcgaattgttctgagcgacaatacaataaataataaattaaaagtaaaatagaaattaatcacataacaagatttcagttaaacagaattaaaactgatttgttcctaaagtatagaaactacttattgactaggctaatctataattgaaactaagaaaaacaaataaaatatgcagttacaaaattaatttaaacaaatgtaaatagttggatgtgcacagtgaattcttaccatgtgcatggattattacctc

SEQ ID NO: 105598 - DNA, 353 bp, Glycine max
  unsure (1)..(353): unsure at all n locations
atctntaagtccttatgatctttgtgagcttgtgcacattcgttccaaagatcatacctctatntagtaaggtgatcttgaagtcatttaagtctttaactctttttgagaacttcaatttagcttctaaatgtaaacccttcatagagatctcgtcttggatctttcatttcaacaaccctttcaaggctaacttatgttcgattctatcaaacgatctaatgaggctcttagttaaatgactcgatgttctaatcttcacagtttgaactttgaagatagagaattgaagagatatgaaggctggttatgataatgcatgaattactcttgtctatctatctcaaatgagt

SEQ ID NO: 105599 - DNA, 449 bp, Glycine max
gacactttaatctcagcttctaaggaagctacctagtctataaatagaagcatgtgtaacacttgttgtaactttgatgaatgagagtcttgtgagatgttcgcttccggcatgtgcaccatattgcacaagtagtataaaacggtaagaatcgagtatcgaactctcggggaacttgtgttatttggtaagctatttcagcaaataggtgtctcgtgtgtaaagataagtgtgaatatgaataggtgtgtaaattatctgtgcaaaaaggaaaattaaaaggaaaatcatgcgagagaaattacgtgtaaaaacaagtagaaaacacgttggccttcctaataggtgcctgatgctaaaaagatattctctatctaacaatgctcatgtgttcctatggtgtctcctgagatactaaacctcgattcctcatgatagtgtattctaat

SEQ ID NO: 105600 - DNA, 448 bp, Glycine max
  unsure (1)..(448): unsure at all n locations
cttctcgagttcctagatttcanagaagtgttcgatgtggatggatggctcattatctgtgtgtatgggggtaacctctacaattggataatctcngangaaggagttgagtggcattgagaagttgaagttaaagtaggttaattttaaaaaataatgttaattaataatgcaaattaagttagtttttgcttgaagcatcttacccacatcaaagttgctcacaaaaacttacatctctgttagaactgtcttacatatataatcatggtacgtcattgtgacatttggttatgctatctattgatataggatcagcgtccaataataaataaatcgtattgaggtctcgtttccacagctgcaccatgctattcttatcatacatgggggttttntctattttttcttcactctttatttttgtttcatttttcttattcttttt

SEQ ID NO: 105601 - DNA, 398 bp, Glycine max
  unsure (1)..(398): unsure at all n locations
tccacaacggccaataacacaacttgngttgtggtatgaaggattaacgtgcgaatttgatgatgggttttgcagcagcagcaggagggggaggaggtatgaacaacggctcttcttcttcgtgttgttcttctaactcctcttctgtttcttacttggatcctgaatcgtctttgcctttgaaccaagccacaattcatgttattaacaatagcaacaacaacaacatgtttctctaccaagcacagaacctgagagagtttgatcagggttataataataataacaacaataatagtgaaatcatggtgtttaagcccgagcctttgtctttgtctctgtcatcacacaacaacggtgtgaatcttcagcgatatggatctgtggtttatggtgat

SEQ ID NO: 105602 - DNA, 359 bp, Glycine max
  unsure (1)..(359): unsure at all n locations
cttgagtcacctgcggctgcagcttgatgctatggctagcttacatcaatatatgcctactactataagaattaaggactcaattcagaaacacagatnanagtgcanagatctacttcatcagaaataattgtagtccataaaattcaactacaaatacaattagttccaggtacaaaaccaaatttctacctaacctcttngatcaatagaaaactctaagcttggtttattgaaataaaaataaaggcaattctatattatcatanttttcagcatcccccaccttttccattactcttgttcattnntatttatatgtacgcagnttttgctacgtganagtgagcaacaatgac

SEQ ID NO: 105603 - DNA, 338 bp, Glycine max
  unsure (1)..(338): unsure at all n locations
gttcgntgaaaactatgggagggttggtctgggtttctttcctacacacgccgacaagagaagggtcgccttagaaaggagagaaagagacctatcccatttacaatggcggggactgtagatggagagggtccttatctgccacattatcaagagctttatcaacgcgaggtggatgcatgagaatcangttgttgtgctagacgaagaaaccaacttatatcatccaatttgggtgcatccgtgctccccgggttttgaattaaaaaattggtggatcatggagtgacccgagatttcagtgttaaatccaatgtaatccaatattttgaacccta

SEQ ID NO: 105604 - DNA, 259 bp, Glycine max
ccagctgctctccaattacactagctactggctccttcttgaaataaactgtccttagagcctctttaggttctttctaatcatccattgcgtacctgacgcaaatgggtgatccaaatttagcacaattgcgaagatggcctctacttccttagggacttcaggtgtggacgtacactttctttaccgacggttttcccttactacaagaaaacagttgtccatttttgatccttcaagaatctctaaccttccaagg

SEQ ID NO: 105605 - DNA, 441 bp, Glycine max
  unsure (1)..(441): unsure at all n locations
acactttaaactaagcttactctgatctgcctgagcttaaattaggatccatanggctttcaacangtctacagttctgcatacctgtttcttctaaaatatcaacagcatacttcctctgagaaatcacaataccatctcctgattgagccacttcaataccaaggaaatacttcaaagatcccagatctttggtatggaaatgactgaataagtgctctttcagctggacaatcttagtagtatcattccctgtaatcactatatcatcaacatagaccattagatagacacattttccaggagatgtatgatagtaaaatacagagtgatcagcttcacttcattttagtccaaacatttgaacaacatgactaaatttaccaaaccatgctcgaggagattgtttcaacccataaagagatcgacgaagcttacaca

SEQ ID NO: 105606 - DNA, 307 bp, Glycine max
  unsure (1)..(307): unsure at all n locations
tactgtctcatgatgcatatgttgagaaaaacgacaccaatagactgnaggacactctttcacaaccaattttttttcaagggtacactataaaaaataagtcagtctaataattgttanaaaagcaatcacctggctatgcaatccaccattatactaataataattctctttgtgccccaattcttaaaagaactgatcataccaatnttatatggtttcataacaataataactgataattaacaagtactgatatcttgggataatactgagaggcaacctcgtcttgattcataccacacaa

SEQ ID NO: 105607 - DNA, 390 bp, Glycine max
  unsure (1)..(390): unsure at all n locations
tcaacatcagaccacttccagggtgctggaactacttcacattttcttgatggggcctatgcaagttgaaagccttggaggaaagaggtatgcctatgttgttgtggatgatttctccagatttacctgggtcaactttatcagagagaaatcagacacctttgaagtattcaaagagttgagtctaagacttcaaagagaaaaagactgtgtcatcaagagaattaggagtgaccatggcagagagtttgaaaatagcaagtttactgaattctgcacatctgaaggcatcactcatgagttctctgcagccatcacaccacaacaaaatggcatagttgaaaggaaaaacaggactttgcaagaagttgctanggtcatgcttcatgc

SEQ ID NO: 105608 - DNA, 247 bp, Glycine max
  unsure (1)..(247): unsure at all n locations
tttactagtggtggaacttctcgatgacattannatttgctttatccaccttaatgccttgggctgatattttgtggcccaacactatcccttncttgaccatgaagtaacgcttcttccaattcatcaccagaatggtctcaacacatcttcgcagcacaagctctagaatcatcaagcaacaatcaaaggaaggtcagaagactgaaaaatcatcatgaagacttctatgcacttctctaccatg

SEQ ID NO: 105609 - DNA, 421 bp, Glycine max
  unsure (1)..(421): unsure at all n locations
attttcgggagaagacactatggatatttctcgtcttatttctctggccaattttagctttaaaattattactaaagtgggttgaccccttagcctccattgcacctatgattgtatcttctcaacatataggttttgtgagggccaggcatattgaaaatgacatctgtacaacttcttaagtagtgaatatgctccataatcatgcttttggggtaatatatccttaaaattggacatatataatgcttttgacaccattgattggtgctttttgctttgattgctttgtatgagtgagtttttagagacttaaatggaaggtggatgaatatatttatgaagaacttgggatcatctgatgttatgtccgagctatangggatagctactgctttgaaactatcctatacttctggac

SEQ ID NO: 105610 - DNA, 414 bp, Glycine max
  unsure (1)..(414): unsure at all n locations
tcacctgcggctgcagctctaaagagtgtgaatgatacaatagctatatcgataaatgagagttatgcctgatagttctacttagaacatcttctacctacatgatgatgcatgattacatatgaagataagactagatgcaacatcatacaatgtctcatgagtgggatgtaaaaacaaactcttagcttaagctaatcttatgacttctcatctctacacaaactgtgtgctagtggtangaatgccagatatcaagtaaatactaagaagagtagaacctaatatatactgtcatcatctgacacatctatttatttccatctataaggatctctatgaaactcctctagagagataatacaccaaatcacaccacaaagtgtgacatacactactatattgcataccaat

SEQ ID NO: 105611 - DNA, 443 bp, Glycine max
  unsure (1)..(443): unsure at all n locations
tactctgcgttcttcctgcttccaaggaagctaccttccttgcttctcaatgaagcttcccatgtgctaggctataaataaaaacatgcgtaacacttttcngtaacttgataaatgaaaaacttatgagaaacaattcaaagttcaacttctctctctaatctccttcaattcccacacctcgcccccccccccccccctctctctctctctctcatattctcttcttccattgaagcttcctctttaagcttcttatccaagccactctcttggtggtgaagcttctccttccatggcttattctctagtggatgacgtctcctctaacctcttctcctttatctttcgctgcaattccatggctaaaaatcactattgaaggaccttattgaagctcatagattcagcctctatagaagcttcataagcaagcttccaac

SEQ ID NO: 105612 - DNA, 340 bp, Glycine max
attccccacattatttccatgacacaaatgccaaaatgatgattcggaaattttacgcaaaactggtcatgcattgccctatgcgaacaactcagtggtaaatttttattgtcatgtgatgctagggctcgggattcatttcctctatttttagtcaacccaatggttccaaaatatgttcttttatccatttgtgcattcatccgagtccattttgggcgttcgggaaaattttcacagcattcaccctttatgtgtatacacattgttttaaaaactagttatgatacagtgaattttctttaaagaaaagttggaagtcatctcttttaaaagcatg

SEQ ID NO: 105613 - DNA, 423 bp, Glycine max
  unsure (1)..(423): unsure at all n locations
gtcttatgaaggaggaagaatttaaaacatctcttggggcttttttttatacnagccgagcaatggtcattgattctggcaataatcatgtacacctgatggatgagttgtataaatttagtactggtttgttaaatataaatgatgtatatcacgaaattatccattgtcatgatgtcgtgttgataaatatccttttctccataactgtctcattttgagttgtgtcatgtatatttgaaaatttctaaaattatagaaatggacattttgtcttcaactggttttgtgtcttgagaagtactggacattttgagttttaaaatataagactaccatgtcaaccacatcaaacaacattgaactgttttggaacatcattcatcttttttgaacnttctaatgtgacattactatttaata

SEQ ID NO: 105614 - DNA, 252 bp, Glycine max
accacaagtttcacatcacaatgccataaccacatcctgtgccactcaatgactacgactccacgagccatatctcgttcttaacacggtccataatctccagctccactcagtaaaactcataccaacatcgcaaaaccgcaaagctaacttgccaaaacaacaatacattttacttagaccatacatctcgtcatcgtacgtgacatcaattatgagcttaactatcacttgacgtgattatacaaatca

SEQ ID NO: 105615 - DNA, 428 bp, Glycine max
tgtcttaatgtcggcttatcgaatataatgcatcctatatacataatgggcacacacttatagagtgagtgccagcttatcgctatacatgctgcaacgaattatgcttagcgggcgtacaccgcacttatccagtgaacacgatgggcttatcgagcgggctctcgcttatctcaatccagatcaaattgaattgggcttagctcacccatggccgacttatcgagccaatcagcttgagatacaagggtttgagtgcttagcgcatgctatcctcacttatcgcatggagaagacgcgctcagtgaggtggtatgcgcatagcgagtggactgttttcatgaaaatgtttttaagtgattttcagtccacttcctcaaaacatgtagaacaaccccccaatatctatgacttagtataagcttata

SEQ ID NO: 105616 - DNA, 115 bp, Glycine max
cggtgattaacatttattctgatccttcaacaccaaaataaacattcacatgttggtctactcattggataatcatggagaatgatcatatgagaacacatacttttttgggggg

SEQ ID NO: 105617 - DNA, 420 bp, Glycine max
  unsure (1)..(420): unsure at all n locations
aatgtaagctcataggctaacacaagtgtatatagggtttcatgtgcaaggcaattgctatttccttctggcattaatctttgagtgccaaaatgcattatcatgatgaccattttaaaggaatttatgaagattgataacgtgataaactaagtatcagtcttaaaaagaaaatcctagatgtgaggtccaagttttttgcttttgggtggtatatcacaggaagaacttatttttcctcacccaaactaaccatacatttttcctctcccttttctctggaccctctggctttgaaattcaagattttggaaatgtttggtaaatactaaagtgcttattcaaacagaatttaacacacgtgagagcttaattntatagtgaagcaagcgggaaaataaagaaggtaggttaaaatca

SEQ ID NO: 105618 - DNA, 273 bp, Glycine max
  unsure (1)..(273): unsure at all n locations
aacatccatgctnactataagcatgacagtataaatatgtaagatagacaccccacattngttgatganactaatgtatgtgaaagacatgtaaaacgaactacccattggcatgatggcattacaactctgtgaattatcaagtgtggatagcctactctccatgaagtaccgtattaattctgtcactgtagctactggcagaggccaagcctaaaaaaaaacctataagctatcttaccttgtcatttcacaaataaagatataatccgt

SEQ ID NO: 105619 - DNA, 370 bp, Glycine max
  unsure (1)..(370): unsure at all n locations
aaaatagtcttgtttgctttctttaattagaataaaaacaagtttaccctttgttttgagctggtattaaatagagagataatgaatttttagtgtaagtaaaaaggtgttaagtgctaactggtattaaatagagagataatgaatttttagtctaagtaaaaaggtgttaagtgctaacataaatcttctattttttaagtgggtctatgttttgtgtgtgtgtgtaattatttgatataatattaaagtgaaagtactgccacatcattgcttctaaaagattgttcatganaattcatatcaacaagtgatattggtaaaatattatatatatatatatatatatatatatatatatatatatata

SEQ ID NO: 105620 - DNA, 562 bp, Glycine max
  unsure (1)..(562): unsure at all n locations
ccgcatctctgagtcacctgaggcatgcagctngctgcatggatgatggaactttgcagtatcctttcaccttttgtattcacgganatgtatgtcttcctanngtnttctatctngtcangaatcatatacanataccattattactagcnataatcatatatntctctttcgtatttttctcttttggagtacttctcattatgctangtggaggagagcgaggacttgaattatntatttataatttgccactcattattcattcataatattatccttccacntgtatcttcaacgcatntatttgaattttgtggnggaactcgagtaagtngaggagttngacanaatcaaagtctatagactatagcanacgttaaattcctagttctgatgttngacanaatcanagtctatataagaaagccatanattcatggataaaagtctaaaatagcatccctctaatcgaaagccanngtcaaatcatttcatgcctttagtnnttttacacacatttagtttaagtctatatactgtttgaatacaagcatgtact

SEQ ID NO: 105621 - DNA, 423 bp, Glycine max
tcttttgttttatcaactttcattgttcgattgttcatcaatttgatcattacacctccaacaaacttcttttcgatttttcaatctaaatgaatactaaacttctagtaaactttcttttgaattggtaatcaaattctcatttattcatgtaatcgaatggtttccaaattttactaaacaatatatatacaattgattctaatgtcaatacttaatcataatatcaatttacagaaattcattttccattcaatcaaaatatattcctcttcaaaccagcaattgaaagcaatgtttccatgacaaattgaattggtcatttttaaacatgacataaaatctctacatttataaaattgtattcacagcccaacaattatatatatatatatatatatatatatatatatatgaaaaaaa

SEQ ID NO: 105622 - DNA, 479 bp, Glycine max
  unsure (1)..(479): unsure at all n locations
ccgcatctctaagtcacgagctgcagctctgtgactagcatggtgtatagtaangatagagaaaantattgcttaatagaactccaacttcaatctttgattggaaatctttgtgataggagtatgtactttttgagttcaaaaccacctattagtcagcaggtttgctatggatgacanngtggttatcttaactctagtttcatgtatggttaccatttttgttgtcatgaattttgaagcatactaaatagttgtttagttaggctaaggtngttctttatgtctattcaaaggaccctatgtggggctaactctttctcggaaacggatgctataaatctttgctaggaactaatggttgataatatgatactcttacataaaggacaaaggtggactttttgactattttttatttacagactggtatgtgtgatattatagcatataagtggatacgcaaaattgactcataa

SEQ ID NO: 105623 - DNA, 428 bp, Glycine max
  unsure (1)..(428): unsure at all n locations
ttgtcctcaaatccctcttgttggactagacttataccaaacagcattattgtaacaacatatttaaaaccaaagcttaatccgcagatccctcatttaagactaagtttcaatcctgcttcattcaagttctaaggcaatagtacatttcccaatgctaaagtcacctagccatgcacacaaatggttgatcagaccaagatcatacataatttaagcactgaaagaagcattgaacacaagaaacacaatcaattagatattaaagtaattacatcaactgttctttagaaatgcccaacaagggtgttttgccatccattacagaaaaccctaacaataatgagattaagagtagagaataactgctccttacacaagaaaggcgatccctnctcctcttctcagcatttcacaatcactctaca

SEQ ID NO: 105624 - DNA, 187 bp, Glycine max
  unsure (1)..(187): unsure at all n locations
ttctaagcaacttgagatcttaacagaaacactnnggtaagttaactaaactgtctactggtcaaccttccccattcttctgtntgcaggttatatggtgtaccatntatggtgagggctcatgaatangtcattgtattcccattgaagaacacactcangaagttcattacatgagaaatcaaca

SEQ ID NO: 105625 - DNA, 414 bp, Glycine max
cgttctaaattggaaagattagcatgctgtttttgctttaattttatcgttttcttgtaaactaactttccaaatgtttgtccccgcatgaaatggctccgaaaaagctttccgcgaaaagatctatgatggacgccgcggttgaatggaccattgccgcccccgagtttgataaccaccgttttatgagcgccgagcaccatcagcgtttcgaggccatcaaatgatggtcgttccaccaagagagacgcatccagctcatggacaatgagtacatcgactttcaggaagagatagctctccggcgctggatgtcgctggtcactcccatggctaagtttgacccagatatagtcctatgaatttatgctaatgcttggcccacattttatggagtgcgggacatgcgatcat

SEQ ID NO: 105626 - DNA, 301 bp, Glycine max
tgaacttatactctaacattttcttgctttatatgctgactcacatacttacatgatcgtgacaatcgtctgctgcgcatgtccacaccatatcctgttgacttatgctcttctctgaagccaaggaccaaacgcaaaatcacgctgtagacacatacaacatgatgtgtgttagctcccgactttggcaagtacatttgtgttacaccatggggccgcaatacaacatatgctgcaggatctatgcaactcttgtctgtagatgcagacgagcatatggatgccctgcgagcttatctca

SEQ ID NO: 105627 - DNA, 187 bp, Glycine max
  unsure (1)..(187): unsure at all n locations
cgcttctttgcatcagntgtgtccactcctgtccaatcctcctacatttaaacctcgcgtattattgccatccttcaatactgtgtcctgtcatacataacaaatcaataacttaaattcattttattataaaaaaaaataataattacccagttctaactacctgattgcggacggggagtacacc

SEQ ID NO: 105628 - DNA, 420 bp, Glycine max
ctcgtcatgtttgttatcatgtcctctacgagcttgtttctcatctcttcttgctgagccattatcttgtgcacaatgctctcacaaaaacacttgaacatctcaaacctatcaagcctcttcctcttgcggtcctttgtgatcttttccactgctagtgcctcgtcgctttgctcgttttgttttgtcaccaatgcgtcaacaacgtttctagaatccccttctacttccaactccaatgcatggtggcccatcttgtcttgtttctgcagtggtggctgagtcgtattttcaagatgatgatcaccactacccccttggtgataaagctgttcaagctcactaagaaaccgataattgctactattattattattattattattcttgcccgaattaatggttgtgaaatatctactc

SEQ ID NO: 105629 - DNA, 436 bp, Glycine max
  unsure (1)..(436): unsure at all n locations
gctgtctagccattctaacctacgccactctgactagtgacccacccacaccaacatattagctcaatctagacgattttctatcttcttcttcttnctctccacaccttaatngcattcattcgcactttgctaccttattcttcgaaatagcctctgcttcgttgaaacccttttctcttagttggcgaanatcattntcactnttnttttttcgcacacgctcaaccaagtaaaccctaattacttactcacacnagtattgggatagtcagtatgaactctacaagtgctgctgttctttagaattcttgctttaatttcatgcgtgctgtaggtttgaggatcatggtgccgttgaatgatgtatgatgcaattctactataagtttcatgaatatggcatataatagattggtctggatctctttttttc

SEQ ID NO: 105630 - DNA, 426 bp, Glycine max
  unsure (1)..(426): unsure at all n locations
gtatntaggcatatactggattgaaattgatcaaaattgttatgaatgctatgaagatgtatacatgaacatgaggcgtaatgacatgtcattttgggattaagaaattgtgattgagattgagtataagtgataagttgagcatatgttaatttgtgagatacacgtgaacatgtgatgatagattgtaatgttgtgagatgttaaattgtggactcggaacttttatttcacatgttaatgttacaattccatcaacagtgtatctgttttatgatttccgcggttagttgaattcattttcataaacttggacgaccatgttttgagccaagagaatttgatctctttatttagactagttctattttgataattgagaagtaaatgtaaaccttttaaccttgaaaatattgttatatactg

SEQ ID NO: 105631 - DNA, 414 bp, Glycine max
  unsure (1)..(414): unsure at all n locations
atgttttactatagagctgatgacttataggttnttaacaatttatcttagaggtgataaacctaaatcatattaatgcgctccagttgattcttataaaaattattttgcctagctatctccaacgttgagtaatgacaactttgatttttatagattatagtttgattcacatagagtttttatcaatagtttgtcagcctattgtccaatgtaaagagaagttagacttatataaaatctttaatatgaaatagacctttaagtaggctaacaagccatgttagatctaaacataaagtctataacaggtaataggccaggcttaagccttaagttttttaaataggctaggcctatataacaaaagccttattcgaccaatgccataagtggtgttgtgattaaaaaata

SEQ ID NO: 105632 - DNA, 274 bp, Glycine max
  unsure (1)..(274): unsure at all n locations
ctgcagctagtccaaaatctgaccaattgcctcacanactatgcataatccgaaaaatgtgagtgtcatcacctcgaggtctggcaagcanatngaagttgcttcactagtagcagcacctganaaagaggatgagctagctgcacaaaagaaaaagcttcctgatcatganggagctaacanaagttntcatgcaggtggaccttcttctagtagttctgacttgcagcagccttctatccctcttccatttccacctagagcaattccaaac

SEQ ID NO: 105633 - DNA, 437 bp, Glycine max
taagctctttcaactgcacaaggctcttaatatttgaagagtatccttgtgtaaccttcacccgacgaaaacactgacaaaaacttatcttctcctttttggacaaagtatggcaagctaggggcaagtaaattttcttcccatcagaccttggatgcaactgtgatcgtatccccatatcagctagatcttgacgggtattcaaaccatccttcgtcttgccttgaatgataaggagcgtcccaatcacactgtcacatacatttttctcgacatgcataacatcaatacaatgtctaacatctagatcagaccagtacgaaagatcaaagaaaatggtcctcttcttccatatgcaattcttacttttatccttcttttgggtctttccaaatacagtattcaagtgttgaacccactgatatacctgctcacta

SEQ ID NO: 105634 - DNA, 201 bp, Glycine max
  unsure (1)..(201): unsure at all n locations
catggatgtggcaccatgatctcttctcagatctctcagatagaccaatccaacnntctcgaggtgggcttttcgactctaatcatagctctttgtgaagcccggngggtngtctctaactntctcaccttcgagtccctcagcctgaccattaatctggcctacattcacaagaattgctggaaccccgctgatccatct

SEQ ID NO: 105635 - DNA, 420 bp, Glycine max
  unsure (1)..(420): unsure at all n locations
ngagatgaggaagtgttgaagggtgaaacttcctgtttttattcgttgatctcatagtggtacctggagatatgtcgcgggggtcaagagaccttgtggacgctaagtggggtgctattgcccaaaaccaatcttgaccaatcccgacccaacccgagcatattcagtcagtgagaacctgtgatgtacctaatcatgcgagctcttggcagtcaacatattaaatgaacaaagaccacaaagtaaggagtcttgtggtggctggccagctgtgaactttgattgatatgtgggttatggcctctgttaatcgattaccaaaggtgggtaatcgattacaaggcttaaaaatgaagacaggaggctaagatggtctctggtaatcgattaccacgaagtgtaatcgattaccatgcttga

SEQ ID NO: 105636 - DNA, 227 bp, Glycine max
  unsure (1)..(227): unsure at all n locations
tcttcttttctttatgcctaaaacccaattaaatccaacattaatcaacanaatcgagtttccactgtataaattcacataagactaaattatntacaaaaagaaaccatannatagaggtacatngctactctntctcctatnntttaatgcaataaagttcatgaaatagcaataacaagcttcaaccacacaacccttgttctttgcctcgcaccgaaacgtgt

SEQ ID NO: 105637 - DNA, 430 bp, Glycine max
  unsure (1)..(430): unsure at all n locations
tctcacggaagatgaatggngaagagaaaaaataattcgtgctaagatgaatcagaataagaatttgtaacattgtaaaacagtctcctaatcctgtctgctttctaagtcaacacgttaacggtggcttatgtattatgcctcactgaaaagagaaatcacaaatgagcaaagaaagtatacaagaatcgaaagctgcaatataaaggccatactctgatcctgtttgacttgaaattgttttgcaaagtagcaaagaataagaatctataacagctcctcatcctatttgattttaaagtcatacgttaactcttttaaatgaaatacatacggaagccatctaacacacacacattaccaagaacaaaattaaaaagaaaagcaaaaatggtggtacttttatttaaacagcaccagaaagcactaa

SEQ ID NO: 105638 - DNA, 524 bp, Glycine max
  unsure (1)..(524): unsure at all n locations
atcttctcgaaattgggtctgcaactntacaagacaattgccaatgatcntgaccgtgggatcttngcgaagatgtctatagtgtgctagaagcttctgttcccgagagcatttcttatntaagcacttccgcctttgctttcgtgtagcttanggaaaacgtcatttcttcttctttctttcttccaaagtcatttctaaagtcccaagcactttctccatcacccatagccaccattagccaccacanaccatcgttgttctccattganacgccacaccgagaggaacccttcaaccgaagcggaatcttccaacttggcttggggttcggtagagaacganaccctaatctgaccttttcatttctntcgaaggaaccatggggtctatgctggttctttgtagttcatcttgtctttgatntttctgacttggaactgtcatgatgtctatgcttctttgaaaacctanagaagagacttgaacgtatcttcatggatatgtatttcgtactacctgac

SEQ ID NO: 105639 - DNA, 447 bp, Glycine max
tcgtgaacattacactatgctttccccatttcttaaaatggggggagaagtgaagagaattttcgtttagccctcttggtaattcagaatcacttaaaattagtgaaaacaatccggtccgtgaagaaaatccgagccgatgcacttccgtaacgtttccgtaacgtttccgtgggtgatttcgcgaaggttttcgaccgttcttcgacgttcttcattcgttctttgtcgttcttcggtctccaaccggtaagttccctaaatcaaacttttcaattcattctatgtacccttagtggtcctcatttgcttttatgttctttcatttacatttcatttactttccgtacccccttttgacgtgctttagtcatttgcttaagttattttctcgcctaatcaaaaaataaaataaatttccaccgttcatttgaattgtaacattcg

SEQ ID NO: 105640 - DNA, 308 bp, Glycine max
  unsure (1)..(308): unsure at all n locations
tctatctggttggcgattctntgggtggaagtctagcacttgctggtgctgctcacaatccaacagttgacctagtactgatattatccaatccaggcaagtctatcaatgctgtattcctttttgtcatatntgataatggatnttgctggtgatgtcttgtcagttggctactgtaatctgacaatatgcctttcaatcatagctacatccttcggccaatctcagatgcaacctttgtttcctttcatggaggctctgcctgatgaaatgcatagtgctgttccctttcttctttagtttatcat

SEQ ID NO: 105641 - DNA, 384 bp, Glycine max
  unsure (1)..(384): unsure at all n locations
atctcacangaataccatcaatgacaatgaagtattgtgtgtgggatgtngtctgactataaatatacatggcactngttctttgaatgcaattnttttctctataagttggtgccggtactntangtggtggngtattcattntgcacaatataatgactctccttctaacttctcacaattcgtgggtttgccaaagtgcaatgattagaatgagttactgtgataacanttntgtttgtagtgtttngggctanatggaggactcgtagttntcttgttttataaccataagaatgaagtttgatctaatngtntaacgggtaagatacacccntcgtcaataanttagactatatatgtnnttttactgcccctctcatg

SEQ ID NO: 105642 - DNA, 426 bp, Glycine max
  unsure (1)..(426): unsure at all n locations
ctccactaagttgcctgatgcctgaaatgtcttttctgattgtgtggtcctagatgcanggaagaatttctccaagagcaccctcttaaggtcattccanttggagatggatctgggagccaagtagtacagccaatctttcgccgctccctccaaagaatgaagaaaagcctttacaaagatatgatcttcctggacatcagggggcttcattgtggaacagacaatatggaactccataagatgcttatgaggatcttcacctgcaagaccatgaaacttgtgcagcagatgtattagtccaatcatgagaatatatggaacaccctcgtcaggatattgaatgcacaagctttcttaagtgaaatcaggtgcagccatttccctaagagtcctctcacgaagtggaggttgagccatgttctc

SEQ ID NO: 105643 - DNA, 279 bp, Glycine max
  unsure (1)..(279): unsure at all n locations
gagggagagaagtggaagtttgaagtgtgtctcataagactntcgttcatcanagntacaacaagtggtacacatgcttntatntatatactangtagcttccttgagaagctntcttgaganaacttccttgagaagctagagcttagctacacagatccctccaataactaaactcacctcctttgaaaacttccttgagaatattcctaaagaagctagaacttagctacacacacctctctaatagctaagctcacccgcatgacanaatacatg

SEQ ID NO: 105644 - DNA, 388 bp, Glycine max
  unsure (1)..(388): unsure at all n locations
attggaatggcacacatataaacaaaggaatataggaaagttgtgtaagaatgaaaactgtaaaatattaagtacatgaaactaagaacaaacantgaaaaatgaacatgaaaagatggaaaagatagaagtgtagaggaatatgtcacactgtatagagagtgatcagtccaacgaagatttgccataaaggtatgggaacctttgataagaaccaagataggttcactctaagaacccacaagatgcacaactcttaaactcacaaaaggagtgaaattctaatcttattcaaatcttccccaaaagcaagacagtacaaggttatgtatagaaaacaactagtacctccctcctaataaggctaatggctaaaaactaatttaat

SEQ ID NO: 105645 - DNA, 467 bp, Glycine max
  unsure (1)..(467): unsure at all n locations
ccgcgatcttagcacctgngctgcagctctaccaatggctacctgataatccttgatcctttgacctgttcccttcttgttgagctactacacctaatgaaaacctgaatacctatcttaagaattggacttggaatgttggaatatgtgggggtttgtttattgacaacttgttgtgctatctcatgagatntggcctactgatgtacatgtatatggtaatgtggacatctgatgaatgcgttttgtttaaaaaaattgaaaaaaaaaaagaaacataagtgatgataaactaatggcaaaagataaacctggtcacctcagtaatntatcttacttttatttttatttttatagcactatccttgtcttatcttggataccctatcattttctactgtctgccatcactaagacttgacttgctggtatgtgatgattaactgcatatgggtgtttgtcttaga

SEQ ID NO: 105646 - DNA, 414 bp, Glycine max
acagatgccactctatgctaaattcctgaaagacatgcttactaagaagaacaagtatatccacagtgacaccatagtcgtggagggaaactgcaacgctgttattcaacgtatccttccaccgaagcataaggatccatgcagtgtcactataccttgttctataggagaagtttcagtaggcaaggttgtagaagcaagcttcatgatgatgaatcaagttgattcaagtagttttgataatgacaaagatgatgaaaaaaagcccaaagaatgataaggttcaagagaagatgaattcaagattcaagagaagaaatcaagaagacttcacaagggaagtattgaaaagatttttcaaaaaaacaacatagcacagttgtgtttttcataagagttgttctcaaaattttc

SEQ ID NO: 105647 - DNA, 124 bp, Glycine max
  unsure (1)..(124): unsure at all n locations
cacacacacacattnttttctagtcgatcactcacatanatttccattctccccctctgnnttttgaattatgattcacttaaaaataagttattactcatgtgagttcttgatntaatcccta

SEQ ID NO: 105648 - DNA, 404 bp, Glycine max
ttatttccagatgatgcagatgagtttgtggctacctcattcactcctctaatgactatagcatcatttttggcgctaaactgttggggattggaagccatcttctcaattaaatttctggcttcaataaaggtcatgtctccaagggctccaccactggctgcatctatcatacttctctccatgttactgagtccttcataaaaatattggagaagaagctgctcaaaaatctggtggtgagggcaattggtgcataattttttaaatctctcccaatattcatatatgctctctccactgagttgcctaatgcctgaaatatcctttctgatggtcgtggtgctagaagcaaggaaatgttttttctaagaatactctcttaaggtcatcccagctcatga

SEQ ID NO: 105649 - DNA, 496 bp, Glycine max
  unsure (1)..(496): unsure at all n locations
ctctctagtcatctgngctgcagctctctctctccaacagctcgagtagctcctactccatgctttatatcacattgtgacagtgtaacctagatataccttaggtaaaacgaggtaaaactcgaaaaatgggaaatggctacgggcngttcaaagatctgtaggtcttcggacttcggaaaactgtcggaacattcgaagaatgttttctggaaaaccaagtttccggaagctccggacacctcttcggaagttcggagaagattcttccgaaaatccaaagaaggtctccgataccttgaattttggaattgttttatttaaaatatgtttttaaaaaataagattttatttatgatattgtttaactataaaacgagtagttccgttcataaacttcatattcactgtctaatcttttttttattttcttctttatattcttctactatgttttatttcctctatctaatcatgattttatatattgttttta

SEQ ID NO: 105650 - DNA, 408 bp, Glycine max
  unsure (1)..(408): unsure at all n locations
atgagaccatcaccgaagttcgaagcttgcatatcagtagtactngtaatagtgactcctcaagttcaacccttcctgcatggctccaacagtacaaaaatgagaataaaggaatcaactataatgatcaggtcttcattattattatcacaatcagacacgttgataagaacatgatggatttcattcttgttatattttattctgtgttatcatgtcatgtttgcattaaaattagagaaattcaggctacaaaatttaaggattttgacactattactattactgagaaattctctctctttctttttgttttttctcctttntatgtgctcaaactcataattcaaaaaaaaatacacaaattatgtattattttaaacgctcttaatcaatatgtcttatttc

SEQ ID NO: 105651 - DNA, 366 bp, Glycine max
cacctgtctgcactgaagctgttgtagcagcctggttataactataaacaagacagatgatcacccctaaaccttctagagatcttgttacagtgcattgctgtaagttaaatatttgatatacagagacatccggcaatgttcaactcatttatcattaacggacatcccttgtatatcccgtaacgttataattaagctgacatcccttgacatccagattaaatattaatactatcatgtatatgcatcagctatttttactggaccaataaaaaagtttatgcaatgtttcttaaatctgcaacctgtatcatagatgatgactatgcactgctcaaaatctttttttcttaaggtaaacag

SEQ ID NO: 105652 - DNA, 447 bp, Glycine max
tacttgcttagtaacgaaagtaacccataaatgtccaagaataaggtcttgaaagatcacaacaagacttttgtaaattggtttaaagatacaatctttggtgaggataatgcttctgcaatgttaaggaagttaccagatgggcctaaaataaatattataacttggcaaggatacgatatcaacaagtatttattctacacgaaatcacaagacgacaagagtacgctacaaaacagtagtgtaagtctaagggttgaatctcaacactttgctattgtacataatgacaaaccccgtgtagcttccatgccttactttgggtcattgaagaaatctgggaggttaattatgtaaaattcagtgtatgtgttttcaattgtaagtgggttgataataatatgggtgtgcgaatcgatgatttcggattcacacacacacacacat

SEQ ID NO: 105653 - DNA, 444 bp, Glycine max
  unsure (1)..(444): unsure at all n locations
tgacatcatgtgcctttcacctcgcacctattgccaatcttgatcttagacatagtcatcacatccatttcaatccatgaaatacttctgttcctattatttttctaaactttctttgtcgcattnttattaatgactcattgagtaatgcacttatcacctgccatacaatattaaataaccacttattattgacagtcactgccaacataaaatattcagcaagtttttgcacacaagtcataagtcctgccatctaaaatattagcaagtttatcatacaagtctanagcttctcataaaagtcatatacaaccacaagtgctgatacaatcattaaagacatctacaagtttctactgtgacaacatctactatgttcgacttcatctcgactgaagtgaatacataatattgacctctgtgtgcacctctacacaaatt

SEQ ID NO: 105654 - DNA, 369 bp, Glycine max
tgtctctacgtttacgcgagacggagaccaacatgctagctatcatcgcctattaccaagaagagttgggtctagccacggcccacgagcatagaatcacggattagtatgcccaagtatatgcggaaaaagaggctagaggaagggtgatcgactctttacaccaagaggcaaccatgtggatggatcggtttgctcttaccttgaacgggagtcaagaacttccccgattgttagccaatgccaatgcaatggcagacacctactccgcccccgaagagattcatgggcttctcggctattgtcagcatatgatagacttaatggcccacataattagaaatcgttaggaaacttgtatggtctctt

SEQ ID NO: 105655 - DNA, 394 bp, Glycine max
  unsure (1)..(394): unsure at all n locations
tgttcactactctntaaacanagatggcatacaacctcctnccataaatacanacagtcaatgtaaattagagcaagcttatgcgcatatttncttacgaacattcacttgcacaagacatcctatcaactaagaaaaatgcacccatatacaatcaaggtagcttcattacctagaatatntacatgtacttccaaagtgtannttgtatntacatcacacacgcctgcttggctgaatatacatacatgcatactcaaagcatttngtggtaccanaaactgcacatgcgctcatctnggtatttctaatacccatacatatacatacttcacgatgaatctcgactacctacacanataggtgctacatttcatgcctttttttcaagttt

SEQ ID NO: 105656 - DNA, 421 bp, Glycine max
catgccatcaccattccggcccatacccattccaagcttatacccattctttatcatgactcgagccaccatcaaagaggtatcagacatactcgattgtatcggaggagactccacataagcattgttcacaatttccaatgcctaaaatgacatttctagtgactcctccactacttcaacataaggagtataagacagatgactagctagtatgtcctcctcgcctgatactataacaagctaacccctcaccacaaatttcaatttttgatgcaaagactatgggaccaccccagtttaatggatccatgggtgacctaacaaacaattataagcaggagttatatctatgacttggaaggtgatttgaaacgtgcacgagccaatctgaatcatgagatcaatttcccctctcaca

SEQ ID NO: 105657 - DNA, 443 bp, Glycine max
  unsure (1)..(443): unsure at all n locations
ctcatgctttacaanaagggtcatcaagtcaagttgaaatatggaagtaaccgtcctgcanaanntgggaaaagatgaatngagtcacatcactgcttntctactgccaacatattangattgtgatgccttgtactccagttcacctgacaagatgtatggccatgtaagaatctaaatgattcacccatatctgctaaaattccaaacttnactgtcgtattccatgctcatgctttattggtgattgtcatgcattcttcttgaaaataaataaataaataaatgacttatcaaaaaaagacccttacgcgcctacgactgtctnactaatatggtaacaagagtcagaaaataagcgaatgagctaagacaatgccatgtaagctgatactagaatatgagcatcgttatgcgttacctcctagtaccatctcttgcta

SEQ ID NO: 105658 - DNA, 431 bp, Glycine max
ctggatttccttttagtagggaatctatccttcctatgatggagtccaacccaatcaccctcattaagaactagctcttttcttcctctattgcctttagttgaatacacctttgtttggttctctatttggttcttaaccctctcatgcaacttctttacaaattctgacctatattccccttctttatgtataaaagaagtgtccagtgggaggggaatgaggtctaacggtgttaggggattgaacccatagacaacctcaaaaggggactgcttggtggttctatgaacccccctgttgtaggaaaattctacatggggaagatactcatcccaagacttatggttgcctttcagaagagcccttaaaagggtggataaagacctattcactacctctgtttgcccatcagtttgtggatgacaagt

SEQ ID NO: 105659 - DNA, 311 bp, Glycine max
  unsure (1)..(311): unsure at all n locations
ttcttagtctcctctagctaaatgatanacacgatgcgtgtgtatgtgcgcatccctccgatgccataaccatgaatgatgcactttacttacgatacaactaagctcacgaatgggagcatgtgcaaggtttaacacgtagatagtacctatcctttcgccaatatggacaacctggccatacataggttaactaattagacaacaatttctattgaattctatgttgaagcctttgtcacaaagtggactaatgctcaagaggttacgctttattcacatcaacatacataacattgtctatctgtgtc

SEQ ID NO: 105660 - DNA, 410 bp, Glycine max
  unsure (1)..(410): unsure at all n locations
agtcacgagctgcagctgaggagcatctacatatttgttgtggtttgtggaaatgctaattgcatgttgtacaaaaatcttcaaaatatttatgttgttagagaaatcctggattgctgtttacaaatcctacaacattatagttgttagagcgatcctgattgctgtttacaaatcctcacaaaaatcctgttagacaaatccctgaaaaacaaaacaacaaaagaatacaatgtaaagaagaaatagtgttactaaacattgttganaaatactcacttttgaaaaacgactacagttaaatggtcctgagggagcggaattccgcccaagactgtgagcatggaaactttgactggtgtaatagaagacgccactctactaatactgagcgtgcggtacgtgtaatc

SEQ ID NO: 105661 - DNA, 398 bp, Glycine max
  unsure (1)..(398): unsure at all n locations
gacactttgactaactaagcttctcggctcatgctgngaacgcctctagttcaacacccttgctttctttgcacccacccagagggaagctccccaagttccaactccgaacacgactcgaccggccggtaattccaacacgacaaggaacttccctccgaggccattgccggaattcaccccgctcccaatgacgtacgaagatcttctaccatccctcatcgccaatcatttggccgtggtaactcccggaagggtcctcgaaccccctttcccgaagtggtatgaccttaacgcaacctgcaagtaccatggtggtgtcccggggcattccgtcgagaaatgctnggcccttaaatacaaggtccaacatttaatggatgccggatggctgactt

SEQ ID NO: 105662 - DNA, 414 bp, Glycine max
tagagaaaaagcttcaatggaggaagagaatgagatagaaagtctggggcgtggaaattgaaggagaagagggagagaagttgaactttgaagtgtgtctcacaagtttctcattcatcaaagttgtgacaaatgttacacatgtttctatttatagcctaacacatgggaaaattccttgagaatcaaggaaggtagctttgttgggaagctagaggaagaaagcttccttgagaagctagggggggctactcacacccttccaatagcttagctcaccccatgctaatatacatgaaaacacaatgggaagcttccttgagaagcaaggaaaagaagaaagcttccttgagaagctagagagggggctactcacacccctccatatctaatctcaccccatgccaaaataca

SEQ ID NO: 105663 - DNA, 334 bp, Glycine max
  unsure (1)..(334): unsure at all n locations
atttctatgcgctgtcgttatcctacaccctcaaatcttatccggagccncatgaatngctagtcattcatgcatcctncgacatcgagtctcgagccccacgaattgattgcctagcgctgntcttctatccttcaccctcatatcttatccggagccccatgaatngcttgtcattcatgcatcctacaccatcgagtctggagccncacgaatagattgctagcgctgtcatctatcctcaccctatatcttatcggaccccatgaatgctatcatcatgcatctcacatcgagctgagcccataattattgccacnctgtcattatctca

SEQ ID NO: 105664 - DNA, 404 bp, Glycine max
  unsure (1)..(404): unsure at all n locations
cttgtggggcttctgtggaggctggatcgatgatctgtatttgtgtccttcaatggtgattntacaccatggagatgcatcggaaggaaaaggagaagatgagaggagaggggaggcaccatccactatggaataagccaaggaagaaggagcttcaccaccaagaatttccatggataagaatcttgaagaggatgctttaatggaggaaaataaagagagaaggggggagaacgaaattgaaggactaaaagagggagagaagtggaactttgaagtgtatctcataagactttcattcatcatagttacaacaagtgttatacatgcttctatttatagactagatagtttccttgataagctttcatgagaaaacttccttgagaagcttctttgtgaaa

SEQ ID NO: 105665 - DNA, 418 bp, Glycine max
  unsure (1)..(418): unsure at all n locations
atatttgtgtngcattgtgcatcatcatagtgtgagtgaagaannatttataagttagaaaaatttcttcagaggcaaaagttgtctattttaatttgatataaagttgtcgtaatcaattacaacatgctgtctgaagctggtagagttaagtctcgtattcgattaatcgattatggtagtactntaatcaatcacactgtngttngagataatgactgattnnttangagtctctacttttaatcgataccaggtggatttaatgatacttctntctcatttaagtngtcagaggtgaacanagaaacaattaatcgattacttnggtcatctaatcgaatacattggtcttgagttgtntccagatggtgggataacacttaatcaatactttgatatttaatcgatacttcat

SEQ ID NO: 105666 - DNA, 421 bp, Glycine max
ctgttcaattgctgcacagaagggaaaaggtctgtgtgttggtcggcaaaggagcataaaccacagagtcttgtgacaagtacagaattctgattcaaggccagctgggttaccatgttaaccaatgcatctagtttaccctctagcttcttagtttcagcttatgaagatgaattcgtggctacttcatgcactcctctaatgacaatagcatcatttctggcactaaactgttaggagttggaagccatcttctcaattaaattcctagcctcagcaggggtcataccaccaagagctccaccactagcagcatcaatcatactcctctccatgttgctaagtccctcatagaaatattgaagaagttgctcagaaatctggtggtgagggcagcttgcacacaatttcttgaatcttt

SEQ ID NO: 105667 - DNA, 376 bp, Glycine max
  unsure (1)..(376): unsure at all n locations
gactgcngtgtgaccataaatttatgttgagtgtcctcatggatatgttctacgattggttntgcatgaatttctaattgtcatagcatatgatttgtggaagtgatctgggcattctttctgctttacatttcaagccattggccaaactactgtcccaacacaccttattttttgccattttgtaatccctttgagccagacacttgatttgttgtcggaacactaaacctaggatgaaagcttcctaccttacctaaggataggagagcaagggtgtttctaggggagatttctatcacttccatggctagttgtgggttttgaaagaagttaagtatttactgaaagtttaaaanaaaagaagaaaagaagt

SEQ ID NO: 105668 - DNA, 433 bp, Glycine max
  unsure (1)..(433): unsure at all n locations
tttgtccttgaatacctagctnttctttccttcccgtttctaatctgagccactgttggattatctggaaaaggaacaatagcatagttctattgtacagcttcccaaaaaccatttgcctctaggtatgtctctattacacgctctggctgcccaaatatgatagttgtcaccatcaacaacaggtggggctagtgctatgtanggtgagtcatttttttccaactcacagcaccctttataagacaactttgatgccaatttgttggtacaacatgaactaaacagagaaaataaataatattttatttctttgtaatttgaagtcataattgcacaacacaacaaagggatctagattctatgactagcttaagtggctggcttcaacagttttatgcactgcaccaccatgtcatccttanatattagt

SEQ ID NO: 105669 - DNA, 395 bp, Glycine max
ttgcagatctggtcttcgccagtgaaaggatcgatgtgggtctgataaaatttataaaaaaaaaagaaggcaaatttgatcatcctactatgacgactgagaaaactggggcaaataaagagggtgaggataaaggagaaacccatgctgtgactgccattcctgtacgaccaagtttcccaccaacccaacaatgtcattactcagccaataacaaaccttctccttacccaccacccaagtatccacaaaggccatccctaaatctaccaaaaagtctgtctaccgcacttccaatgacgaacaccacctttatcacaaaccaaaaacaccaactgtcgcaacctacccttcggcgggagggcgacgcgagactcgcgtgatgcgtgttccac

SEQ ID NO: 105670 - DNA, 344 bp, Glycine max
  unsure (1)..(344): unsure at all n locations
tcccatcagtgaccttgactggtctccctatgatattacctattgcgagtgacttgactngctagtgtgtggtttgtcttgtcatgtactcctangcgcccgacgagggttttcactgacatggtgccacattgcatataggatngagtcttagtgtatnntgtgcataacgcttgtgtattgttctatattgatnntattgatgatattgngtttcgactattgagtatgcgaatggtctgaaaacanatgagactatggtgaaataacgtgagttagggctcaagtaaatgggatttggtatataatacttatacttatatgtagtttattttntctctata

SEQ ID NO: 105671 - DNA, 408 bp, Glycine max
  unsure (1)..(408): unsure at all n locations
gtataaatgaaccaaacaagtcaaactcaagcttcatatttttaacaagccaaatacaagttttaaatttacttcattttaaataaatgacctaaacttagcatcttctaaccaagcatcaactttaatttcttggcttgactcgacactttgacaacgcccttaacattatatattactccaatttggttgataaaaagcgatgacaatgttatcaaattcccaattattattattacaaatattcaattatgaatagtacatcaacccatgtttcgaccacttataggggtcagtgccattagatcataaagttataaaagaaaggaatatatgatcttatngataaaatttaaattatttaatatcctattaaatattatgtatttacacaacatttaaaattta

SEQ ID NO: 105672 - DNA, 117 bp, Glycine max
  unsure (1)..(117): unsure at all n locations
attatactactcttctaatgtagtggaccactaanattaanataatataatagaanatactgcttaagccattcanatcaagtcattntgaatctcaccattagtatcatgcatgtc

SEQ ID NO: 105673 - DNA, 407 bp, Glycine max
tatcttacctatctatctcccagatgtctttgcaaagattcaatagataatatacatgaagttctaattcaagatgttttctttgttgcatgggcataatgcaatcactctatgtctagcaatgattttattaagatgtccctacctttgagttctactaaaaattatcctctctcaagcgactaatccctaaaactgatgcatataaaaccttcaatgtatttctaccaaggattaccctctttcaagcgccaaacccctaaagatgatgcaaggatgaagcatataatacatttgttggcattttatgcctgccaagccctaactaaaggggtttagcctttcattgtcatgagagaactttacactctatggggttgatatggatggaagaagatggatggata

SEQ ID NO: 105674 - DNA, 294 bp, Glycine max
  unsure (1)..(294): unsure at all n locations
gagcaacagcaatctttaacactccctcctnctcctncttcttcacattcacactctntctctctctctctctcctnctacaactatctctctnctgcccctctacctacatccacgaccttctccgctccagaggctagccccncggcctccctccagaggaggtgaaatcctacagcttctccgataccggccactnggaagtctccttgacgcgccggcctgaccaatacaaaacagagtcctttcgacaagtcgtcaccgcaacctcacctatggaagcctcatatgagt

SEQ ID NO: 105675 - DNA, 286 bp, Glycine max
atcattgcttgaggacaagcaagattctatgttgtgttgagttgacaagcgccaaatacgaggtggttttgggattaaatggataagacatatcccttggttaggagaagttttcttgcaaactacccttgaatctagatgcatatatatatattgtataattaccaatattggtgcttaaatatgaaagattcatccatgattctgtaggttttttatggttgtttgacgaatctagacacacagccttgacgatgggcaaaacaatcatttcatggagattttt

SEQ ID NO: 105676 - DNA, 349 bp, Glycine max
  unsure (1)..(349): unsure at all n locations
ttatatcttaagctctcatgtgcatatntctgtaaaagcttctntaattatattcccttatgtatttccatntagactaatcanagctngacattattatgatcatgttgcaagctgtcttcaagagagagagcgtgttattcggcaggggggccaagtacattggcaagttgatacttggaggggtggtcttcctgcacttcangttngttcanatngatngcaatggtgccatatcatatattggaaatgaatggttntatntgttcttccatgtgcatnnntatgaaataggaattgagctcactttttcttctaaatcatcatcattnttngtnggtagtaattc

SEQ ID NO: 105677 - DNA, 434 bp, Glycine max
cgcatgatttacatctccctctttctcaagcaaattcttcttgatatcatcaaaatcttcatgatttacattctccccctttttgatgatgacaaccacctgtatgttaggagcaacaacaaagaaaatatctatttgcatatagtttactcccccttggttttacaatgattgcttatatgagacaattgaagatttcatatttttcatatataaaaagttgtctcataaaacaatagataatttttcttactattttatcttttatctttctctccccctttgtcaacatcaaaaacaaatcatgaatagagaggagaaagatgttaccacttgttgcaatgtatgagaatcaagtgatatcaaaaggcattaaaacaatcattcaatattaatcaagcaaaaacaagtacaataacacatcaatcaaacac

SEQ ID NO: 105678 - DNA, 457 bp, Glycine max
  unsure (1)..(457): unsure at all n locations
ctgcagcttcttctctctgtctggtcggccgcaaactgtgctgtatctttgctctgaagaaagtgtgcctattatatggctatngcttagtggcgagatcccacaacattatgcttgcactgccttttgctccgagactaacaaattgatgatgtctcttgtgctaaactttgatttgacccgaactgatgaggcatgaagttcatatggtcaccacagaaaaaggatggcagttattctggtttataaaattttaatctgtctgatactggaccatgatgncaccctgtggtgttgaaaagtacttcaccttctgatgtggtatgagcttcatgctaggatctattatcactttgatataaaatagtgaaatatgggatngatttctaaataataaattggaagtcatgatgagatcgtttctgactgaatgcacaactgtgaaacaacgatctac

SEQ ID NO: 105679 - DNA, 452 bp, Glycine max
ttacggaacattaaactaagctatgctgatacatctacacaaacctcctcaacctcaacagcttatatcagccacaacagaataattatgacctctctagcaacaggtacaatccccgatggaggaatcatcccaaccttaaatggtcaaatccttcacaacagcagcagcaacaacaacaacaaacttattttcaaaatgttgctggcccaagcaaaccatacgttcctccaacaatccagcagcaacaacagcaacagccccataaatatcaaacagttgatgcccctccgcaaccttcccttgaagaacttgtgaggcaaatgattatgcaaaacatgcagtttcagcaagagaccatagcctccattcagagcttaactaatcagatgggacagttggctacacagttaaatcaacaacagtcccataattctgatagattaccttct

SEQ ID NO: 105680 - DNA, 107 bp, Glycine max
  unsure (1)..(107): unsure at all n locations
aacaccatcattccctcttctgctnctttcttcttcattatgatctctattctncatgtgatccaacctctcatggagcgcatcatctcgttagttcattaacctct

SEQ ID NO: 105681 - DNA, 463 bp, Glycine max
  unsure (1)..(463): unsure at all n locations
tctcatcatgaaattagtgcngcatcttttggtagtagccattatggctatgatangaatggctcctatgagtgtctgaggggaccanactagctagatcaactgtgacanatanatgangngtacgtattntggggccctgaatgggagaggtcagtntctatactctatatngaagggtccattatactagcactggttcttctctttatctcaatacgcttatctgtatggtcatctatcanctaatattaanagcgtaatattccctaagtccanaacaaagcaccgggtatatacctaagcctcaccgtanaggaagttaatggatagtagtctctttacgtgactatactnanagacagaattatatgtcactgcgtgcctcntattattatatatatatttttatatttatattatatttatattattatatatatatttattatatttatattcc

SEQ ID NO: 105682 - DNA, 433 bp, Glycine max
tggagaggatgcttcaatggagggaaaagaaagagggagagattgagagaggggggagcatgaaattgaaggaagaaaaagggggagaactttaactttgagttgtgtctcacaagactctcattcatcaaagatgccacaagtgttacacatgcttctatttatagactaggtagcttctcaaagtagctttcttgagaaaacttccttgagaagcttctttgagaaaacctccttgaaaagctagagcttagctacatacacccctctcataactaagctcacttccttgagaagcttccttaagaagattcctaaagaagctagagcttagctacacatacctctctaatagctaagctcacctccataagataagaagctagagcttagctacacaccccttataataactaagctcactcctatggcc

SEQ ID NO: 105683 - DNA, 396 bp, Glycine max
tactcaagctcgctacacattttgaaaaatgtcattctatggttgttcttgtttacttctaagccacattatttcctatgttggcattgaaggagatccggctaaaagtgctgttatttcacaattgccttacccctcttgcgtgcgagaggtgcgatcttatcttggccatgcttgattctacacacgctctattatagatttttgcaaagcagcccttccactatactacttgtggctataggaagtggattttgactttaatgataaatgctaaaaggctgttgattgtctatatcagcactgactaccacccccatgtttcactcacccaactggtctacccctcttgagcctatgtgtgatgcatcaaatcatgcaatgggagttgtcctt

SEQ ID NO: 105684 - DNA, 419 bp, Glycine max
  unsure (1)..(419): unsure at all n locations
tgtgcaaagatagaaatgatacacaaagagaaaacattnttcattatagatgtttgatgaatggaaaggttttttctctaatcattgatgggggaagttgtaccaatgttgcaagcactagattagtggagaaacttggtttaaaaaccacccctcaccctaaaccttataagttccaatggttgagtgacaatggcaagttggttgtggaaaagcaagtgttacttacattctccattggaaagtatgttggtgatgtccttcgtgatatggttcccatggaagccagacatgtgctgcttgggagaccttggcaatatgatagagatgttgttcataatggggtcaccaatcaatattctttcttgcataaggtaaaaaggtagatctctcacctttgtctccaagtgatgtgtgtg

SEQ ID NO: 105685 - DNA, 105 bp, Glycine max
cttacactgcgctcactgtacctgtgatttcataactgtctacacactaatgtctcttttaagtgttatggttaaccactactctctgacttttgctatgttctg

SEQ ID NO: 105686 - DNA, 415 bp, Glycine max
  unsure (1)..(415): unsure at all n locations
tacccatcacatgtggtactangtggctgtctggcaatggtgcacaacaagttttccacatccacaaatcccgcataaacccaccatcccctgttgcccacctccaactgagctcacgtactcccacgtagcccatatgcttgtttctctcaacaccgggtccccatcaatcctcccaagcttccccaacttccaagtaatacaaaattcaaacaacacaaactatcacaaccaagaaaacagggcaaaggcagaaaaccttgcccaaaacatcaaccaaaatcacagcttttctcacttaaagaccccagtaacaattccttcgttccagttcattaaccgttggatcgactcgaaaattntactggaagtctctagtacataagcactacattttaccatggtgatctactac

SEQ ID NO: 105687 - DNA, 96 bp, Glycine max
ctcatacccgttagaccagagactctgatgagacacagtcttatctgtggataagtcataatgatcaagtgtagcgttctctccactatggtgttg

SEQ ID NO: 105688 - DNA, 237 bp, Glycine max
cttattgtatattcttcattctttgaccatatgtataaaatagagccacgatcctttgctcacatgaccacacccgtttatagcctaagcatttctccaaacacttggtgggcgcatgtttaagcactaatatcgcgagaatggggacaatgtggaatgcgccatcgctttagaatgcacactaagagatggcgatcccttactaccgctcaattgcacataatcaagcagctattt

SEQ ID NO: 105689 - DNA, 254 bp, Glycine max
  unsure (1)..(254): unsure at all n locations
cacattctactatccttttttatatcttcaccacacagaatgtacaatgaagcgcaaactgctacctctctacactcgagtgattaagtctcacctgaagctgatagcgctaaccacactggcgccatcctctgactgcaatcaccagctcgagtggcgccttccagctacaatcttgagcagctgctattgctgtaacctatacctgantatatgcatagctgaagtcgctgatcataccaatgcttcatgca

SEQ ID NO: 105690 - DNA, 444 bp, Glycine max
  unsure (1)..(444): unsure at all n locations
gacactttaataccagctcttcgacaatgtcgatgagtggcgacgaattgggtaaagcgtggtttttcatactcatggtgatggtgttgngagcggaagacaaatgtttgtgggttgaacgcacgactttgtagttattctgaccatctttaaccgttattattctaaattaattatttcaacattaaaaacttatcaaaacactatcagtaacattgttgatgaaaaaatgaaagaaaagatgaaaataaaactttgaacacataaaagaccatcagacttttaaaatttaatatattaaaactaaaaaaaatattaaaacacaaagaaccaaaatttaaatttaacctaacattaaagataatgattaaaattaataaacctaaattatattataatctgtaattagacgagaactaaattttgagactgagtttgctgtaa

SEQ ID NO: 105691 - DNA, 314 bp, Glycine max
  unsure (1)..(314): unsure at all n locations
catgaaacatacacacctatagaagtcataatgttagatggatatggattngaactatatgtttatgtgtttgaagagacttggaaacttactttatgctttcctttcttagtgtacaatattctcacgcttatctatgggtttatgattaacaagatctgccaaagaatgatagctacttgacctaggaatacggaacgcctgtattgtattattaaaacttctgatcagattattttttagctgagtatactgcggttgaagttgtggcacattggaaactgacccaaacatctgtattacatgtgtcatac

SEQ ID NO: 105692 - DNA, 416 bp, Glycine max
aagctatatccaaggcatagggagacagatataaagaattccattgccaatgcagttcatggtatggaagttggggagtttgctacatttatggcacttggtttgcacttcgtggtcttgcagcagcgagtaaaacttacactaattgtgctgccattcgcaaaaccattaaatttctactttcaacactgaaagaggacggtgggtggggagaaagctatctttcatgcccaaaacaggtttgtcattgaatggtcatggtaaacaggatactatatggtttattaaactgtattaaatatgcttgtatgtatgtctttaacctcatttagtgtggatgaatagagcacatattctttatgtgggttcaagacatttcacttctcttcccctcggttttaaattttaatctctat

SEQ ID NO: 105693 - DNA, 153 bp, Glycine max
cttcaaacagcacgcatctggtcttcttaaatctaaccgtgaatttgttctccacaattaagcacgcgattttttcctcagtagaacgcgactgtactgagctcttgcagagcttctggggacgacaagctttggcatagggctctggtaaaa

SEQ ID NO: 105694 - DNA, 362 bp, Glycine max
tcaggtgcagccatctccctaagtgtcctctcacgaggtggaggttgagccatgttctcagtatgaaaattagtagctgaatgctcaaaatcagaatattcaaaatcaccctcaacagaatgctcacaatgcacagaatgactaagttgcacactatgcctaactaatctacgaaaggttctatctatgtcaggatcaaagggttgtaaatcacctggattgcccctagtcatgcattatatgcagcaaataatgtgtttctcaacaagcacctaacatggtggtaaaactacaactatactcatacgatatcaaaatgacgtgaaactgtgtgaggaacaccctaaaatcatgaaaagata

SEQ ID NO: 105695 - DNA, 388 bp, Glycine max
tgtaacaccaaaattggctctgtcatttccaaatatgcatgcgtgttatgaagcatgaatatgaatcaagccaaggttatagctcacgcagtcaatgcggcaaaacacaccaaaggattatgatgatggatggctcaaagaatgacatatgctaactcatcactttcaaattgagctttcaaaactatcatgacatgcttaggagaatcatggatctcaagtcacgaaatgtcaaaaactcttatttttaaaaaaaattacccatttcttgaacatatactgtgattcagagaaagacatgcaaaggcctacctgcacacataattgacccgctatattaaactataaatacgacgatgcttatctacattaacacatcaacacaact

SEQ ID NO: 105696 - DNA, 92 bp, Glycine max
tgtcgcattatcgctctcagagcgaacacaagttcatgatattttatacatacatctgttgagaaagctaatagagccttagattcacatat

SEQ ID NO: 105697 - DNA, 427 bp, Glycine max
tccgttgttcaattgtgagagtctcgatatatgatgcgcctgtatcggacctccgtgtgaaaagttatgaccatttgaatttctcgagagcttcccgtgttcaatttcgagcgtttcgatatataacgcgcttgaatcggacatccgagtgaaaatttatgaccatttgaatttctcgagagcatccgttgttcaataatcaacgtctcgatatactatgcagcttaatcggacttccgtatgaaaagttatgaccatttgaatttctcgagatcttacgtggttcaatttctggcgtctccatatgtgatgttcttgaatcggacctccgtgtgaaaagttatgacaattataatttctcgagagctttcgttgttcaatttcgagagtctcaatatttgatgctcctgaatcgaaccttcgtgtg

SEQ ID NO: 105698 - DNA, 399 bp, Glycine max
cgtgaatgactcattaccagcccatggttaacgtgccattccatgcaattctagtgcattatgccttttgatattttaagcacaaatggctaaagaaagtgtaaaccaaaaaatggaaatctctgctttcgctataactagttaaccctatcctattgccctagatggacgtgttacactttcttggattaagcgttatcaaagtggacgttgcacaaagtacactctcacagaacttaattacatcgtcacttactgcacaatgtaattctttcacaaatgaaattttatttcatacagtatgcatatctttgccaaactatgcaaaataaaatacatacaactatttatatatctatgcattgcacgaaattcacagcttaatattatacaatcaat

SEQ ID NO: 105699 - DNA, 382 bp, Glycine max
aaagatgattggatcaccacttcaagagaaatgagtcagaaaagctcacaccattgaagcctggtaagactcaaggaagataaatgatgggggtatgggagaagacacgaattgtcctaatgagctgacttgaatgtatttcaatgatcagtgaaaaatgccaccatatcttattatagctgtgtcacaaatggaagaattgattctttaattactaaatgaatgattggagcaaattctatgtgtaatacgacacccatcatcttctgtcctaatcaggtgaaagtttttagtcctctctatgactaatcagcaatatatctatattgcaaaatggttctatctgaccatatctagttaactagctcctctttgctatttg

SEQ ID NO: 105700 - DNA, 404 bp, Glycine max
  unsure (1)..(404): unsure at all n locations
cttgaatgctctattcaatggagttgacaagaatatcttcagtctgatcaacacttgcacagtggccaatgatgcgtgggatatcctgaaaaccactcattgaagaacctccaaggtaaagatgtccagactgcaactattggctacaaaattcgaaaatctgaagatgaatgaggaagaatgtattcatgacttccacatgaacattcttgaaattgccaatgcatgcactgccttgggagagaagatgacagatgaaaagctggtgagaaagatcctcagatccttgcctaagagatttgacatgaaagtcactgcaatagaggaggcccaagacatttgcaacatgagagtggatgaactcattggttcccttcaaacctttgagctaggactctcngata

SEQ ID NO: 105701 - DNA, 271 bp, Glycine max
tcaaatgttgattatgcctgctggaaacgaagtgactaccatgacttagcctcaagcttttgtgtcgattatcatacaggtccgtttttctgtccttccaaattcgtgctgttaacccattttttaccttctcccttcatgtttgttgtacatgactttacccaatttctatctttacaaagtgaatatctggcttatacccaatgacacctttgatggatgtatatcttttttcgatgtctagggttagcgcttatgcattagaatcaaa

SEQ ID NO: 105702 - DNA, 249 bp, Glycine max
tgagaattgtgaaggaacaagactctgaaatgaaggaacagaggaatagtggttctttgaagaggctatctctgagttctcccggggggaggttgacgatccactcgccgagaatagctggccggaggggcctggaaagcgtgtcgtctacagcgagttctggctcccggagaagcctctccgataagcttgcgggtgtgaagtcattctttaacccacagaaggatttcatggagtccatgatggaga

SEQ ID NO: 105703 - DNA, 267 bp, Glycine max
  unsure (1)..(267): unsure at all n locations
tcctatntatgattaacanaattgcctactgaaggtgtaccttttgagggtgcactgattgatgaatgntaatttgatttctctgtgcatgatgcccgccggttggttngcaccaaccaagcggatatgaccggaagacttcttgccggntcatttggctttgagagccgcatcctncattaccttattgntcgcatcttactccctagatcttcanaccttgctcanggttatgaacaagatctcattgtcatgtgggcctttcat

SEQ ID NO: 105704 - DNA, 346 bp, Glycine max
  unsure (1)..(346): unsure at all n locations
gcgcatcgatatattataagcctgaatcggacatccgtgtganaagttatgaccatttgaatntctagagagcttccgatgtttaatttcgagtgtatcgatatattatacacctgaatcggaccttagtggtaaagttatgaccatttgaatntcacgagagcttcctgtggtcaatttcgagtgtcactatatgtgatgcgccaaaattggacattcgagttaaatgttatgagcattngaatttctcaagagctttcaatgttcaattctgagcgtctcgatatgtgatttgcctgaatcggacatccgtgtagaaagtatgaccattgaattctcaagactt

SEQ ID NO: 105705 - DNA, 358 bp, Glycine max
  unsure (1)..(358): unsure at all n locations
atatcctacaatcatatgtcatttattaccacctagttaaaacatatgcgaatttcatgttaaagtcacaagcctacaatacattcattnntttgtgaactgcanaaacaatcatgatgtgtgtgtgtgtggaggggatattcgaatatgaccatcaagagaccaaattagaactaaacttagagtatgaatgtgctagcaattagtttagacaagagagctttaactcattttggggtgaaaactttaactcatgggacccagtattntttaagatntgtagcgtgcattaacctcaaacaaacatctatgccacaacattcacccctaaatagctcaattaattacatctcacatt

SEQ ID NO: 105706 - DNA, 404 bp, Glycine max
agaaatgattattatacacacattatggaagtactatgtatttattacctatacttaacagaaaatacttataacactacaaaataaccataaattggaagagtttgatacaacttacacaagttttatacacaaaagttagtcgtattcaccgactaacagtacacgaatctggaaggaaagtagtagtagaaacatgatggcgcgcaaactcaaaagatatggcattatgggcaaaaagtagttgatttctacaataccaaataacccaaacaaaattcacaatgagggtgagagacaactttctagtttgggcactccattttctatcaagtagctaaagcaaggagtgacaatagatgttttccattggacttgcaaattgtaacatccatcccaatcta

SEQ ID NO: 105707 - DNA, 239 bp, Glycine max
  unsure (1)..(239): unsure at all n locations
tgtcccactaagcgagttcatctcttctgacgaatgctcgaatgtttatgaactctctaagtgcacgtgtgcgctaagcgagtaatgtgtttcacacactcagagattgtgtcagtgctttcgtattcgtggctaagcgagcctgctctctaagccacttcactcctgttggttgaataatcctgagcatagcgagcncatcttgctaagcccaaggcacttgtgattctcttatgttt

SEQ ID NO: 105708 - DNA, 378 bp, Glycine max
  unsure (1)..(378): unsure at all n locations
catgaccaacctatttatgattaacaaactttctagtgaagtgtgcctctgagggtgcactgattgatgatagaaattcgtactttctgtgcatgatgctcgccggttggtttgcaccaaccaagcggatatgaccggaaagctctcttgcggttcattggctttntgaaatcgcatcctccattaccttattgttcgcattttgctacctagatcttcaaaccttgcccaggttattgaagaagatctcattgtcatgtgcgcctttcatanaggtttacaaattgattggcacaccttgtagatattccatgcatatgcattgaattgaagcccattgcctatctcatttgtacccttttttcacaggtcacatcc

SEQ ID NO: 105709 - DNA, 79 bp, Glycine max
atatatatatatagatatatatgatgataggtatatatatatatatgtgtatatatacatatatagatatatatatatc

SEQ ID NO: 105710 - DNA, 157 bp, Glycine max
ttcttctcctccacaggtattggcatcctccattggctatctgtgttcgattcttccgacatccaggatagtgtactaacctcgtgtcttcattaggaagcgtatacgcccggtggatatacgacatgagatgatgtgtagtgatgtgtggcggctg

SEQ ID NO: 105711 - DNA, 283 bp, Glycine max
  unsure (1)..(283): unsure at all n locations
atctctaagcaccgccgctgcagctatgaaaatgtatttatgtgacttgtttcgatcatagtgaatatggttagtattcaatccaagcagcatcactactaagagcccttttatctctaattgatcattaaatgtatgctgaagtgtgacacgacaattgtatgcaagaaactccacctccacagcagttattatgtttcttttttctaaaaaaaggtcaaggacctcattaacaaacttaaatgtatgcatgaccatggctttcntttgttataatactaat

SEQ ID NO: 105712 - DNA, 159 bp, Glycine max
atatgctgtcctcaaaatcatggtgggttgcgggtgaatgacattatagcttttaataatgcattacttgcgaaatggatgacggatttgcttgaagggaggcggaatctatggtgtgatactgtggattctacatattgagggtggtgaagattgcat

SEQ ID NO: 105713 - DNA, 483 bp, Glycine max
  unsure (1)..(483): unsure at all n locations
tgatgcagatgggtttgtatctacctatgcactcctctaatgactatggcatcatttctggcgctaaattgctgggagttggaggccatcctcttcaataaatttctggcttcagtaggagtcatgtctccaaggactncaccactggcagcatctatcatattttctccatattactgagtccttcataanaatattggagaagaaagctgttctgaaatctgatggtggggcaactggcacatagtttcttaaatctctccaagtactcatacaggctctctccactgagttgtctaatacctgagatatccttcctgatggctgtggtcctggaagcanggaaaatantttctaagaatactctcttaaggtcatcccagctcgtgatggaccttgcagcaaggtaatacagccagtcctttgccactccctctaatgaatgangaanagccttcagaaatatgtgatcctcttggacat

SEQ ID NO: 105714 - DNA, 502 bp, Glycine max
  unsure (1)..(502): unsure at all n locations
ataaaaaagagcatatagcaacatatntgtgantatagagtagttataatntattaacaatggtatccgaaccggaccgatttattctggtcaacactgggttgaagacgtgtcactgggctaatatcataaacgatcaagtaattgtatcagctcggccttgtatccggntntcgttctaaccgattaaatttgcaaatctaataacacttagacaaanggggtaaataatcattagttcctatatnttcattattnnntattttattggagnncgtatagttttaaattataggaactaagagaaagtaaatgtanattattataaactaaaaaaacactcttnaaatacaggattaanagaaaaataacttttataatataggactaananaatcacttttttaatatangaactaaaaaaatagaactatgaantatangaaataataatatttacctcacaaactacactagtattacctcattgagtgaatgagtg

SEQ ID NO: 105715 - DNA, 447 bp, Glycine max
  unsure (1)..(447): unsure at all n locations
gatcttaatgcactgccgctgcagctgattatatatgactttatagatcaacttcgatctatactatctaatatctaatattatacttncaactaatagctctatcactaaaaaccaatagatntatatatggactaagacttatcattaaacaaaccaataagcatacgtatacgggtcaacgaatttatcatactaaaaaatggtaataccacacaaacgtatcgtattctataaatagtaaaactatgtttaaacataaacacaatactctaattgtaaaatcatgatattatattgtatactgaatattattattattttatcacaaataatattatctataaacatatcggtatgttaagtctagtaagctcttatgagaaacacaatttaatctacttaactaaaaaaatgtttttttttaaaaaaaaactgattcacttt

SEQ ID NO: 105716 - DNA, 382 bp, Glycine max
  unsure (1)..(382): unsure at all n locations
gtctgcagaaactgatatctcatgattctgtntctncatccgctcaagggagatgtatctacactganagatgtaatctcagataaccagtntagctagaaaaccatgatggttaaaaacattcagctggacgttcctttcaactctttggccatattgattatatcatagtgtntgtttgtgtggcctttgctatantttggtatagagactntcaaatcttgtcacttcaatgctctgttaaggttaattnttggtgatttatgcaagagctggtacattatgtattagtttcattctagtgggaaggctaactcatgcatcaataacctgcccatctttctcttttcttgtccccatgcgctgtgcagcatgctgaaat

SEQ ID NO: 105717 - DNA, 253 bp, Glycine max
  unsure (1)..(253): unsure at all n locations
tcttctccaccatgtaagtgtccttcttcatcaatgggttgagcacccttnttatcccaagagccatcatgctctttacgggaaccaaaggatgcaatcactgcagcgccaattagaaaggatctctttgatggaacataaagtttataatcaagagggatgttgaagtgttgaagaaagagggtgactaggtgtgaatatggcaatggagcatttaatcgcantgccttatgcatgcgatatcgaactaagt

SEQ ID NO: 105718 - DNA, 337 bp, Glycine max
  unsure (1)..(337): unsure at all n locations
ttcttgaaccctaatgttagtgtctgtggaatgaatgtaatctctatgctcacaatttgtagttatagtcttggctggaattgcgtgatgagtagtctctctcataattctaaggttaaaaatgaattccttgcgtatcacaactcangggtagccttgaatntcacctaaatcagagtttcctactnaagagtatgaacaaaacaagtttacggaaatttctnttatgactaaactgtcacaccactagactgtgtgctatgcgtgtatggactattgttatcatagatttgagttcactaagagattttacgcgtgacaatatggggtagcactg

SEQ ID NO: 105719 - DNA, 442 bp, Glycine max
  unsure (1)..(442): unsure at all n locations
ctcacttgtgtcttgatcttcttggtttaatagaggttctttgatcaanatgaacttaactaatttcttcttatctttctcttccttggatattgaatgantattagagtggaatcgatcttcctagctaccatagaggtttagttngagaacttgaacatcgaagaaaaagctcatgtaggaactagagctntgcctaccttcactaactntatgggtaatatagtggaggtgagtaattggaccaacttattatatggtgaacttgctaatgatctatccaaggagctctaattacttgaatttgttcatctttttgtaaaggatttgtgaactctctcatgtacttcaataganaaaaacattatcattgtaggatgttacaactataagccaaaagactatctatatgtgatnttattctgaataaccatattacttg

SEQ ID NO: 105720 - DNA, 441 bp, Glycine max
  unsure (1)..(441): unsure at all n locations
gctngtgacatttaattctgatatatccttgttagatagctatctattgggatttatttggttatagcttgctctcttcaaatgggtcgatgccaagcctgaaaaacctagtacgcctcttctcttttttcattattttcatactagtcaatccttccccattcccctgaataattaaccctaacattatgttcatgtattctgatcaaagtggtcaattntctttcctcagctatttgttcagacaccctagagcagtgatctagaatagttggaagctataaatgcataaatctttgaaaattggaagttcattgtcantttgaacctttctggtgatgttaaatcctggtttttctctcttcatgaaatggaacatgcactggatnttgatttgcatggtaatcttgtataataaaagttaacgaatgattagaactt

SEQ ID NO: 105721 - DNA, 326 bp, Glycine max
  unsure (1)..(326): unsure at all n locations
acgtgcattgtgtgcatacacaattctcggtacactatatcanaatggtgtatcagaaatgcgtaatagaactntaatggatatggttagaagtatgttaatcaattagactntacccgtatctttgtggatgtatgccttgaaaactgtcatgtatttgttgaacagggttcctagtaaggcagttccaaagacaccttntgaactatggacaaataggatacctagtataaggcacctgcatgtntagggttgccagacagaaataaggatttataatccgcaagaaagaaaattggatgcaagaacaatcagtgaatatttca

SEQ ID NO: 105722 - DNA, 466 bp, Glycine max
  unsure (1)..(466): unsure at all n locations
ccgcgatctctgagtcacctgcggcatgcaagctntgatgatatggtcttcactgacgagaggatcaatgtgtgtctaataagaggcaaatctgatcatcatgctnttgataatgccaaaaaaaactatggcaaatgaagagggtgagaatgagggagaagcccatgctgtgactgccattcctatatgggcaagtttcccaccaacccgacaatgtcattactcagccagtaacaacccatcttcttacccaccacacagtgattcacaaaggccatncctaaatcacaccacanaacccacctaccacacgaccaatgctaaaacaccacttttagcatgaaccgaagcccaaccaagaaatgaatttgagtgagatacctgagaatcacccaatncagtgtctangtgactgctccatattacttgatatcaatggagcctaccctagccaggtcatcacctc

SEQ ID NO: 105723 - DNA, 473 bp, Glycine max
  unsure (1)..(473): unsure at all n locations
gtagacacatcttcttcaaccttgtgattctagactctctttcatngaagcgcatatccactcgcaattccaaagtgtcaaacctctcaccaacaaagggttgaagaccatcanacctgtccttcttcaccaacatttctagcacccttcttcacccatgagccatcatgctcctttatataaccaaaggatgctatgactgaagcgcctataaggaatgatctcttgattggaacataaggttcanaatcaagagggatgtngaagtgttgaaggaaaanggtaacaagatgaggataatgcaatggtgcattcaatcgcaatgccttatgcatgcgatatctaacaaggtgtgcccaatcaatttgtaacctntacaaagggccacatgaaatgaatcttttcagaacctgacaagggtgaaatctggaacaaatgcaacatacgtatggagatgcgttcaaaccatgacc

SEQ ID NO: 105724 - DNA, 197 bp, Glycine max
  unsure (1)..(197): unsure at all n locations
tgcaagcttctcgctggagtcctaatgggcacatangattgtggtgggatccantaccttatacccctcttgaggaaacatagcatcaagctcctcatcagtcaaggggcgaattctctcttcaatatccctctcccacctcaacaaaatgtattgttccggagtaatggagccttgtaaagcccagggttggagta

SEQ ID NO: 105725 - DNA, 408 bp, Glycine max
  unsure (1)..(408): unsure at all n locations
attcactatggntccttaatntgtgctatatccagaataatcagatngcagttctcatangtctttgctctgtggntntcatttgattttattgttctggtgatcctacagactgaactaatatctggtgaccaaaatggcaacattcgtgtgtgggatttgacagcaaattcatgcagttgcgaatnggtattagttatgactcttttntattgaatatggatatcactgtagaatcacgactcacaatatcntttattcaagacataaatccaaaataatatttactaagaatgaactgtctanattagtagccagttctaactctctatgcatacaccttgcataagcacatgatgcgttctcttttgaccttcacatgtactctaatatacattcaatcaccat

SEQ ID NO: 105726 - DNA, 408 bp, Glycine max
  unsure (1)..(408): unsure at all n locations
gcttacggtanaatctgggacctatctctggcagaagtctccacagaggtcattgcctccctcgcccaatattatgaccagccgttgagatgcttcacttttggggacttccagctatcacccatgatggaagaatttgaagagatcctaggatgtcctctagggggaaggagaccatacctcttctcagggttctatccctcattagctagaatntcctagatagtccaaatcttggcacaggaataagaccacagaaagcaagtcgaaaatggggtggttggaataccgagaaaatngttggaggcaaaagcaagaatcttggcaggtagaggtgaatgggccccgttcatagacatcctcgcacttttgatcttcggnggagtcctctttccaaatgtagatggg

SEQ ID NO: 105727 - DNA, 338 bp, Glycine max
  unsure (1)..(338): unsure at all n locations
cgacttggtgtccagaaatagacacttctntgttacaattgaactaaggttctntgcctatggtggtgcagtctttgcactgtgtataacactagttgttgccatgctcatcgtgttgtgattcacctccaagatgttcaagtcctcctccatggtgtggtgtgccattcgagagcaaccaatgaataaagacttagttcttcatatcactctgggctgtgattagtgaatgatagaatgaggttaaatcttgtattgtgtctgtgaggacttatatcctattggggtggagttatataattggataatttggtctggtatagtgaggaattcgtatg

SEQ ID NO: 105728 - DNA, 296 bp, Glycine max
  unsure (1)..(296): unsure at all n locations
agctntgagacgcatgtgaaccttttgcatcatcaatacattcagctngatcctttgctacatattggtagccatgaatctctaaccttgcttccctagcatggataaattaaatgcatgcaaatntctgaaccctattccttcatattcctttntcattaagaagttgttccaacttagcccattaattcctttcctttggtgcttaattgaataccacacaaaaagtcatcattntctgcaagtcatcttcaatggtagaaggaagcaaataaacactcatgaagtatgtggga

SEQ ID NO: 105729 - DNA, 550 bp, Glycine max
  unsure (1)..(550): unsure at all n locations
tatctggtcatcgtctagatgtcttatatcaacaattcccctttatttcanaagattctaatgataattgtgacatttgtcatttagctaaacanaaacgattgccctattctcttagttcgagtagaaactctaaaanttttgagttgattcatantggatattggggaccattttctaaatcatcaattcatggacatagatattgtttaactatacttgatgattntagtagatatacttgggtggtttattaaaatcaaaaagtgaagtgaanacaaatgttcaaaaatttattaattngatggaaaantcaattganacanaaattaaatgcattcgatccgataatagtcttgaatttttcttaaagaattntntcaangggttaatcaccaaactagttgtgttacccctcaacaaatggagagtggacactacatcacatatcttacgtactagggccctatgtcaattgacttcacaatttggccttgcataacatgccgttctataatcggtccttctgtttctataacacatggactta

SEQ ID NO: 105730 - DNA, 378 bp, Glycine max
  unsure (1)..(378): unsure at all n locations
ctttgtatgtatgtttatgctngtggtaggaacctataagtctatgtatgctngttgtatggatgtttgtgattccttgttcgtagcgatgtcaatgccttatagtttgatgacctgtatcaagatatatttcataaggaatactcatttgatcgtacctttcagttctagtacaacctatttccttatgttgcgcgttgaagtcaagtaactcgattacacttgcaagtccgagtataattcattctttgtgttatgagcttacatcannacagttgattactggattttctgtcacaatcaagcgaatggtgacatctccatatgtgtgtaccactatggtcatgtntcatttctagaaatcatttggaatatttg

SEQ ID NO: 105731 - DNA, 416 bp, Glycine max
  unsure (1)..(416): unsure at all n locations
agcnnttatatgctctngcnatatcctcctcgtgttcatttttggttcatntcagngagtnntnnttnttntgtgagcatcaatgtatggaatgacctctgttgtattgtntaatacatacaaatgtgcttgtgagacttcgtgccgagtcattgtgataactttgaattctcgtgtacccttatcccccggtgtccaaccatgacgactttctggagcggcgatgggttgagcagattcaatgtactaggagcaaaactcaatacactcttcagcaacataccttttgacaatcgaagctttgggctgggtcggtgtagattcttcgatacctcttaacactttcatgtaacgtcaattggatacatccaccataggaatacaggcgcacacattctgatcttctccactacatg

SEQ ID NO: 105732 - DNA, 420 bp, Glycine max
  unsure (1)..(420): unsure at all n locations
taagctcgcctcagatcctctgtggacagactagacagacaacattattgtacaacatatataaaccanaacttaatccgcagatccctcttgtaagactaagttccaatcctgcttcaatcaagttctaaggcaacaatacatttcccaatgctaaagtcacctaactatgcacacaaatgggtgatcacaccaagagcatacataatttaagcacttatagaagcattgaacacaagaaacacaatcaattagatattaaaataattacatctgttgttctttagagatccccaacaagggtgtntaaccagccattatagaanaacccctaactattaatgaaatacagaacctaggtatctctgcanaagctactcctcnttgtgcctcagagcacttctccccattaggcactat

SEQ ID NO: 105733 - DNA, 460 bp, Glycine max
  unsure (1)..(460): unsure at all n locations
tgccgctgcactgagatatgggaccatacatgtgtctatgtggcggtcggcgatggtgcacaacaagtttttcacattcacaatgcgcgcatanacncaccantccctgtagcccacctccaactgagctcacgtactcccatgtagcccatatcctcgttctctaacaccgggtcccataatcctccaagcttcccaacatcaagtaatgcaacattcaaacagcacatactatcacagccaagaaaacagagcanaggcaganaactctgccaaaacaccaaccaaaatcacagctnttctcacttaaagaccccagtaacaattccttcgttccaattcgttaaccggtggatcgactccaaatttttactggaagtctctagtacataagcctacattttgaccgntgggatctactagcaaacatccagaactcattctgcactgctctttccac

SEQ ID NO: 105734 - DNA, 331 bp, Glycine max
ccggctggtcgaaatgtgcgaatcttgtctggcccgttcgcccaacctttcttcatggaattgaatctgacatgctttcctcagacacatgattagagctgcagcattacgtgatccaggcagctgttccgttgcggctaattctaaaaaatggtttcccactttcctattgaaatctttcccggggcttggttgtaactacccactcaatattactgccactgcacatgcgcctgttcctgctacgtgaggaacaacctaaagtgctcctcctcatctccttgaatgctgttatcgctccgcagttgtttggggagtcaggtatgctctt

SEQ ID NO: 105735 - DNA, 222 bp, Glycine max
  unsure (1)..(222): unsure at all n locations
tctccatggatcttctcacatgtcttgtgctaaatggtgtcaagatgattctttagaaattccatcgattaaaattgctacagaagctagatttgattttctatggttcaaatntcttgttcttgctcttgaaccatgaattatgttgggtttaggttcctttgagttttgtcttgcaattttntgtggctgaaacctacatgtcgcaacatgcccttttgt

SEQ ID NO: 105736 - DNA, 320 bp, Glycine max
ctactgatgatgagatgtcatgttatggtgctctacatgcctaccagaatcatcatttacttacgacacttagctacatcactggcctcatgagtgactcagctattcattttcttgcactttgccctgcagatgaagaatcatagaagataaccataagtaaaggctttagatgttttatcacttcactttttttctatattttcattcatccatcttactccaatcacatcactcttagtggataaagaccttgacatcgcatcatgcccgaatagattgatgataatatttcatctcttctgccaaaaaaatgtctc

SEQ ID NO: 105737 - DNA, 293 bp, Glycine max
  unsure (1)..(293): unsure at all n locations
tggtccttatacgaagtcactgagatacttgngcctgtgcgtgttgcgtnntggtatgttattgcctctgctatttgtagtcatgatttcctcttggttggaattattgtctgatnngtgtatctatgtgatatctggtactgctgttagtgtgttgctatgatctgcatgttnttttnttatcggcaaaaatatattaaatattcgttatgtaaatagtgatgaagtacctgaggtacttnnntttattttatntttngcagaaaacaaagaagggaaagagcaacaatttg

SEQ ID NO: 105738 - DNA, 299 bp, Glycine max
ctgctggtgaggggctatggctgcttttttggcaatggtaggagggattcaactgctttgcaatttctgcaaggcacaattgttggtgaagtggtttctgtgggaaataacaatgggttgcgtttacaatcccgctatgaatttgctgaaatcagaattcagcatcacgtacaatgacaaagattctggtttatggaagctgtgtgttggttggcaatttgctctgctgtttgtggtgttatctgatggatctgatgtggacggagatgtggaccctaagacagtagtctgatctaccg

SEQ ID NO: 105739 - DNA, 396 bp, Glycine max
  unsure (1)..(396): unsure at all n locations
ctctttggctggatcagaaatggtgcagaaagtacgtacggaccttacngtgcacactggtctcatgcactcatatctcggcggcaactatcactttttcacatcaaacttcttacacagctatagttgcaacacanagaacatgtgcatttccatagcctcagaagtcgatngagataatataaacaacanaactaagattaagatgaaccgacgtagaagaaaacaattgtgagatccataactttcctgtcatgtttccttttaccgcgtagctaaaataatattntataacnctcggacttgaagatgctatgaagctatagttggccaatggagcactcgaaagtctgtcaaaaanggttaatggttattccctctcctgcttattactct

SEQ ID NO: 105740 - DNA, 238 bp, Glycine max
  unsure (1)..(238): unsure at all n locations
gattgtggggaaatcgccaagtgtctcttcaccacttgncgcccagttcccaccaaagggttttttatgtcaactatgtttggaaggtatggaaaaacccccaaaaacgttcgaaagaaggctcttttgatatgatcctgcttagactacaaaattggcggataatcacctctgcgtgagtctttgagtctcgtgtttctaatgttatctaaatttgcaaatgtggtttctttgatta

SEQ ID NO: 105741 - DNA, 233 bp, Glycine max
  unsure (1)..(233): unsure at all n locations
ctatatgtctacanaaaattcacatggttgttttcatatcaaatctacatctatatgtcanattatgataaagattttacataaaaacaacaaagagtngttcgatttcacaagtttagagttgttattggcaatcacaacacatgtagaatcttccatttgacaacacaaacctttgtcattattgtgaggaaaatgggcaaaagagagaattaatgtgaagcaagacagtg

SEQ ID NO: 105742 - DNA, 271 bp, Glycine max
  unsure (1)..(271): unsure at all n locations
cctatctatcatatctctgttcatatctatacaaactaatatcatcaacaatgaatgattatntaaatgagttatttatcttatgtttatgagtcttacaagttcaaatatgtgtgaatactatacaaattcactctaatgactaagttcctatattgagtcggaaccngactctataatgtttgtaatacttgaataacatattatgtatgatataaatgctgtgcaacaacatttaattatataagcaattctatatcatgtatcatgt

SEQ ID NO: 105743 - DNA, 376 bp, Glycine max
  unsure (1)..(376): unsure at all n locations
ctaatatatgggccattaaatctatcatgtgttgacagtaactaattagcctgtgaatttcctctggggctgaacacacttcagcgatggcctttgctttggctagtagtcgcgggaggtcttgaattccatttaaggtcaaggcgaacctatccatccacatggtcgcttcttgatgcaatgcatcaatcaccctccctcttgcttccttctcgcgtacgctngtgcgaagtcctctactagttnttgttcatgggtcaaagactggtttaactcttccttgtactgccctattatagctagcatgctatgctcgcgggcttctaagtgttgggccaaactcctcttggatcttgagcaagctcgctactccttc

SEQ ID NO: 105744 - DNA, 305 bp, Glycine max
  unsure (1)..(305): unsure at all n locations
agctgcatagaagctgagctagctcacacacccctctanntactattctcaccttcttgagaagagaagctagagcttagctacacacncctataatagctaagctcacccccatgacatagaacatgaatatacataaaaaatcctactacaaagactactgaanatgccctgnaatacaaggctaanaccctatactactagaatggccaaaatacaaggcccaaaagaagaatacaacctattctactatttacaaagaagagtggacccaacctttggccatgtgctcaaaaatctaccct

SEQ ID NO: 105745 - DNA, 291 bp, Glycine max
cgcatatatgccccgaatcgacatcgggaaagtatactattgaattctgagacttcatgttaattcagcgtttattattatactgattgacatctgtgaaagtataccttgaatgcgagatctcatgttattgagcgtatgtatttttccctgatcgacatcggggaaggttaccattgattttagactccgtgttatactaactctacattttcgccaatgacttcttgaaagtttgacatgatttagacttcgtgcatttagctgtttgtatctctatgattcatgaag

SEQ ID NO: 105746 - DNA, 427 bp, Glycine max
  unsure (1)..(427): unsure at all n locations
aatattgtagccgatgctctntctcggcgtcatgcattactttctatgcttgaaacanaanntgatggtcttgaatgttnganaagcatgtatganaatgatgaaacctttggagaaattttaataattgtgaaaaattttcagaaaatggtttctttagacatgaaggctttcttttcaaagaaaacaaatcgtgtgtgcctaaatgttctactagatatatgcttgtntgtgaagcacatgaaggagggttaatggtgccattntgggtccaaaagactctagatacattacaagaacatntnntattggctcatatgananaggatgtgcagaaattttgtgaacattgcattgtatgtataaatgcanagtctaanggtaagcctcatggattgtatactcattgcccattcccgagatcttg

SEQ ID NO: 105747 - DNA, 362 bp, Glycine max
  unsure (1)..(362): unsure at all n locations
acacttatccnagaccatgttacttatctntaagccttatgatcnttgtgagcgtgtgcacattcgttccanagatcatacctctatttagtaaggtgatctttgaagtcattaagttcttttaactctttntgtagaacttcaattttagcttctaaaatgttaaagcccctcattagaagatctcgttcttttgaaatcttttcattntccagacanagccctttntccaaggtgtcataagcttcacttgtttcagtattttctatcanagaactgatatccttagaatggatggacttcttaagnttaatatgatccttgggatagttctttaaaattctttcacacagttttgaatc

SEQ ID NO: 105748 - DNA, 440 bp, Glycine max
tgtgtacacttgttgtatacttgatgaatgagagtcttgtgagatgttcgtcttcgtgatgtgcaccatatcgcacaagtcgtataaaaccggcaagagatcgagtatctgaactctcgcgagaactctgtgttattcgtgaatgctatctcatcacataggtgttcgtgtgtaagataccgcaattgaaaggtggtaatatctggcaaaggaaataaatgaaacatgcaagaatactgtgaacaagaaaaccacggcttctatagtgctgtctaaaatattttacaacagccatgtgtctagggctctgaatctacccattctataagtatctatctacacatcgcggatcttgtgctactcactacactaaccctccactaattccctctcttgatttcactcctttgaggcttacaccgtccttatactacaatctt

SEQ ID NO: 105749 - DNA, 378 bp, Glycine max
  unsure (1)..(378): unsure at all n locations
ggatgtctccttcacctctagaacctcacaatcactcacagactcatctcatgctctcaagatggcttcctcttcacgctccattctctgccagtcttcttacaacaaaagctctcaaaactctctagaacttggatctttctttctctagaaatctctaaacatgcaaaagcttcgagaattgtccacactccctctccatatntgatttcaggcttaaatatgtggccttgttggtgcatgcgtgcgtagcgcaactctggctcgttagcgtgcattagtgaatntcggcttagcgcgtgtcttctcgctcagcggatggactcaagtggtgcacttagtatgatgacaccttgctcagcgaacatgcacaactca

SEQ ID NO: 105750 - DNA, 398 bp, Glycine max
  unsure (1)..(398): unsure at all n locations
tgatattacatgtccgattggtttggagttacggacanatgttacttccaagtatttataattcttcggcagaatttgacctataatatgtgcttttcatgtggaagatggcaaacgcaaggtgagttagttgtgtgcagcatctatacggtcaaatctcacacattctttgactttttgtctccaaaagggatagggtattgtattattcacttgtgtccataaaaggaaaatgatttgtatactatccgttatttngtgaaaatgacgttgtattgtatccgcttcggagattttgatcttggcgtttttttactggcatagttggaacactagttgctgcgatgctcttatgtagttacaaatctatgctgtgattcaatccatgggctggtgtt

SEQ ID NO: 105751 - DNA, 257 bp, Glycine max
tatcctgtgccactcactgactactctccagagccatatctttcttaacgcggtccataatctccagctcccacatcagtattacatcctataaacacaacacaaagaagaaaattgcaaaaaacaaaaagtttactcaaactcaacattctcgtcatcgtacgcgacatcaattatgagcttaactagctacttgacgggatatacaatcaactattgctatttcaacacaaactaattttgctatcaattgtgca

SEQ ID NO: 105752 - DNA, 356 bp, Glycine max
tagctctcttcagctgcacactctctcctagtttgtatagttccaaacctctctatatcaggcagttaatcagagcattaaacacacataactactagctacgaaacttagcaccacatatcacatcaacatcttatacataaataagattataaattctcacatagtcgcatccccaacctgtttacacatatcgaataacatccgagcacatctccacggattaaactatatacaagccacaaactgctctatgagcccacgtatttcgccagggattaacgaactctagattattactacaaactactcgactgcactataaaaacaccagcactctcaaggattaactgcta

SEQ ID NO: 105753 - DNA, 386 bp, Glycine max
  unsure (1)..(386): unsure at all n locations
tcacatgacgtacatatgtgtctgcgtgcacnanagatagaatgttccttgaagatactaaataatacagatttatcaagcagaaccaagtctttgtgatattcttcaatcatcattgttacagttcctaggatgacttgatcatctctttgtcttgttgaacacctgctagtaaatctatgtactatgatgaccatcttcctctctttctgataaattaaccttcgtatacctntctcaatcgcctgttcctgacttattttcgtgattatntaagtgttgtggatgaatgtgcgaatctatcattattgactgctgctataagcanactctcagaggctagagagcaatatgatcaaatggtagagaataaacagttagaacta

SEQ ID NO: 105754 - DNA, 478 bp, Glycine max
  unsure (1)..(478): unsure at all n locations
ttcgtaatgtgcctgtcttataataccncanaatctcatttggtgaaattgaatntcaatgtgtcattactaaaaaatattaaggatcaaaatcggttgaaggttactcattaaaaaatatttttcactccatccaaatcttgtgggtttaagaattaatgtttagggagaccttgtgtgcacatctttaggatcaatattgtatgcggagagagcattgccagcatcccttctaatctggaagatcaaacggttcctcaacgtgtgctccaagaagaagtcgagagaaaagaataatatgaatgacatcttantcatagaggtcataacgcacagaagatcaatgaaattnntcatcaattcacctcacaccgaccacttgttgttgcacngttcatgagaatcgcactgatgacacattctaaagatatatagtaagtcttgctactgtatgactctgggcttcgctctacagctc

SEQ ID NO: 105755 - DNA, 328 bp, Glycine max
  unsure (1)..(328): unsure at all n locations
gttgtgcaatgacaacatcatcagtatatcgggaagttgttgataatttgccgcaaccaagttaggtaaatcattntacctcttacatacttatcangtggagtttccccgagtaatgtttgacaagcaacacgtacatcgccaatgatgaaactggttaccagcaatccatcaatctttcagtccaactgtaggaccacatcctgtaaggtaatggttggctctccatgtggaaaatgaaatgtgtgtgtctcgattctccaacgttcaaccaacgcactaaccaaatgctgtgtaatatcaacttttccaacatttataatatgtc

SEQ ID NO: 105756 - DNA, 398 bp, Glycine max
  unsure (1)..(398): unsure at all n locations
aatacttatacaaacctaccaattaggggtgttgcggctctgtgcatattccgcccatgtgtctggatcaaggccatacttgactgtangatcagatatttgctgacattcattgtcagcaaagacaaatttcgaagtcaatgaagactntatatacctccatcttgcttcaactgttgacatcaccttnttgttgcatattcaccttcaaggatatcaaatgtgcgctgcacaacataacgagttatgtaacagtatgtaaatgaatcctttaatagtaacttaacaacaaaatcatgaatacaagtgtatgtataattacttaccaaaatatctntccatattaagctctttagatcatctgggacaacattccaattcgcgtgtacaatatgaac

SEQ ID NO: 105757 - DNA, 210 bp, Glycine max
  unsure (1)..(210): unsure at all n locations
atcaaataataaatatattgtgtaatttttttatacagcannatataccttctgctgggtgaacaattcttactggttgaggaatgtcngtgacttcatcgtctgtatcagatataccgtcaagactatcatcttcgtctaaagactcttcaacgtatgaagtagacacaacataatcatcgtcatcatcatcatcgtcttcgtcaatat

SEQ ID NO: 105758 - DNA, 469 bp, Glycine max
  unsure (1)..(469): unsure at all n locations
gtatttcttaatgtttctactagtagccggagctcatcatttaacttctagatattgatatgaaccacaacgaaaataatgaacttagctatgtgtattttgtttattgcngtaactctttgtaacganggacggggtttcanggctgttgtatatattctcattcnagaaatatctattcccaagntgtatatagtgttagaaatttataccattgtgtcaagtcaatttgttttaaactcgatcaagtacttgatccaaacacttttgtccccaatttgctctggatagccagcctcatgaatattatacacccagtcccagccatactattgtcagctatgatattcattttactgttgctgnaatgataattgcgtcattcggttgcgtggtacangatgatatgctatgattccattctcatcatcctggatctgtcttctccgcatcttctatatttgttaat

SEQ ID NO: 105759 - DNA, 300 bp, Glycine max
  unsure (1)..(300): unsure at all n locations
gtgagtgatcgactaggggaaaagaatgtgtatgtgtttctttgatttagggttgtcatcatcaaaaaggagggagatgtagaaccaagcttcatgatgatgaatcaagtttattcaagaagttttgatgatgacaaagatgatgacaaacagccgaagagaatgantttcagattgagtcaccaagttcaagatcaagtttaatttcaagtttcatgagaagaaatcaagaagattcaagaatcaagagaagtttgtattcaagattcaagagaagatgaattctagattcaagagaag

SEQ ID NO: 105760 - DNA, 393 bp, Glycine max
  unsure (1)..(393): unsure at all n locations
tctctcacattgaatggagagaggctctcttccgccggtgctcncttcatggtgtaccctaactgtcttatagcaagtgcgggattgtagttaatacaacccctcatccctatcaacgggtatgttgggtagtccccacatgagaagagaactccctcatttccttccttccatcgaggaaaccagttgattattctgcctcctatgccagccaagtgttggtccctatctactcttctcttttcgacacacgagcgatggcttcggagcggacatgggtgtcttatgtcttgttggaataggtgtgaaaccaaccatacacaaagagcaggtaagtagcagatgatctgtgcgctactcttctcgcaccttcggtcanatgtatcaaataag

SEQ ID NO: 105761 - DNA, 384 bp, Glycine max
  unsure (1)..(384): unsure at all n locations
tttcattccttctcctttgcaaaaagaattcgccaaggacataaccgctgaattctttttgtatctctcttcntccttttccaaaagaacaaaggactaaccgcatgaattcttttgtgtctccctctctccttgtcaaagaattcaaaatgacacagtctgataatttctttgattcttcccattcccttatacaaaagtgttcaaaggactaatcgcctgagaattctnttgtatccncattcacaaagtatcanaggtttaaccgccttagatctttgtcttaacacatngganggtacatnctttgtggtacaagtagagggtacactactttggttgactgagaacaagagagggtacatctcttgtggatcagttcta

SEQ ID NO: 105762 - DNA, 313 bp, Glycine max
tgcacccctgctcaatttgtgccaccctgttaacggaataattctctgaaagcaaataactgactcaaaattaccttacatggtgggtgagttgataaccaatttcctgagacctctgggaagcttcttctgcagacctccgggtttggaaacatcttggtgccacatcttccccccaaatgataaaaaaagttaacagaatcaataccttcccttccccttttttggattgttttaaaataggaaaggactccctttttctccttctttctccaactatcagaagccggcattaaatgacctgtagtcatat

SEQ ID NO: 105763 - DNA, 371 bp, Glycine max
  unsure (1)..(371): unsure at all n locations
agacttgtatgatatcaagatccttatattgccatagtaggactaaggaacactatggtctctgataccacaacaatattctcaaaatgtcttactttataataaacatatttacgtacttcagtcttcacaaatctaaaacttcaataangtggcttgaatgattggtgagaacaagacttgacaaaagttgagggaataaaatgagcagagattaactccctttcacatgcgagtatttcaataagtattaacataatacttattttaaccatttacttaaatcagttacatataaatattgcataattgactaataacacaaattctgcttttcatacaaatgggcattttcttctctaagatgaaag

SEQ ID NO: 105764 - DNA, 249 bp, Glycine max
  unsure (1)..(249): unsure at all n locations
atggngctagtgcaacactgcaactgcaacaatgctcagtgttngagtgtgctgtgttgcagagagaaagtgaggagagagaagaaagttatttataatccgtaattaataacagaattaaatttatgtgataatatgttcataactagaataatccagataagtgatgttgtaatcgaatgtatataattgttacaattgaatactagcttcttatttttgacatgtgaagatttctatccaacacat

SEQ ID NO: 105765 - DNA, 500 bp, Glycine max
  unsure (1)..(500): unsure at all n locations
gtcttgtatttctgcangaatgttatgtaatggtttgcacccagattgtgacgcagataaatatctacttcaatgcgtctatgggtgacattctgtagtatctaatttagaatataaattcgtgaaatacctcttctggggtcaaatacgttttatacaatcgctagtagtatttcattgtgaagatcttgtctgcattaaaagtatttgtcattgattagtacttctaattaatagaacaataaggctataatcgctggtcgggtctatggaccaaacgatatccaaattaagagactacgactngatccggtttggttcgagtgaagcacatttggtacctggtaactcagaatttattcttccccagaacatgcgtcactagttcctacatcattgaagatgtataatactcttctacttatacagtgacaagcatcatactgacctaaatgtcaatcataaatcttcagcttaaaatatctgaaaaacttcttgtt

SEQ ID NO: 105766 - DNA, 114 bp, Glycine max
ttaaagcctctgaactatgctctaacacatgcctacttgcattaacaaagctaaatgctttcgctcttagaaccatattttcaacctatagcctagattgtaattatcactaac

SEQ ID NO: 105767 - DNA, 403 bp, Glycine max
  unsure (1)..(403): unsure at all n locations
acaaagtctgtccattcatggccaatcctcttgaatctcactggacagcagtgacaagaattctcacgtatctcaaaggctctttacaccatggccctcttctcaaagctgctactcctggaattcccattcccagtaaagccccttgtgatgcagactgggcttctgaccctgatgatcacagatctacttcaggagttgctatttattntggccctaatcttatatctcgcgtggctaagaaacaacagattgttgcaagatcaatactgatgtgagtatcgagcctacacacgcacagctgaagagtgggattcaactctgtgactgactatctgtccttcactactcacagctttgtgacataatataacctgtctcactcagacaagccatggaatca

SEQ ID NO: 105768 - DNA, 492 bp, Glycine max
  unsure (1)..(492): unsure at all n locations
tatatatagcaagatcaagatccattacttcaaggtgaaattggaattttcattctagtcaaagaagttaagcctattaaacattgacacagatgatacatgagaattcagtgaattgggaatagggtaccgcacaataaaatcacataagcattttgagacatanaacacatgttatacatataattcattcagataacaatcaatgtatattgatggctctcttggggtgatacaccaacacaacatacaaacatgatgatgctaanntaaactctaacatcatttgacatttaatatgcaccaattagtagtacctactaccttagggtatantaatanaccantgatacacacanattaccctatattgattcattgttattagacaacaatcaccttgggaatcataattcctatacatgaattcatgtccataaccatatcattattaacttatatcttgagatgaatatatatttgaataatacc

SEQ ID NO: 105769 - DNA, 255 bp, Glycine max
ttcaatggctatctctaaacattattacgctagttgcacattctatacgttgagagatgttaaattattgtgtcacatatattaatgagccttaactgttgtcatgtataaattcctatatatcgctatgtttaaaaaaatagtcaatacatatcttcaaattgatgtatgataaagacaaggtggtgcgtgttctatcctataatttattcaaggatatattacaatatgatcaaactaattggaatgaggtaa

SEQ ID NO: 105770 - DNA, 452 bp, Glycine max
  unsure (1)..(452): unsure at all n locations
tacatatttactagatgaagtcaataatcaaatgtgataaaaatggtgagcataactataaatgttattcaatctatcatgttatcacttnntagtaaataatattctttattttattatcatacttattattctattaaaatgttaattcgacaagtttttgaataaattatatgcttgttatctgcaagagaatatgataatgagaaaaagttatttataatttcattctataattgtcttgattgtagaatattgtaatatgatatcataatccgataagttaattatatctatggtcttattggataaaatcatagatctaattataaatgcatatacgatatgttatgggatgtatattaaggactaatgagaatctataatacatacctgtatgcatagaagttctgaaaattatatttatgattgaattctatataacagtttgt

SEQ ID NO: 105771 - DNA, 411 bp, Glycine max
  unsure (1)..(411): unsure at all n locations
ccttacccgacgaagacanctgacaaaacttatcttctccttcttggacaaagtatggcaggcttcgggcaagtaaattttcttcccatcagaccttggatgcaactatgctcttatacccatatcagctagatcttgacgggtattcaagccatccttcgtcttgccttgaatgttaaggagcgtcccaatcacactgtcacaaacatttttctncacatgcataacatcaatacaatgtctaacgtcaagatcacaccagtacagaagatcaaagaanatggacctcttcttccatatgcaactctgactnttatccttctttngngtcttcccanatacagtgttcaggtgttgaaaccgctgatatacctgctcaccagtgaatcggtatcgcgcaatatcatgctc

SEQ ID NO: 105772 - DNA, 233 bp, Glycine max
  unsure (1)..(233): unsure at all n locations
ctatctctctgtgtgtctgatctcataaagaacgagagagatatctcaccagaacttcattgacaaattctctctcaacaactcttgtgcaaacacttgcagatctattgagaattcatccaagaacttcaccttgggttatccactctagccgagagacatctttctgttcttctcagaaagccaattgtcatcgacagactggttgtctcttgaatngtgagtatcctgaa

SEQ ID NO: 105773 - DNA, 287 bp, Glycine max
  unsure (1)..(287): unsure at all n locations
tgctgaattgcttccctgaaaccacacctcccaggttcttcatggaaagggctatggaagttacaattggtgagccattggtacacttgatgcctgaccaagaacatgcataggaattcccagttaattgttcttcaagaggcaccacccaattctgcaagctgttatcatcatctacaagctcagcttttaggcttaagagtgcctctgagtaagggtcatcaattgctagaactgctgatgataccatgaaggtagcaagaagtagatntttgatgtgggagtat

SEQ ID NO: 105774 - DNA, 272 bp, Glycine max
  unsure (1)..(272): unsure at all n locations
tgagggtattacttgttgtggaatgcaagacgtgtggttgtgggtgatactaacggcccttcanagtgntttgcaggggtataccaccaactgcttgaccttcagtggcatatccgangcaacgctcanagtcngctagattgtggtggcgaatatcatgtgtctctcccatggttngagagacatctgcatgatcagtctgaggttgtccgctttcaatgagtatgggagcggaattattgacatcctcactgtgagtgtatgccacatat

SEQ ID NO: 105775 - DNA, 422 bp, Glycine max
  unsure (1)..(422): unsure at all n locations
ctaggaatactgctagtctctgctatanagttgtcttcatagatcttattattccttactccgctgagagtgtggctngcagatctagtccaatctaaactagacgcttcttgtattaactgtcagagaaacaaattaaatcatcataaggcactaaatcagataataataataataataataataataataatggactgacagcccaacatttaagcatgtgcacgcacctgcttatacagagcatataagttcacatcatgttcagagtatatcatgtgtgcctgacataaaacacttagttaattcaataacttccatgtatcagatagacagatctattttatgatcatatataaaaaatacgtaagatcaataagaaagatgaatacttcagtgcgtgttatagcttacatagtcat

SEQ ID NO: 105776 - DNA, 290 bp, Glycine max
  unsure (1)..(290): unsure at all n locations
caactattgatgcttctgtctcttatccgcaggaatatgagctcgctttgaccgccaacagatgaatgcaatgaatngacacgagtggatgataaatcaagttcaatcatattctctgatgccactgaaaattcccttatgtttttgcatgattcaaggttgagaaaactaaaggagggtacgtggttctcgcctgtaatttttgtaagggaacaataagctatagacaatctcttgagagacaaaatagatggagacacactagtcaacctaggacatatatngatatc

SEQ ID NO: 105777 - DNA, 376 bp, Glycine max
  unsure (1)..(376): unsure at all n locations
ttgagctcacaaccctggatggtaatgccntgatgagattctatagactgtaggcatgctgctctagaatggaaccagaggagataccacgtgttaatgctttccatcataaccgttggaattgttatcagactctanaccactcctacttcactcaagagactcccctcatgatgatatgcacatggcaaaaggatntctatgtcacgtctaattgcaccttctcttctatggtgttattgtccttctccagattattcttcacacatcatgtggaacccatcattgtagaagttgaatctgatattgacgctgcgtctgactccctagttgttcaagtgtaggatcctccaccatcacgagtctatgttcaact

SEQ ID NO: 105778 - DNA, 557 bp, Glycine max
  unsure (1)..(557): unsure at all n locations
atctctgagtcacctgcggcatgcaagcttagctaaaatcnacattatcttcttgtccataagtnntatcataagactgatcagaaaagttaaaagagttaatggagcagaagttgcagacccctgagcaacaatagtggcttcctaagttcttaggatatgactttactattcagtacaagcctgggaaagagaacatactggcaaatgcattgtctgggaagtttatgatggccatttccaccccaattcattcttggataaatcaagtaattgatatgactcanactgatccccaattggtgaaaatctatcatagtttcctaccaggaaaaccttcttataatgattacaacattcaaaatggattatggatgttcaaggatanaatngtatttacctagtgatatgcactatcgaattagatcatgcaggagtntcataatacctaaaatggtgggcatgcanggggtcataaaacaatagcccngaaatgggctcattntactgaatggaatgggaatgatatagtaagttgtcaaggatgttcatttgtc

SEQ ID NO: 105779 - DNA, 435 bp, Glycine max
  unsure (1)..(435): unsure at all n locations
tatagttgaatggtcagtgtgcacaatgatctntgatcctacaagatatgatcaanactttttgaaggcataaaccactgctaacatctccttctccactactacacagttgatttgggcttcatttagcattnntgtggcatagtagatagcatgagaatattccactcctctttgtcctaatactactcttaccacatagttagtcgcatcacacattaattcgagttcttgccctcaattgggagccactatagctggtgtggttactagcttctttttcaagaggtcaaaagcttgaggcattcttcattgaagtggaacgaagtctctnntgacaagtaaatactaaggggtctggcaatnctagagaaatcttgttaaaccttctatagaaatcagcttgcccananagggtcgtactcctttcacgtc

SEQ ID NO: 105780 - DNA, 362 bp, Glycine max
  unsure (1)..(362): unsure at all n locations
atctcacangaataccatcaatgacaatgaagtattgtgtgtgggatgtgttctgactataaatatacatggcacttgttctttgaatgccaattttttctctagagtttggtgcggttactttaggtggtggggtattcattttgcacaatataatgactctccttctaacttctcacaattcgtgggtttgccaagttgcaatgattagaatgagttactgtgataaccaatttgtttgtagtggtttgggctaaatggaggactcgtagttntcttggttttaaaaccataagaatgagtttttgatctaattgttaacggttaagatacacccttgtcaattaatagtactatatatg

SEQ ID NO: 105781 - DNA, 374 bp, Glycine max
  unsure (1)..(374): unsure at all n locations
tgtctnttctgatggatgtggtcctatatgcanggaagaatntctccaagagcacnctcttaaggtcattccagttggagatggatctgggagccacgtagtacagccaatctttcgccgctccctccaaagaatgaagaanagcctntacaaagatatgatcttcctggacatcacgaggcttcattgtggaacagacaatatggaactccataagatgcttatgaggatcttcacctgcaagaccatgaaactngtgcagcagatgtattagtccaatcatgagaatatatggaacaccctcgtcaagatattgaatgcacaagctntcttaagtgaaatcatgtgcagccatttccctaagagtcctctca

SEQ ID NO: 105782 - DNA, 162 bp, Glycine max
tatatcgagatacttcgaatctaacaacggatgctctcaacaaattccaatggtcataacttgtcacacggaagtccgattcttgcacataatatatcgagacgctcgaaattgaacaacgaatgctctcgagaaattcaaatggtcataacttgtcacacg

SEQ ID NO: 105783 - DNA, 283 bp, Glycine max
  unsure (1)..(283): unsure at all n locations
ctccactgtattccgtgtgacaagtgatgaaccatttaatttctcgatagcattcgctgttcaattacgagcgtctcgatatattatgcgctcgaatcggacttccgtgtgacaagttatgaccattagaatntctcgagggcttncgtttttcatatcaagcgtcgagatatattatgcgcctgaatcagactatcgtgtgagaagtatggccatatgatntctcgagagcatgcgtgctcaatctcgagcgtctcgatatattctgcgcgttaatcggact

SEQ ID NO: 105784 - DNA, 72 bp, Glycine max
cctttctggttgagccactacagccttagtgaaaacctgatttacctatccttaagaattcggactttgaat

SEQ ID NO: 105785 - DNA, 311 bp, Glycine max
  unsure (1)..(311): unsure at all n locations
aacacacacacaccattttttctagtcgatcactcacataaattttcatatctccnctttggttttgaatntatgattcacttaaaattaagtntattactcatgtgagttcttgatttaatccctatttctcttcccctttggaatcaacaaacagccaagtgcgtacaagtatgaacatgcaataccactaatcttccacaacatctgganaatacaaccaatctgngcagaacatgactgatcaatttagaaagtccatgtctatacatatcataatttcaaccacatgcaataagaatctaatgtca

SEQ ID NO: 105786 - DNA, 274 bp, Glycine max
  unsure (1)..(274): unsure at all n locations
tgactatagcatcatttntggcgctaaactgtcgggagttggaagccatcttctcaattaaatctctggcttcaataacggtcatgtctccaagggctccaccactggctgcatctatcatacttctctacatgttactgagtccgtcatanaaatatnggagaagaagctgctcagaaatctggtggtgagggcaagtaggtgcataattntttaaatctctcccagtattcatataggctctctccactgagttgcctaatgcctgaaatat

SEQ ID NO: 105787 - DNA, 321 bp, Glycine max
  unsure (1)..(321): unsure at all n locations
gaaattaagaaacacacacacactttttcctagtcgatcactcttattaatggctcccctttggttttgaatttatgcttatcttaaaaataagttgattactcatgtgaattctttgattaatcccatttctcttccccttnggcatcaacaaaaagccaaagtgcgtattaaataaaattaatttaaacatccatacaatgttcataaaaaaatatcaaccaaatcatgaagcangaagcaagaaccatgaaaccatgaagcaaacaaccatgcatagataaattataaactccacatagtcaaataacatacttaata

SEQ ID NO: 105788 - DNA, 328 bp, Glycine max
  unsure (1)..(328): unsure at all n locations
taaaaaactaatgccttacctaggaaataaaaaaaacttaatggctgagtgtaactaaaattgtggcaaccaaaagtcaccctcaacagccaacaagtcagccaccatttggactcccaaaaggctgatgcctaggttgccaattgggcccttattacaacttgaactaaacctaactaaagcccttttagtggattaacccaaaacataattttggtcatccaactttacaaggattgggccattatttagacaaactaaacactctaaaattgagacanaagtggttcatttagtcctccttcatttgggccatgatacaactcac

SEQ ID NO: 105789 - DNA, 342 bp, Glycine max
  unsure (1)..(342): unsure at all n locations
taccgtaagaggaattgtgctcaatgtanactgtcacgctcagcacgaattgtcgcgcttagtgcatatcccaacccaagaggatgtgcactaaacgcaaaaagtcacactgatcaccaaaagtagaccccgcttagtgagacgagctcgctaagtaggatctgtcnattataaatatggttttcaacgtgaaaaacatgagatatcgctctcctcctctccagacacccacccacccaaaccctaacactttcttcttcaccacccacgaccattggtggccaccacgagccaccgttgcttgccgctgaaccaccacacgcgaggaacagtttaattgga

SEQ ID NO: 105790 - DNA, 257 bp, Glycine max
gaagtttttatgataacatttgtgatgaccaaaagctcaaagatcaagaacaattcatgataacaaagatgatgatcttcagaatcaaagaatgagttcaagatgttccagaattgatcaagaacacttcaagggtcaagaggagatttgattttcaagaatcaagaatcaagggtcaagggtcaagcttcccagaatcaagactcagatcaagactcaagagaagaattaatcaagataagtatgaaaaaagtttt

SEQ ID NO: 105791 - DNA, 363 bp, Glycine max
  unsure (1)..(363): unsure at all n locations
tcaagatgtctntccttatccttcttagaaagtgccaatggatatggcacctctctcccttcagctggagttgcctctgtgttcttctccctagccagctcactatagagtgttctcttctcttctctctcactctcttctccgttttcatctttttcattttcattataattttcttcttctttatgtatttctttctcattcacacttattggtgtctctttcctctggtcattctctacttcttcttcctcctcagatntacacaaaggttcaactactgcgtcaattgctggctcaatcaccagctgttatatatcttcacctaccctcttctcatcctctatcatggttgccatccta

SEQ ID NO: 105792 - DNA, 403 bp, Glycine max
  unsure (1)..(403): unsure at all n locations
agtttaccaaggaatgctactcttaaaacanaaatggcatacaacctcctncaataaatacaaacatcaatgtaaatttagagcaagcttatgcgcatacttctttacgaacgttcacttgcacaagacattcttataactaagaaaaatgcacccatatacaatcaaggcaccttcgttacctataatatntatatgtacttccaaggtgtatttgttacctacatctcatgaacttccttggctaaatttacatacatgcgtactcaaagcatttggggtaccaaaaattgcacatgtgcacattccggtatttctaatacttatgcatatacaaactttgtgatgaatcttggctatctacacaataaggtgatacatttcatgctntactcaagtggtt

SEQ ID NO: 105793 - DNA, 455 bp, Glycine max
  unsure (1)..(455): unsure at all n locations
atcatctctgatactctatgtggagaagcagctgctccgcctgattcgccagttggaaaagctgctattctctctgattcccaatctggagaggctattgctctctctgctntcccagttttccatctgatagatgaggaggaggcttagactcaagatacccaggatctgtctcgggactnttaaattcctgatggttntgctntntggataatgattataactatattagtttcagtacattcgttttagtgatgttaatttacgttcatatatacttgtgtttttgtggatatttggatgcttgttttgaccatatggaacagtttaacttgactntgatgattatgcagcgaaacacttttatctntttgcgaaatgggtgtatagactgatttgcgatgatgcatgatataatgaagtgtgttctttcaaagttgactagtgtgatgtat

SEQ ID NO: 105794 - DNA, 481 bp, Glycine max
  unsure (1)..(481): unsure at all n locations
ctggacttatccacttgttgcccaagtttcatggtcttgcaggtgaagaccctcataaacatttgaaagaattccatgttgtctgctccaccatgaaaccttcagatgtccaagaagatcacatctttctgaaggcctttcctcattatttagagggaatggaaacggactggctatattaccttgctccaaggtccatcacaagctgggatgacctcaagagagtattcttagaanaaaatttcccttcttccaggaccacggccatcagaaaggatatttcaggcattangcaactcagtggagagactatatgaatactgggagagattaaaanactatgcgccagttgccctcaccaccagattttaagcagcttcttcttccaatattttatgaaggactcantaacatggagagaagtatgatngatgctgccagtggtggagcccttggagacatgacccctactgaagccagg

SEQ ID NO: 105795 - DNA, 422 bp, Glycine max
  unsure (1)..(422): unsure at all n locations
gttctggactcatgtacgtatctatttatcttgaggtggatccaagtgctccgatcatccatttgcatactcatgtgttggtggcatactcaccgctgtttatttctttatgaatttcatcatatcttagaaaacaccaatgcacccctattacactcgatccagaaaaatggattatgaagagggcgtgcaggaacagatgaangccgatctatcggtcttaatagatcatatggctttcatctcggaggtcatgtataaactccagaagaccatataggattaatgcaccgcaaccgccttcagtacagttagggaagcggagccagtgctgtagcccgccttgatccnggcctagaccatacacagtcgtgtcngacgaaagatagtcacaacttatactatggctgctncgacttacc

SEQ ID NO: 105796 - DNA, 351 bp, Glycine max
  unsure (1)..(351): unsure at all n locations
tagatgatgcgtgtgtatgtgtgcaacccagcgatgccataaccatgaatcatcaatcttacttaccaaacaactaagctcatgaattgatgcatgtccaatgtctaacatttagatagtacctatcctttngccaatatggacaacctcaccatacatagcttcactaataagacaacaattcctattgaattcaatcttgaagcctttgtcacatagttgactaatgctcaagaggttatgctctagtccatcaacatatataacattctctatttgtgtcttanacacgattccaatatttccttcacccataattntacctttatgtntgtctccaaagtgacatat

SEQ ID NO: 105797 - DNA, 424 bp, Glycine max
  unsure (1)..(424): unsure at all n locations
ctctattctctctttttctcttaactgntattcatttcttctctcctctttcactctagcacttactgtatcttgcgcaaatntcatggcttttccactcgcgatgatcatggaaggctaaacactcaatcaatccaaggatccactccatttaaggatgaatatgagttntgatttagtatctctaatttgtatgaatgttcatcgttttcttcaatcctcgttttgattctcatgattatgaatatgcttangatcgaaaacacattatgttagagattcctttcctaatctcaaacttaatcacagattgtttggatgatatntcaacctaatntgcgatctcaatgaanttanggattaattcaattgaactaactctaatgagaattgatgaaccttcacaacttgatctttctctgca

SEQ ID NO: 105798 - DNA, 320 bp, Glycine max
  unsure (1)..(320): unsure at all n locations
tgtattctaagaaaaaccaaattcctttgaagtcatgtcacaatataagccttgatcgagttcttgtgaatttcatgtgtgtgcatgctctntattgcttatgagaaggaaaataaagttgaattgtgtgatgcatgattgtgagttgatatcacctaaagtaattggtggttgagtgaccaacatgtacaatgtgataccctctacccctcacatatatactaataaggaatagaaaaatttaaatattaataanagtattttaaaacaagtctttcaagggaaaaaggctcacattcttntcttttcatcatattcaa

SEQ ID NO: 105799 - DNA, 138 bp, Glycine max
tgtcacttgccgcctgtacttgatgggccagagtgtctttttgctgagacagcacacctaattggggagtgtttcatgatcactactttggtagaactggcaatgattaaccctcctttggtatttgaggtgactcct

SEQ ID NO: 105800 - DNA, 323 bp, Glycine max
tcgactcccttctgcctccgagattagccacccctcttgaaggcactccacttataaacttctgactaacaggagatgaatcccccttggcccgtccctctaaatcatccccctgatctaccctccacatatctttatctcgctcccccccgaaaaaatctgtccttgcgagatatgaagatgagcctgagaagtctagctcatgctcatatacctttggatggcaatttgctgtgccaatatcttctccatttagtccatttgtaacaagacactgtcaagctccctgtctcgaaagggcgttccgacaaatttgccttctt

SEQ ID NO: 105801 - DNA, 287 bp, Glycine max
tgccttggcagaatacctggctcaacaacccatcaacgactaccagcctatgcatccagaattccctgataaagacatcatgacctctgttgaggaggaagtataggatgaagatatggacatatggattgtggtttgacgacacgtctaatgcactaagccatggagttggtgtggtgttggtttcctccgatgaacaatatatacctttcatgggtaggatagggtttgactgcacacactacataactgagtgatgtgccagtatgttctcctatttctaaccc

SEQ ID NO: 105802 - DNA, 197 bp, Glycine max
gcgctgcagcttagacacaaggacttgaattttcctggaagcagaagaagatgctagctattttcataaggcaaagctgatgataaaaagatatttaactttggaaaatcataattataaaacaatgatcaagagacatcttcatcaagagaaagagagattctcttagtccaatgcttgatgcacacctggcctga

SEQ ID NO: 105803 - DNA, 138 bp, Glycine max
  unsure (1)..(138): unsure at all n locations
gcatggatatgttctacgattggntctgcatgaatttctaatngtcatagcatatgattngtggaagtgatctgggcattctctctgctntacatttcaagccattggtcaaactactgttccaacacaccttatttt

SEQ ID NO: 105804 - DNA, 320 bp, Glycine max
gatcttaagcaccgcggctgcagctatgcgtttcacgacgtcttaacttttattggtcatttaacattccggaaccgttcgctaaattaacactgaacgaccttaaggtttttaacgttccttgaacgctaaattaccttcgaacgtttgaaaacgctaaaatgtttttttagaaagacttgtttgtgcacattacacataacattgtataatactaatgaaggtacttcttgtcataggtttttttttttccccccccggccctactttggtactggtcagcttccgttttatacttcattcttacattgtttatattt

SEQ ID NO: 105805 - DNA, 349 bp, Glycine max
  unsure (1)..(349): unsure at all n locations
tcatcagttataggaacacgttcatagtcaacaaggtatcctgccacttgtaattcctggtacacctacagccaagataataacttcggcgcattntgttcagcataatgattgagtagaatcacactcccactgtaaatacagttaacccatacctctagtggtgtcttcacagaattacatgacactgattcccattgttccaccatctgaccatctggcagttcatcagtcacaaggatcttatattcatatcgtgtatgccatttcacanatagaatgcttgtcatgcaatgcatagttagatagcagntaaggcatgcatgccatgaattccacagtgcatact

SEQ ID NO: 105806 - DNA, 87 bp, Glycine max
  unsure (1)..(87): unsure at all n locations
agagaagtggaactttgaagtatgtctcacaagactctcattcatcanagttacaacaagtggtacacatgtttgtatttatagact

SEQ ID NO: 105807 - DNA, 253 bp, Glycine max
  unsure (1)..(253): unsure at all n locations
actagctcgaacaaactaccggcgagatcatgaacangaagaactaatgaaaatgggaaaatgtagtgaatgatcatggaatgtacggaagcgtacagaacatatggcttggaattntccttcttctttctcactattagtaatatagtgccaaagctgaacctttttctaactctacccatttattcaaaatgaggagtgggtgcgccactcgccagcgagctggactttactgagacctccttaaaattca

SEQ ID NO: 105808 - DNA, 176 bp, Glycine max
aatgcatgacataggatctatatgctattcctaacatttgcgctctgagtgtacctagagactatcctagcttcagaaaggacataatgtggcgacttcatagtggaccttatcattcatgcatagccgaaatgtttgatgttcatacattgcatgcagcacaagctataattgta

SEQ ID NO: 105809 - DNA, 389 bp, Glycine max
  unsure (1)..(389): unsure at all n locations
tgcaagctttacatgcatgtgcacaccatatntactatactttgatcaactgttacaatctanttgatggagaagataatttatactactcttctaatgtagtggacaactaaanataaaataatataatagaaaatactgcttaagccattcaaatcaagtcattttgaatctcaccattagtatcatgcatgtcaaagatnaagagaatcaggcatctgaatgcataacaccncccaaacattaaaagaaaacatgctttctanagccaaccaaggtaaaaatgtattcatatttcatgaactttntcaaaattataagacacatataaccatatataanaacatggcagaacagtctcaccacatgaacaacatagaccacacatt

SEQ ID NO: 105810 - DNA, 393 bp, Glycine max
  unsure (1)..(393): unsure at all n locations
ctcagctatctaccatcatctccaatgtcttgcgagattaatttatataaacataagttctaatcaagacgtntctctgttcatgggcataatgcaatcactctatgtctagcaatgatgttattaagatgtccctacctttgagctctactaacaaatatcctctctctagcgactaatccctataactgatgcatatgaaaccttcaatgtatttctaccaaggattaccctctttcaagcgcctaacccctaaagatgatgcaaggatgatacatataatacatttgctggcattgtatgcctgccaagccctaactcaacgggttagcctctcattgcatgagagactttacacttacggggttgattggatggaaaatatggatggat

SEQ ID NO: 105811 - DNA, 266 bp, Glycine max
tttttatataatgggtaaacttttcttgcatgttctttgttcacagacaatgtcgaagacacactaagcttcatttatctaaaaacgttttttatacacagtgtgtttcttgtagttataaaactaatttttgtatttttggtgtcgatctctccactgatggctttttgtttcctcagctttactttttcttcattgtgggctttaatatgtaacttctgggtcttgttcaagagtcacccctaaccatttttctagatgccttt

SEQ ID NO: 105812 - DNA, 442 bp, Glycine max
  unsure (1)..(442): unsure at all n locations
acaacaagctntccacatccacaatgcgcgcataaacacatcatccgctggtgcccacctccaactgagctcacgtactgccacgtagcccatatactcgtttctctcaacaccgggtacgcatcaatcctctcaagcttgcacaacatccaagcaaaacaacattcaaacagcacaagctatcacagccaagcaaaacagagcanatgcagaanactctgctcaacacatcaaccaatatcacagctnttctcacttaaagaccacagtaacaattccttcgatccaanntcgtaaccgttggatcgactcnncaaatnttactggaagtctatagtgcataagcctacattttgaccggtgggatctactagcaaacatncaaaactcaatctgcactactctntccacagccaatcacacacaangcattttctgactt

SEQ ID NO: 105813 - DNA, 260 bp, Glycine max
  unsure (1)..(260): unsure at all n locations
tgagagttgatctctaatactactntctataatcatatctaacagctaatatgngggcttctttgtaaaatgagatctttctctctgttntttgtatgcgccttttcttaatgatggcaaaataacatanatagcatacgtacactttatgtagctacatgcagataagtctcttacaatgcacaaacaaactcatatctatctatgaatttgtaaaatccccttcatatacttatcattgggttgatacttgcacttat

SEQ ID NO: 105814 - DNA, 392 bp, Glycine max
  unsure (1)..(392): unsure at all n locations
atttcaagttttgacaatnttataacggtgcataatgtantttgctanttcttttcttcttaaaactaaactaaatgacatcgagcacgattagagatctagactntagagttcctcaaccctcatatacaagtgtcttgattggctaatataatcgaanacagtatttctgtcctcatgtttctctgtgtacagatcaatatcttttgtgtgtttagaaatatttcagacagaataaattaaattattgaactttgtagacgagtattagacatagacaagtctaatccattaaagtaattcaccttggctataattatgaataataatctatatattaatactataaataattgtatagtgaatgattcaatataaactatcgatataat

SEQ ID NO: 105815 - DNA, 298 bp, Glycine max
  unsure (1)..(298): unsure at all n locations
atcatcgctcaggacgaagaagagttatgtctatccactgcccacgagcatataatcgctgatgagtatgctcaagtatatgcggaaaaagaggctagatgaagggtgatctactctttacaccaagaggcaaccatgtggatggatctggttgctcttaccttgaacgggagtcantaactctcccgattgttatccaatgcctatgcgatggcagacacctacttctcccccgaagagatccatgggcttcttggctattgtccgcatatgatagacttaatggcccacatatatt

SEQ ID NO: 105816 - DNA, 386 bp, Glycine max
  unsure (1)..(386): unsure at all n locations
ctcggaagataacacacgaagaaggagaatccncaatcatagaaagggagatagcatatagggaaagataattcccaattaatagatggagagatagcataacanaatagaagatgatagataatccccgatccaagatctaaagagaatagaagaaatatacagaaaggtctttggaccatataatacctgaacaatacagaaatgtcaccaagaatacattgcttaccaaaatcctgtgcgtcggtgacttctggcttagcgtcagtcatgctcgctcagcctgtaggttcaagcagtgcacatatctatattgatcttgctatgcgcatcatgacaactcatctgcttccaggatcttctacgcgcttagccatgaaactgtg

SEQ ID NO: 105817 - DNA, 418 bp, Glycine max
  unsure (1)..(418): unsure at all n locations
agatgatgacaganagctcacaagtctggatcactccatgataacaaagatgatggcagtcaagaatgagttcnacacttgatttcaagaatcaagaatcacgattcaagactcacagattcaagaataatctagatcaagattcaagactcaaagattcaagacataagagaggacttacatcagataagtattaaaatagttttcacaacattgagtagcacaataagttttttacaaaatcattaccaaagagctttactctctggtaatcacataccacgatatagtaatcgattaccagtggtgttaaaatggtaagatttttcaaattcatcatgacaagtcacatctggtgatgtgtgattgataccaccttatgggcatcgataccagcgactgtnttcacaaatcattt

SEQ ID NO: 105818 - DNA, 327 bp, Glycine max
  unsure (1)..(327): unsure at all n locations
actcacttattcatgcgcagatatcatggcttctccactggtgatgatcatggaaggctaaacactcaatcaatccaaggatccactccatgtaacgttgaatctgagtcatgatatactatttctaatatcgatgaatgttcattgtntacttcaatcctgattttgattttcatgaatatgaatatgcttaagatcgaaaacaaactatgttagagattcctctcctaatttcacactgcatcacacgattgtttggatgatatttcaacctaattagcgatctcgatgaatttaaggactaactcgattgaactaactctaatg

SEQ ID NO: 105819 - DNA, 203 bp, Glycine max
tatgaagcgtctaacttgatgcaacattatatcatagagatctatttggatacctattgttggagtagtcctgcgtatgtagatttattggatgctactatcaccttgcacgtaactacttcttatttttttaactctatcaagcaaagcgaatagaacatattctagatgtgtatccaacttccgattacacgaagtgcaaa

SEQ ID NO: 105820 - DNA, 239 bp, Glycine max
tgcgaacagagatccgaaaacttgatagacaatggcggcacctactgcgcctcgagagatcacagcttctagtatttcagcttgatagactagtggccattaatggaaccgctagagttgattgcctcaagctggtagtatgactttgataaatgagttatcccgttttatcctgatagggcgataaataccccgatttatcttaactgagtcattttgttaccactctacattgggtt

SEQ ID NO: 105821 - DNA, 262 bp, Glycine max
gaaccccttagagagagatcttaaactccccttgagctgataactgagagagaatatgaggagggaatacacaatttgttcaaaagacttgaatttaagtaatttcaatgatcaggtgaataaatcacacacatgactctattatccttagtgtacaaatggaggaaatcaattcattgaattgaagtgattgtgagccaacttgagccaaatgcctaatttgattggatatattttgtcaccactatcagacattcagatc

SEQ ID NO: 105822 - DNA, 343 bp, Glycine max
  unsure (1)..(343): unsure at all n locations
tacattgattattcattctttgcaagggttagtatatgcgaacttttgcatatcagtcttacactggatcttctattattcgaattgatatatgtaatgctaataaataacaaaggagacaaacttcttacctactgcttcaaattgtacatggacgtatgccgctttgttactcataccctcattggatgtntgtgctgatatggacagttgacgaagtataatgacgtaaagcttngagacatgttgcagagatgatcatagttgattactttggaagatgttggcattcataacaacatatcaaccatttaatcctttaagaattgattacatccaatca

SEQ ID NO: 105823 - DNA, 397 bp, Glycine max
  unsure (1)..(397): unsure at all n locations
gctggagtggatgatgaaaggatgtcctctngtctagctctttttctcgatgccatatgtaactaaaaagaactaaaaattccttagaaccaaaatgctcanggttaacaacagaaataaggctgaaattgacaataggcgcttagcgggatacaactcgctcagcgcgccctcagaaacataacatatcnggcttagtggaaccaagctcacttagcccaaaagttgccgtaacgaactgcgcttagctcaggtagactcggcttagcatgcggntatcaatacaaattntgactaagttacttgggcttagcgattcagcctcgcttagccacaagtatctcaacaggaggatgagtgttcatcctcacaagatgaactagcttagcgcgatatg

SEQ ID NO: 105824 - DNA, 488 bp, Glycine max
  unsure (1)..(488): unsure at all n locations
catgtaacattntctatttgatagttcactaagattaatcttgaaaatattacctttcctcttagcaatgaatgattgtgtcccattcttgtgttggacgacacacccttctntgctaaaggaaacatcaagtccactgtcacataattgacttatgctaagcagattgtgtntaagccctttaaccaataatacattatcaatnggaggatagggatcaatacttatacttcccacttctgtattcctccgaaagtgactatgtcatcaagcattgaaacatacacctttctccaatcatgtgacatngagcaccattgtccaagtaccatgattggtgtgttcttgatgtggctgaatacatctacaacgggaattattntctctctanatactcnacatntgcttggtcctttcnnttgtagtctcaaagcatngcatgatccagtcttttgataatgctacacttggatgtcatgtgtctaatc

SEQ ID NO: 105825 - DNA, 305 bp, Glycine max
  unsure (1)..(305): unsure at all n locations
tgatgacananagttcanaagtcaagatcacttcatgataacaaagatgatgacattcaagaatgagttcaagattgagtcgagaacacttcaaggatcaagaaggaaattgatttccagattcaagaataatcaagatccagattcaagactcaaagatttcagaatcaagagaagactctatcaagataagtattaaaaagtttttcaaaacattgagtagcacaagaagttnttttacaaaatcattaccaaagagttttactctctggtaatcgattacccagatatagtaatcgattact

SEQ ID NO: 105826 - DNA, 365 bp, Glycine max
  unsure (1)..(365): unsure at all n locations
gctctctcaggaggctcttgcaatcctcttgttacttgatttgaattaatttatcaccacatctgtgtacgaatatatatatatatatatagtgagagagagagagagagagagagagaaattggcattctcatacctctaaagattaattgtttactctcacccagaagccacccataagaaatgccactctataatttcgagtntcttaccaattaaattatgaacaatagacctaagtgaatgattggacctgccgatatttntcttttcatatattctttcttatagaacttctgcaatgtgaagtccatacncatatactgtccagagtgtcaattaagtcatcagttgagttgttgagt

SEQ ID NO: 105827 - DNA, 150 bp, Glycine max
tgctcgctgtcgatgtggctaaacacaccacatgactatgatgatggatggctcagagtctcacaaatggaaactaagcactctcgaagtgagctttcaagactatcatgacatgtacaggagaatcaatgatttcgagtcgcgatatgt

SEQ ID NO: 105828 - DNA, 412 bp, Glycine max
  unsure (1)..(412): unsure at all n locations
agctngctngaganacttncttgatatacttctttgataagctntccttgatagctagagcttagctacacacccctctaatagctaagctcacctccttgagaagctagagcttagctacacacacccctctaatagctaagctcgcctccttgagatgagaagctagaggttaactatacacatccnctataatagctaagctcaccccatgccaaaagacaagaaaatacaaaaatgtccctactacaaagactgctcanaatgccctgaaatacaaggctaanaccatatactaatataatagccaaaatacaaggcccaaaagaaggaaaaacctattgtaatatntacaaagaagagtggacccaaccttggcccatgggctaaaaaatctacccttaggttcatg

SEQ ID NO: 105829 - DNA, 348 bp, Glycine max
  unsure (1)..(348): unsure at all n locations
gtcccaccactaaaggaaccacattggaagattgtacaccgtgttagtctcgaagtagattaaccatgagcttgtatttgttgttntgatgccaacaaactntggtccagacatccatatagtcctaataggtataaccgattggatcanaaggtacatnactgtttttgtattcattcagatcggatccaaaatgtctatgttgtcaaacctttaacatatggattgcagaatgagtatctaaaagacggtcatttggcgctttgacatgttaatagatactgagtttgaatctattaatatgaactcataaaacgttcttggtttattggttgttgttgtttgaaa

SEQ ID NO: 105830 - DNA, 260 bp, Glycine max
tgatcatccattgacatcaaggtttaaatttcaggacacttaaggttcggctaagcattattgactgaccaatgtaatttaacaaatttcttaaaaatcttatttaaatcctgcatcctgcttaagataagagtatgtatatttcaaagattttttatctatttaaagataaaccagttggaaaacgactagagtgctgggtaactgagattcaaagacttacgtgtggacgcagcagggcacatacgatgttttctacc

SEQ ID NO: 105831 - DNA, 311 bp, Glycine max
  unsure (1)..(311): unsure at all n locations
tctaagctgcatcagtcacaacactgcatcgagtccagagcatatntttatataatattctcaacagccacatctntttatgtggttctagaatggctatcaaacgcctatatacatgtgtcatgagacacgaaattgctaagagtgttctagaacaaaaaggtcttatcctcgttaaaagctacaatcgtatatcctcttacagattccttggccaaaacacttgtgattctataagaaactatttgagtgctcangatgttcaatctatctctttgaagagagatttcttctgctcgtcttcttattct

SEQ ID NO: 105832 - DNA, 354 bp, Glycine max
  unsure (1)..(354): unsure at all n locations
ctgttaataaactatcacaaaggactgagataaccttataattcatctactacggatcacgttagtaattaagcttcacattaacaacaacatgattatagagaactcttatatcatagctgtttgtagaaaccacattttcctacgctgcaatttattacttcattttactattttagcctacacatagttaaatatgtctaaacatctatatccatgctctctccccnnnnccttttttaattncccctnntnnactantcccctatttatctccaacatcccctaatttaaactcacaatcgtgccttctgcaaccgattccttgaatattgttatataatggaccaaata

SEQ ID NO: 105833 - DNA, 400 bp, Glycine max
tgaagaggatgctttaatggatgaaaagaaatatagatagggggagcacgatatgtaggaataaaagagggagagaagtggaactttgaagtatgtctcacaagactctcattcatcaaagttacaacaagtgttacacatgcttctatttatagactaggtagctttcttaagaagctttcttgagaaaacttccttgagaagcttctttgagaaaacttccttgagaagctagagcttagctacacacacccctctcataactaagctcacctccttgagaaaattccttaagaagattcctaaagaagctagagcttagctacacatacctctctaatagctaagctcacctccttgaaatgagaagctagaacttagctacacaccctcaataata

SEQ ID NO: 105834 - DNA, 401 bp, Glycine max
tgatgtgggtggaggtcagagactaaggtggttcatagattatagcggtgtggtgactaggttgcaacaaaggttggtgcacagtggttatggttggagttggtgacatttaattttaaacatcattgtttatcagtcgaagaaggagaagaaggagaatatttttttaaaaataatttcaataataaaaataatgtggtattaatgtgttagtgattatgtttgatgatgtagcactctttctgtaacattatcacttaacaaaatgagactaacggtaggtactacaataaaacataaaaaaaaagtcaaataagtagatgagcaaaagtgaattttacgcaataaattaaaaatgacttattttccagatatgaaaaacatatttaagcctttatttt

SEQ ID NO: 105835 - DNA, 385 bp, Glycine max
cgtacaattcaccccaattccagagtactatgctgacttgctcccacatctactcgataattcaatggtagccatatccctaaccaaggttcatcaacctccatttatccgacaatacgactcgaacgcaacgtgtgcttgacactgagaagccccagggcgttccattgaacatggtaaggctctgaaacgtaaggtgcaaggtctaattgatgcaggctggctgaaatttgacgagaattgcgtgtaaatcctgacattgacacgagatgccacacatggggcaattttgaaagctgttgctaggtgtccctaatgactcatcagggtttccaagcttatgccattattgtaaaccacatctacaatgttaaatgaaatggat

SEQ ID NO: 105836 - DNA, 397 bp, Glycine max
tatccttatggcttgcctccggacttcacccctcgtgccaccccggaagatttaagccaagcccctactttcgaggggcaactcccaccttatgacgactatcccgggcaagacgatgaggaaggagatacccatcttggccccctgctccacctcaaagatccgtccccccatgaactaccccaactgaacataatccgccatatcccggcctcacccacacccgtaaaagaatctgttcccttcgcggaagataagggaaagattgaggcgcttgaagagaggttacgagcagtcgagggccttggcaattacccattctcggatttagcggatttatgtctcgtgcccaacatcgtcattcctccaagttcaaagtaccagactttgatcaata

SEQ ID NO: 105837 - DNA, 271 bp, Glycine max
ctgtggatgacgtatggatggccacacgtgatagtcgggatttgaggaaggacaaggttgtattggctgaattgagacatccgatgggttggcgggactctcactcgtcttcgattgggaacctcttcctgtgtatgggtctcattcacaccgtattactagacctcgtgtgtggcatatatcacaggcgtgagtatcaaactttcccatttgcccaccctcattaaacattagtgcgacgatcaccaaatccgaaaagattgattgtatg

SEQ ID NO: 105838 - DNA, 380 bp, Glycine max
tcaatggaataggtcaatcctttttgactataccaaatcggtcgaataataataaagtcatctcgcctcacagaaaatcatataagtctcatacaattaatatagaacccatatcctaacgtcacatcctatcagagcgtggcgtccccgtgtcctataacatgagtgtctacatagtcatccacctattgatctgctcccccgaacacaagttcaagatcatcacaggatccaaacccaacaacacacagggagtgagttatcacattcctagctaatacagaaacaagataatttaatctacatattatataaatgagataccacttgcttaaacatagctcacgtaacttcaccacttcatcattcataattcactt

SEQ ID NO: 105839 - DNA, 387 bp, Glycine max
ttagcctttgggatgactaccatgttgcttcctttatttctaacaagcatatcttcaaagcttcaatgtgattccttgaagttgtacatccaccttcattttaaggggaaaaatgttattggaatatatatgaatttcacataacactttatattagtttatgaaagtttaagaaaaattctaaaaacagaagatgtctcaacatcttacttatatttccaaataagtcgtaatcattttatgagattttcaaggtgatttcttcaagtggttgacgatccaccttcataatgaggaaagtgttattagaaaaataaatatattataaaagagtcaattacaaataaattttgagtacctttgtttagctcttcaaattgtaactat

SEQ ID NO: 105840 - DNA, 391 bp, Glycine max
tgaatggacacccatatttcctagtaccagtgtctcttctgataaattctttattcctacacctatacttgccactcctttcacagccaattaacacaaacgtagtccttcctctactacctgtgtttgagtccgaccttaaaatcaccgccataaatccattttcatgagcaacggatcgagcccaccgcaaaacatcctctcgacactcaaacacctacaaagcaatccacataatttaagttttctactagtattcattctattaaatttgtgacaaacattaacattataacctgcgaagtattgaacacatccgaacaatcaacatgtggttcattcgcactacatgcttcttcatttcataatcctatccgcttgtcaaacatat

SEQ ID NO: 105841 - DNA, 391 bp, Glycine max
tgtgactatattttgtgttggatgcaagtactttatgataatgcaaggagatacctaactagcatgatgaaaaagcagcctgtgccatttgctcaaaaatttctcaatgcagaccctttatcactaaggctactggaaaagttgttggcttttgatccaaaaaaccgacctactgctgaagatgtatgctacattgtgctctattgcttatttatgtgcattgaaatgtatcgtagatgaatccttgactatttcttgagtttgtcttttcatttggacagtaaaacgtataaagaatcatagcattgaatagcactttataatattgggtcttgactttcatgctcaagattttttaaatgttcgtgttgtatagctttggctgaccctt

SEQ ID NO: 105842 - DNA, 374 bp, Glycine max
  unsure (1)..(374): unsure at all n locations
agcaagctaagctgctgtaactgcattttgctcttaatatttgaagagtatccttgnggaaccttcacccgacgaagacactgatcaaaacttatcttcttctttttggacaaagtatggcatgctggtggcaagtaaattatcataccatcatacactggatgcaactgtgatcgtatgcccatatcagctagatcttaacgggtattcaagccatccttcgtcttgccttgaatgttaaagagcggtccaatcacactgtcacaaacatttttctccacttgcataacatcaatacaatgtctaacgtcaagatcagaccagtacggaagatcaaagaatatggacctcttctctcatatgcaactcttact

SEQ ID NO: 105843 - DNA, 395 bp, Glycine max
gttgtcactccacccatatctggccttcacattaaccagacttaacatcgctgacaacaacgtcaaggaattcttgcaccccatatacaaaggattctttgaatcactttgcaatccttcatacataggggcatgtgcttgctgaaaagactcttgtccaaggtcacgaatcatatcctctaagcgatctcccatttctacatcaaatggttcagattgggacccactctacatgtctgtcaattcaccatgccatatccacgtcgagtaattcttcttaatcccatcactcaatagatgctcccgtatgtcgtccagtatttgtcgtcttccattcaaacaattgatgcaaggacaataatattttccgtcctcatccggacgacttctttctg

SEQ ID NO: 105844 - DNA, 206 bp, Glycine max
  unsure (1)..(206): unsure at all n locations
cttgagaagctagagcttatctacacacactcctctaataactaagctcacctcttaagaagagtagctagagcgtagctacacacacctataatagctaagctcacgcgcatgacatgatacatgaatatacaaacataaatcctactacnaagactactcacaatggtctggaatacaaggctaaaactctatactgctagaat

SEQ ID NO: 105845 - DNA, 393 bp, Glycine max
tgaagacaagactatacgaggtatcttccttgggtatagcaatatctctaagggctaccgtgtctacaacttgcaaactaaaaaactcgtcatcagtcgagatgttgtagttgatgagtgcgcttcttggaattgggatgaagaaaaagtggagaagaacgttcttatacccgctcaactacctcaagaagaagctgaggaagaagacccaggtgaaccaccttcacctccaccacaagaacaagatcaagaactatcatcactagagtctactccaagacgagtaagatctttggtggacatatatgaaacttgtaacttggccatacttgaacctggaagctttgaagaagcatcaaagcaggaagtatgggtcaaggcaatggaagaaga

SEQ ID NO: 105846 - DNA, 328 bp, Glycine max
  unsure (1)..(328): unsure at all n locations
agctantataagtgctcttctnctttgtatttgaagagctacataagtggataattcgcgtaccattggctatggtaagaataaagggaacctcaatgacattctgcaagtatacatgttaaacatatcaccattgtatcaggataatttaataagtatatcacatactattctatttgggattaagataaatagttaatgtttagatggggaaatcgtgaccttgtcaacatggaatgcggccttcaatcggtgcacaattgtagaccagcagtgaattgatgggctctanatgacaaacattcatgtaatgagtaactcaactaac

SEQ ID NO: 105847 - DNA, 384 bp, Glycine max
  unsure (1)..(384): unsure at all n locations
taagctccttcaactgcacaaggctcttaatatttgaagagtatccttatggaaacttcacccgatgaagacactaacaaaaatttatcttctcctttttggacaaagtatgacaagttgggggcaagtaaattttcttcccatcagaccttggatgcaactgtgatcatatccccatctcagctagatcttgatgggtattcaagccatccttcgtcttgccttgaatgttaaggagagtcccaatcacattgtcacatacatttttctccacatgcataacattaatacaatgtctaacgtctagatcaaaccagtacggaagataaaagaaaatggacctcttcttccatatgcaagtcttactnttatccttcttttggg

SEQ ID NO: 105848 - DNA, 399 bp, Glycine max
tcacatggagctacgtcagctcttggtgtttttatgttttaacctaggattttgattcattggttttgatatgattgtgtgaaacttgttgaggggttttactccccatgttgtgagaaatatttttgtataaattgtttgtacattggacaagatttgctatattagcatgataaattgttatattgagattatgaaattgtgattaaaattgtgcctaagtgataaattgaatatgtgataaattgtgaaataacatgctgctttgagatcataacattgctattgggattgagtataagtataaagttgaacatgcattgatttgtgagatacacgtaaacatgtgatggtggattgtgacgttgtgatatgctaaaattgtttattatgaaattt

SEQ ID NO: 105849 - DNA, 399 bp, Glycine max
  unsure (1)..(399): unsure at all n locations
tcttccncttttctttatgtaaaatgagttcctctctattcatatgagaaagtttattcttttctcacttcctaaattttgaatttcggtgttgtaaaaaaaaatcattgatttgcttagctcggtgtagaaaagggagggacatagaagaaagtaagaaactattgatgctggaatcacttgctgcaatcttttcataagaatttatacaacaaccaatttgcatttgtagatcccttttatcccaataagcaggcactttccttccggtttctaggattcttggatcctttgatttctagaaggttaaaggttgatggtgcgtggcatagttatgtttgtagttatgacgcgtgtccttaataaattgtgtggttgttaattgtaagttttgttggt

SEQ ID NO: 105850 - DNA, 398 bp, Glycine max
ggtatcacgattcactgtgacagtcaaagtgtctttcacttagcaaatcaccaaatgtaccatgagagttcaaagcatatagatgtgaaactacacttcatcagagatgtgattgaatctgagaaggtgaaggtggagaaagttttaacagaagaaaacccggctgatatgttcataaagtccctctctagtgtcaagttcaagcactgcctggacttgataaattttgaaggtgtctaaagcagattggtagaagagcagcccaaaaacacaaggtagacacttgctaatttagattcaaggtggagatttgtggtgtgtgactcaaaatcacaattgacacaagtgagaaggctttaaagtagtgttgacataactgttttcagttattataactg

SEQ ID NO: 105851 - DNA, 292 bp, Glycine max
  unsure (1)..(292): unsure at all n locations
acatcaagcgatatatcaaagacaaggaatacccacaagaggcctctaacaatgacaagagaacattgcggatattggcagccgactctttcctatgtggaaatatcctgtacacgaggaaccatgatatggtttagttcnacgtgtggatgccagcgacgctgagcacatgctagttgaagtgcatgagggattctttggaacacatgccaatgaacatgccatggcccagaagatcctgatggtaacgtactatnggctcacaatggaaaatgatagttgtatccatgtt

SEQ ID NO: 105852 - DNA, 397 bp, Glycine max
ttggaaaaagatttctatataaagttagtcgtattaagcgactaacaaacaataggcatctaactgagacaagtatgcaattggggaattccgatgtccatggattccttgagccacagtccatccagagatctgggcaatcagaaagttacatgaaaaactggatgcagagttctaaacgggatgtctacctcggagcctacctaaatgggtaagtaaaactgaaggaatgaacttaaataatgtataatacttcaataacctataccggtctccactatagtgcacactggcaaatggtcgttatgttgcctaaggaaaatcttcttgtctggttttgttccttgcatcataggctaaacaactatctgaaaggaataattaacatgtcagtgtt

SEQ ID NO: 105853 - DNA, 395 bp, Glycine max
  unsure (1)..(395): unsure at all n locations
ctctacanttgcatcacctctcaatgagctggtgaagaagaatgtggcatttaccttgggtgaaaaacaagagcaagccttcgctttgctcatagagaagcatactaaggcacctgttctagctcttcctgactcttctaanacttctgagctaaaatgtgatgcctctggagtgggagtagaaactgtattgttcaaagtaggcccctattgcttatttagagaaaattcataggccccctcactcccactatgataaacttatgctataaaggctcaactgtaactacctgtttcagattgcttatgtgactctcctacctcttaggcaacagtaacagagctccaaggtaagcctatatttctttttaactcaaagaaacaaatggatatcc

SEQ ID NO: 105854 - DNA, 399 bp, Glycine max
  unsure (1)..(399): unsure at all n locations
ntgtgtttgacttagggatggcctttgtggataattgggtggtaggtaaggacaagggttgttattggctgagtaatgacattgttgggttggtgggaaacttanccgtataggaatggcagtcgtagcatgggtttctccctcattctcaccctcttcatttgccccaatttttgcatttatcaaagcatgatgatcagatttgcctcttttcagacccacttcgatcatttcgccagcgaagaccaaatccgcaaagcttgaaggtgtgtaacccaccatttttcataatagaacactggtaatgtgtctactatcattgttgtcatttctttctccgtcattgagggaaccacttgggctgccaggtccctccacctttgggcgtattctttgaaa

SEQ ID NO: 105855 - DNA, 394 bp, Glycine max
  unsure (1)..(394): unsure at all n locations
nttggaaaatatcctttggccaaacccgttcttcatcaattaaggaatgctttctaacattctaggaactaatttcatcatttctcttgaatttctaagttcttgacttggatcaaacttgagaagcgcttatctttgacatcatcaaaacttcatatcatatatgcttctacattatataactaaaagcaagaaaacttcccaataataataatcctgcccaaccagcatatcatgaatcattagtgtagtgatgtatgccatatgagtaaccaaaaatgatgtgatatttcaatagcataagggaccaaaaagcaaatagaatcagtgaaagttaattgattacccattgttttgggtagccgattcctaaatataaaataaggataaaatt

SEQ ID NO: 105856 - DNA, 367 bp, Glycine max
  unsure (1)..(367): unsure at all n locations
caccgcggctgcagctacttgttgatgctactggtaagacatggttctattgatgctntctataatgcacgatttggtgatacaccaatagcctgtgcctgacttaaagtaattatataggctatataatatactcatcatattgacgaatgtatttcaacggtagtatattgtggttctgatgtttatgtgtcatgcattttggcatatcgaatgctagatctatgatcattcatctgcaatctacactctaccacgaatattgcctccctcttagatgcttgatgcttatgtcactgatactgttaatggtgaacgatgtgtgattaaagaaggatttcaaaacttacattctactgtctgctct

SEQ ID NO: 105857 - DNA, 390 bp, Glycine max
tatcaaattaagatcggctctagagattgattttgttttctacttgatcaaagagccaaaggttgtccccggaccatgacatgctgattgtagtactttacgatgcaaagtcttgtaaattgtatactttaaggacaaaatgtaggccttgctgataaatatttgtcccccgtttacaaattcctaaaatgaagttgaactcatatagagtgaccaatgtttgatacacacactcacggtagctgttatgtggggctaggcttaaactcggtccaattacatttctgaacttttaccaagtttcaggagactgtttctaaaccaaaaaagccataatgagggcgcttgacttttgtatatcattttgctgacatggcaccgaccatgtaa

SEQ ID NO: 105858 - DNA, 344 bp, Glycine max
ttcagaaccaatactactagacggaacttattaacattgacctgaattgtgagaagtgatcgcacctaaatagacatccaggggtgacaatcttcaaattgcccattatctgataagtggatgtgtacacataactgagtgtagcacactgaacatcggtgtggatcatatatatcactgagggaatggggaacagaaacaccgttttccactccattgtcatctatggcaaaagtgactttttgcattccctccacagtaacaaacttgacactctcaagctgaaaggtgaaaccacccaccactgtcattgaccattaaaatctggttgattaaaattgatg

SEQ ID NO: 105859 - DNA, 297 bp, Glycine max
ctatatgcactacctacttagtatatttgtttgattgttgtacaactaatggcattatgctcactcaatgttcgcagaatatattttggtttaccaatgaacttgacatataaacaataattgtcttttctctattaatcaatcgaccaacgtatagatatccaactaatgactttgccattgaatgattgagacgttcacacattaacttaccatccatccttggcctccaaccactggtttcttacatagcgtaaagggacatccatatttactactgccagtatctcttcttac

SEQ ID NO: 105860 - DNA, 385 bp, Glycine max
cctaaacaatggcttatatcctgttagcgcattcaaattattgttcattttctaatctaggtttacaatgccaacgattttaacctgcaatgtctcttaaaatggaagatgaaaatagagcaagtatttgcatgctgccaatataatgaatcaaaaaaggttaaggtagcagctttagagtttaaagatcatgcttaaatttggcgggatcaagaaaagaaatataggaagggaatgaatgaaacccccgaggcaacatggttggagaggaagacctatacgataaagaggcatgtttcgagagaatataaaagaagacaaatagaagaagggagaaactatagagctaatgagagagatgaaaggtcatgttggaagataaaac

SEQ ID NO: 105861 - DNA, 412 bp, Glycine max
gttaactataacactcagcttctactttaaaaaaagcttatgtttttttctatgtcactctggaaaaaacaatgatttgatcagtaatatttggacaattggacccacagcgtcagattacacaggatagagagacaggctcatgccaataagaaaaagacttgtggggtgttatctaacccctacttgttgaactttaaatctctcaaatgaatatggatcctaggttgttgaataatataatataatacctagttgttgaaaactaatgttactatgaaaaaaacaattattagattagtaaggaaaagtaatataatattggaacttaataatacaaaataagtccttagactctaattgttggcattcaattcagacaatgctttgcatggttctggctggcgtatta

SEQ ID NO: 105862 - DNA, 348 bp, Glycine max
  unsure (1)..(348): unsure at all n locations
tcctctaagtcacgccgctgcagcttgagggtttgatgcatttcagtgaaagattttcgtntcctgctcattctctgngatataaactacatacttgttaaccactgggacacccttctgtntatcgctccaaccgataatgtctgctcagtcttcaaccaactgatcctgatcgtagatgaagatactctggtcaacatgacggctaatattctggtctagctggcaatagtgtaaccttatcaagtagtcgaagcctgaatcaatggggagttgccatgtgaggttgaaccccatgttgaaggtaccattacttccatatttcttacagatctgtacactgtgtct

SEQ ID NO: 105863 - DNA, 395 bp, Glycine max
  unsure (1)..(395): unsure at all n locations
ntagagaaactgaacaaaagaaggattattatttttaaaaaattaaaaaacgaagatttttcttgatactgtaaaatgataaagaatttagaatcctttttgttaaactgataattatttcacaataggggaagtacatcttttaacgattttattaactagtgtgtctagaacattgaagacattagttaaggaattaaaaaaatatttattaaaaaaattataggacaataaaaatattggttaaggaatcaaaataaaaatattagttattaaaaaaatcatgaaaacgtaaaaaaaagtattaataacaattttatatatttcaataaaaatatttttttttagttttttaattaatttcctaagaataccggttaatatttaggcaaaat

SEQ ID NO: 105864 - DNA, 528 bp, Glycine max
  unsure (1)..(528): unsure at all n locations
tcctctgagtcacctgccgcatgcaagcttgtatgccctctcccctcagcggggatntcttcttctgcaaaggcgagataattgttggcagtgatattatngaccacccctccgaaaccttctaccgagaatgtctgggccacatgggcctcattcaaaaccttcactagcagagcccgatgaggctcggagctcatgagtaactctaacagcgagaccctggccagcgttttattgagctgttcgataaccttgaattcgctctgctgaattatacggaggaactcgctggcttcctctagtgacacctnctttntaccatcttttctctccgtaagacctttcgccggaatatctttattcaaagtgaggggtgcttcntcatctccctcctccaccacctttgctttcccttgacnttcncnngttgactgtangtctggggtgcaacacacaccgctacggtcacaccactcgtccgtgatattatacttaccgacacgactgcgttgtgattctcttcttccc

SEQ ID NO: 105865 - DNA, 391 bp, Glycine max
tcgaaagaaagtgaggaggtacaagcccttttgcagatcttgaaagagctcgagtagtcaaagagaagttcaagtcaacggccatcaaagtccgaagagagtacgacgaactgagggacgtcaatatggccaccgccgaagccttggaatgagaaaccaagagggcccgaaaggaagaacacgaccgaaacaagtttcgaggggctttatggggttgcaaaagtgagctcaagctctaaaaagatgaaagggatcagtcgaggattgaaggcatgatcttgaaggacgagttaaaggcttgccttaggtcgaaaagaaatttgtcccggcagttaagcaagactgaagggaatatgtgggccatcatcgatgagtacaaagagaagctgaa

SEQ ID NO: 105866 - DNA, 355 bp, Glycine max
cttactaattatttttttttgcatccagtcctaattgtgtggtataattaagtcacccctcattattattgtactgtgtggttggttcctgtgatgattgcgaacctttgttcgtggaagcgttatgatttcaattcttttcatatatgacagatattttatgtgatctcgcaagccgatgtgatgacgctgggattattttgggagatagttgtgttttgtgaatcaactccttcgtagctggttatcttaattttttttgttgacatgaggatttaacatacacatttacttatatgtctgaacataatttcttaccattatgtgaatgagtgtattgagatgctttgctatc

SEQ ID NO: 105867 - DNA, 408 bp, Glycine max
  unsure (1)..(408): unsure at all n locations
gaacgaaaggaagtctactttttattcatgttggcagacatctaatagcaacttacagaaacaaacaacacaccgttatgtttcaatatgaaatattagaatcatcacttacatattatatagaagaatactcactccctcttggtattcaatcgagtccctacagctgtaccaccctgtgcaagctgttcaagaacacctctgcttattaaacttccaaagtaatagtgtagaaaaacatttatgtgttgacttaagtgtctacctgatcatgctgtgaaagtgacataccctataaaccgacttcactgttattcataaaatccttctattaaaatccttccccagattttctccactcnttatctatatactaacactatgcataccaacatacatgctatactt

SEQ ID NO: 105868 - DNA, 359 bp, Glycine max
ttctcaagcttgcttctacagcccatgggcccaaaatctacccttatgcttattgagaaccatagggccttctcctgcattcctagcccaatcttccttgagtctcctatccaatgcccttggagagttggattgcatcactcagtcagacatccaagtaaaaagttttgggtgtctgaatattccaagatcttccatgttcaatttcaagagtctcaatatatgatttgccttaatccgacatccaagtcaaaagcaatgcccatttgaatttaactggtgcatcttcgttgaaatttgaacgtctagatatagtatgggccacatcctaacatctcagtctatagtaatgtcttctg

SEQ ID NO: 105869 - DNA, 366 bp, Glycine max
aagaaacatgaagctgataagccgatgttttctcataagtcatgctgttacaagcaaagttcactgacaagatcacaaacaacctcatactaatgatacaatcgggcttatacgaaatcataataaatatgactgtaaaagatttttgccacaaatgacgaacttatcatatatcaatgattgaccggatgagactgcgagtgtgttaatgagatctactcatatcgcaatgattcaacgcatctaagataaatatatgatgaatattatcaaggaaaagttcgtgaaaaacggatgttacgaaccgatattgcaagcaaacgtaagtaacgtccacgcacttaacataagcataataccagagct

SEQ ID NO: 105870 - DNA, 176 bp, Glycine max
cagggggccttcaactttctctagaaaaaacccctcctttcaaattcttgttggcatcaccacctgggggcgtagctatgcacaatgggatgtgtgcctgttaaatcactagctagctcccacctacttaatcactaacaccaatccccatatctcttcttaccaaagacaagcct

SEQ ID NO: 105871 - DNA, 406 bp, Glycine max
tccagcggtgcccgcatcaacccatactgacgaatgatttgggagctatatgcactcctgggctacggactctaaggcaatcttgatcgccacactatatcccattcctgctaccactaagctggtagtgctgccttcacccctgatcgcatgccttgcgagactacgggagtaccctggcgatccgggcactaaaacccctgcgatgaaaggcgttacgctttcgtgtaatggcgctgctctcatggggataccaagcttgtattttgcgagaacgggagtatcatttatacgacctcttgttcccatgaggggaacatttggacatcctgcgcatgaagatagagtcttgattctgtcttccttctagcgagggaaccaacttacattacgccgcttcatgcta

SEQ ID NO: 105872 - DNA, 267 bp, Glycine max
gaaaattaatataaatttttgttaacgcctaaagaatgtattttattaattggactgcttccataataatgcgggtgttgtcaaactgtctacgttaactttgttagtgctgttagctcaatgccattaggccaactagtaagtttcgtctattttgattgatatatcatcactcaactacttgtatactattattattataaatgtttaatttagtaaatatttttttactcttcaatataaaatttttaatcggtaaatcattta

SEQ ID NO: 105873 - DNA, 59 bp, Glycine max
gcacgcgctcactgacttgcggtttatgaaatttccatgactgatatctcagtcctttt

SEQ ID NO: 105874 - DNA, 391 bp, Glycine max
tccatcaagtggtaatcagagcacaagagcttttatttgtgctccttaaacctccattaattatttttctttaccttctcttccattgatatttcttcatttttctccatgtatctcctcacatgtcttgttctaaatgtttttaacatgattctttataagtttccaccgattaaacttgctatagaaactagatttgattttctatggttcaaatttcttgttcttgttcttgaaccatgaattgtgttgagtttaggttcctttgagttttgtcttgttattttttgtggctgaaacctaaaccataaaattcttacaaaaatattaaagtagaagaaaacctcaaaaatctagagtgacttgttcacctattgtagttttgtcatag

SEQ ID NO: 105875 - DNA, 335 bp, Glycine max
  unsure (1)..(335): unsure at all n locations
ttatanaatactcaaccttgatgaatcttattgatctacttcagacatttttattgttgttggaccacacactttgtcccgcttataggtaatggatgagtttctcttacttggggatctaaattaacatgtgtaaggatccttaaaggattaatttgttagaatagttactcttattattggtatacatttctttgtcttatacacatgggatattcatactttttagtataaataaaagtcttattaacttgcgtatatgtgcaatttcatacctttcacagaatcatcctattatttcttgctttttctctttttttcctttacatgtggta

SEQ ID NO: 105876 - DNA, 373 bp, Glycine max
tatagttacatatgaacaaatgtactctattgtgcacaatataccaaatatggccctatcgagcacgataagattttaatatacaaacgaactaatgaaatgagtatgctatgacaggttaatataccagtctacaaatgaacaaagacccacacacaagatgaaaatgtcattctgcactaattaatccaacaccataattgcactttattcatttacaagttatagccataggctatcacaaggtatcagttaactagaaacttgtgagtcatccacaatatatagagtaataatatgccatatcatacagacaactgccactaaatgaaaaactaacctggtaaagtccatgaaataatccagcttccaa

SEQ ID NO: 105877 - DNA, 391 bp, Glycine max
taagcaaatggggaatattactgagatagactttctgcttataagcaaacaattcgattccttggaacatggcatgtatggcaagattactcttgctgacctcatggatactgtctaataaatccaaacatatcttctaaaagggcagagcagtaatacacgagactgccactattgaagagtgtctcatgtttgcaatcttatcccatgaatatagtgactatttcttctactaaaactagagactatcattcatgccacaaagataaccttagtgttatctcatcctttattcttttctttgggtcaaacgttataagtgtattgcacataattaccaagcatttgcccatacgcatgaaatacggatattcagtgaacagaactatac

SEQ ID NO: 105878 - DNA, 390 bp, Glycine max
ttgatttcctttgttctggacacctttcttttctcatgtgcacccaaacccaatctccgggttcgaagacaaccttatttctccctttgttggcttgtttagcatagcttttatttcttctctcaatttgatttttgactctctcatgaagcttcttcacatagtctgcctttgcttgaccttctttatgcttaaaaacataaacattatgcataggcaaaagatcaagaggagttagtaggttaaaaccataaaaaacttcaaaaggagaacaattagtggtgctatgaacagctctattataagcaaactcaacatggggtaaacaagcttcccaagtttttaagttcttcctcaaaactgtcctaagcaaagtttccaatgtcctat

SEQ ID NO: 105879 - DNA, 390 bp, Glycine max
ttaaagcacagcaacacagaatctaggtgttctacacccctcaattcaatgggttttctaggtttgagaagtgaaattgagaatgaggtaaatttggagcaaactctcacctcacacaagtctataacatcaatctaaacttgctcaaactggatttacacctaaaatctcaccgaatcaaaatttgactctccaacacccaaatttaccctagaaatgactccttgttcactttggtcatttgtttttctctctagctcagcctaacctttctcacatgttctaaatggcatttcaagctagggttaactcattttaacctccatttaccacagaatccagatttagcctttcaactctcaaagcctcactcttttccactcataacac

SEQ ID NO: 105880 - DNA, 280 bp, Glycine max
  unsure (1)..(280): unsure at all n locations
aaaaattcatactttcaaataatttctataattgaattgatctgacaatacaaaattgtatttataacaaatgtagttaaaatgtgtattgaacatgaaacttgaagatgaacagaaaatatgttaacttacaaattcagttactaagataaactatattagacatttttaanaaaaaannnnnntnncnnaaattctnncacaaatatatttccaaaaatttgtacaagaatcttgtgcaatatattttaatgttaaactgattttggctgagatttta

SEQ ID NO: 105881 - DNA, 395 bp, Glycine max
ctgaagaaagagggttccatagaacaatattttcatcgtatgaagagctgaaaatgagtgaatttcatctaggggatcataaacatagttatcaacagtggcggttgacacaaaaagctggcgaatgaatagataaactatgtccctcacgcaatgcaccatcaccgagactatatataatggagggccttattctcatatttgattgtatgaatgcttgaaacttttacattctataaacactatcttggattgcaagtttagattgatttgcttataatatacataatcgattatgtatgacactgcattaatgtactttgactatcgaatgatcacataactaattatatctacatagcatcattcccaaaatgagatatatttggcttcaa

SEQ ID NO: 105882 - DNA, 315 bp, Glycine max
  unsure (1)..(315): unsure at all n locations
tttatcaaatcttatcttatccagatgttattctatctagattntatggtattcacaatttatttcgtccagatcttatttcatcacatcttatcttatcttgtccagatattatgttatttcgtttataagcttggacttaaaatagatntgtaagttgtggggctgaggacctatataacagcaccaaagtattaggttagggatgttttntccggagaggagaataattctaggatgttagaatttcagtttctattactgctcatgcacactggtcatgtagaataaaattcattctttgcgatcatctct

SEQ ID NO: 105883 - DNA, 393 bp, Glycine max
gtgatagatttcatagtaagcagaataacttgagcatctttgcctatgaatcatccaacataatagggaacaaattcatagtaaccctcgagtacaagaccgagatgactatagagtagtattccctcatatttgatttccccatttccaacaacttagtatatgttttattttcatttgaaaatgttgtgacatgtgtttcaataaatccaacgaataaaaacaaaataaatgttaaaacaaggattctttgataaaattattttcacctcaaacgtaattttataacatgttcttagttaagtacgaggctttccaccttttgcttgacaatggcaaaggagatgcacattcagagtaactagcgagctagctaaaaaactttggtgacat

SEQ ID NO: 105884 - DNA, 337 bp, Glycine max
  unsure (1)..(337): unsure at all n locations
caattcccacaaattttgactccagccagtccaccggggggatttcccccttaaagggatcctccaacgcacagacacaaaactttttaaaagtgttgcctagtcacatacttctcacaatcgcgcacacagaacgccaaaaatcaacaggaggcctccacctcctgaaattggagcaatacttcaaaatgcgttacaaaacaaactcttcagcttatataagggcgtggtccattatcacncccccnnnnggganctttatttcccctccaaattatgcttcttagtagaacatgcagcccacattctttctttccataactgccaccattataaa

SEQ ID NO: 105885 - DNA, 404 bp, Glycine max
accttgagaagcttgagatgatctcctgacacttctctaataactaagtacacctccttgaaaagcttccttgacaaactttcttgaaaagcttcctagataagctaaagcttagctacacacacctccctaatagctaagctcacctccttgagatgagaagctagagcttagctacacaccccctataatagctaatctcacgcctgtgccaaaatacatgaaaatataaaaaaaaagtccctagtacaaagactactcaaaatgccctgaaatacaaggctaaaaccctatactactagaatggccaaaatacaaggcccaaaagaaggaaaaacctattctaatatttacaaagacgagtggacccaaccttggcccatgggctcagaaatctaccctgg

SEQ ID NO: 105886 - DNA, 249 bp, Glycine max
gctgcacagacagcggagattattctagttttaacctcccagtctgcgacatatttagtgttctggtaaaacatgagtctatataataggccagacagcgaaatgacatgatttattactcgtgatgaacctacaagtgggaaagggttaggttgagggttgaaaaacttcaatgctcatgtttttgaccataatgacttcacttatggaattgacggtacaggataaggcatatgatgctcatcttga

SEQ ID NO: 105887 - DNA, 361 bp, Glycine max
tgacccactatctcttatttaaaataacacagtgccattaacctatggacctaaaaaacttaatggctgagtgctactgaaattgtggcaaccaaatgtcacccccaacaacctacaaatcaaccacccattagtcttccaaatagatgatgccaaaggtgccaattgggcccttattacaacttgaactaaacctaactaaagcccttttagttgattaaccaaaaacatatttctggtcagccaactttacaaagattgggccattatttatacaaactaaacactctacaaatgagacaaaaggagtcatttagttctcctctcattaggccatgaacaactcacaccttggacttta

SEQ ID NO: 105888 - DNA, 298 bp, Glycine max
  unsure (1)..(298): unsure at all n locations
atcgttttctnttgggggctgtgaataacatgcaccacgaatcccaccatctaattattattttgaaagggtctataacatgatacactcgtggaccacttaanacttctccttctgagttattagagaatatcttattaaatgtcattatataagttcaaattttaaataaaaccacctgtctatatgacagaatacgtgataggatatattggtgcatgttattctagacgtgcactaaaggaatgttcattgacccacagtatttcattcacacaagtaaaagatgagttcttaa

SEQ ID NO: 105889 - DNA, 395 bp, Glycine max
taatagcagagctactatcacaacaaattactttatcctggttttgcattttacacaattttcccaacacccttttcaaccatatggcttgacaagcacacgatgctgcacctatgaactctgcctctgtagttgatagactcacaattggttgtttctttgatgaccaagaaacagcagctgaacacaataagaaaacataacccgaagtactttttctatcatccaaatctcttgcataatcactgtcagtgtaagcaagaagctctttgtttcctcccttcatgtagaaaattcgaaactcagttgttccccttaaatatcttagcaaccttttggctgctagtaaatgcagctcagtaggattctccatatacctgctaattaagttcacc

SEQ ID NO: 105890 - DNA, 389 bp, Glycine max
cttctggttgtacagaaggggcacagggaagctttatgttctgcatagcacatggtgggggaaaacgctgtacagcaccatggtgcaccaaaggtgctgaggggaccacaccactttgcaaaggccatggtggaggaaaatgctgtgcataccacggtggtggaatttgtactaaaagtgtgcatggaggtaccaacttctgtgtggcacatgggggtggaatgaggtgttctgtacctgactgcatgaagagtgccaggcaacaaagcgattattgtatatgtcatggaggaggcaagagatgcaagtttgaagggtgtggaaagagtgcaccaggtggcactgacttttgcaatgcacatgggggaatgaagagatgctcttggggc

SEQ ID NO: 105891 - DNA, 281 bp, Glycine max
aatggatataacactcttcataataccaacatcaatgtaatgtatagcaagctcatgcgcatatgttcttacatatgttcttttgctcaacacattctatcagccgagacaatgcacccatatacaatcaaggcagcttcgttacctataatatttacacgtactttcaaagagtatttgatacttacatcacacacatcttcttggctaaatcacatcatgcatatcaaagcattttgggtccaaaaatgccatgtaccctcttggattttaaaactatc

SEQ ID NO: 105892 - DNA, 398 bp, Glycine max
ttacaatttttcatctaacaaattttaatcctctatttaaatgatatatgacagattgtaaatgctgaagaagcaacaatcaatttaatcgatgttctttaaacctataaggcaaaattgattgcaaactcgatttatattggttcggccactttccgtgcctacgtccagtcctcaaacaacccacttgagatttccactatccttataaaactcttttacaacttctaaaccacctagggatccctctcccttgtgttcaggattctcataattcaatgagacaaacagtctctttatcacaacaattcttttttagaaagtacagatgtttttctttcttttagagaagatgatacatgttgaagttcttagaagaatactcaaatgatttacaa

SEQ ID NO: 105893 - DNA, 322 bp, Glycine max
  unsure (1)..(322): unsure at all n locations
tgcagctgatatttgtgattggttatttcaaatcaacttaaaaataaccatagttgacagtgggaaaaagaaagcctactcatttattgcaacttgcgaggacaccataaagaagatacattaagttgtcatatnttaccttataaatctatggagaatgatgtacaagtcaactacattatgctcctcccggcagatagttgcctttacactagactacattcattactcacatgaactcatctataagaaacactagtatcatctcagagcgacagccacatgtactgaatcacagtctaagttgttctacttctacaca

SEQ ID NO: 105894 - DNA, 389 bp, Glycine max
taatctctaatagggatcttgcattgagatcttagcatcaagacctgatcttgctaagatccattattggagtaggatgttaaatctttatgtgaagatttagttcttataaaagaatggccaagatctacatccacttaaaaataaataaattttttaatctcttcacaaaattgatttgcatccaattcttgtaggacttacaaaaaatgatttaagatcttaaaatgagatttattattagactaaaaaatggaggaaatcttgagagtggtgtggtgccgtgggatctacaaaaaagatggctaagatctcaaaatgaaatattctatcggcgatggtttaagagataaaaggagttaaaatttctctcaagattctatatattt

SEQ ID NO: 105895 - DNA, 464 bp, Glycine max
  unsure (1)..(464): unsure at all n locations
atcctctgagtcacctgcggctgcagcttgaagtaatgaagatggattagctcaagatgatgttntggccttttgcatacccaacttctttaaggggcatgtgtattatttgttagaatgattgttgcatcttactacatgtcatatatgtctttcattatgcattatcatagtgtgcgcaaaggaagatttctaagacaaatttcttcaaaggagagaactctctattttaatcgattacatagttgtcataatcgattacaacaagttgtttgaagctaagagtaaagtctcgtatcggtttaatctattacgatagtactctaatcgaatacactgttgtttgagacaatgacttgatttttaggagtctatgctctatccnctaccccannnntaatcaanacctctctctttttaattgttaaatataacaagacacttaattaatactatgcatctat

SEQ ID NO: 105896 - DNA, 384 bp, Glycine max
tgagaattagcaaaagggttgtgattaattatgaaaagcttttgcttgggagaaagaaggacaaccttgtaagatgcctcaggctatagtgaacttcatagtgcaaagtcttggtaatttactcattcaagaaggaatgttcctatatagggtggaagacaaagtgttgcaactgcaaactgaattgaggatgatgaggtcttacttgcaagttgcagatagaaagcaagatggtaatgaaagcctaaggaattggatttcagaaatcagagaagctgcttatgattatgatgatgtcgttgagtcatatgcccttagaggagcttcaagaagaaagttgactagtgttttgagcctcatcaaaaggtatgctttaaacatcaa

SEQ ID NO: 105897 - DNA, 395 bp, Glycine max
tctgaattcaggtattcaatctcttctgtaccagtgaagtgaaaattcttttatctttccctatccatcaattttctgaagatcatcgatcataatcttaattttatccatatttgagataagttaaaaatgactttcctttccacttttagactctaatcaagtttgagtgctgtcattacttctcagtttagatgcctctgaattattgattggcagagctatctatccctctattaacctaccccagatatcccatttagctaattttccccattctgtatttgcaggttggggttcagtacttggtctaataggaaatcacttgttgccggaacattattttagaactatattctaatgcaatgccaatgcacaaatgtattaaccaattg

SEQ ID NO: 105898 - DNA, 359 bp, Glycine max
ttataagcgcgggtctgggagacaaaggtcaagtgttcgcgatatgcgaagatgatgttccgagtaccttggatttggtacgaccatgccctcctgatttccagctgggaaattggcgagtggaggaacgctccggcatttacgcgacgagcataatttaaacctttacggttttaaaagctctatagttgggcctaggctttagagttttttccttttgttaaggctttgtgtctttagtttttgaatttataatacaaggatctttcttcatctgttcctggtctctacccattctcattcatttgcatgtttacttctttttctgaaacggcagatccgatgacgaagtcccccga

SEQ ID NO: 105899 - DNA, 367 bp, Glycine max
atttggtcttcgccggtgaaaggattaattgtttttgtaaaatggaaaatatgagtatcctactttgatgaatgtgaaaactggggcaaatgaagaggatgagaatgagggagaaacccttgctatgactgccattcctacatggtcaaatttgccatcatcccaacaatgtcattactcagccaataatagtccctctcacccaatcatccacaaaggccatccccaatcatccacaatgcctgcccgctgcacatctggtgccaaaacaccaaccaaaaaggaatttcgtaacaaaaagcctatatgattcaccccaaattccggtgtcatatgctaactcgctcccatatctacttgataatgc

SEQ ID NO: 105900 - DNA, 406 bp, Glycine max
cctcgtaggattatggggtacccatcacatgtggtactatgtggcggtcgggcgatggtgcacaacaagtttttcacatccacaatgcgcgcataaacccaccatcccctgtagcccacctccaactgagctcacgtactcccacgtagcccatatcctcgtttctctcaacaccgggtccccatcaatcctcccaagcttccccaacatcaaagtaatgcaacattcaaacagcacaaactatcacagccaagaaaacagagcaaaggcagaaaactctgccaaaacaccaaccaaaatcacagcttttctcacttaaagaccccagtaacaattccttcgttccaattcgttaaccggtggatcgactccaaatttttactggaagtctctagtacataagccg

SEQ ID NO: 105901 - DNA, 266 bp, Glycine max
  unsure (1)..(266): unsure at all n locations
gcagcctcttatccctctctcattcccaactagagcaattccaaacanaaaaatggtagaagcggaatatgagattttggataccttcatgatagtagaggtgaacatacctctgctagacgccatcaagtagaatccaagatatgccaagtntctaaaggagttgtgcacccactcaaggaagctcanaggcaatgaaagggatatcatgggtagaaatgtgtcagcattgatagggtaatatgttcctcacattcctgagaaat

SEQ ID NO: 105902 - DNA, 395 bp, Glycine max
tgtctcagcgtttatgcgagacggagaccaacatgctagctatcatcgccaagtaccaagaagagttaggtctagccgcggcccacgagcataggattgcggacgaatatgcccaagtatacgcggaaaaataggatagaggaagggtgatcgactctttacaccaagaggcaaccatgtggatggatcggtttgctcttaccttgaacgggagtcaagaacttccccgattgttagccaaggccaaggcgatggcagacacctactccgcccccgaagagattcatgggcttctcggctattgtcagcatatgatagacttaatggcccacataattagaaatcgttaggaaacttgtatggtctctaagaccttgactagatacgacttcctt

SEQ ID NO: 105903 - DNA, 298 bp, Glycine max
gaccaaaacgcaggaagagaaaggatatgggtacttcatactggaaaagcatgctctgaacatgctggatgctggtcctgaattatgggagataggatcaatacataattcgcgccaaataaatgagagagcggatggtcatgatcaaatctagcatcagagtgtgaatgttcacgttttgatggggagtcagtcatccatgcttagtgcaaatgtcaattataacgagaaatataaaatatcccacatggccttcacttactcggagaatacactatctaagatactcttatgggat

SEQ ID NO: 105904 - DNA, 385 bp, Glycine max
tgagaagttgcatcaactagctgaccagatattgcatttcttcatcaatgagcatagagaggcttagtcaagtgccacaggagaccagggagaggaggatgttcttttagatgtgctcttgaagaaggagtttggcttaagtgatgaaagtatcaatgctgtgatctgggtaaggatagacattttccaccaattttattgcatgatagaaaaatggagaaaagtatgctttactgccttcacactttagtttcaaaaactattttgtattttctaaaatgattagtaatcattttgtcattcaaaatttaataggttttgcaaattggtttgaatataagtgtttaaaaagaaaagaaaaatataaacagttaaggaactattt

SEQ ID NO: 105905 - DNA, 308 bp, Glycine max
atgacttagataatactgtcctccgcccatagtcgagatgcttactctctatattgtgcggcacaacttccgaaggtgcattcacagcccgtatcttcctcggtttctattactaacaactatatctgtgattaattgaatgaccctggccaccctatataacggctaaaactacaatgacgttttgctttccctatttatagctcactataccgatcttaataacacaaagaacacgccagacttaacaaggagggtgctcttgatgccacttttttcgcgaatatatcgccatggttaaactcttt

SEQ ID NO: 105906 - DNA, 324 bp, Glycine max
  unsure (1)..(324): unsure at all n locations
caccgcngctgcagctgctgaaactttattgggctgatctttgtcttaatattgtccttaatgatgaatttcantcatggagtcgcagcagtggaaattattataatatcatattaactacattctgccaagacatgtgtggagattcatggagtaaaatatatatactaccatggccgagtacggctacgctgaaaactaatggaagtttaaggagcaccttattgaagctcttgtgctctgataccacttgatggaagctcgcttgagaatcttctatggaggctggaactttgagcttcaataacgtccttcaatgatgat

SEQ ID NO: 105907 - DNA, 376 bp, Glycine max
  unsure (1)..(376): unsure at all n locations
ttcttagaagaccgacggatggatngatatgtttgatatgtgtacatccttcaagagatagaggctgaatatatacgtcctctttgaaatgtggtaactcaacaagacttgtgcagtctttcatattcaaataagccagctttcttagaagaccgatggatggattaatcttcttgagttttatgcatcctttcagatctagccactcaagatttagagcctcccctaaatctggcaactcgattagatttttggaatgagagagaaccaaacgtctcaaattgtgtataggctgcagtgaagggtcaatagtacgagacaatagttaataatgacacttaagctttcttttgattctttaattaatctgaggaaa

SEQ ID NO: 105908 - DNA, 354 bp, Glycine max
  unsure (1)..(354): unsure at all n locations
agcttgaatgttcagcaacaatccctgtcaacctatgagaaggagttactagctganggtgttgctgtacaaaaatggaggcattacatattacctaagcagtttgtaatcaaaactgatcacagaagtctcaagtatattcttgaccagagactntccacagctttccaacaaaaatgggtggtaaaacttatggaatttgatttcattattgaatataagcanggaaatgagaaccaagctgctgatgcattttcagagttgaatgtgctactatttccattcaccnccccgattctgatctactagagagaatcaaagcatcttggcaatgtgatgatgccttacaaaaac

SEQ ID NO: 105909 - DNA, 424 bp, Glycine max
  unsure (1)..(424): unsure at all n locations
gtcacactatanaacacccaagcttatgcgcatatttccttacgaacgttctcttgcacaagacattctattaactaagaaaaatgcacccatatacaatcaaggcagcttcgttacctagattatttacacgtacttccaaggtgtatttgttacttacatcacacacatctccttggctaaatttacatacatgcatactcaaagcattttgaggtaccaaaaattgcacatgtgcacatcttggtatttctaatacctatacatacacaaacttcatgatgaatcttgactatctacacaataaggtgctacattccatgctcttttcaagttttttgctacctaaagccgcatgcaaattcaagtatattttcctttgctgactaaaattgtattcaaattaaagggtatacattttttt

SEQ ID NO: 105910 - DNA, 268 bp, Glycine max
  unsure (1)..(268): unsure at all n locations
attgattcagagaagctaagctatacttgacaagagatgctaattaagtggaatttcacaattgattcagagaagcacaagtgctctcaacaacctaagttatacttgacaagagatgctgtgaaatatcataatggtcacaatntaagtaaaccccaatgttctaaanatgtcaaaaactggcatagaactaattaagaccatgaaggaaatgttcgacatttcaggaagcgtaccctaatggagggtttcaacatatatgttacaa

SEQ ID NO: 105911 - DNA, 384 bp, Glycine max
  unsure (1)..(384): unsure at all n locations
tatttattccttgtggcataaattataagaacttattttgttacaaaatcttgtagattaaactttttttgaaagactaattggtaacaaaaacctttgaaagagtaatgcaatgacgacaaatgtgactttttaggtgatagtatttggatcctcagagagataaaaaaatcaaaaaatgaagaacatatcaacctcatatatatatacttgccaaaacctggagctaagagtggctaaggtggactcctagatctcgctcgtcggactgagagtgatctttgttaagaggataaaagggggacctgcaaaacaaactacttcgatgctcatgtaagtacgtgagttatgagagtaagagagtatganaagaatgagatggaa

SEQ ID NO: 105912 - DNA, 281 bp, Glycine max
  unsure (1)..(281): unsure at all n locations
gtttcatggtcttgcacgtgaagatccttataagcatcttaaggagtgccatattgtctgttccaccatgaaaccccctgatgtccaggaagatcatatctttctaagagcctttgctcattctctggagggagtggtgaaagattgtgtgtactaccttgctcncaggtccattaccagctgngatgaccttaagagggtgctcttggagaaattctttcctacatataggaccactgccatcagaaaagacatntcatgcatcaagcaacttagtggat

SEQ ID NO: 105913 - DNA, 389 bp, Glycine max
tcgagaaccaaaatgtgccgcctaattcatctaataactcatcagtagttgggatagggaatctatccttaattgtaacagcgtttaaagctctgtagtctacacaaaaagaccaggatccatcgcattttttgaccaatatgacaggggaggaaaaatggctggtgttcggacaaatgatgccactctgaagcatggattctacttgagtttcaatctcttgctttcggaaatagggatagcagtaaggatgaacattgatgggttctgagttgggtagtaagtggatggcgtggttggtggtatgggagtgagggagggtcgtcggtgtttggaacagggccgaaaatcggttgagtaaattggcgatttctgggtattgggtagtc

SEQ ID NO: 105914 - DNA, 281 bp, Glycine max
  unsure (1)..(281): unsure at all n locations
ccaatgtccctcatgcttcatcatacacttaagataagatgactattcatntaccacattcatatattacatcttctacaacattatcttcttttttgtcgtccttcacatcaatatcttatttcatttttacggataaaacaatcttctgtcactctctctcttctagttatttctgtattacttgtacaagctactttgtatatttctggtcaaatgcaacttgtcattncagaaatataataatgattataaattatatttgatatggtatcacacac

SEQ ID NO: 105915 - DNA, 394 bp, Glycine max
tggtgcatatgacatatatgctccagcttgatgttgagtgttaaaagatatgattagatctttaagtaaatatggaaatagggaatagcataatcttaccttaattacactaggggttacttaccttaattgtatcattattctcattataaataaaggcttagtgtggtcatccaagacacaattcatgaaattctataactctcaaggatggtgttaattgctatgctaggaacatgggtattaacggggtgcctaagtcttactatgagatgttgagtggagtactaatgtggcttggttccccccctttttttcttgtttttttatctatttcattttaagatgaataaaatataatcttctaatatgtcaaaaagcttacctgagacac

SEQ ID NO: 105916 - DNA, 393 bp, Glycine max
tgtaatggagaatgttgaactgtacatgaatgctcgtgtttctccaacctctttgacctattatggattttgcttgggaaatggaaactacacagtaaaactccattttgcagaaataatgtttactgatgataaaacatatagcagtcttggaaggcgtgtatttgacatctacattcaggtccatatttttatcattttcctaagttggtcaaccacatgttaaattttgatcaaatttggtaaaattctctttgggaacttcatgataccaaattcaaatacaacaacaacaacgacaacaacgccttatcccactaggtggggataccaaattcaaatacttcagtataatctttgacataaacaaaattttttcataagttgtaatta

SEQ ID NO: 105917 - DNA, 411 bp, Glycine max
ccttaaatactcaccttgtgactcttggcaatttcttttaaaaactagtctcttataagttgcgacttttgaaaaaatcttcagaaacaagtctcttgaagaattgtgatttttggaaatgtattttttgaaatcagtcactagtaatcgattaccattaagttgtaaccaattacgcatcaatagatgtgactcttcattataaattttgaaaatcaaaatgtttagaagctctggtaatcgattacaagtgttgtgtaatcgattacacaagtttaaaatgatttaaaattttaaaacacaagttgtaactcttgaaatttgaaatcttaacgttttaaaacactggtaatcgattactaccttctgataatcgattaccagagagtaaaactctttggtaatgatttt

SEQ ID NO: 105918 - DNA, 322 bp, Glycine max
  unsure (1)..(322): unsure at all n locations
gactatgctgctggagcaactcggacaagattccgatgacggcacggcggcgcgtgaactacacgcgctggaagagacacgaagctgtaaccgcgcgttggatgcgcgtggaagctccgatgacagcgcgtattgcagggtttggtcgcgcttttccgacgatcctaacccttgtctcgccggagaaaatgacagcggctgactgcggcggactgcggngacaactgctgacggtggcggacgactgcggcggactgcggaacccgctctgatgccaacttganaagctttgatatttagtgagttgaaaagaacctcactt

SEQ ID NO: 105919 - DNA, 394 bp, Glycine max
  unsure (1)..(394): unsure at all n locations
nttgtattaattaatgatgcatcttattttggtatgatcttacttgaaaactgcacccttactaatcaaattaatgtcatcttgtgtgcattcaggaattcttttggtccagattctaatttcctctaccagttcctctatttctttaaggcagaaaatattgatgatttcttagttcttgtgcaaatatgccggttgctttggtggtctgttcaggataatggtaattcttaatcaaccttccatttcctatggattttacagttctttatctactgtacttgtattttaaggcatttgggaaaaaaattgcaaactggaacctatatttattttacatttaatcttttcacccaccagaaaagagatttctagtgcaatcaattgactttat

SEQ ID NO: 105920 - DNA, 388 bp, Glycine max
gagaagataaaattctataatgacgtgattatttataaattttaattgagggaggaattgttggagaaaaattcaaattttaaaataaacaaagttggtgaagattcaaggagattcttttaggaatttgcgtttcaaatctttaggattttatctagatttaaatatattattaatttgttttaacttattttagatatttgtttcttgttttaaagattagaatatgataatatttggattctgtagtgctatttagctttatatacagagccaacaaaaagattctacagtatatctcatctaagatcccttgaacattaggatcactttcaagtgtgtaaagttttcccaacagtctttgctctcatttagtgcaatcactttg

SEQ ID NO: 105921 - DNA, 364 bp, Glycine max
tgagatgaggaagtgttgaagggtgaaactttctgcttttattgttgaccacagagtggtacctggagatatgtcgcgggggtcaggagaccttggggacgtcaggtggggtgctattgcccaaaaccaagcttgaccaatcccgacccaacccgggcatagtcggtcagtgagaacctgtgatgtacctaagcaggcgagctcctggcagtcaacagataaaaggaacaaagaccacaaagcaaggaggcttgtggtggctggccagctctgaattttgtgtgatatgtggattatggcctctggtaatcgattaccaagggtgggtaactcattacaaggcttaaaaatgaagacaggagac

SEQ ID NO: 105922 - DNA, 297 bp, Glycine max
  unsure (1)..(297): unsure at all n locations
tatcctttatgtctaaatctcatgttgttgagatatcgactggcatgagatacttggattcatgagtcactctntgttagcagtactttcggactgagtcacttggtaagtctatggacatattacataatgactcttaatatatgtaggtgttcaaaatgtcatggtttcttcacccaacgtagctgcaggcgaacacatctccatgatttagcttcttgtacatacaatgatacttgatgggttaatcttatggaatgccgatggtgtataaactgaagacacaccaacgttgct

SEQ ID NO: 105923 - DNA, 394 bp, Glycine max
tcaagaatcaagtttcaaagaatcaagattcttgaactatcaagtttcaagattcaagattcaagagcaatcaagactcaagattcaagaatcaagagaagactcaatcaagataagtactaaaaaagtttttcaaaacattgagtagcacaagaatttttcacaaaatcttttaccaaagagttttactgtgactcgctctacccctcacatatatactaataaggaaaaataaaattcaaatattaattaaaagtatttttaaagcatttttttttacaagtctttcaaaggggaaaaaggctcacattcattttcttctacatcatattcaaacttatccaaataaataataaagtattctcgactcaaacaaagtcgtctaagcttcata

SEQ ID NO: 105924 - DNA, 340 bp, Glycine max
  unsure (1)..(340): unsure at all n locations
agcctggaagacatctctaatgattcttctgtggcttccacatatggtgtagaagaaggacaactnacaaggatgtcttnctccaccaatactatgaataactgcctttccaccacaaacttcaacctttggtggagcgttgaaggaactaccccgaccgagtgaatccaatgtcggcctagaacgcatctataggccatatngatatccatcacttggaaagtgatnngacagatgtgcgatctaatctgaattatgagatcaatctcctccttacgttccgatggctaccatctaaatccacaccaccatggagctcggctttaggtgtgatgcattg

SEQ ID NO: 105925 - DNA, 394 bp, Glycine max
  unsure (1)..(394): unsure at all n locations
ntataagcgcgggttcgggagacaaaggtttttctttcgcgatatgcgaagatgatatttcgagtactttggatttggtacgactatgccctcctgatttccagctgggaaattggcgagtggaggaacgccccggcatttacgcaactagcataatgtaaacctttacggttttaaaagctctatagttgggcctaggctttagagtttttccttttgttaaggctttgtgtcttttgtttttgaatttataatacaaggatcttgcttcatctggtcctggtctctacccattctcattcatttgcatgtttacttctttttctgaaacggcagatccgatgacgagtcccccgaagtactaatacctgggacccgtctatcgacttcgagc

SEQ ID NO: 105926 - DNA, 398 bp, Glycine max
cggagaggaggcttcaatggagggaaaagaaattagggtttatatagagagagggggggcatgaaaatgaaggaagaaaaagggagagaagttgaactttgagttgtgtctcacaagactctcattcatcaaagttacaacaagtgttacacatgcttctattaatagactaggtagctcccttgagaacctttcttgagaaaacttccttaagaagctgctgtgagaaaacttccttgagaagctagagcttagctacgcacacccctttcataactaagctcaccttcttgagaagctttcttaagaagattcctaaagaagctagagcttagctacacatacctctctaatagctaagctcacctacttgagatgagaagctagagcttagccac

SEQ ID NO: 105927 - DNA, 124 bp, Glycine max
  unsure (1)..(124): unsure at all n locations
gagaggggggagcacganattgaaggaagaacaagggagagatattgaactttgatttgtgtctcacaagactctcattcatcagagttacaacaagtgttacacatgcttctatntatagact

SEQ ID NO: 105928 - DNA, 402 bp, Glycine max
tcatgataatgaatcaagtatgattcaagttgttttgatgatgacaaaaagcccaaaagaatgatgtcaagattgagtcaacaagttcaagaaatcaagaagattcaagattcaagagaagttgatttcaagattcaagaaaagacatcaagaagaatcaagattcaagagaagatgaattcacaagggaagtattgaaaaggatttttcaaaaaccaaacatagcatagttttgttttacaaaaagagttttctcaaaattttctaagttaccagagtatttactctctggtaattgattatcagtttcctgtaatcgattaccagtgataaagtttgatttcaaaagcttttaactaaatttgcaacgttccaaaagttttttaaatggtgtaatcgatt

SEQ ID NO: 105929 - DNA, 292 bp, Glycine max
agctcgagaagctcaatgcagtacaatttatggatatatataaccagacgagaacaccattctgactctgtcatgggtacaactagaatgatgacaatcaatgatcactcgcagatcttgtgacactgtgcctacaattaccgcatattaggatggtttaactaattataatatcttatattgtctgttgctaacgatatatctgttaagagatatgattctgttttatcatatagaaactgttctagtcatgcctaaaataagggatttcctgttttgatatctgtctcta

SEQ ID NO: 105930 - DNA, 381 bp, Glycine max
  unsure (1)..(381): unsure at all n locations
gttgagcaagacattaaaacagtattgtataattgtacattgaattgagatgtttgatctctttcaatcatctcaaaaagctcaagagctttgtgatgcctatcagccttgttaagagaacttaatagagcattgaatgtatatgcatctggtttaaggtctaaagatttcattgtgttgtagacctgaaatacttgcttgagttcccctgctcttccaagtgagttaattaatgcattgcatgcaactaagtttggcttaagctcaaccttcaacattttgttaaagacacttaatgcagcatcccattttccctccttagcacatacactaatgataacattcatgtattgttgtctggttcatatccattntgaacca

SEQ ID NO: 105931 - DNA, 340 bp, Glycine max
tgtatctagcactaatggtacactagtcatgttttccacatcttgtgcattacaggatatgaacaggcgaatgaaggattggtacagtcgaagggagacacgacctttaccacctaacactaaaccgaataaccaccaaaggcgtatgctccactattattcgtgctatggcataccccatgtgcgacccggaattattgatcttgtttagccttttagagccggaaattgacattattgcagatgacatctccgctgggagggatttaaaaatacctgatgcttgtggtgaagacgcccctatgactattattattatatatggatagaccgatgatga

SEQ ID NO: 105932 - DNA, 227 bp, Glycine max
agtctgttccaggatgtcaagacatctcacatgacatcagctttctgcttctgcttcccctgtctccatggctttactccagcatcttctatcagctactaatcgtttccaagatgtgaagacatctcatgtgacatcagcttttccttgtcttcatgctcttactgcagcatcttctatcagctactatgagcttacatcagtcattatcagcagcagcacgctcc

SEQ ID NO: 105933 - DNA, 388 bp, Glycine max
  unsure (1)..(388): unsure at all n locations
tctagaaggagatcaacttgatgttctatgcttcttgaaggtggcagtccatgaggaatctccttgggaaagacatctttaaattcctgcaataagggttgaacactaggagaaacataaatagttaactgattagaattatcagtctctctctctctgtcttgtgtatcactccatctctcaagtgtatcactcttcctttttctattcctctgtgatgcctcactattgtctctctattgttctctcttttctctccttctgatttggttatcacacacttctctaagggatagaggtttatgaataattttctggtcatggtgcaggaaagaaatctgttggtgaagccatcatgcactgctntggtgtacccttacatgttggc

SEQ ID NO: 105934 - DNA, 378 bp, Glycine max
  unsure (1)..(378): unsure at all n locations
tctagaagttggaacatgttagacaaatggcctcttatatcttaagaatggggggttgaattaagatattacaaactatttccccaattaaaaattctactttgattataatgcaagttccaagttcccttaaagatgaatttctaaatgatgattcaaattaaacaatctgaatgtaaatgtaaagaaacaataaataaaagagttttaagggaagagaaagtgcaaacacaatttttatactggttcggcaaagtccgttgcctacgtccagtccccaagcaaccctcttgggagttccactatcttgcaaatcctttacaacttctgaaacacacaaggaaaacccttctttgtgttcagattntttacaacaag

SEQ ID NO: 105935 - DNA, 215 bp, Glycine max
ctattctgcattataagaattagggctatttattatctgaaacgccgcagctgacttgctacttcaactcgtaatctcctcaaagacttggtagagatataaacattttgacatctcttatcagaattaggtatatatacaaaacagccagccataggtctattcaactcacaacgtagtttagaatcccctggaaacaaaaacacgcgctacta

SEQ ID NO: 105936 - DNA, 396 bp, Glycine max
tacgcaaaatgaccaaggcaccatgcacagttgaccttgtctcaaggatatgtgcatgccaccaaagtgtccctctctgtcctgtgagggtgaagttgtacacaaaggcctggcccggttgaattgggcattgggttatgtaagcaggcccatcggcccaacccgtcctcaattgtctcactccatgcctattcaaattttaattcatcattaaattaaaaaagaaattagtacaaaaaatttaaatatattttttgttattgtaatttagcatttttttttgttattgtaaattttattttatttttttctttttatttcttataaaatatgtttgatttatctttcgtcttttaaagcgttttagatagcattgtctaaacggtaaaaaaatat

SEQ ID NO: 105937 - DNA, 371 bp, Glycine max
  unsure (1)..(371): unsure at all n locations
gcttgtgtagcactatccactgtagaagcataatacattacagctggaagttatggtactcaaagtctctggatgaaacaacaactggaagactttggagtaatactcgatcatattcctttgaaatgtgacaacacaagtgctattaatctatctaaaaatcctatcatgcattctagaacaaaacatatagagatgagacatcatnttcttatagatcatgtatcacagggtgattggtgcattaagtttgttgatagtgaacatcaactagctgacattcgtactaaacctcttgctagatatagggatctcttcatcaggaatgaactangcatcttagatggatctaatattgaatgatgttatgc

SEQ ID NO: 105938 - DNA, 397 bp, Glycine max
tctcccctattttgctataaataggggaagaagtgtttatgaaaagggttcagccccttaggcacttctctctctttcgaatttgctgaggaaaattagttccgtgaagaaaatccaagccgaggcgcttccgtaacgtttccgtatcgtttccgtgagtaattacgcgaagattctcgaccgttcttcaaagattcatcgttcgttcttcgttttcttcagtcttcaacgggtaagtacctcaaaccaagcttttcaattcactctatgtacccatggtggtccacattttttttcatgtatttttattcttgttttcgtctactttttataccccattttgacgtgcttaagccatttatttaagtcatttctcgcttaatttaaaaataaaata

SEQ ID NO: 105939 - DNA, 398 bp, Glycine max
ttatgagctgaaccattttatcaatcaagacattttgatgtttattcacaacattagagaatgatctcttttatcttactgagagtgattctcctaaattctagagtgaatcaagaacaccctggctgaatcatcggactttcacatccttagtgagcagccctcgctggaaagagagattctttccttcctttcatcttcgcccttgttctttccaaccatagttccagaaaatccacctctgcccagaattatctcgtggccataactcccattttacgcactcaaattaagtgattcttgagcctaagttgactatcaaaacgatacctttcacctcgttttggaatcacctcatttggagccctgtagcttcagttattgccatttctatattt

SEQ ID NO: 105940 - DNA, 363 bp, Glycine max
  unsure (1)..(363): unsure at all n locations
ttgtnacaaggacaagccaggaattgtttttgtgaacatacgtaactttctcctgctctgtttctctctctgactcttccctgtgccctctctcttctctttttgattttgactctcacaggttctacatccattgtgatggggctttgtttggtctcatgcttccttttgtcaaacgtgtaagtcttgaaatgtcactattttactgttcaatttcttgttgctatcctcgtgttttttgacacacaacatactaagaattttaaacgttgcctaattagcttcttccttttgcgaataaagcataataagaaaactatgtctctaatgattggaaaatactgaattttaacacaatattta

SEQ ID NO: 105941 - DNA, 391 bp, Glycine max
tcaaaccacagcaacacaaaatctaggtgtctttaacttctcaatttaatggattttctaggcttgagaagtgaaatttagaatgaggtaaatttgaagcaaactctcacctcacacaagtccataacatcaatctaaacttgctcaaactggatttacacctaaaattccaccaaatcaaaatttgactcctcaacacccaatttttccctagaaatggctcttggttcactttggtcatttgtttttctccctagcacagtccaagctttctcataagtcctaaatgacatttcaagctagaatgaactcactttaacctcctttaccacagaatccagatttaaccttccaatactcaaagcctcacgctatttccatcataacacca

SEQ ID NO: 105942 - DNA, 289 bp, Glycine max
  unsure (1)..(289): unsure at all n locations
tcctctaagtcacctgctgctgcagcttctgcatagccaactcttgtgcatgcagagtgcttttcanataaatgccaactctacgcgcaaatctgaattcacgcttaaatatgtggccttgtccgtgcttgtgtgcttaacacacatatggatcgtctagcgtgcataagcgtattctggcttaacgcacattgttcgcttatcggatgatctgaatcggagagcttgatgacttggagcggtcgcttatcaaacttgacaactgcatctcttcttggatctttcctcc

SEQ ID NO: 105943 - DNA, 400 bp, Glycine max
tctacctttatcctaactttcaaccacattttgtgtctttattcgccttacataaaaggccactcatctgcttgcacagatggaacaaaatcccaatgaccagtggagtatcctcatatggccttgcaaatacttttattaaagttctccctcttggtttcttggaggcagacaagatccactttgtgctatacaatgagccttctaacatcagcccactcgactgccctgcccaaacctctagaattataggagagaattatcataattgctgagatttaattcccttctctgctgcatatcaaatcatctttattctccatatccagcagcagccccttaaccttgctatcattcttcctcataagacgagcccattttcttcaagatgtcacattgc

SEQ ID NO: 105944 - DNA, 277 bp, Glycine max
cgcatgcatcttgtctgtggttatatgtgtttatacacgattttgacttgtttatccaatctgcgcaaatggaatggggcgagagtgattcataatctgcctatattgtgcaccacatatctgtcaaaatgtgtgcagcaaaattaggctcttgtgcagaacacggttgtgtattgttggttgtggaaaggataccaccaattgggctctggaccgtctctagtatatcccatccgtcataatgtatatgtatgtctatggacctccagtaaataat

SEQ ID NO: 105945 - DNA, 374 bp, Glycine max
tgggaggattgatggggacccggcgatgatatatactatgatatgggctatgtgggagtacgtgagctcagatggaggtgggcaacaggggatggtgggtttatgctcacattgtggatgtggaaaaatttgttgtgcaccatcgtccgaccgccacctagtacctcatgtgatgggcaccccataatcctacacgctggagatgaggaagtgttgacgggtgaaacttcctgtttctattgttgaccacatagtggtacctggagatatgtcgcgggggtcatgataccttggggacgtttggtggggtgctattgcccaaaaccaagcttgacctatcccgaccctacccggcatattcagtcttgaaaacc

SEQ ID NO: 105946 - DNA, 200 bp, Glycine max
ttgttgtgaaactcactacaagccttaagtgataaaccatgatgttaccatattcttatggaatattggagctctggaattgttctgggaataagtgtggggggttgttgttaattggacaactagcttcgtggctctgccttctgatgtatttcgagccatacttgatgtacaattgcatattgagtaaaaggtggaca

SEQ ID NO: 105947 - DNA, 392 bp, Glycine max
tcgaagggaagagagagacctatcacgagctcatagcatggtcgtgaatgaggagttagctgcttgctcaaggtccaaacgaaacttggctcaccgtttatgcgagactgagacccgaagaaacttgaaagagcaatggcggacacctactccgcccccgaggagatccacggacttctcagctattgtcagcatatgatggacttaatggcccatataattagaaaccgctaggaagtttgtattgtcgctcagatcttgactagttataactttctgaataaaatgagtttatcccatgtgtttactccaaggatcagtgcgaattaaatcactcccgcattttatctctagcatgcattcatttttctatacctactcctcacatttgg

SEQ ID NO: 105948 - DNA, 342 bp, Glycine max
tagacgaccttgttgagtcgagaatactttattatttatttgaacaagtttgaatatgatgtaaaagaaaaatgaatgtgaacctttttccccttgaaagacttgtaaaaaaaaatgttttaaaaatacttttaattaatatttgaattttttttattccttattagtatatatgtgaggggtagagggtgtcacaatttgaaccaaccacttataaggaagcaatttcctattctaaaaccaaggagttgatagtggctatgaataaagagatggaatccttccagaagaaccagacttggagatttagttgagctaccttgagtagcgggtgcaagtgga

SEQ ID NO: 105949 - DNA, 351 bp, Glycine max
tgatatgaggtagcgtggaacggtgagacgttctacttttgatactttgaccataaagaggttcctagatatctttgacgagggtctagagaccttgtggacattaggtggtgtgctactgcgcttaaccaggcgtgtcgaattccgatccatcctgggcgtaggcatcgagtgacatcctgggatgagcctatacacgctagctgctgacgttcaccagatcctatgaactaagaccacaagtcgaggatgcttgtatcgtggcttgccagctatgaactttcagagtaatatgggatatggcctctggtaatcgataacgcaaggtgggtaatccattacaaggcttaa

SEQ ID NO: 105950 - DNA, 368 bp, Glycine max
  unsure (1)..(368): unsure at all n locations
aagctagagcttatctcacacacncctctcataactaagctcacctcatggagaagcttccctaagaagacgtcataagaagctagagctgagctacacatacctctctaatagctaagctcacctccttgagatgagatgctagaacttagctacacacccnctattatagctaagctcacccccatgacaaagaaacatgagaatacataaaaagttcttattacatagacaactcaatatgcctcgaaatacagggctaataccctatactactataatggtcaanatacatcgcctagacgaaggaagaacctattctaatatntaccaaaaancaacgggctcatacttaaccccatggctcc

SEQ ID NO: 105951 - DNA, 303 bp, Glycine max
gctcactgctagccttaaatgaaaaaccatgatatcaccatatccttaaggaattttggagctttggaattgttttgggaatacgtgtgggggtttttgtttcattggataacatgttttgttggctatgcttcatgatgtattttgggccatacttgatgtacattgtatattggttaaatgttggacatgttgaatgagatgttgtttctcaaaggctacgtacgtaaaaaaaaaatcgaaaaagaaaaagaaaagcaataaagttgagtgaataagatcttaaatgacaaaagaatgatg

SEQ ID NO: 105952 - DNA, 306 bp, Glycine max
gcagctgcacatgccacgttatctgacagagaccactttagctacattttattccataagagtaagctacccggcccgagcatgatccggatgagtttcccattattccggaaaatagcttataaggggatctctcttcaccatagcacctgtgatgacggttgctccccttaacggattctaactcccctatgtatccatgccatgcgaagtgaacctacttccccgaaagatactgggcttttgctttgcccttatgttaactatggcacataataaatctgtgaacttggtgctcccacctgc

SEQ ID NO: 105953 - DNA, 338 bp, Glycine max
acacatgcacaatggcctaggatgcatgggagatcctgaaaaccactcatgaaggatcctccaaagtgaagatgtccagattgcaacttttggccacaaaattcgaaaatctgaagatgaaggaggaagagtgtattcatgacttccacatgaacattcttgaaattgccaatgcttgcactgccttgggagaaaggatgacagatgaaaagctggtgagaaagatcctcagatccttgcctaagagatttgacatgaaagtcactgcaattgaggaggcccaagacatttgcaacatgagagtagatgaactcattggtttcccttcaaacctttga

SEQ ID NO: 105954 - DNA, 330 bp, Glycine max
  unsure (1)..(330): unsure at all n locations
cttctgtgggcatctgacttgctgtcaatctgtcatacaccacagattctgccttcttctattttcagaatgtgaatgcctntaacagcacctttgtcaatgagtntcttcatgcctctatagtgcagatgtccaaatctttgatgccatatcctgactccatcttcttaggacgatagacatgtggaggagaatcttgatttcttggggtgtccatatgtagcaatagtctttgatctgctgtccttattagaacatcactttcttatttgtcaccaactttctgacttgtgaagttacattgaatccttcatacacagctgactgatg

SEQ ID NO: 105955 - DNA, 400 bp, Glycine max
cttcattaagaggcttctagcacactctagatatcttctcaaagatcccaacggttagattatggacaagtgtcttgtgaagttgcagaccaagtttcgagaagatccaacggttaatgaaggcttggaagcgtttttaccgaggcagcttcatgtagctttctctagaagcttcattaagaggcttcctccagaagcttcctcgtggcttctttgagaagctttctcaagaggcttctttgagaagctagattcttatctatccacacccctctattaactaaattaacttccttaaaaataattatggacgaaaataacgcaacaaataatcaaacatcaaacataattactaataatatatagatatatatatcagggtgttacaccaaccatgata

SEQ ID NO: 105956 - DNA, 371 bp, Glycine max
  unsure (1)..(371): unsure at all n locations
gccgctgcagctttgtggacgtaaatttgggattctatctctacngattgtgtgagttggagttatacgcactggatggaaggatgttggagagtgattcacaagccatagtgcagagaccgcaactaatgcatcaatactgggaattgctaatgttccaagaaagaagcaacacacacaagtccagagcaagatggataaaagagggngacctaaacacacgatattntcactcatgtttgaaatctatacagctcataatccagttgatggcatcgcactccgatgataagtgttagaatcagatatgatattataaatgcagtgacttctacttctaaataattaaagagctgatttgttaaataata

SEQ ID NO: 105957 - DNA, 397 bp, Glycine max
tgggaggagataaagaaatggtatcgctttctctctaagaaaagtatgtagaaacgaacagtaaccaatcttttagtcagtgtaattcacccatttctgctgttctgtctttcccgacttcgtactatacatagcacctgcaacttctctgcatagatgaacttttctcaagtttgattctcttcaaccacattttcacacctacacatttattattttaaagatctttgtaatttaaaacttggagtatatgtgtgtgtgtttttttttctctgtcttcactactttccttcctttatttcaagtacaatttgtagcatagactgttgcactaagccgataggttccatggatcaacccaatttatataatctttgatttcaaaatttaacaaaca

SEQ ID NO: 105958 - DNA, 396 bp, Glycine max
tccttgagaagattccttgagaagattcctatagaatctagagcttaactacacacacccctctaatagctaagctcacctccttgagatgataagctagagcttagctacacacaccctctataatagttaagctcacccccatgccaaaatacatgagaatacaacagagtccctactacaaagactactcaaaatgccatgaaatacaaggctaaaaccctatactgctagaatggccaaaatacaaggcccaaaagaaagagaaacctattctaatattttcaaagaagagtggacccacccttgacccatgggctcagaaatccaccctgaggttcatgagaaccctagggccttctttagcaactctagcccaatcctcttggagtcttc

SEQ ID NO: 105959 - DNA, 355 bp, Glycine max
tgagatgaggaagtgttgaagggtgaaactttctgcttttattgttgaccacagagtggtacctggagatatgtcgcgggggtcaggagaccttggggacgtcaggtggggtgctattgcccaaaaccaagcttgaccaatcccgacccaacccgagcatagtcggtcagtgagaacctgtgatgtacctaagcaggcgagctcctgacagtcaacagataaaaggaacaaagaccacaaagcaaggaggcttgtggtggctggccagctgtgaactttgattgatatgtgggttatggcctctggtaatcgattaccaagggtgggtaatcgattacaaggcttaaaaatgaag

SEQ ID NO: 105960 - DNA, 412 bp, Glycine max
  unsure (1)..(412): unsure at all n locations
gcttgagctcattggtgctgccccacatagctactcggaatttatctctgccatgcctttccttgcgagcacctcttgttcttgttcagggctcttgcngaagctacattttcatctcgtaactcgacacactcttttcagacgtctgtaatgactaacttgaattattctttggcgagtcttgcctttcctagctctgtttatagagctcagacttcttcatcctcttccggagcgttgaagttctcttctgtgattaatttcgacttggagagccaatctaaccctcgcgtatgaacantcagccattcatgataaccaccgatgatgccattatggatgcccctaagttctttatcttccttaaccgccttcccaccccttatngactctttntcccatattaaacttc

SEQ ID NO: 105961 - DNA, 396 bp, Glycine max
tttgaaatcaaactttgccactagtaatcgattacaggtaattcgtaatcaattaccagagagtaaaaactctagtaacttagaaaattttgagaaaaactcttttgaaaaacaaaactgtgctatgtttgttttttgaaaaatcttttcaatactttgcttgtgaagtcttcttgatttcttcttttgaatcttgaattcatcttttcttgaatcttgaaatcaaacttctcttgaatcttgaatcttctagatttcttctcatgaaacttgaaattattcttgatcttgaacttgttgactcaatcttgaaatcattctcttgggctttttgtcatcatcaaaactacttgaatcaacttgattcatcatcatgaagcttgcttctacacataa

SEQ ID NO: 105962 - DNA, 353 bp, Glycine max
  unsure (1)..(353): unsure at all n locations
tgttcatgttaagaatgggggattgacttttgctcagagttacagaaagagtacacagagtcattggtttggttggaggaactgataacatgatgcttactggtgaaagcttgggacatagtactgatcaattgtactcccagaagagactcataaaggtcttccttaaggcgcttggatctgcaacatacgcacctgcaaactctaccagatctcaacattctcaagacagttcattacctataactctaagcttgatttctaagaatgtagataagtttggaggtgacatttattattcncttgtactggtatgagtgaataatccacaaaaatctaccctttttctctct

SEQ ID NO: 105963 - DNA, 395 bp, Glycine max
tgtggtgcacgatggttccttcaaggagatcttctgccttccaaagctgaaagtattatgcttggaaccccttggagaactcatttccattggattagagaactcttggattgagcccttcctaagaaatctagaaaccttggaagtaatgagttcttttagttccataaacttggtaccacacacagtgtctttctccaatatgacgtatttggaaataagcagttgcaatagcctgttatatttgttcacatcctcaacagccacaagtttggttcaactcaaaagaatggagataaaatgctgcaattcaattgaagagatagtgtctaaggaggggggtgaatcacatgaggatgagatagtatttcagcagctaaattgtttgaatcttt

SEQ ID NO: 105964 - DNA, 379 bp, Glycine max
tgaatgactacatgagagactaacaaccatcttatggttaacgcgccgggccatgcctttctagtgcattatgcctttggacattctatgctagacaggatgcagtctgcctaaacctaaagatggatacttgcgctactgctaatactagcaaaccctatactaatcccatacatggacgtgccaccctatctcggatgaaccgtaatcaatgtggacattgcacaaacttcactctcacagaacttaataacattgtcacttacagcgcactgatactctgttcacaaatgaaaccttacacacatacagaaatcatgtcttggccttcacttgcaaaataaattacataccacattgcatatatcgatgtattgca

SEQ ID NO: 105965 - DNA, 426 bp, Glycine max
ctaagagcttccgttgttcaattactagcctctcgacatattatgcgcccgaatcggacatccgtgtgaaaagttatgaccatttgaatttctcgagagcttccgatgtttaatttcgagcgtatcgatatattataagcctgaatcggacctccgtgtgaaaagttatgaccatttgaatttcgcgagagcttccgatgttcaatttcgagcgtctctatatatgatgcgcctgaatcggacatccgtgtgaaaagttatgaccatttgaatttctcaagagcttccgatgttcaatttcgagcgtgtcgatatattatgcgcccgaatcggacatccgtgtgaaaagttatgaccatttgaatttctcaagagcttccgttgttaaattccgagcgtgtcgatatattatgcgcccgattcgga

SEQ ID NO: 105966 - DNA, 363 bp, Glycine max
tcaagctaacataattgactaaaagcgtgcttgttgtcaggtcaagaagctgcaaatgactgattaactgtgacacgagactcattgattggagtgaatgtgtatgagaacgtgtgtgaactgacattcctgcgtctgtcaataatctctagggaattactcctcttgacattatatgaactaagccttcattaggcattcagattattaacattttcagcgcctcaaactagtatctacaattaattaacaccccgacgttgatatccgatatatcgatgataccatcctccagttccgcggttcacaaaacatcaacataaagaatagttatgttccgagggtgaacggttcatctctgat

SEQ ID NO: 105967 - DNA, 388 bp, Glycine max
tgccttgccccttgatatatgtgagggactcatggtcactatgactgacaaattccttgggataaaggtagtgttgccatgtctttcaaagcccgtactaacgcatacaactccttatcataagttgaatagttaaaggtaagaccacttaactcttcactaaaataagcaattggatggccttcttgcatcacacaggcccaattccaacattataagcattacactcaatttcaaaagatttttgaaagtttggcaacgcaagtatgggggcattagttagcttttgcttaagaacattgaaagcttcttcttgtttctctccccatttgaaaccaacatttttcttgagcacttcattgagaggtgctgccaatgtgctaaaatc

SEQ ID NO: 105968 - DNA, 391 bp, Glycine max
  unsure (1)..(391): unsure at all n locations
tggatagagtgcatnaataaagacgtccagcatgcattcttggtttaattagagtgttgcaattaataactccaccactcacatctagttgatataaatatgatataaccaaaacagacatgggtcgatagtactattatacctaaatctgaccccacagacatgttgaccattctcattgaagctgtcggacattgcacacgatatcacatgtcaatatccagtaaccatgttgagtctgacaactacctgatctagtgatacatatgaatgaaatgcacatatttgcttgactcctagatcatataatatgtttctttctctctattatactactatatcaaagaaatcattnntttgatntgtgacnactatatatattatatgaata

SEQ ID NO: 105969 - DNA, 152 bp, Glycine max
tttcttcatgtattgactcatatgtcgtgcgtcgcatgatcgcaacatgtatgttcagaccttccaccaattaaactctctatagaagctagactttatgtctttatggtttaaacttctagttctctgtctcgaaccatcaattgcgtgag

SEQ ID NO: 105970 - DNA, 65 bp, Glycine max
gaatacaactcgcacgcaacgagtgcttgtcacggagaagcccctgcgcgttccatagagcatgg

SEQ ID NO: 105971 - DNA, 482 bp, Glycine max
  unsure (1)..(482): unsure at all n locations
gtcatgctataactataagattcctgtgcnggtatcattgttttgcatgactgatggctaccttggagctggagattatggttgaatctgcctcaagtgttattttgaaggtaattgagataatcttctgttgttgtgtgtctattatatacctgaatttgggttcaagactagttattcaacatgtggattatctaccataagattgttctaataagtgattttatcatttgagcagatgatattatcatatgaccttgcttttgcttcgattccgctccttaagttcagtagcagcaaagtgactagcatctcaagcattgaagaggtgtgttccttcttgttgtggatcatgnctataagtaatactgaactgaaaatgtctacttctaaattgattactaggttacatgaatgtgatttgacactngcatcatatatcactgtagtgtatttttcagctatatatttggtgaatatca

SEQ ID NO: 105972 - DNA, 488 bp, Glycine max
  unsure (1)..(488): unsure at all n locations
tcttatcatatattccttgcattaactttaatgaatntttaattattattgtttattataccaaaacacatcctactcattcattatttaatttatagtaagaaatctcttcataagaattagcacgtctctctcccccttccaccaattgaatcagttgattcttttctaaaaaaaattgtaatgtgagagggaatatataatgacagtcaaactatcactaattaagatattgcacacgtaacacattatgtgacgaattatagtacataataatttggtttaaaacattatggagtcaacgaggttatgtaacgggttgaagtgagaaatttgattctattttatagctgttaatcatgttctatcctgattcctatgggatacatatggtggctctcatagaaacatatgtatccctttgagcaatcgtgatatttaccaactgcattatattcattatatctctacgtttatatgataggagc

SEQ ID NO: 105973 - DNA, 501 bp, Glycine max
  unsure (1)..(501): unsure at all n locations
tgctcatctntagtgtacatattgctctcaacatgtngaatggcatgtcaaatcatntgtaggagttacatcngactatatcctcggatttcttggcctgtntacagcagctntatctctgccaagaccagcggattgagtgtngtccatgccttctttagttgttctcaagactaaaatatgtgtgtctttagtttttttaagttataaatagcattcattnttacaatgatataattagggggcaatgattatgtgtgtaaagcttttgaaggtacgaggctttcgtactccaagacattngcttttgcattaaatgcatttttgttattcttctcttacaatattatntagtttgaattcaaagggttacgagtattcttgataacactcattgcacatatcttacaacaccactataattaaactcatttttaaagactagttaaataatggatggaattcatcgacttgtgacaccacgtgccacatatcactgaa

SEQ ID NO: 105974 - DNA, 419 bp, Glycine max
  unsure (1)..(419): unsure at all n locations
agtgaaattgagaatgggcataaattggagcaaactctcacctcacacaagtctataacatcgatataaacttgttcaaactggatttacacctaacatatcactgaatcaaaacttgactcctcaacacccaagattaccctagaaatggctctttgatcactntggtcatttgttgttctctctagcacagcccagaacttttcataagtcttaaatgacatttcaagctaggattaactcactctaacactcaaataccactaaatccagatttggccttccaactctcagaatactactctttttccactcacaacaccatactctcaccttctaaccctacgttaatgctacgcttcatctctaatagttgtccataagtnatttcagcacatatacatcacaagcatcatcat

SEQ ID NO: 105975 - DNA, 313 bp, Glycine max
  unsure (1)..(313): unsure at all n locations
gagctcaacgtgtatagaacgatcatgttgctttggatttattacactctaagcacgcacaccgcttatcacaatataattacatagtcccttcagcagaaaaactgagctcctctactattctctccatccacaataactcttgcattcctttgaccatagccctatattcagcttgagcggtacaatgaaacaactntttgttgttactcttacaagctactacattacctcccacaaaggtgagatactcagttatagatcagttgctatacacctctgtgccccagtcacaatcacaatacccactgac

SEQ ID NO: 105976 - DNA, 379 bp, Glycine max
  unsure (1)..(379): unsure at all n locations
ccttgcactcttcacctcatccttgaattggcctattattgaacctttctgatctgtcatgatattacatcataactttcttcttaatttgtgtttgcaaattcagtttctttaatttggcagcatcgcccattaagaactcatcaagaatattacccttncctcccttataggnttaacacacattactttatcaaagttatctacntccacactctgatgtatgacgaacaattgcctaccatcttccttatttgcatcatgattagctaccactttcacctcactaagatttgggccacattcttgaacatcttctatggcaatatctttgacatcttggaagcgacgaatgctctcattggctcaccacctacat

SEQ ID NO: 105977 - DNA, 345 bp, Glycine max
  unsure (1)..(345): unsure at all n locations
tcgtatgtcgacatcacgcaagttagcttgtactccacaaactatggcgtgttatacttagtcttccccacccatttgaaaggccaagctctccattggcttgctctgttaccttcaaacatagtagattcttttgaataggtggtgtcttgcattggcacccaattgtgaccaatcagcctcacaacctaaccttgatggctttggtcaacatacaccaagagaacaaggagcctctgtgacattcatggaacatcttggatagacaaccaacactgcccgaaactatgaccttgcggctaccatgcactaccttatacaacttctaaccanaacctttgtaac

SEQ ID NO: 105978 - DNA, 406 bp, Glycine max
  unsure (1)..(406): unsure at all n locations
cagcacaatatggacatggcttccgatcggaaccagcttcagggtatgactaaacgagagcatgagtccattaaggaatatgcccaaagatggagagatctctcagcccaagtcgtaccgcccatgacggagagggagatgatcacaattatggtagatacgttacccacattctactatgaaaagctgataggctacatgctagctaactatgcggatctcgtcttcgccggagaaaggattgaatccggactacganaaggcaagttcgaatatgctgccaatatggcccccaacaacaacagaagagcctcagtatttgtgcgcgaggaataaggaatgagatgcccacgccgtcaccacccgcccaacatggatgaaagcaccccataatatctgaagctca

SEQ ID NO: 105979 - DNA, 531 bp, Glycine max
  unsure (1)..(531): unsure at all n locations
ctccttgctgcatatttccgctntgtncatgtgtgcatctggtatgctgccaattacttccgatagtgaataatggcttgatctgctgatgtcgacactctcctcatgacttgggtctcttctcatatgtgtttcctctgcattgaagtgttcgtggatatcaacctctcctggttcatgatagaataccatctcagaaggatcttacactcctgcccagaactagttccgcctcaatactgacaagcattgctctccttaacttgtatcatctccacataatcattttctccagaggagtggcgttcatgttcaacaacatcagacacatggcaatgttagaataaatacagttctggagacaagtcttgttactgaatatctgtcatcctatcaatcgaactccagattcatattctggacagaacttaaccttgatcactacgtcatctgttgctctggatgatgatagctgctctccgagcatcttcaatatataacagttcatttaccttttgttgataccaatct

SEQ ID NO: 105980 - DNA, 454 bp, Glycine max
  unsure (1)..(454): unsure at all n locations
tgttgctaaaatctgggatgaatctctnggtataacatgtatgtccaagataagaacatactttctacatagaagtggggtaggaagagaagtaataacatcgatcttggccttatcgaccttaatacctctatttgagagcaaatgccctaagactgtaccttcatggaccataaaatgacatttttcaaagttaagaacaagggtagtcttgatgcatcaatcaagaactctagaaaggctatccanacatgcatcanaganagaacaataaacactgaaatcatcaacaaacacctctatgcaactntctaataaatcagaaaagatactcaccatgtacctttggaaggtgtcaggagcattgcatatgccaacagacattctggtgtaggcaaatgtgtcgaatggcangtgaatgttgtcttgtgctagtccttcagtgcaatatgaa

SEQ ID NO: 105981 - DNA, 391 bp, Glycine max
  unsure (1)..(391): unsure at all n locations
tctagcacacttcagacatcttctcatagatctcaacggtcagatcatggaagcgtgntttgtgaagctgcagaccacatttcgagacgatccaacggttaatgaaggccaggaagcgttataccgaggcagcttcatgtagctttttctagaagcttcattaagaggcgtcctctagaagcttcctcgtggcttctctgagaagatttctcaagaggcttctntgagaagctacatncttatctatccatccctctattaactaaattaacttccttacaaataattactgatgaanataacgcaacannatatcaaacatcacacataattactaggtatatatagatatatatatcatgggtgtacacatcatatattgagacgctcg

SEQ ID NO: 105982 - DNA, 562 bp, Glycine max
  unsure (1)..(562): unsure at all n locations
tactaagctcttcgtcgcttncgtcttaggtagtgtctaacctcatttctcttttgatagcgtaggctggccttaggttagacgacatttgtgaggaaatttttgcgtgatgttgaagacgaacttctttcgcatggccgtaagcttcttccgcgcgtgaaagacacttcgtttgtgtctggtggaagataattcttccgtgtgtatccgcggaagaagtttcttccatgtgatccagagggaaaaaccttcttccgcatgtanaatatgatacatctttcactcgcggaagaaccttcttctgcagagttcgcgatagaatcttcttccacatgcagacaatatatcccgcggaagaacgttcttccgcagactctcgcggaagaccgttctttcacatgcacgatttgtcatccacggaagatctgtcttctgtgtgcccgcgatagaactatctcagcantcctcttttttctgatataggttctattgttaaatatgactgaccgcatntatcgatatatagtagctttttattattgtattcaatcgatatgattga

SEQ ID NO: 105983 - DNA, 462 bp, Glycine max
  unsure (1)..(462): unsure at all n locations
tcactcctacattccatctctagcatgcatgttctttctntacccactcctcacgtntggttttntagggaaaaacaccataactaaacgcgccacaaggtatccctatcgcaccagatccaaatctagaacgatgggtgatcaagaggagacgcangaacagatgaaagccgacatgtcggctctgaaagaacanatggcctccatgatggaggccatgttaagtatgaagcagctcatagagaagaacacggccaccgctgccgctgtcagttcggctgccgaagcagacccgactctcttggcaactgcgcaccatcctccctcaaacatagtatgacgaggaatggacacactgtggcacgatggcagccctcacctgngatacaaccgagcgggctacccttatggattgccgccaactactcaccacccgtcttgcaagaagatgcgggccacatt

SEQ ID NO: 105984 - DNA, 298 bp, Glycine max
acaattggacacacagcgtcagacacacacgatacagagacaggctcatgccaataagaaaaagacttgtggtgtgttatctaactcctacttgttgaactctaaatctctcaaatgaatatggatcctacgttgttgaataatataatataataccaagttgttgtaaactaatgttactagtgaaaacacaattattatactagtaaggaacagtaatataatagtggaacttaataatacacaatatgtgcttatactcttcttctggtatctaaatcagaaatgcatgcatggt

SEQ ID NO: 105985 - DNA, 338 bp, Glycine max
  unsure (1)..(338): unsure at all n locations
ctttcaacttcggaagaagatcaacctggcttctcctgacaaagaaatgatatcccaattatatntatcaaacaaacattcattttaagtattatcagcacaccacaaacattacagaaccaaatagatcatcaatcattggcaaatattattcaatcaagggtattattacagtatgctttactcccaactaagaattaaagggtcctatgactatactccctccanaaccaatataaaagtgctattatcactgcgttnttaaattcaactattcaagtctacctcaatccttnntatagaacaagttcaatgtaactactctaacttgttctata

SEQ ID NO: 105986 - DNA, 348 bp, Glycine max
gagaagttcaagtcaacgggtcatcacagtccgaagagagtacgacgaactgacggacgtcaatatgggcaccgccgtagccttggaatgagaaaccaatatggcccgaaatgaagaacacgaccgatacaagtctcgaggggctttatggaggtgcaaaagtgagctcaagctcttaaaagatgaaacggatcagtcgacgattgaaggcatgatcttgaaggacgagtataaggctggccttacgtcgaatagaaatttgtcccggcagttaagcaagactgaagggaatatgtgggccatcatcgatgagtacaaagagaagctgaacctatcagcgactcacga

SEQ ID NO: 105987 - DNA, 355 bp, Glycine max
  unsure (1)..(355): unsure at all n locations
cagtgacgtggtacacanatttggaagcctcttaggtccggtcgtggaaagacttggcaactgctttcattatgcagtaccaatacaacacacatatggctcccgatcagaaccaacttcaaagcatgagcaaacgggaacatgagtccatcaaggaatatgctcaaaggtggagagacctagcagcccaagtcatcccacctatgactgagagggaaatgatcacgattatggtagatacgctgcctacgttctactacgagaagctgataggatatatgccggccacatttgcagacatcgtcttcaccggagaaagaatcgagtactgactgacgaaaggcaaagttgaata

SEQ ID NO: 105988 - DNA, 426 bp, Glycine max
  unsure (1)..(426): unsure at all n locations
cactggagctgacccatcaactgtcctaactctttcagaccgacgactcctaggctcttaatcttgacttgatagaacctctcttaagcgaagatgtctgactcgatcccatgttntactaaagtggaataaaaaccagtgcgaatcaagactccgacatctatcacatgtgaaatggatgaatgcatgaagaaatgtgtatgacccagatgcattttatggatacgagaacctgtgcaatgtatctctttcttaaatacaacattcgggcagcatagcgctggatgcacgcatttaagaaggtgacacggaccttccgtcttctcgtgacanagtgaggggatcaagacgcaacccatgcatgatgacatgatgtagatgcgaagaagtaatgggaacaaggagatcacacaacatgcaatatcc

SEQ ID NO: 105989 - DNA, 240 bp, Glycine max
gtgagaacctgtgatgtacctaagcaagcgagctcctggctgtctacagataataggaaaacaagaccacaaagctaggaggctcgtggtggctggccagctgtgaatattgtgtaatatgtggatggtggcctcttgtaatcgattaccaagggtgggtaatcgattacgaggcttaacattgagacaagaggcttagatggtctctggtaatcgattaccaaagtgtgtaatcgatta

SEQ ID NO: 105990 - DNA, 342 bp, Glycine max
  unsure (1)..(342): unsure at all n locations
gtacatagaatgtgaatgtagcacaagggtggaaatgagccaagccaagccaagctntactaggcttgagctcggcttgagttgaatacgtaaggcttgagcttggctcattacctgtcatnaggctttttctaaggctcggctcggcttacataaaagcctggcttgacccactagcctatntaaaagcttgcttaaagacatctcttgataattaattattttaaaacctagtgaaatactaactaaaaaaaagaaacttataaaatcttgtataagtaatgtacaaatccaaacataattgataaacaatatcatatcgaattcaagtcgttaaagcac

SEQ ID NO: 105991 - DNA, 248 bp, Glycine max
gaccacagagtggtacctggagatatgtctcttgggtcaagagaccttgcggacctcatgtggggtgctgttgcccataaccgagcttgaccaatcccgacccaacccgggcatagtcggtcagtgagaacctgtgatgtacctaagcaagcgagctcctgtctgtcaacagagtaaaggaagacatgaccacaaagcacggaggcttgtggtggctgaccagctgtgaattttgtgtaatatgtgga

SEQ ID NO: 105992 - DNA, 273 bp, Glycine max
  unsure (1)..(273): unsure at all n locations
atcatctgcattcaatagttgacttactagttgattgaactggttaatgtggtcatgtagatctcctctcatctcacatttgaattgatacaactccatcttcaaacatatgcgattggttagcgactntgacacataaatattttcaagcttctcccacaaggcttntggtgttgtctccttcaacacgttatgttntatctcgggagaaagggctaaccgaatngtgttcacagctctcctctggctcttagtccactcaggttcatttat

SEQ ID NO: 105993 - DNA, 317 bp, Glycine max
  unsure (1)..(317): unsure at all n locations
caattttcgtncgcagaatatgcccccatctttcggcaatacattcgaagatgccccttcggacatatcgtccctctgtacttatcaaagtccggtactttgaacttngggggaatgacgatgttgggcacgagacataaatccgctaaatccgagaatgggtaattgccgaggccgtcgactgctctcaacctctcttcaagcgccttaatctttcccttatcttccgcgaagggaacagattcntttacgggtgtgggtgaggccgagatatagcggactatgttcagctggggtagttcatgcgaggatggatc

SEQ ID NO: 105994 - DNA, 389 bp, Glycine max
  unsure (1)..(389): unsure at all n locations
cattatcatatgcgcanggtggcaaatctaccaaattgcactatggaaaacccatgtgacccaagctcttgttagccactttaatagcctatatcacanaatggtatataagccaatgagccaaatgtgttctaggaaatgtgagactntgccttntgtaatacccatcaaaactacaacagatccccacatattacaaaagtcttcaaaaatattntcaaaagggttaanaaggataaaagaagagganagaaagtgtcggacctggtgtagtaagctattgtgaaccattctttactggtaggacttaacacatagcgtagttggtgtggcaagctatatgaaccacaaacactttagtatgttagtggtccaccaatcacattaca

SEQ ID NO: 105995 - DNA, 431 bp, Glycine max
  unsure (1)..(431): unsure at all n locations
tactcacgctacaatactangaagaaccatagttaagtgaatgaaaatggctaatgaatgttgagaatgtctccttcaaccctttaaaccctaatctcacttctctaacctaaactctctnggtggctcagnttctgttgctctagcctttctctctacctatgttttcgactcatctccttagtttccgccaactctagtngtttaaaggctacttgaacgtttcagctactgaaggctcgcttagcaagaatggctcattaagtgagaacgtaatgaatttgacttaatgagctgggcgcgctgagcgcgagaagagacaaacaactctcttggcaagcttgcgacgcgctgggcaagcacatctctgactgatcctcttctanggttttccagcatgctaagcgagtngcatgcctcgcttaacggat

SEQ ID NO: 105996 - DNA, 199 bp, Glycine max
  unsure (1)..(199): unsure at all n locations
ctcatgtgcaccctacncaatctccgggttcgaagacaaccttatttctaccttcgtggcttgttagcatagcttatattcttctctcaatttgattnttgactctctcatgaagcttcttcacatagtctgcctttgctagaccttctctatgccttaaaacataaacattatgcatangcaaaagatcaagaggagt

SEQ ID NO: 105997 - DNA, 305 bp, Glycine max
  unsure (1)..(305): unsure at all n locations
atatgtaataattataaataaattcngtcaatttatcacagacttcgacaggtgttatcgttgatttcacacgatgaataattacattcgagtgatttacacaagaaaataaacatattaatctacgtaagtatatagttaacacaagtgaaatactatatcttattgtgagtatcatatctcaaatgtgttcttactatatgatatctagatggtcagantattaaatagaaatatatacactttagatacaacttgtgacacttatttacaacaaaataagagctgttatattctcttgacag

SEQ ID NO: 105998 - DNA, 373 bp, Glycine max
  unsure (1)..(373): unsure at all n locations
tcacaaaccctcaaagaagtgttagatgttcgcgttcggagaaacacacctgagtggtagaaacgtagcttgatttgctggaacgattgttgagagaaagaacacagagcacaataaggcttctattttcttaatcaaacgttggtgtatgttgccaatgatgagttaagcttatttatagtttctctgctagcttgtaaagcacgcaacaataagatgagatataggagtattatgtttgtattnttatacaaaggacattagccgtcatatatagtataattaaggcttataaatagatagttattctctttcaaataagataatcatctctgaaatntaatatcttgaagatagcttgaattacttatga

SEQ ID NO: 105999 - DNA, 272 bp, Glycine max
  unsure (1)..(272): unsure at all n locations
ggtgccttatggtggaacaacaacattgatagggttggaagatggaataggcattgtcaagtttcttggaggggaaaagttnttcattactggggcaactgggtttctagccaaaggtattttgtctaatatatatactctattgtggagattagcgtcttaacgttactcaatggtttaattggttttgactatgatatataggtgagtagtcatttgtctgctgttaattcagtttgtattgagaagattctaaagacagaaccagatgt

SEQ ID NO: 106000 - DNA, 485 bp, Glycine max
  unsure (1)..(485): unsure at all n locations
ctaagtnattggtgaanacttttttaaaaatcgaaggaagaagagtttctaggtggatttcatggattataatcattcgtccaactcttaatgganaacactataagaatattgccgctaaaaaagattataaaatatatacatttgntntctttcttaccaaatgatccataaacaaatgtctctatttatgtttattttnctctcttttataagataaacataactcttaataataaactagtatagtcattcaaagataattacactaattgagaagtgcacatattggagcgtctatggttgacccacacaccacaattagagtggccagatctcaatttggtccaaagttgctattgactaactatgacttgatgtcagatgnctcattatatatacaatctattcactttcttttgcttgactcctatcaattattcccaatactttaccgaatcacatgaatattcgctctttcataa

SEQ ID NO: 106001 - DNA, 309 bp, Glycine max
cgccgacatgttctgcgacgagatgctcgacctccaacacgtcgccgccttcctcccttgtactaagatcaacgcctctgctgattcctttgtcactgttggcacccgccagatcgctggagagtcacgcctcaacctcctccaaaggaacctctcgctcttcggcgccatcattccgcctctcatccgttactcccccaacaccattctcctcatcatttccaaccccattgacattctcacctacgcgcatgcaagaaatggaggataaagaaactcaagtatgcaaattggagaaaaggtcgatga

SEQ ID NO: 106002 - DNA, 373 bp, Glycine max
tggcgagccttctccttcttggaaggtaccataggatatggtactttctcaccttcattcacaactatatctcttttcttctctctagctggttcacttctactcctctcttcattcttatttgtttcatcgtttccatcttatgcatatacgttatctttatctccttctatgtctctttcttggtcatctaatactctattctcgaccactattcggtgttctttttcctgagtgctgtcacctctcacatcatctctcttttattagtacacttcttttagcagcttcttcttggatcacactatcctatcttccctccataaccttactcttgcatacagcttgctgtctcttggatttttctgttttt

SEQ ID NO: 106003 - DNA, 526 bp, Glycine max
  unsure (1)..(526): unsure at all n locations
tcagctgtgccatatagagatgagcatgtgatggaatatgacagattatggtagtcagttcgtcagatcgattgtgaaggaatgcattaatcgtatcccgctgaaagtgtgatcctctaaatttgaaagaaatggctatcatttagtactgattcttgcgagaaatcttgaagtatggatcgaatgcatgacattgaggatgatgaaggccatgtttgattgtgatagccacttatccaaaaagctgaccatgtgctngaatgaattatcccttgtacccaggatgaagttgaatgaattattgatgatngaaccctgagcctatacagtgntatctcctgctaccttgacttangttgtangagagcatcatccataggaagcgcggttcanagcaaatttgtcanaattnnggggagtaatatcaaggtannattgttccacattgtggaggactgtgtagaatggaatggcatagaaacagatacacacactattctgtcataccatatatctttgatacatt

SEQ ID NO: 106004 - DNA, 399 bp, Glycine max
  unsure (1)..(399): unsure at all n locations
tactcaagctcgcacatcgaagaaatctgcaacatcttcagactnggggtcatgtgtactgctaccctgccagccacgataccttccatgaaggaagtacttcaaatattgctcacctgctgcaatctacttaccaatggagagaagaatgctggtttctatgattctattccacgtcttaagaattcaacatgtgaataccaggaggaatactatactgatgacgattgatgattactcggtagctccgatcacagcttgagtgttctatctggtaataatacagacaggtgatatacttttaacatatgggctagtcttgaagtcatactagattacaagtaaactcacagtctagctactgtataactatatagagtataacatacatcgactcac

SEQ ID NO: 106005 - DNA, 372 bp, Glycine max
  unsure (1)..(372): unsure at all n locations
atcatgcagatgggtntgtaactacctcatgtactcctcntatgactatgacatcatntctggtgctaaactgctgggagttggaggtcatcttctcaattaaatttctggcttcagcangagtcatgactccaagggctccaccactggcagcatctatcatacttctctccatattactgagtccttcataaaaatattggagaataagcttgtctgaaatctgatggtggnggcaactggcacatagtntcttaaatctctcccagtactcatacaggctctctccactgagttgtctaatacctgagatatccttcctgatggctgtggtcctggaagcaaggaaaaatttttctaagaatactctct

SEQ ID NO: 106006 - DNA, 277 bp, Glycine max
  unsure (1)..(277): unsure at all n locations
ctgagatgangaagtgttgagggtgaactcctgctttattgtgaccacgagtggacctgagatattccggggtacgaaccttgggcgtcagtgtgggctattgccanaccaagcttgccaatcccgacccaactccggcatagtctgtcagtgagaacctgtgatgtacctaaacaggcgagctcctggcagtcaacagattataggaatacaagaccacaaagctaggaggctcgtggtggctggccagctgtgaatctttgtaatatgtggatgg

SEQ ID NO: 106007 - DNA, 470 bp, Glycine max
  unsure (1)..(470): unsure at all n locations
ttattggagtaggatgttaaatctttatgtgaagaattagttctttataaagaatggccaagatctacatccacttaaaaatanataaattttttaatctcttcacaaaatcgatntgcatccaattcttgtaggacttacanaanatganttaagatcttaaaatgagatgtattattagactaaacaatggaggaaatcntgagagtggtgtggtgccgtgggatctacatacaagatggctaagatctcaaaatgaaatattctatcggcgatgggttaagagataaaaggagttaaatattctctcaagaatctatatatntctctcaatttttgtacaaccaactaagaggaaataatacaataaagttctttcctttcactttttttcctttctatacaacgtagtaaatcattccagtttatcacacttctactcttctcctccgcttgtatgtacataacat

SEQ ID NO: 106008 - DNA, 384 bp, Glycine max
  unsure (1)..(384): unsure at all n locations
gacataggtcaagtgttcgcgatatgctaatatgatgttccgagtaccttggattttgtttaccatgccctcctgatntccagctgggaaattggcgagtggaggaacgctccggcatttacgcgacgagcataatttaaacctttacgggtttaaaagctctatagttgggcctatgctttagagtttattccttttggtaaagctttgcgtcttttgttntgaatctataatacaaggatctttcttcatctgttcctggtctctacccattctcattcattngcatggttacttctttttctgatacggcagatccgatgacgagtccaccgattgtctaataccatgtgacccgctatcgacttcgatcgagatatgtat

SEQ ID NO: 106009 - DNA, 321 bp, Glycine max
agtggaccaaagagagggagtgacgtcgaaggtctgggttatctttgctgggttcatcttcaaagcttatgtgaaaatcattatttcatgcctttcatttgaactgcttgatgatcaacaaagttaaagaaagtcttctcgttgagaggataacgtgatagctgtagtctactcacattactattgaagtaagggtggtgttctgtactactaatccctttaggggagcgacattactagcggttggctgattctgttgaatattaaagcttaaaaactgttactggtgtataggtggtaagttgtttctataacacatcg

SEQ ID NO: 106010 - DNA, 406 bp, Glycine max
  unsure (1)..(406): unsure at all n locations
cacatgtggtactacgtggcggtctggcgatggtgcacaacaagttgtgcacatctactatgcgcgcataaacccaccatccnctgtagcccacctacaactgagctcacgtactcccacgtagcccatattctcgtctctctcaacaccgggtccccatcaatccttccaagcttgcgcaacatcaaagtaatgcaacattcaaacagcacatactatcacagtcaagaaaacagagcanaggcagaaaactctgccagaacaccaaccaatatcacagcatttctcacttatagaccccaagaacaattccttcgttccaattcgataaccagtggatcgactccaaattattactggaagtctctagtacataagcctacgtctntgaccgtaggatctacta

SEQ ID NO: 106011 - DNA, 260 bp, Glycine max
  unsure (1)..(260): unsure at all n locations
atgatcgatcgatcaccactccgcgtctgactaaagactctaaagaagcgctcctaggaggcagcctagtatctctaactgttctctataatttcatacttattaattgtgttgaattatctcatgcattcgcctaaccatangaagctctacatgccatcattggctaaccagactgcggtcaaccatacgggccaggtgcagttgaacacaacttgttagctactaccaagtacaccctgcacctgcagtgctaagac

SEQ ID NO: 106012 - DNA, 214 bp, Glycine max
  unsure (1)..(214): unsure at all n locations
tgtaaagatccaagtacatttggcatacctcgtactatatggaacaataagtttgacaatgccatgctagaattaggagcttctgttagtgttatgactntgtctatttataattctctatctcttggtcctttgcagtcaactgatgtggttattcatttagaatataaaagtgttgcctatcctactggtttcatagaggatgtcttagtta

SEQ ID NO: 106013 - DNA, 405 bp, Glycine max
  unsure (1)..(405): unsure at all n locations
tgataacataagatgatgacanttgtgatgattaatagctcanaggtcaatcaaagaatgagttcaagatgttcaagatagaatcaagaacactctaagattcaagaggaaagttgaagaacacttcaagattcatgaggaaagtngatttcaagaatcaagaatcaagaatcaaggatcaagctttcaagaatcaagatcaagattcaagactcaagattcaagagtcaagagaaggcttaatcaagataagtatgataaggtctgttcataaactgagtagcacatggatttttctcataacattgttaccaaagaagttttactctctggtgatcgattaccagattattgtaatcgattaccagtagcanaatggatttgaaaagttntcaactgaattac

SEQ ID NO: 106014 - DNA, 382 bp, Glycine max
  unsure (1)..(382): unsure at all n locations
tctcctagtagcttttgtgtaccactggcagatacaggttctctgttattactctaaagaaagatgtactggactcgccgtcgtgtcgctgtatagttccctgcgacatttaacaaagacaaaagttctttatctcttgaaaatgggaccggaagaatttattaagactgtgaattgaatgggctanagccaatacatcatgttcaacctgtgtaacaattattggagaatcctccttaccacactaatcatganaagagaaactgacctatttaagcctactcagggtacttgcactcttgcaaacacctgataatagctcatcgcatcccaccttcaccactttnacaatattcgaaaccctttgttgcgctgctataac

SEQ ID NO: 106015 - DNA, 411 bp, Glycine max
  unsure (1)..(411): unsure at all n locations
atatatnggtaatcgattaccagggtatctgaacgtggaaattcaaattcaattgtgaagagtcacatcttttcatacaatgctttgtgtcatcgattacatgtgtatgtgtatcgattaccagtgaccgttctgataaaagtcagaatgaactttccatggtttctcaaatttctaaggtatactcttctatggtatctgactagacatgaaagtctataaacaaacttgatgcattctttcttttcactttaacttttgacactttagatattgaacttgctctcatttctcttttcttgccaaactttaagtttatgtttcaacctgtctctgaaaacaaagggcttattttatctctttcttccaaagattacgagcaaacctgatctttggtcttctccttcaaac

SEQ ID NO: 106016 - DNA, 528 bp, Glycine max
  unsure (1)..(528): unsure at all n locations
ttatactaagctctcaggagctcctagttataatagaacatgtgtacacttgttgtatcttgatgaatgagagtcttngagacacaactcataagtcaacttctcttcctctttcctccttcaatattgtgctcgcccctctctctttctctccctctgtcatttgctccaatgaagcatcctctccaagcttcttatccaaggctcatcttggtggtgaagtttcttcttccaatgcttattccctagtggatggcatcgcctcttacctcatctcctntgtcttccgctgcatctncacggtgggaaatcaccattaaatgacctcatagaagcttaaagatccagccttcatagaagctccacaagcaagctgtcattaatggtattagacacaagagcttcagtatgggctcttaaacctcattcaattttctgcttacctattcttcaatggtgttctcatagttctcatgtatctccacatgcttggataatgttttacatgatcttatagttcacgataac

SEQ ID NO: 106017 - DNA, 484 bp, Glycine max
  unsure (1)..(484): unsure at all n locations
atcatatatggagtatttagtataaataaggcttagagtntagatatctcaagataaagaaaatgactncaaccactcacatattaatgaaaagtttcattaacaagatgatgtatcataatataatgcaatcagacagatattgaaagggctacataaaaactgatatctccctaactatatcaaaattaaattcccccctttcgcatcaacanatacgaatagacaatggaaagatgatggcgatgacttattggagtattgatttgtattgaggtaggtgataattacacgctagacgcacaatatttctattacaacaaatactataatatatattagtggtgtaaagacaagataacacaatgtaagctgtagctcataacaaaatctcgacactggtatgatacataaacacttgtacaaaatcaatgatatgcatcaaaggaccatcatagtatatcacacttgtataagtggatac

SEQ ID NO: 106018 - DNA, 274 bp, Glycine max
  unsure (1)..(274): unsure at all n locations
accatggagatgcacacaagataaggagaagatgtttatgaggcaccatccactanggaataaaccatggaagaaggagcttcaccaccaagagagtgccttggataagaagcttacataggaagcttcaatggacgaaaagaaagagagagagagagggatgagtgagcatgaaattgaaagatgaacagagggagagaagtctaactctgaagtgtgtctcacaagactctcattcgctaaattacaacaagtgtacacatgcttattttat

SEQ ID NO: 106019 - DNA, 340 bp, Glycine max
  unsure (1)..(340): unsure at all n locations
tatatctgtattaaaatctttcacgtacatctgatgtttatgcaggagtcactctgtctaagataacttaactgagtagagactagtgctctccttcttgcataccaatattgtactcctcactcagaatcaaattcatacttctaaagtcatgaccttatatctaaacaaattactatatntatttctcctaccaatatagagatttctccattcccatctccacaatcaatttgccttcctctggttaccaatattngacaccgtgacctctatggctaaatcaatgttgtataatctagtatactccctatgtatgagaataagccacttacaccca

SEQ ID NO: 106020 - DNA, 426 bp, Glycine max
  unsure (1)..(426): unsure at all n locations
aaacattcngaacgttcggaagccctcgctagatntttcacggaacaattttccaagcaattcaaagaagagaagtgcctagggctggaccctntcttctgcattcctccctattatagcaaatagtgaggtggtgccgccagctcgccagcgagctcactcgccaggaagcagggtgcttctccaaacaaccgctttggagaatctttggaggccaatggcctggtgctttgcccccattttactatcacccctctgtgttttgtatctttttcgaagtacgaactacaattcgaacaactgttttttcgatgtaggacctgcgatcatatatcctttgactcgatgacgacctactatatcacatctcatgattcgtggccgaactcgatgcatatatttggtttcgctgctgatacaatccat

SEQ ID NO: 106021 - DNA, 522 bp, Glycine max
  unsure (1)..(522): unsure at all n locations
tgctaatagtaaaccaaacctctgtatttacctcagttatgtgatcacttgtccattgcatattcctntacaacatgtcctacccaatcataccctcggaaccaaagtccgaaacttctgaattagctagttactagttgctgattctggagtcgaaggaagcacatattcacagagtaagacaattacaatcatcatggtccatgcgtgaacgtaggtaatccatttcctgtactaactgggacttaggactaattgcattccgaaactttgttaagccatgcgatacaacctacgtaacaatgccgtgttntacgtacaatgtggcgtgtanaagaatgtaactcatcaattgatgtttttaatcttttaatgtcatctatctcaagctttatattagaggtgacaattatttatcaacttacatgatcatgctacactcaatattgcatatctctgaattaaaaattctttcactgacaatggcaatgtatacagagctcttgttatggacattatcac

SEQ ID NO: 106022 - DNA, 214 bp, Glycine max
  unsure (1)..(214): unsure at all n locations
cttcgacgttcttcattcgttcttcatctgtcttcagtcttcaaccggtcagtaccttcaaccaagctttctaatcattctatgtacccgtggtggaccactatttggttcatgtagttatattctcgatttcatttacttnttatacccgcctttgacgtgcttaagccattctattaagtcattttctcgcttaatctacgtataacatata

SEQ ID NO: 106023 - DNA, 383 bp, Glycine max
acatatatgtcattcgccatgggtgacatatgattggagtcgtgatggtgatacttacttacatgtatgccaatttgccgggtggtatacactggtgtcgagatggaatatgctctcgagtgcatgtcactcattgtaagtgacatacactggagtcatgatatatgatacgctctttcatatatggtactcgtagtgggtggcatacactcataccatgatatagatacgctcttgcatgtatgccacttatcatgcgtggtatacactagagccatgatgggaatatgttctagcatgtatgtcactcactgtggatgacatacactacacgcatgagtttgatacactcctgtatgtatgccactcgctgtgaatgacat

SEQ ID NO: 106024 - DNA, 419 bp, Glycine max
  unsure (1)..(419): unsure at all n locations
acatagaggaagtcattccaaggctntaacagaacatangtactctgatgttactccttcattagatgncttgatgtntaaacttatttgttgatctgtataactatcgactagtcattagatgctgcacacaggccactgctaccactgtttggctnttgccttgctttatcactttgtcagacccatccncaatcgcctctgttcacttatccatagttggctccatatggttgtgttataattgttagtttgctagtatttgttaataaaagggatcgaactcgtgatctttctctactntccttctttcttaatcaccanactaaccttatatctnnctttatggctatatagtgatgttatagatttattaaaccacgtgctaggttactcgacatgtggtttgcatactgata

SEQ ID NO: 106025 - DNA, 338 bp, Glycine max
  unsure (1)..(338): unsure at all n locations
acatttataataacacagttgattttattcgaanatagagttatctctttatcttagtgagagtgattctcctaaattcttgagtgatgaggacatgaccaagagcaaaggcaacgattcactttaaagacttggacggcctatgacaatggctagagcaaggaaagccaaggaagctcttcaacaagtgttgtccatactatttgaatacaagcccaagtttcaaggagaaaagtccaatggtgtgagttgtatcatggcccacatggagaaggactaaatgacaccactgtgtctcacatttagaagtgttagtttgtctaaataatggcccaatc

SEQ ID NO: 106026 - DNA, 454 bp, Glycine max
  unsure (1)..(454): unsure at all n locations
gctctatcaaggatgagctctataggaatactctntccttcatagacccattcatttctacgcttccatatggacaaaatcattccaaaagtctttcacagaaaactcatatcatcatattcgaagcactgtgtcatccactacacaaaagacatattctgatagcactccattcttccactaatttgactggcaaaccagagatgaatcacctccttacggaaaagaaactcatgttccaccatctcctctttctttccacaataagggcaagtngggtcacaagattctatttttgcttgagatcttttaactggacaacattctccatagctcacatctaatttcgcacttgggatacatcacttcaaatttgtgctcagaactgataagacttgggagtctttcattgtaggcaccattgtctgagtagcagattaccatgcctacatct

SEQ ID NO: 106027 - DNA, 239 bp, Glycine max
  unsure (1)..(239): unsure at all n locations
catgaaggtataattctctatgttttctttgttgcatgggcgtaatgccatcactctatgtctagccatgatgctattaagacgtccctacctctgagctctacttaaaattatcctctctctagcgagtaatctctagaactgatgcatataaaaccttcaatgtatttctactaagggataccctctntcaagcgccaaacccctcactatgatgcacggatgaggcatacaataca

SEQ ID NO: 106028 - DNA, 322 bp, Glycine max
  unsure (1)..(322): unsure at all n locations
gagtgcgtctccatcatggacttgagtttacttaatatataatatgttgtcaaataaccatcttagaatatctacattctaaggcgatatntcggagaaccgtcttatatcctacaattattttttttcttaaaaaacattgtaagataaccgccttacattgtaggcattctaagatggtttgttgaatagctgtctaagaatcctaaatctattttaagttttgttagaagatatatattctaagatggttattatacaacctttctagaatgttgtcattctaagacgattatcttcgtgagaagcctttgaaagactt

SEQ ID NO: 106029 - DNA, 265 bp, Glycine max
  unsure (1)..(265): unsure at all n locations
ttacttacctctcatctatgataagaggaaagcaaagatagaacactgatttcgtccgtcctgccctttccgtgatgacgactctcatctctacttcttcttttttcttctgcacanaacgtaatacagacaacaaccagaacaacgaatattatacacatattcacatacttggcgaaagaaccgatctggaaacaacagataacgtgcttccagtcaccagaagcttccacttgatatggagacacatgaacaggtaggaatg

SEQ ID NO: 106030 - DNA, 421 bp, Glycine max
  unsure (1)..(421): unsure at all n locations
gatcctagataaccatgattnngtggaagcctaaccncattacaagcctagaaagtccttcagattctaatttgtgtgttcatcattgtatgtcatgaaatgaaatgcanaggttgagactcgtgttagttgtttatgatggaatgagcctatacacttgagcttgagtgaaacaatgactgtgaggtttggttgatgatccttccttgatntcttccatccttactagcttatttcaattgtgactttaatgtgcatgattctatctttgacaagttcatgtttgtaaaattattgattgaagcagccatgatatcagttcatatggttgaatnntttttctgtganaattaattcttcttctatgaagcaacaatctggtngtgcataatatcaaagttgtgcgctaagtgcgagatca

SEQ ID NO: 106031 - DNA, 523 bp, Glycine max
  unsure (1)..(523): unsure at all n locations
acctccaaactatgaaggtgatgatcgagtgcagaanaatatatctcagagtgtatctcggagagctattgttgttnntctttcaatatccgctgtgtttctcccatataacctggttatatataagttctatatttttgagaatactagctgacatttagatcttccgttttcatgaatattagagntaatatcagaatgaaagtaatattctgaagccaacataagaatgaaattcattgatgagagtattaacttatatgcgacctgttctagatgtatgataactagctcaacagaactaatgtacaatagttatcactgagagacactacgtgtggttgggtttcatttcagtttatgtgttatttcctgtattatatatcgataactgttacatctttaaatattagacatctgaaatatgttaagttgactttatatctgtctcagaataaacactgagatcatcattatgactctgtttttttatatttaattgctaatacatttacatagttat

SEQ ID NO: 106032 - DNA, 457 bp, Glycine max
  unsure (1)..(457): unsure at all n locations
tattagcgacactatgatactcagctctatccaaaggactacctgactaatccttgatagccttttgagcctgtntccctnntcttgttntgaagctcactacaagccttaagtggaaaaccatgatatcaccatatccttaatgaatattggagctttggaattgtattgcgaataagtgcggcgttcttttgttcattggaaacatgttttgttggcatatttatgatatatttgagcatacttgtgacatgcatatggtaatgttgaatgttgaaatatgtgttctcaacgctccgagaaaaaatttatattattacaaatcgaaaaaaaagaagcataagttagtgaaaaactaatgacaaaaagagaactctggttccttacgtaattacttatctttatttcagtactagagcttatccatgttttatcttgataccctatctatttctct

SEQ ID NO: 106033 - DNA, 111 bp, Glycine max
aacatgccttgaagcgtactgatacacataatgataatccatgatatcaccatatccatcaagaattttggagctatagaattgaattggtaatacccgtgagggtcaaag

SEQ ID NO: 106034 - DNA, 210 bp, Glycine max
ctatacactgagacctctctgtctacctatatccttgacctccatcactggcggagaagaccatcctgaggaatatagagcacttgggcatatgacccacgactcccaaataatgaatacaggagaagcgcactcacagacggctttccatcagacaaatgagaaagggtgcacgttcttcttcacgtctacttcaccaaatgtaactcc

SEQ ID NO: 106035 - DNA, 488 bp, Glycine max
  unsure (1)..(488): unsure at all n locations
atcgctctctctcgaagaaaagtatgtagaaacgaacagtaaccaatgctttagttagtgtaattcacccatntctgctgctctgtctttcccgacttcgtactatacatagcacctgcaacttctctgcatagatgaacttttctcaagtatgattctcttcaaccacattttcacacctacacatttattattgtaaagatcnttgtcatctaaaacttggagtatatgtgtgtgnggntntttttctctgtcttcactactatccttccttgtcttcaagtgcaatgtgtagcatagactggtgcactaagccgatggttccatggtcaacccatttattaatctttgtttcaaattaacaacaatcaatgactattattagtctatctaacataattgcctcaattaaattagacctctgtatatctcaaaattttgctgggggattttgtacccatgatattttgaggagtaaccgagtattt

SEQ ID NO: 106036 - DNA, 292 bp, Glycine max
  unsure (1)..(292): unsure at all n locations
tcaccttctcgctaagccaatctgtggcttatcgagcgtncgctaagcgcaacacttctgngctaagcgcgaggaggactctggaagaagatgaactgtacaggttcgctaagcacaccgcttcatctcactaagcgcaccacttcagttcatccgctatgtgagaaaggcacgcgctaagccgaaattcactaatgtgcgctaagcggtccataagtgtgctaagtgcacgagcacgaacaaggccacctatntaagcctgatatcagaatttgtgaagtgagtntggact

SEQ ID NO: 106037 - DNA, 386 bp, Glycine max
  unsure (1)..(386): unsure at all n locations
cgcgtgcacgatggttccttcaaagagatcttctgtcttccaatctgnaagttatacgctnggaacctcttggagaactcatatccattggattagagaactctgggattgagcccttcctaagaaatctagacaccttggaagtaatgagttcttctagttacataaacttggtaccacacacagagtcgttcttcaatatgacatattaggatataagcagttgcaatatcctgctatatttgttcacatcctcaacagccactagtttgagtcaactcagaagaatggagaataaatgctgcaattcaattgaagagatagtgtctaacgaggcgggtgaatcacatgaggatgagatagtatttcagcggctaaattgtgtg

SEQ ID NO: 106038 - DNA, 253 bp, Glycine max
taattcacgcatgtctgctgctctgtctttcacgacttcgtactatacatagcacctgcgacttctctgcatagatgaactcatctcaagagtgatgctcttcaaccacattttcacacctacacattcattatgttaaagatctttgtaattaaaacttggagtatatgtgtgtgtgtttgtttttctctgtcttcactactttccttcctgttctgtaagtacaatatgtagcatagactgttgcactaag

SEQ ID NO: 106039 - DNA, 125 bp, Glycine max
agtgagaatgtagtgttacgagtagaaacagagtgaggctttgagagttggaacgctaaaacgggattcagtggtaaatggatgttaaagagagtaaaccctattttgaaatgtcatctatgaca

SEQ ID NO: 106040 - DNA, 75 bp, Glycine max
aatctttcatagactctgtagataagactataaacctaaaatagctataaccacatgcttaaatatggatgtcat

SEQ ID NO: 106041 - DNA, 513 bp, Glycine max
  unsure (1)..(513): unsure at all n locations
tctatccctctttcatgtgtagaatgaagctngacaggttcaggtgcttgtgctgctactggtgganggcacttgaattgtgtgtcagacctcaaggtgatggcactcacatnntttggtattctgcacagttgtgaaggcaatttgtcaaaattttggacttgaacttggtcatctgagtagccatctgccccatnctgattttcagactntgaatgaaggctcttgtctcttattgaaatntcatatntnggatggtcatttgcctcactaactcttctaaggaagggtgaggaggggcctcagttgcttggtgctttgttgtgatactcgtgttgtgttgtgctgcatagaggaggacatactgctcttgactatcgaattctgaaaggangacaggttgttgtgttgtgaggacttgccatctcanattggatgatcctcccacctgatgatctgtgctgaaagcataatatttgctgtgtggttgctgtgtgacgctatataatgttg

SEQ ID NO: 106042 - DNA, 169 bp, Glycine max
ccatcttctgctagtagcttcgtagttattggtcttactacaacaccacttatttaatttctggttggtcatcatcgatgatcgatccaatagaatagcatagcaccatgaagaataataactagcgacaacaagaacagtcccttgctgctcaatgacacatgttcag

SEQ ID NO: 106043 - DNA, 126 bp, Glycine max
ggatggatgggttgggtggtagggatggtaggatgggtgggatggatgtgttggatgggatggattgattgatggattggttggatggatgtatttggatggatgattggttggttggattggatt

SEQ ID NO: 106044 - DNA, 367 bp, Glycine max
  unsure (1)..(367): unsure at all n locations
cacagccaagttaaacagagcagattgcagaaactctgctcaacacatcaaccaagatcacagcttttctcacgtaaagaccacagtaacaattccttcgatccaattcgntaaccgtntgatcgactccaaaatgttactggaagtctatagtgcataagcctacattttgaccgttgggatctactagcaaacacccagaactcattctgcactagacgtttcacagccaaccacacacaagcatttttctgcacaaagccaaaatcctgctgccctattttgacagcaaatctgcataagtgagatttcgaaatcacacttcctcatccaatcttgcccaatcaattctacaagttcaaatatg

SEQ ID NO: 106045 - DNA, 176 bp, Glycine max
  unsure (1)..(176): unsure at all n locations
taaaatctaaatttgcgtttgaaagtggagaggcatgataatnatgacatgcttgtgagagttttactcgatattggctgccccatgaggggtactttgcacctangtagcatggaaaatacctttcaatggtatgtaaatatgtgtataaatatangtagcatgggaaacacctt

SEQ ID NO: 106046 - DNA, 350 bp, Glycine max
  unsure (1)..(350): unsure at all n locations
ttcttaagaaagcttctcaaggaagctacctactctatanatagaagcatgtgtaacacttgttgtaactntgatgaatgagagttgtgtgagacacaactcagagttcaacttctctccctttntcttccttcaatttcgcgctcccccctctctctttctgtccttctttcttttcctccattgaagcatactctccaagcttcttatccaaggctcatcttggtggtgaagctccttcttacatggctttattcctagtggatagcgccgcctcttatctactctcctatgtcttctgctgcatctccatggtggaanatcaccattaaaggacctcattgaagctc

SEQ ID NO: 106047 - DNA, 243 bp, Glycine max
  unsure (1)..(243): unsure at all n locations
tccacaaagcgcgcataaacccaccatcccctgttgcccacctncatctgagctcacgtactctcacgtagcccatatactcgtttctctcaacatcgggtccgcatcaatcctcccaagcttccaaaacatccaagcaaaacaacattcatacagcacaagctaccacagtcaagaaaacagagcanaggcagaaaactctgctcaaacaccaaccaaaatcacagcttttcttacttaaag

SEQ ID NO: 106048 - DNA, 475 bp, Glycine max
  unsure (1)..(475): unsure at all n locations
agcttggtatctccttcttcactacatcaagaatcaccgngttgagtcttctctgtggttgtcttcctggttanctccatcctctaaatntattcgatgcatacatgtggatgggctaataccaggaatgtccgccagggtccagcctatagccttcttatgcttcttgagaactgacaacaacttctcctcttgctcatcagcaagggaggcagatataatcactgganaactcttgctatcatccaagtaagcgtattttaaatttgatggcagaggcttcaattctggtgtggtcggctggacagtggtagaaggagatggtttctcagcctctacctcatanagaaagtcagaggtatgtgtacttcctgaaacatagttagtcctatctgactctataaaatcaatctcgagaggtaaaacaccaccaccagacatgcaatcaatatcactcttagattcactctcagca

SEQ ID NO: 106049 - DNA, 367 bp, Glycine max
  unsure (1)..(367): unsure at all n locations
agcctctacttatgtggcagggtgtgcttccttcacttacttgtctcaaccgcgagctttgnaccccactcttccttcccgcgatgcttatctatacatcagccgtcgttgtctttgcctaaacccattccgggttcgtaaccgttccccaacataactcgggccatcattactgctgcatcggacaggcaagcttgcccagagaatgaatccacggataaatgcttccacctctaagactggaagcggttctaagactctctgcgcctcacatacgcaagaggatggcactaccagatgcttctcgctgaaccataccaatcccttcactcaattcactttggggaggaaggaacaatccctgatg

SEQ ID NO: 106050 - DNA, 410 bp, Glycine max
  unsure (1)..(410): unsure at all n locations
agcttgccacncagctctctcaggcgagctcagctcgtctaagcgagcanggttgcttcctccagaagcaacaaccttctggaggaatcttctggagggcccaagtgggcctggttgctatttgcacccccaattttactaagtacacccctggccttttttggtgattctttnttcgtaaagttacggaaacttacgaatttcgtaacgataccttgtttctttccgtaatgttacggaaccttgcggattacataatcatcccctntttgacttacggaatgttacggaacctcactaattgtgcaacgatgcttccatttgatnttcggtgtgtcacggaaccttacngatgtgtgcatcaatatttcttttgtttcccggcatgtccgaaatttacaaattgctaa

SEQ ID NO: 106051 - DNA, 239 bp, Glycine max
  unsure (1)..(239): unsure at all n locations
ctgcagcttgtgcattaatatgtcagattgtattggatntgactntgagaatgcttaggcctactctatcttatgctganatcaactntatcttgaagagttggggagacaagtatctaactcttaaccattctgatatggagggtgtgataccatgtcaagaataaactctcctaaatgataagaagttagttgaaaagggtatgttggntttaaatctctaacgtatttaacttcta

SEQ ID NO: 106052 - DNA, 304 bp, Glycine max
  unsure (1)..(304): unsure at all n locations
gtactagctcactctattcaagagcactgagttgactcctatcactccctatggtatactattctggcctaatgtggagtggaaccatctctcaataaaattcttgcttcagcangagtcatgtctncaagggctccaccactggcagcatctatcatacttctcttcatattactaagtccttcataaaaatatnggagaagcagctgctctaanatttgatggtgagggcaactggcagcatctatcatacttctcttccagtattcatacaggctctctccactgagttgtctaatacctg

SEQ ID NO: 106053 - DNA, 277 bp, Glycine max
  unsure (1)..(277): unsure at all n locations
ctctctcatgacttgtgcatactcaataatttcattcctctttgcaacaacaatggtcccatggttggcccttccccacttctctagtctttctacatctctcatttgngttnttgccttgtaatttgactcctcaagcatagaagaaagatggtttgctgtcttcttcgcattcgaaagctcagattctgcttgagcttttgcagattctgcagtccatttgctctccttgntaccttcaatatcccttcttgctctgtggagttcctttgttctt

SEQ ID NO: 106054 - DNA, 132 bp, Glycine max
ggtattgctattgcttgcgtcacagaaataaatcttattgatagaatggatgatgacgtgaactacgtacaaagtgctaaagtctgatggctgttaatttgtgtaagaagctaaaaatgctaaatatagaca

SEQ ID NO: 106055 - DNA, 192 bp, Glycine max
ggccgctcggctactgtgtaccccccaacttgatagtggtcatttacgatgaattcgtttatttcttattgaatggatattcagatttaatattatattgcaagatctatacatagtatggtctcatattctctctagttgaaccgtacacatgagatactgaaattatgttgacaatgcttacatttaatg

SEQ ID NO: 106056 - DNA, 494 bp, Glycine max
  unsure (1)..(494): unsure at all n locations
atcctctgagtcacctgccgcatgcaagcttgacaacatccatatcaaacaacattcanactgtacaagctatcacagccaagcaaaacagagcagaggcagaatactctgctcaacacatcaaccaatatcacagctnttctcacttaaagaccccagtaacaattccttcgatccaattcgttaaccgttggatcgactccaaaaatttactggaagtctatagtgcataagcctacattgtgaccgttgggatcgactagcatacatccaggactcattctgtactactctttccacagccaaccacacacaagcattntctgcaccaagctaaaattctgctggcacctatttgacagcanaattctgcataagtgcagattnntgaaatcacacttnctctcatccaatctggttcanatcgattcctacaagtcccaaatcatgtatcaaacatgtctaaacataagcaaacttcaaccacataacac

SEQ ID NO: 106057 - DNA, 162 bp, Glycine max
tactaagctcatctcctagctatgtttattgtggaaaataagattattatgtatctggtgacgatgtagagctaaactgtcatatcttgtatgacagcaaagatgtctggtagtttttagtagggcataattcttacggatgggtgcggcatacccgtcata

SEQ ID NO: 106058 - DNA, 419 bp, Glycine max
  unsure (1)..(419): unsure at all n locations
tcaatgagttaagtaatagttcatgatagtgctttctaatagacttanggtcatcagaaattaccacatatgcatataagccccttcttttctttagtcctaaagaatntcttatcttggctnttctccaaatctggacattccgacttgaagtgtctaggctttgtgcattcatagtagactatggagctnttgtctntttccttcttgtcctggggcattcttcttgaagagcttctccacttagacccactnttgtttctccacatcttatagaatttgtgatagatgaaggcgagatcgtcctcatccaagtcttctntagattcatcatcaaatgaatcattgactntaagcactntggaggagcntcttcatacttgttctctagatgaatggtctttcttggtcttcttact

SEQ ID NO: 106059 - DNA, 184 bp, Glycine max
  unsure (1)..(184): unsure at all n locations
ngctagtagaatggctatacatgatacatgtcanggtttggtnntggtcanagataaaggggatgccccacattatttccatgacacaaatgcaaagatgatgatntggatacttcatgcanaactggtcatgcatgcacctatgtggacactcaagtgtcaaacttttatggtcatgtgatgc

SEQ ID NO: 106060 - DNA, 302 bp, Glycine max
  unsure (1)..(302): unsure at all n locations
tagatcagataagataagataagatctagatgaaataatatctagatgagatcagatctaaataatatctagataagataagatctaattttatagaataaattagtctgccctcttcaagtccaagcccaattctagattcaagcccaatgcttcattaattcctgaaattagattaaaaacatcaaattagctgaatgggcncanataatataactgcctaataaattggacaattaagactaatcagtatttaaattggggaanaagggtaaagaaatatgagaaaatgatggcacatc

SEQ ID NO: 106061 - DNA, 263 bp, Glycine max
  unsure (1)..(263): unsure at all n locations
atcatcaatntattttctaagtactagtaaccactatattggctttnntaagaactcccttcattgccatatcaatctttatcctttatgctatcttaactctaantaatagatntttcttatannaaatgtattgtataacattttacantaagtgagaaaaagagaaaagaaagaaatgtgaaataaatattatgtgcattgtatatgaataacanntactttattggttggtgttntgtatcctgcgaaagctacaaacc

SEQ ID NO: 106062 - DNA, 288 bp, Glycine max
gctaacctatcgcctacagcttagattgtgaccatccaacctgtgttcgactctaccactatatgccgcgatgatccatactgttccctaactcctgccttcttacgccgcatcatgccttggaactcttggagaccctccgttgggtcactaaaccccggcatgaaagcggagctttctctaaggcgctctctatgggtagccagcgtctatgggagacgggatataataatacacccctgttccatcagggacattggcatcttcgatgaaataaatctgatcttc

SEQ ID NO: 106063 - DNA, 146 bp, Glycine max
  unsure (1)..(146): unsure at all n locations
gagcttagctcacactctctctatactaactcacctctgagaagttccataagaagaatcctanagaagctagagnctagctacacatacctctctaatagctaagctcacctncttgagatgggaagctagangcttgctacaca

SEQ ID NO: 106064 - DNA, 348 bp, Glycine max
cttcggcgtggatgatgacagtcgatgcctcgtcttgctagagctcctccacgatctttatagtgccatgcaagatggaaccaaccatctatggcgacagtatatcatattgcacttctgacggacattgttctggtcgagaatcccattccaatgcctctcgcgagaacaattctagagatcacactctcatcacttaaggctgccgatgacacgccgatgctggagtccataagtctgttcagagaggtctctcctttcatgatgatggaggaatatccaaccatctcagtctcagagtgcacatctactatatttattatatcacatgattgtcccactatgcat

SEQ ID NO: 106065 - DNA, 95 bp, Glycine max
gaaaaaaagaattttaagtcggaaattaaggttagaaatattgatatggggattatattttctataaatttaaaatatcttaaatatcataaatt

SEQ ID NO: 106066 - DNA, 440 bp, Glycine max
aaacctggttcgtaatgtctacgtattatcgcgaatatggatcagtatgctgactggaaaggcgtacgttatcgtctgggcggcagcactaaaaaaggtatcgattggtctggtttcgtacagcgtacattccgtgagcaatttggcttagaacttccgcgttcgacttacgaacagcaggaaatgggtaaatctgtttcccgcagtaacttgcgtacgggtgatttagttctgttccgtgccggttcaacgggacgccatgtcggtatttatatcggcaacaatcagtttgtccatgccttcaccagcagtggtgttattatctccagcatgaatgaaccgtactggaagaagcgttacaacgaagcacgccgggttctcaccgcagctataaaccgttggatgcatcccttggctatctgacgagtaactgaagcact

SEQ ID NO: 106067 - DNA, 193 bp, Glycine max
  unsure (1)..(193): unsure at all n locations
atctaagtattcttcatgctagntatctcttaactgatatcactacatgtcaagtatttggttgaattctcttttatttttatgaaactctcacaagacttgatatgtcgatatctcacatgtcacacagagacaatttgcattgattgccaactatccatcttacagtntcatctaccatacaaattcagat

SEQ ID NO: 106068 - DNA, 205 bp, Glycine max
  unsure (1)..(205): unsure at all n locations
tccctatgatatatggtatgataaatgtgttgagtggcgcaacccttcttttgtaanatcactcatgcatcccaacatttcatgagttacatacatanggactcattaggtacgtgtgttcttatacttagtttcaatacaaacttatgtgctcatatgggacaccttaggttcgtcctactttctggtgtgaataatcaacatg

SEQ ID NO: 106069 - DNA, 317 bp, Glycine max
  unsure (1)..(317): unsure at all n locations
atccttaagtcacctgccgctgcagcttctaccaatgactacctgaataatttcttgatagccctttgagccttgtttccttttccttgtttgaagctcactacaagccttaagtgaanaaccatgatatcaccatatccttaaggaattnntggagctttggaattgtttgggaataagtgtggngnnggttttgtntcattggataacttgttnntgtggctatacttcatgatgtattttgggccatacttgatgtacattgtatattggttaaatgttggacatgctgaatgaaatgttgttcctaaatgata

SEQ ID NO: 106070 - DNA, 430 bp, Glycine max
  unsure (1)..(430): unsure at all n locations
atggaagctcctaatatctcccacactttgntgggtgggccattcttggatggccttgattntctcaaggtccacttggaccccatntctaccaactacaaaacctaagaaaactatattatctacacaaaaggtacacttctctatatntgcatagagggtgtntntcctaaggactgaaagaacttgtctgagatgtcctaagtgatcagctagcctcctactatacactanaatatcatcaaaataaacaactacaaatctacctatganatcccttaagacatgatgcataagcctcataaaggtgcttggtgcattagtgagcccaaaaggcatcactagccattcatacaaaccanacttggtcttganagcagttntccactcatcacncctttntcatcctgattggtgataaaccacttta

SEQ ID NO: 106071 - DNA, 131 bp, Glycine max
tggaatctgcaggcgaaaagaagccaaaacagtcaaacagcgaaatctctggcggcagcggtgatggtggctgattacatggtcagactcgctggagggagatgagcaccatggcggtagtgggtgcacct

SEQ ID NO: 106072 - DNA, 454 bp, Glycine max
  unsure (1)..(454): unsure at all n locations
atccttaagcacctgcgctgctgctgtgcnataagcactctcgatttatcttacatgcttgatgttggctcgtctttgcacgggaagccggaaggtccatatcaccttcttaattgtacacatggggcactgcgcccncanatgcgcaagtaagaagagataattntccgggctctcgtgtccgtaaaatgcattcatatcatgcatcgcataagcatctcttcataacatcataatggacatatcctgcatntgtccgttatcatattccggcctcacattntgcatgagtcatggcatcatcatgcatatgcattcaacanactttntgatctgcanaattgcataccattcgntntcatgtttgctcatcctttgcgtttcctctacaaaacanaaacaaaanaaggggggaagcgtganacttcacactacattctttagtttcatgtgt

SEQ ID NO: 106073 - DNA, 372 bp, Glycine max
  unsure (1)..(372): unsure at all n locations
agcactgcgctgcttctatggtangagatggaagggcagtttgaacagtgagtgatattcatggaaaacaatgataggcttgtgatgctgtctatgaagccaaacacttactcttgnggagaccatggcaatttgataagagggctaatcatgatggtttcaccaacaagatctctttcacgtatcaaggcannaagatagtgctctaaccattgagtccacaagaagtgtgtgaggatcanagaanaatgagagagataaatcttcatgaaaagagagaaaaagaaaaagagagccaaacactcgatagttcataaagtgaggacanaaagagggaaacacaagagaggaaanagatgagtgaaacacttg

SEQ ID NO: 106074 - DNA, 316 bp, Glycine max
acacgcctgaggatatgtgatatgatatatattgataaagaatgaaataattttaaggtatttgtgagatctttcaaagttaggcactgagttattaatcttatttactttgataacttcatttattgaacattctgggaatgaagtggatttatagcaatacaaaattgggcagctttcaccatcttatggaggaagccaagctatgtcgtccttacaatgtcataaaagtattgaactgacaaataggaccgcattgaatgatggtgtgagctctttcagcaatatcgcattacctttacattgagtatttctt

SEQ ID NO: 106075 - DNA, 212 bp, Glycine max
  unsure (1)..(212): unsure at all n locations
cactttattttcatacccagtaagtntaacagcgagtccttctggtaaacccttaacagtagtccactcagaaggaattatggcacaggggggcacaaaagtgaacccaatgttcaaaataaggccttcttggatgctaangatttcgaatggtgatgaaatgattagtggtagacccttagagacctcaaggggagattgcactacagtga

SEQ ID NO: 106076 - DNA, 136 bp, Glycine max
tacaaatttgatgcattcaggggtgtcctgtgcaagaagatgataagtgtaaacaacttttttttgtccgagtctatatgctcgacaaatagctggtctttccaccgagggattccaaacaacatcaagaagcacg

SEQ ID NO: 106077 - DNA, 478 bp, Glycine max
  unsure (1)..(478): unsure at all n locations
cacaacttagatattttcacaacactctccttgttgngttgctactcttatcaacacctatgatttctgtgatgatggcttaccccatctgttattctttaaatcttcatttctgtgttcttcaaatgtaaaaacattcatactgggctggagtaatatgatattttgtaactcaatttaactcgtgttgtatatttattcttctacgatagaaaatcacccaaaaacattccctcaaatatggaacaagtttgtctacattcatgagtacccttctacaacctaagaaagggagntagtaaatatcacattgtgngcttccgttccaatgacaaaaattctacattacgctcaaaaagggtgcgagggatgcattcattcatatgactgacttttgactagtactgaataatacaaacaaggccttgatcattncacactatacatacatttatacaatctaagatcatgcaaatca

SEQ ID NO: 106078 - DNA, 137 bp, Glycine max
  unsure (1)..(137): unsure at all n locations
tgtctcgctaagcttggaccgtacgcttagcgagactcaaccgctaagcgagacatcagccacttagtgagtgagatgaatattgaagaanatctgccatgtcatcacacactcagcgtgtcatcagctcgttcagt

SEQ ID NO: 106079 - DNA, 139 bp, Glycine max
  unsure (1)..(139): unsure at all n locations
tggtcttgcaagtgaagatcctcataagcatcttaaggagttccatattgtttgttccacaatgaagcccnctgatgtccaggaagatcatatctttctaaagggttttcctcattctctggagggactggcaaaatat

SEQ ID NO: 106080 - DNA, 466 bp, Glycine max
  unsure (1)..(466): unsure at all n locations
gcttaccacccactgtctatttgctntgtttgttgntcacttctcagcagcaattatgggtatgctgaaatgactctatctgaaaagagtntctaacttcattctttgcacagntgatatcccaatcacaagatgccttcttgcanttttctttagccctctgtttatcattcttcttccacttgaactccctgcccaagaatatgctatactttctcaaggcagatntaaattcatccagagtaccaaactccatccctaattccaacttctgttcaccaactccactactntgactatattgaggatanacttcaacatcctcatcttcatcatcactactaatggggattttcagctctctgaatgtaaccatctgtctcaactcaacttcacttcattcatcatacaagagaatctganaccactcatacttgcactttcttttttctctactacccacaca

SEQ ID NO: 106081 - DNA, 201 bp, Glycine max
  unsure (1)..(201): unsure at all n locations
gctanttattnttcttcttcttctctataattcttatagagaaatttaacatcccatttttcgtagactacattgaaaggagttgttatttgtaaataaatagaagtttatgataagggtntntaaattaaataaataaagagaaataagtgtattaaaataatagtctgagagaaaataaaaaggcattttatttatgca

SEQ ID NO: 106082 - DNA, 449 bp, Glycine max
  unsure (1)..(449): unsure at all n locations
gaagatggatcgagtntacataacttctttggctatggccaatacatgaattgagctaaataattacanaaattatggacttggttgattgcccatgtttatnttnnccgttgcactttgacttctgacaagatgtgatgaacaatgttngtttaatgaaaatctgaattgattcgaccctatgttctactaaatgtcctatgtaaaaatntcaatacttcaacaatggtattttttttttcacaatggttacatggctcattccattctttccttgaaagctaagctgtaatcatggtaatcaaaagaaaagaacgcgctntacggtgcccttactgaacatgtgccanagctaaagtgatgagtaaaatagaggaggtgcaagagtagatgaaggctgacatggaggtcatgatagagaaaatgaccacaatgatggaggccatgat

SEQ ID NO: 106083 - DNA, 105 bp, Glycine max
tagcaattaaacatagatttttttcttcttcattagctctctctaatgatggatcttctagatccctctacattgacatcaaccctttcttgaacacttatactc

SEQ ID NO: 106084 - DNA, 451 bp, Glycine max
  unsure (1)..(451): unsure at all n locations
agctctgtatntatatgccttcttcagtaaaggttttgtttctctaaacggatattattcttcactaaagctcatgttngaagatagtgcatattggagcnattaatgcttgcattanatgcatgtccttctttatgctggaaactcactctcattagcttccttgaagaacacttcaatatgaaaccacttgctntntgtcagagcacatctatcacaaaagtattttgatactatttgaaactccaaattgttgaacttcatttattcttcaggggaatcgacaaatccaaggagaatgtcttgtagacagtcttgcacacaaatatcagatgagagtataaatgaaacttaattcancttaaatctattcnaccataagattatcttcattagacttcaaccatatcaagaaaatagtgattccataaactaactctaacttatatta

SEQ ID NO: 106085 - DNA, 110 bp, Glycine max
  unsure (1)..(110): unsure at all n locations
tttaatagctggtgtacaatcagtttggccactggtaatcgattacatcctctggtaatcgattaccagagagtaaatntggtgaacaagaacttttaacttaaaattct

SEQ ID NO: 106086 - DNA, 359 bp, Glycine max
  unsure (1)..(359): unsure at all n locations
agtcacctgccgcatgcaagcttgacaaatatttgtcacctctacataaactctctcaagaaataactcncaatttttcatttgttgtcttttgggcttgaatccttattagcccatagttntaaatagagatnttatgttatagcttanggttccaaatgttgtgcatgaaaaggacaagggatttgagatgttgcatgatggctttgatgcttaaggattcatcttccattatttcttcatcaattgcttcttcncccatggntgtgaatggctgcgtttgtaatagcccgtttcctttgtttgttaatataaaataatgaataagaataanaattaggtcattagatttctcacta

SEQ ID NO: 106087 - DNA, 129 bp, Glycine max
  unsure (1)..(129): unsure at all n locations
tttcatgaaggtagaaatataattcattngaacccaatanagggatatacaaataatcaaatntcattgattatcaacagtgtcatgtcaatctaattatatcaactatattgtatgaatgccattctg

SEQ ID NO: 106088 - DNA, 328 bp, Glycine max
  unsure (1)..(328): unsure at all n locations
aagtgtgtgttgaggggtacacatcgtttattacagcgctgattatcgggaaaatggcatcgataaagtatggcgtgaantgctaagcatttttcaattcaggctaattttacggataattgactcgagatataatattgctttgaatactcaactttgtttaatgcagcttcatatttaacactaatcgacttatgtaaagattgcgttgattgtagactcatttaatacgacggtcattactaggacacatcgaatcagataagtatgcgttgattgtaagttatttaatcagcgctattatagaacattgcttcattaagtttga

SEQ ID NO: 106089 - DNA, 108 bp, Glycine max
atatgagacttctgtatggaaaagagctcgacagattcaacccatagatttaactacatgtcgataagtccgtatatacgagacgctgatattgaatacaaagtctga

SEQ ID NO: 106090 - DNA, 396 bp, Glycine max
  unsure (1)..(396): unsure at all n locations
agtcacctgccgcatgcaagcttaagtgtttaggctcattccatcatanacaactaacacaagtcccaacctttgcatttcatctcatatcatacagcaatgaacatacaaaatgaatccaaatgactntctatgcttgtaatggggttaggctgccaacaaatgatggtttttctaggattcacaagcttangttctaggagagcattcatccatagataaaccttcacttttcattcattcccacccatacttgccttttatttaagtactcagctttcattcatggaattacaacatacacacttatntaattcattngtacttatagttcttttntgaacacaatatatacagagacattatgtgtatatacagaaatagtgtgtgcatgct

SEQ ID NO: 106091 - DNA, 173 bp, Glycine max
  unsure (1)..(173): unsure at all n locations
atatgagagctnatctctgtggtcttcttgaggtacttatgtaaaacctattttctatntaatgatgttntatgtgttctctgggctatcagtacgtcatttcagtgtgcttttgccttgatcacatagatgcatgcnnttgtaggatcattcaacagtgaanactgatctga

SEQ ID NO: 106092 - DNA, 373 bp, Glycine max
  unsure (1)..(373): unsure at all n locations
tgatctaagtgngtctaanaagaagcanatctgatcatcatgcttttgataatgcaaaaaaactggngcaagtgaaaagggtgagaatganggaganacncatgtngtgactgccattcctatacagccaagtttcccaccaacccaacaatgtcgttactcagcanataacanaccttcttcttacccaccaccccgttatccacaaaggctatccctaaatcaaccacanagcctgtctaccgcacttttcatgacgaacaccacctttagcacaaaccanaacaccaaccaaggaanggaatttgcagcaaaaagcctgtagaattcaccccaattctggtgtcttatgttaacttactcccttatctat

SEQ ID NO: 106093 - DNA, 100 bp, Glycine max
ttatctcactctctatctttgtttttttgaagtttacttttttatctcttgtaatcttcatttcttcgatgctcagactcctcaagtcaaagatagcgtc

SEQ ID NO: 106094 - DNA, 292 bp, Glycine max
  unsure (1)..(292): unsure at all n locations
tgaccacagagtggtacttggagatatgtcgcggnggtcatgagaccttcgggacgtcatgtgtggtgctattgcccanaaccaagcttgaccaatcctgacccaacccgggcatagtcggtcagtgagaacctgtgatgtacctaagcaggcgagctcctggcagtcaacagattaaaggaacacagaccacaaagcaaggaggctcgtggtggctggccacctgtgaaacttgattgatatgtgagatatggtctctggtaatcgattaccaagggtgggtaatcgatta

SEQ ID NO: 106095 - DNA, 406 bp, Glycine max
  unsure (1)..(406): unsure at all n locations
catagagtctggcgaaaggtgcaaatntttgattcatgtgccagttgggttactaggttaacttaggcatctagtttaccttcaagcttcttagtctccgctgatgaagataaattcgtggctacttcatgcactcctctaatgacaatagcatcacttctggcactaaattggtgggagtttgaagccatcttctcaattaaatntctggcttcagcaggggtcatgtctccanaggctccaccacttctctccatgttactgagtccttcataaanatattggaggagaagctgctcagaaatctggtggtgacgaccactggcacattgnttcttaaatctctcccaatattcatattagtnctctccatttgagtgtctaatgccctgaatttctttctgat

SEQ ID NO: 106096 - DNA, 168 bp, Glycine max
  unsure (1)..(168): unsure at all n locations
ctctcgcatgttcgtctaccatagctcatcttctgctggctctgagcaacttttacgaacaatttaaaacctcgcgtatgactgagtactgcatctacngatcaactgacgacgtcaccccacatactccggaatcgctggtggctttcaggcgtagattacctcaaa

SEQ ID NO: 106097 - DNA, 389 bp, Glycine max
  unsure (1)..(389): unsure at all n locations
tcgtatctagtcaaggtctgagagaccatacaagtntcctaacgatttctaattatgtgggccattaagtctatcatatgctgacaatagccgagaagcccatgaatctcttcgggggtggagtangtgtctgccatcgccttggccttggctaacaagcggngaagttctcgactcccgttcaaggtaagagcaaaccgatccatccacatggttgcctcttggtgtaaagagtcgatcacncttcctctagcctctttttccgcgtatacttgagcatactcgtccgcgattctatgctcgtgggccgtggctagacctaactcttcttgtacttagcgatgatagctagcatgttggtctccgtctcgcataaacgctgagacaag

SEQ ID NO: 106098 - DNA, 327 bp, Glycine max
  unsure (1)..(327): unsure at all n locations
tgtagaagtactaccactatgtcaaactcttggagcatttcaaaaagaaagaactggtccatgttgataaggaataaaacgaccaagctgatgctttagcccacctagtgtgctttaagagaccaagttagcaccagacatttatccaagatgccctaacctcccctaccaccgatgttattgaggtttgctcaagtcagattgctccagcagatggatgtctcccatatggaccttcctggtcacctacgccttactccangaagtggtatgagccgataaggtaagaacaccagcttcacactatgttatcattaacaatgaaat

SEQ ID NO: 106099 - DNA, 139 bp, Glycine max
  unsure (1)..(139): unsure at all n locations
gataactaccacaatgcataacctagtataactacacatcatatcttccataacccaatacccacgaaaatttatgtgagaagaagtctacacaaacctgaaatntctaaggtccacacgtagagatgcgcttcacgac

SEQ ID NO: 106100 - DNA, 181 bp, Glycine max
tatgacgtgagtgttatttatattcactatatgctgtattattgtcgttttctgcatctataaactacttagtagtcagtatctccataatatgctctatgcaaatattgtttttgacaggcacaataaccttatatatttactgatttctcctgtgaagaagaactgaccaattatgatt

SEQ ID NO: 106101 - DNA, 385 bp, Glycine max
  unsure (1)..(385): unsure at all n locations
agctacatactnacatactgttcatagttctactccaganatataatgaaagctctgtatgtgtatatatatatatatgagcacaacgataataaatatatcgcataatgatgatgagaaagcatatatggcagatacttgagagatccaagcaggtataatatgaacaaagaccaaataaaataataaatataaagaagcttgctagcaatgtcattactacagctattataaagggagggggtttgtttcttttttcactatgtattcgggaggggagcaccaattgtgcactctatactaatcannaattcataataatagaaaattacaagtgttataattaaactctatacttcnttaaaaattagtgcccttagtactg

SEQ ID NO: 106102 - DNA, 485 bp, Glycine max
  unsure (1)..(485): unsure at all n locations
gctntatgcttcatctccacacgtaagtgacaagacttgcctatactcattgaactggcgatatgcctatcggagtcttatatgcatgtctatatgcccataaagcatcatccagtttgagtgaccaatccttcctagtagaggccatagtctcttctaaaatcttcttcaattccctatatgacacttncgcttaaccattggtctaacggtgatagggtgatgctaccttgtgtgtacattatattgtttaacaccttctgaactgattattgcagaatgtgtgcctcatacttataaaatctgggacccaaatcggaaagatgttttctaagaaactcctatatcctggctcttatcggggagccactgttcaaccatttgaacatatctgtgtactgatatattatttcaaggatatggaatgcctcaaatcattcctatagcaagacttactcctaatatttgaagatccttcttttaat

SEQ ID NO: 106103 - DNA, 153 bp, Glycine max
  unsure (1)..(153): unsure at all n locations
atgcacncatatacaatcaaggtagcttcattatctagattatntacatgtacttccaaggtgtatntgttatttacatcacacacgcctccttggctgaatntacatacatgcatactcaaagcatnttgnggtaccaaaaactgcacatgc

SEQ ID NO: 106104 - DNA, 417 bp, Glycine max
  unsure (1)..(417): unsure at all n locations
ctgcagcttatatgcaaatccctctggtaagactaagtttctatcctgcttcaatcaagttctaaggcaatagtacatttcccaatgctaaagtcacctaactatgcacacaaatggatgatcagaccanaagcttacaaacattaagcattgaaggaagcactgaacacaaaaaaacataatcaattagatattaggtatntacatcagttgttcattagaaatccccaattagggtgtttagctagccattacagaagaaaccctaacaataataagcttacaaaacctangtatctctgcanaagttggccctcttgctgcctccagagctctnttcccgaaataggcactgtggtgtgctctggaatctgtgccaatcatatgcctaaagtctgtgtaccctaattctgcaca

SEQ ID NO: 106105 - DNA, 345 bp, Glycine max
  unsure (1)..(345): unsure at all n locations
tcttaagaacctgtctttgacaaacttatacaaaatcgtgagtgttgtcatataaagtatatcaaaatgcatgaataatgcattagaactcacatcaaaatacagtcaaatatgggtttatcaacctcctgcacttgagcattgcttgcccacaagcaattattctaatttataaatacaacttaattctctctagtcatgagacttgtaacacaatctcaattaanagttaataaattaagacatagaacaataacaacaagcagcatggatgcaacanaagtttcgaaggaatccactaggctttaaattacatttcgatatagttctacaagagtttatttc

SEQ ID NO: 106106 - DNA, 424 bp, Glycine max
  unsure (1)..(424): unsure at all n locations
gcccactccatcattatgtatagtacctgacatctcanacaaacaaatcaaacgtaacaagacaattatagttgttgtttgaatacctcacccactcaagtgtatcacacaattatggctnttctctaatgaaacactcttgccttttaccactctaattccccttgagttcttaggcaattcaagagattatggccacaacaaagaacaattcaccaatatgtgtaaggtaaggctagagagacaaggaaaaggttaaccaagaaaaaggctaacaatggttttaggcacaaatgaaggaaataaaattcagaatttaggaattcaagtaacaatccttcatgcaaccaatatattaccttanagagatanttnttaaagttcttcaagcatgaaccattcagcccaatttattnttttaatt

SEQ ID NO: 106107 - DNA, 152 bp, Glycine max
gtccataatgcgactagggggctgtcgatggcacacagctttcatcacatgcgcgcataaccaccatcctgtgccactcaatgactcacgtactccacgtagccattctcggttctaacaccgggcccatcaatcttaagcttcacaacatc

SEQ ID NO: 106108 - DNA, 194 bp, Glycine max
cacctgacatcttagacatacatatgcaacgtaacaagacaattatagtcgttgtgtgaatacctcacccactcaagtgtatcacacaatgtatggctgttctctaatgaaacactcttgccttataccactctaatgccccttgagtacttaggcaatgcaagagattatggccacaacaaagaacaattcac

SEQ ID NO: 106109 - DNA, 73 bp, Glycine max
tcctgtgcactcactgactactctccacgagccattctgttttaacacggtccataatcttaagctccaaatc

SEQ ID NO: 106110 - DNA, 73 bp, Glycine max
gcctttcttttaaactggaaagattctgagacaccccagcctcgacttctaggatccaagtttgcgctcactc

SEQ ID NO: 106111 - DNA, 266 bp, Glycine max
  unsure (1)..(266): unsure at all n locations
ttattcccaactaataaataaaatcatanaattgagttccaccaaaaataatgtntgaaggacaactcggtgatgttggtgaagtcgggaaatattgctagaaagataacattgtcaaactaagaaaagtgtagggtgaaaaatgtgtcttttcctctttgtattcccctatanatattggttattacaaataaatacaagctgattttctgccctgtanatagcaaaactacggaaatccctatattgcagtgttatattctaat

SEQ ID NO: 106112 - DNA, 171 bp, Glycine max
  unsure (1)..(171): unsure at all n locations
catatccaccgcgccagttctcgcactttccaacttcgagattccatttgtggtggagatggactcttctggtaccagaatangggctgttctttctcaggcgggtcaccccatcgagtttttcagtaaggagttntgtcccaagctctgtgcttcctcaacttatattcg

SEQ ID NO: 106113 - DNA, 319 bp, Glycine max
  unsure (1)..(319): unsure at all n locations
agcctgtaatcgattacacatatactgtaatcgttaccagagaagaatttcagaaaaatattctcaacagtcacatgtntttacttggttcttgaatggccatcaaaagcttatatatatgtgacttgagacacgaatntgctaagagattttcagaacaaaaaggtcttatcctcttaaaaagcccaaatcgtttatcctcttaccaattccttggctaanacacttgtgattcagtaaggaattatttgagtgctcaaatngttcaatctatctctttcaagagagatttcttcttttcttcttcttcattctgaaa

SEQ ID NO: 106114 - DNA, 416 bp, Glycine max
  unsure (1)..(416): unsure at all n locations
atgatgccgatctaacatntcctaatcgacatcatgcaaatntcgttcatggattgaatcgataactcattagccgacatcggtcgtgaagtagcctcgactggtattntttagccgacattgcgcaattntcttttaataaacgctcgctggtcgataatggtttcttctcggcagaggaagttttcatttgttggtgctgcgtaaaaaatttataatgtacctcggctaggcttttcatgcgacacaaccgacgttttatncggccgaactggcatttcccattattcggctgaaacattacccacctcgcaaaaattttgccaccacttatgctattcgttccggatgaatgaactcataccgcatcgtcatgaataccccactgtttagcaccgcattgccattttttaaaa

SEQ ID NO: 106115 - DNA, 134 bp, Glycine max
  unsure (1)..(134): unsure at all n locations
cacacngatgtgcgaattcggcgcataatatgttgagagggctcgaattgaacaacgaaagctcttgagaaattcatatggtcataacttttcacactgatgtctgattcatgattatactatatcgatacgct

SEQ ID NO: 106116 - DNA, 339 bp, Glycine max
  unsure (1)..(339): unsure at all n locations
atatgctgtattgtgagcacatgctttagcatatatgtagtttgttataatgnngagcttacattataccaaattggaattcagcctagctgactaccaagaaatatcctagtaaaacctttaggataccgaagcatatccctagaggtttcaggtgttcagtcctgttgaatactcgagcacttattatcgtgtctctcaagagataacttctttctactagtatcaagtatttggccctgttgaagtcccgagtaccatggttattcaatcgttcaaaagatagcttagttactagcatcaagtatttggtcctgcctaccatggttatcctatcct

SEQ ID NO: 106117 - DNA, 135 bp, Glycine max
  unsure (1)..(135): unsure at all n locations
ctggagtatatgatgaagggatgtcatctgctctagccctttntctcgataccatctgtaactaanaagaactcanaattccttagacanaattattcaagtntaaaaacagaaataaaggctgaaattaatgat

SEQ ID NO: 106118 - DNA, 315 bp, Glycine max
  unsure (1)..(315): unsure at all n locations
tgaagtanagtatgactgagtaatgaaataagtttgatgaagttgatattggttngaaattntggtttgaagcttttttggttgtattgtataatgcttgtttaagatattttggctggtgtgaatttatattttgaagggttcaatgatngacttatactatgtattgctttattactttaattgtatcatgtatgctagtgaataacaaattgacaataggaacacaaactattaagttgtagcgctagtttgatgtccctgcctttctttattaaccaatgtctagttttgctaaaagtttctctacttagt

SEQ ID NO: 106119 - DNA, 153 bp, Glycine max
tcattaagaactagctcatttctttctctactggccttagatgaatacacctttgtttggttctctatttgggtcttaaccctctcatgcaacttctttacaaactctgacctagaattcccttctttatgtataaaagaagtgtcaagtggg

SEQ ID NO: 106120 - DNA, 95 bp, Glycine max
cttgtgatggctaagcatactcttgttacatgatgtataagagtgctacttgagtctataaaatatctgttcgacgctatcttaaactgatgcta

SEQ ID NO: 106121 - DNA, 78 bp, Glycine max
  unsure (1)..(78): unsure at all n locations
atcttagaaatctacattctaaggcgatattttggaaaaccgtcttatatactacaattattttttttcttaanaaac

SEQ ID NO: 106122 - DNA, 147 bp, Glycine max
aactaagctgacggtagctacataatatgtttatggatcaagttagactaaaactcttcctaattcttgacaatcataacacacatttcactacacaccatatgttgctactctttcacacaaccagtctttgatcatggttacccc

SEQ ID NO: 106123 - DNA, 336 bp, Glycine max
  unsure (1)..(336): unsure at all n locations
gcttgcaatggttatggctctatacanaagtgaattatcgtgtnattaaataaaatntcagagtaaggatttcctcatctgcattcacaagtgattcaaataaaaagcatactatttctttgaaggaagaaattgttggatcaagtggcctcggaataattaagaagggggggtcgaattaattattaacgaacctttactaattaaaaatctattcttcttaatcactaccaaagtaacagcaataattaaagtgcacaacagatattaaaagagtagggaagaagaagacanacacacgagaattatactggtttggaacaacccgtgcctaca

SEQ ID NO: 106124 - DNA, 345 bp, Glycine max
  unsure (1)..(345): unsure at all n locations
gccgcatgcaagctngatcaacacgtatcataatcttacagcggtctctaacaatnggtttattgactcttctcaaccaaatcaccttcttccttgtgggaccttcattntctcttcagatagggagaggaganaatgtttcttgatttggtattgtagggaccataaccatgccttaggtntaacctattanggtntcattatcccctaatgggtcaaactggtttccgctcattaagcccatatcacatttttgttggcagtctaatggactcattgaattagatcactttatattgaaccccatctaatgtanataactgatataaatgttattatataatg

SEQ ID NO: 106125 - DNA, 127 bp, Glycine max
tgtatagaggagctgttatgatttaaagatgataataagcctgtttgaaacaaaagtagcgttaagaaaacttgtagaagatataattttacgacaacttgtctgacatgaaatagattcgcaaaca

SEQ ID NO: 106126 - DNA, 412 bp, Glycine max
  unsure (1)..(412): unsure at all n locations
gcattcattctntctttacccactcctcacgtttggttttttaggaaacacaccataactaaacgcgccacaaggcatccctatcgcaccagatccaaatctagaacgatgagtgatcaagaggagacacaggaacagatganagccaacatgtcggctctgaaagaacatatggcttccatgatggaggccatgttaggaatgaggcagctcatggagaaanacgtggccaccgctgccgctgccagttcggctgccgaagcagacccaactctcatggctagcgcgcgccatcctccctcanatatanaaggacagggaaggaacacgctggtgcatgacggcaaccctcatctgggatacaaccgagcggcttacacttatggatngccgctcaactactcatcacccg

SEQ ID NO: 106127 - DNA, 407 bp, Glycine max
  unsure (1)..(407): unsure at all n locations
tcgagctnggagaagtacttctattatgcttctgtcaagttgtccggggtggacatgtctttgggtttgcaggcgagatttgacgtcttaagtgagggaagcctctgaatttgataactntgtccttctctgatagacgttacattctatctgctactgcaggcgtgtgcagcacatacgtagtactattgcatatgtgtcacttgtgaagtgagcatgtactggagttgtggtgtgaaattgtccacatgattacactagaattagttaaaaggtttcacatattactcttttctttaaaataaanatagattctctctcaatnnttgttntaagcctattttntgtttaactgactntggataaggataatgaagtaagaaattaaaaaaaaaaattctaattga

SEQ ID NO: 106128 - DNA, 374 bp, Glycine max
  unsure (1)..(374): unsure at all n locations
gcagctgatatgctggcatatatagtcttttgatctttccctctccaaaagtttctccgataaactgtaagtacgaatctcactatgtctggctaattcttgtgaaggcaccctcaaggggccttagttatcttcatttggaaaatgcgaatatgattataacccaactgcttgtcgtgataacccanaatgcgaatattattattattattattatcacaatnttcacaacgatggttgactagctnttcccatatcttnttatttcagtaaccgatcacaaaaccacatacccttctaacaaccaagaacaagaagaggaagctgtttcagccccttaaagaanaggtggtanaagcgacaagaattatgtg

SEQ ID NO: 106129 - DNA, 112 bp, Glycine max
  unsure (1)..(112): unsure at all n locations
agcatgggagtngaaagaaaatatttacatcaataatctanggaaagtgaaaagtgtaacggatgccananaagccaatatgtcaagtaagtgattgaataagttgcaatta

SEQ ID NO: 106130 - DNA, 210 bp, Glycine max
  unsure (1)..(210): unsure at all n locations
ttgatattnttaagaaatgggagataacaattacctattgggaaactctacatgagatgccactctatccactaatctttagagatctgtttaccgagaagagcatgtacattcacagtgacattgtagttatggaaggatattgcagcgctgtgattcaaagaatccttncaccgatacacaaagatcatgggagtgtcacaatatcct

SEQ ID NO: 106131 - DNA, 152 bp, Glycine max
atgactagcctgatgttggtgaatctccttacttcatacatcataatgtgagtttgctgtctgtattacagatattcgggcttaacatgtacttgtctctctccagagaatactatgttatctacgttgtcatgtaatacagcctgtcttgc

SEQ ID NO: 106132 - DNA, 363 bp, Glycine max
  unsure (1)..(363): unsure at all n locations
agctnntaaaattgaattaatatgttcagaaactgctgtgtaatcgataccatatatgtgtaatcgattacatagggcanatnntgaattcaaattttaatagnctgtgtaaaatcagtttggccactggtaatcgattaccagagagtaaatntcttgtaaaaaaacttttaacttaattttcttggacaaaccttntgctaattcaattggaattcccttcctatntaatataccctntctaagactctatagactgtcttgatcatccatcttgaatatatntaatngctttgtcttgaataagctntgagacgcatgtgatcttttggcatcatcaaaacatcggcttgatcctttgtc

SEQ ID NO: 106133 - DNA, 269 bp, Glycine max
  unsure (1)..(269): unsure at all n locations
gatgatacatgatttgtgactngtangatttgatttgngcaagaatggatgagaggaagtgtgattntcgaaatctgcacttatgcagaattttgctgtcaaataggtgcagcagaaattttggctttgtgcagaaaaatgctagtgtgtggtgggctgtggaaagagtagtacagactgagttctggatgtttgctagtagatcccaacggtcacaatgtaggcttaagtactagagacttccagtaaaattttggagtcgatcccac

SEQ ID NO: 106134 - DNA, 127 bp, Glycine max
tcatgctcgtgcacttagcgcaattctgaaccgcttagcgcacattagtgaatttcagcttagcgcatgcgtttctcgctcagcggatggactaaagcggtgcgcttagtgagatgaagcggtgcgc

SEQ ID NO: 106135 - DNA, 368 bp, Glycine max
  unsure (1)..(368): unsure at all n locations
tgcatgcttancacctggaacccggacgctccatcaactatctagtcgatgttggacaaagggtatgcatctgtanggcacaccctatntagatcaatgtagttggtgcacattcgctatttgccattgaccttcttgaccatgacaacattggcgagccaagtagaaaacctgatttctcgatgaagttatccttgacganggtgttgactctcttcttgaagacttatgtcagtcatctcaaatctttctttcttttctgagatattgggttcggcctgcggtcgactagcaatttgtggtatattatgctaggatgaaatcccgacatgttagatggctgccagaaaataaatccacgttctgtg

SEQ ID NO: 106136 - DNA, 417 bp, Glycine max
  unsure (1)..(417): unsure at all n locations
tcttcagcacctgccgctgcagctatgaaatattccaattaagatgaggatgttttatctattcaccttattgtantccaactggacctcaccaaagatggattccatatgaaatgtctcttcacttcatccatattaaccctttcaacgctgtttgagtaatttaagttacacattttcatatgagaaagtaatggtggcaaataattcaacttacttgcttcgcacacaacaaaattgtttgaatcccattgaaatgacactttcaccaaagttatgcaactatgcaatagaaacacaaatattcttatgtctatcagacttcaatgcgattactacctagtgctcatcctatgacaaggaggtgttaacaatctctttaacttcttgctatgataacaaatctcattcatatat

SEQ ID NO: 106137 - DNA, 365 bp, Glycine max
  unsure (1)..(365): unsure at all n locations
gcactgctatttgcttgccacacctcaacgcgatggcactcacattcttcggattctgcacacgctcgtgaaggccatctgtcacaaatctgggactgagctcggttcaactgagtagccatctgccccatctgatttgacagactctaaatggaggctcttgtctcttgctgaaatngcatattctggatggtcattctgcccactaactcctctaaagaagggtgagatcgggcctcaactgctatgttgttttgttgttgttgctacattgccggaggaacatatggcctgcttggaccancatcattctataatgtagggacatgtctgtgtgctgctattcgtgtgggaggatatctcat

SEQ ID NO: 106138 - DNA, 157 bp, Glycine max
  unsure (1)..(157): unsure at all n locations
cttcactcaagtgttgtatncagttaagttgtatcatttgaaggatgcatatgtatgtttcatcaaggatgccaacggttactccttcattatatgcctattgtttgtggtctatatcacattaaatacaacttataggccaagtgtaacccaatta

SEQ ID NO: 106139 - DNA, 355 bp, Glycine max
  unsure (1)..(355): unsure at all n locations
gcagctctgaaagtgttggttttcaccttctcgctaggcttatctgtngtcttancgagcgctcgctaagctcaacactcatgggctaagcacgacgaagactctggaagaagaagagctataatggttcattaagcgcaccgctttatctcactaagcgcaccgcttcagttcatccgctatgcaagaaaggcacgctaagccaataatcacttatgcgtgctaagcggtctataagtgcgctaagcgctcgagcacgaacaaggccatctattnatgcctgaaattagatnttagaatgggagtatagactgtgattcagatctctgcatgtctatgggttctagagagagaa

SEQ ID NO: 106140 - DNA, 313 bp, Glycine max
  unsure (1)..(313): unsure at all n locations
gaatctgagacatttttcaatctggatgtagcccttagcttgcttgtgcagcttgtccatgctaccttaacttgctagggcataaggcgaagagcatggaatgccacgctacctcgaggttaagaattcaaatctggacgactgtgcgcgcaaatctgtccatgaattntntaaaggactcgttgtctgcttgtcacagactatccaatgcggtcgaggtcatgcggtgagactgctggtggcgtactgcacactgaatcattctacgagggtgtcgaagctattatggacctaggtaggagtccatcatact

SEQ ID NO: 106141 - DNA, 189 bp, Glycine max
acacttggagtgatcacctgcagtccttcttgaacccttaccacccactctgtcatcatgccgacactcaagaagcccaacatctatagccttctctaagtgatgcaagctacattggagcttgatgcctaagatcttcttcatcaatggattcctttgctttcttgaagatgaatggcaacggaatgg

SEQ ID NO: 106142 - DNA, 108 bp, Glycine max
  unsure (1)..(108): unsure at all n locations
tgtttagcaaaatctttgctctcatcaattcatatttattctacgcagccttactggattcctaagtgcacttgcgagactatngatgatcaattgtgttgtcgttta

SEQ ID NO: 106143 - DNA, 420 bp, Glycine max
  unsure (1)..(420): unsure at all n locations
agagcgactgccgcatgcagctcagagcagtgcaaggaaatttaatctctatatcatcaacctngaaatgataccttcattctacatgcttgagaatgattacgaacctactcgctatattaaatctttatgagaaaactcttgtatattctataagatagatagctctcnaacatcttgatactctatacagaaactaaatgcttagatttacattcgttgtatatgattaaactcatcattagcaatcaaacacatacttttgattgatatacctcagtggttggaggacaaaaatatctgtgtaaagctgtgataacttgttggaagctacagtactgtgtaaatatgaacttgttgtaccaaactgactatctgatgggaccatacattaaatggctattttttagtacttgttaa

SEQ ID NO: 106144 - DNA, 267 bp, Glycine max
  unsure (1)..(267): unsure at all n locations
ttacttgtgataatggtttgtctttcattaatgtggagtcataaagctgttcgaactattagatacctatgataaattacagtttattggtactcatcatttgtataaactggagtatgcagattgtgccatctacatgtaggatgtgaaagtgtcatgcttggagatgctcatagcattaagtagtctattgaatccagactacttgcctatataatccanatatatactgtaacatgtgattgtttatgaggatatatactactc

SEQ ID NO: 106145 - DNA, 125 bp, Glycine max
tgccactatcactgttatcatcttcttctccatcagtgagggcactacatgagctgccagatccctccacctttgcgcgtattctttgacagatacatgctccctcttaacacgttctgtagctg

SEQ ID NO: 106146 - DNA, 479 bp, Glycine max
  unsure (1)..(479): unsure at all n locations
gtcacctgggctgcagctatagttgggatgatgtatgctgtgtgtcttatcattgcataccctncaaggagtganggtcacagaacttgcaacaggatcaccgangtgtttgaggtcaattggaaaactatgaaagagaagtggatgcgtgaggccgaagagactaacaagaattgcaagagggaattacatgtgtgtccaaatgaaagaagtcaagtgagtaatcatctcacacaaaggagcaatatttntatgtgctgattcataatagcttctcatcacaagtcaagaaagctatgccaataangggcattatgagcagcatggacattacncctcttcaacagtntcatttaattacctggnttattcatnnttatgtataaagtatctattgagtttcacgtaagacgtctctactggttctattttgagtcgaagattactcctcaataacaagaaaagttctgtatgtatgt

SEQ ID NO: 106147 - DNA, 159 bp, Glycine max
  unsure (1)..(159): unsure at all n locations
taccaatcagaatttggagaatgagattatgtcaatatgtgatcatgtcttagaatcaaactagggtgatactngaagacaacatagattatatgatgcctgcaagcacgacccagcctttgtcccaaccttaaagaaaagtgcaaatgtgcatatcat

SEQ ID NO: 106148 - DNA, 428 bp, Glycine max
  unsure (1)..(428): unsure at all n locations
agcttagccctagaggagatggacctttctcatgtttgtataggatcaataacaatgcctataggttggaacctccagaagagtatggagtcagcaccacttttaacatttctgaattaactccttttgcacgtggagctgatattaatgaggaggaactaacagatttgatgtcaaatcctcttcaatgggaaggggatgatgcaatccttcctatgaagggaccaatcactagaaccatgagcaagaggctccaagaagaatgngctagagctgctgaagaaagcctanggttctcataaccttngagagattctgagccatggccagcgtgtgccaatatcttgtcatatagactggatgcattatattggccttgatatcggctcatatgtangacgataccctaaaatangatttcacccttg

SEQ ID NO: 106149 - DNA, 374 bp, Glycine max
  unsure (1)..(374): unsure at all n locations
ttgaaggaataaaagaggaagagaagtggaactttgaagtgtgtctcatangactttcattcatccaagtaacaaaaagtgttacacatgcttctatttatagcttaggtagcttccttgagagacttcattgagaagctctcttgagaaacttccttgagaagcttctttgagaagcttccttgaaaatctagagcttaactacacacacctctctattaactaagctcacctccttgagagacttccttgagaagtttccttgagaagattctcagagaagctagagcttaattacacacacctctctaatagctaagctcacctccttgagatgagaagctagagctcagctacacactctctataatagc

SEQ ID NO: 106150 - DNA, 242 bp, Glycine max
  unsure (1)..(242): unsure at all n locations
aagtactattgtagatacacatatgattntccacgcagccacgctcatntgcgacatttntttaagaacatgggattgttgcccaatacactatgcttggttctccagatcagaatggtgtggcagaacgacaaaatcaaaccttattagacatggtgagaagcatgaggagtaattgacagcttcctacattttgtggattgatgctcttaacaacggtgtgtatatattaaatccagttc

SEQ ID NO: 106151 - DNA, 457 bp, Glycine max
  unsure (1)..(457): unsure at all n locations
cacctgcggcatgcaagcttctaaggaggggagcttagttattagatgggtgtgtgtagcatttttctagcttnctcaggaagtcttctcatagaagttttctcaagaaagcttctcaaggaagttacctagtctataaatagaagcatgtgtaacacttgttgtaactntgatgaatgaaagttttatgagacacacttcanagntccacttctctccctcttttattccttcaatactgtgctcaccccttttctctttcttttcctccattagaccatcctcttcaagcttcttatatgaggtacattcatggtggtgaagctccttcntccatggctcataccctagtggatggcgcctgccctctcctctacttctttgccttccgctgcagtctcatggtngaanatcagcattgaaggacctcatcgnatctcaaagatccagcctccat

SEQ ID NO: 106152 - DNA, 72 bp, Glycine max
tcttagcttaactacttcattttatggaaggaaaaattaccttttttcaatatgaattatatatggtctgtt

SEQ ID NO: 106153 - DNA, 315 bp, Glycine max
  unsure (1)..(315): unsure at all n locations
ctatctaacatcatctacctatggagaaacacatgcaccaatctgcatatatgcaaaatctgatagaagacatacaatttcgaaccctcttatagaatatgtgaaagaccctgacagattatatttatgtgccaagaaggaaattcatgtatatcttgagtagccttaactttgacaccaccactattcttactcctcaaactccatgttagagttgtctgagcacatacatgtgcaatagangtaacgactttgatatggaaaaacatcttacattacaagaagtttcgtttgttctcttgatacatgcttcac

SEQ ID NO: 106154 - DNA, 183 bp, Glycine max
cccatgttgtgactgtcgttcctacattgccaaatttctcaccagctcaacaatatcaatacttaaccaatatcagcccttctcattacccaccaccctatcaaccgagaacacccaattattcacaatggccactcctatattatccacagagcccgccttccgcgcattcgatacaaaaca

SEQ ID NO: 106155 - DNA, 400 bp, Glycine max
  unsure (1)..(400): unsure at all n locations
caccgggctcagctgtaacactgntagtatatatatttttatatttacactttgcatactattagaatatgatgcagagagtctaaggcttagagtacttctgtgaaatttcaaagaaagaccagttaaggtatgcaccaatatattcaaaaaaaatgttgaagatatctaaaattaatatttattgctatttgacaatatcatatcctatatgaaatatgcctttttcactttttgaacttgattacatattgatcaatgatttgtatatatttgattgcattctaacaattatagtcttttatagtttactagtaacatatgtgaaccttacacttaatgtgaacaccgattattaccaccacctataagcttcagagacagtaacttttcacagctg

SEQ ID NO: 106156 - DNA, 382 bp, Glycine max
  unsure (1)..(382): unsure at all n locations
ccacattcttatatcaaaataattattttggcagtatattttatttcatcttaaatggagaatataataaaaagacctgaatcaaaataattaacgtctgcgaacatgaatcagaatcttnctcttttatataaatacatagaagtactttttgccaatgaaaatataatcttccttttttataaagacaacatatgaatcatagtgattgacggatgcatcatttcgttntatgatactctaggagaagagatagttttaatagaaccaatgttattatgccgtacttgtcactattaatagacgagaattatntncatttgacatgatggtgatatcctgatagataattctattgctaaatatttattaaatttatatt

SEQ ID NO: 106157 - DNA, 338 bp, Glycine max
tttcactatctacattatcattaaaaattatttgatccattgacctacaacctaattaaagtgaaaatctgctgcctaaaaaaatcaagaatgactttatgataaatgtaacagactaatttgactcaaggatagaccatctctatcaatgcgatctataatagtaacatttatatggaaaaacacaaaaacggcgaagaaccacacctaaggcgatttgataaaggctgatctatgccctcctttatcaacctatgtacatttcacctcacctcttttttcactaactacctttctccccaccctctcctcgagctttttcgcgctatctttatcta

SEQ ID NO: 106158 - DNA, 262 bp, Glycine max
tattacttagcttcataaatattggtttttgtagtatacatatcaggcatatactaccatgaaactcaatttggataatgcgcgcgttgatagaaagtgaaccaataccattaatatgacatcttgaactgttgtagcatataaattatatagcaaggtagaaaacaatattagtatagtactgaaggctaacagtgtgagacaatcttaaatctcgtttattgttttaattgtaatcgtaaataagttctaacttaacgaa

SEQ ID NO: 106159 - DNA, 433 bp, Glycine max
  unsure (1)..(433): unsure at all n locations
atgaaacctgngtggncagccaatgcaacaatgccaattggcacaactgaatgtggttcatacctcaaaactgcatgttgcgcacactgttgttacaatgaaagagccatcgaacaaatatacaagtcaacagtattccaatgacttattaggcagaattatgcagacaaattaacttcaagactccattcaaaatatgaaacagatttatgtttcttctaatttatgtttccatctcaagagagttcatcttatgcagggaatagggagctcaaacataccataagcacgggtaggatcataggcttctatatcctctacgtgaagcgtgatcggaaagaattgcaacgtgcttgctatgacctgaatgtacaaataccaangtggattatgaacacgtaaaaagcaaactggactaatgtacgaatgaaaa

SEQ ID NO: 106160 - DNA, 150 bp, Glycine max
tttatgtatgtaagtccaaagacactatattttctattgtataatgaaatatgatgaaaaaaaagtgttgaaacaataaaatatagtaagaatttacttatgttgtgtagaaacatggaatgtaaactgcaattgtgaattgatatgttt

SEQ ID NO: 106161 - DNA, 370 bp, Glycine max
  unsure (1)..(370): unsure at all n locations
ttaagcaccgccgctgcagctgatactcttcttgagagtatattatgtctttctagncgnatcagacatgctcgtctggatttgacatatgcacataagttgctttgaatcctgtgtcttcttcggttagcaaacgttacgaagaatgacacccgatatgtctttaaatattaaagaagacgtaacgaagcagtttgatgcaggattcttatctgtggcacggtactcctgagttgggtggccaacaattgtcccagtcctcgacataggacnggaagagtncgaatgtgtgtagactacctggacttgaaccgagccagtcctaaagacaatntacccttgcacacattgatatattcgtagataatat

SEQ ID NO: 106162 - DNA, 238 bp, Glycine max
  unsure (1)..(238): unsure at all n locations
tcagccatgtctgcaaatgaataattgttgaacccttcaacatacctcaatctttcttcaatgagatcgagtatccnctntctttccactgcccgtggtggccctcccgcggacagaaacattggctgcgttgggtggtttcgaggttctttcgtgatgttgggttgaggtagtgcgttgggtgccggtccctctgtgagatacacggagtaggagttgacgtcttccctaacatgct

SEQ ID NO: 106163 - DNA, 305 bp, Glycine max
  unsure (1)..(305): unsure at all n locations
ccccccccagtattggtaatttnaaattattccccatatccctgatgcccctgccctcccccgaccccctaccttcctacacccaccctcccaacccctcaccctctctccgccccatccacacctccccccatactcctccccccctcccctccatcttccccccgacctcccttctgcctccctcccatccctcccctcctaccctcctccccctctccccctcccacggtctcctcccccccccccccccctcccccacccctctcccccccctctctctcccccttccccctcgcctctcc

SEQ ID NO: 106164 - DNA, 424 bp, Glycine max
  unsure (1)..(424): unsure at all n locations
atttggttaattggttggattctgaatattaaaatagntaatttagatattataanaattgtatagggttttaggtatagtaaaatagtagtgtattaagtttctatcttaccttaatattaaaatggtaaattacgtttactctgataatttaagtttgtacggtagattaattttagttatagtttacatgatattaggtttagttgaatgatattagttagtttaatttaaatgaatagtttgacgtacgttagttggtaatatattaattttatgaggtagtattgaacatcgataattgatatatatgataatctggctaaataaatatgtattataaattcggtagttaaggaaatagtaatgtattagtttacgacgtacttatatagttaatgatagtttcctagtagtagtaaaa

SEQ ID NO: 106165 - DNA, 242 bp, Glycine max
cagattgtatcttatataaacatgaggacgagttggtacacatccataatgtggacgagcatgtaggaaatatccatttgcagttacgctttggaagcaagtaattattttacgtatctgctagcagacaacagtttatttgcaccttagaagaaaactgaccaacttttgacctattaaattttgcactctaagttgtgttaattacaacctagttcatggataactcggtcattgatctt

SEQ ID NO: 106166 - DNA, 384 bp, Glycine max
  unsure (1)..(384): unsure at all n locations
tagtatgtgcaattatatcaagttctatctgatctcttccccttaccaaaattctctcgtgaactgtngttgtctctcactatgtctggctaatccttttgaaggcaccctcaaggggccttagctatctctatttggaaaatgcgaatatgaattagaacccagctgttgtaaacattctgtttttacctttcttatcctcctttttgcttgtttttcgaaaacctgngactggtaagcctgcaaaggtgtgcccttgatagttgtctttgaaaaactatgacagtcctttttggttaggctggtgctcggacgataataagatctacataagacccacacgttagtgtgggcagctcgcgatcttcattacttcagctaata

SEQ ID NO: 106167 - DNA, 376 bp, Glycine max
  unsure (1)..(376): unsure at all n locations
ctactgacaacttgatgacatgggctgatcccgaaagaaattatataacaaaggctacccttggattcaaaaggaatcctaaggagtctgcatgagcgactaacatcagatgtatcctactatcacaattgtctgtgggcattntccatgagctcctagtcgtatgagttatcttctcaaatgtgcaagtgcagaacctcgacgatatctttttttatnttttttaacaatcataagcgtgtgcgggtccatttcagaatccaaactaaagcnaattagtcatccttgaccatatgggcttattggcttgtatgtggtaggggtagaggctataaagaaagatcnacaggctcaaaagtgttaaagttatattgag

SEQ ID NO: 106168 - DNA, 482 bp, Glycine max
  unsure (1)..(482): unsure at all n locations
ctctcagtcacctgacgctgcagcttgatgattacattctnnccctttctcaagcatattcttaattcttcttgacatcatcaaaatcttcatgaatttacactctccccttttttatgatgacaaccacttgtaggttaggagcaacaacaaagaanaaatatctatttgcatatagtttactaccccctggtttgcaatgattacttatatgagacagttgaagaattcatatttttcatatgtaaacaaatggtctcataaacaatagataatanttcttactatnttatcntttatatntctctcccncttggcaacatcaaaaacaaatcatgaatagaggagaaagatgttaccacttgttgtaatgtatgagaatcaagtgatactcaaaggcattataacaatcattcaatggtaatcaagcanaaacaagtataatagcacatcaatcaaacacaatcatatacaatcaatca

SEQ ID NO: 106169 - DNA, 385 bp, Glycine max
  unsure (1)..(385): unsure at all n locations
gtcatctgctcaaataaagccatctgagacttcatacaattaatatgaacnttatagnccacatgtcacatcctatcagagcgttgtgtctcgacgtccttcagcacaatatcccttaaagcaattcacctagttatctgctcccccgaacacagagttcaagatcatcacaggatccanacacacacaacanaccgggagtgagttatcacattcctaactaatagagaaataagacaactagatacacatatcatatatactaaataaaacttacttacacgtaattcacgtatatccaccactttgtcatccaaaagtcacttttcatccatcaatcacactgttcaatcatcaatcacattacacaagaatcacacgctct

SEQ ID NO: 106170 - DNA, 280 bp, Glycine max
atagcctaagtcatttatgttcaaagaacgaaattctaataacacaaatctgacttgataactatattagcataagagttcacaacttagacaactagttaatctaaatattgatctaactatctgcataaacagaacaggtacagcgagaatatcacatatttgtatatgtcgcacaccatattgacatcccagtaatactatctcttttaaccacaacactaaagacagaagcattcgattggcatgtgttctattttctctaccaaaatatcgatca

SEQ ID NO: 106171 - DNA, 355 bp, Glycine max
taatctcagctgcctgacattggcaagtgaccgttggcctatttgtgctctatcgagctttctcatttcaactttatagttcttcaagtattatgcatcaagtttcttcccccccattcgtacactctcctatgttgtttaatcctgttggtcaagaatataaatgatattaaatatctcgttagttcattcaaaacaacagtaaaataaagaaattttaatcattcttagtcaaatctaactatcaattaaattcaaattgtataattatcaaccttgatacaaacacatatatcatgttgctttaatctttattacgggctaattacaaactcttctaacatcatgatgaatg

SEQ ID NO: 106172 - DNA, 395 bp, Glycine max
  unsure (1)..(395): unsure at all n locations
aaggatggataaatttggtgcgatgactnnacgtggccacaccttgcacatgtgaacttaggcaattttctctatagcttatgtcctgtgacattgtcctcatctacagatctccttctattttctatggcttctcttggaccttatatgtgggaaacagggtgtgatactgtgttgggacaataatgggccttgactggttaataaatgctggatgcttatataactttattgaagaactcatgaacatgtctaagcttcctctttggagtattgtgcgtggatgtcgatggtatctaataaagtgtaaatagacacatgttgtatgagaaaaaacataaaacacactgtagtgcatatcacaggatgtcttactaatgactaactatcccaat

SEQ ID NO: 106173 - DNA, 320 bp, Glycine max
gcacacacacatattctcattaacaatagattgggcgagacaacataaacacgacattatgatatatgtaacgatataaatataatataaaaattgacataatgtatacataacgatatagaattctatcatacgagcaaatttaatttaaataatttagtatatatgtgatcatatgactcacaatctataataagacgctcatatactaaatattatgtaatggtaatgcgcttaagaatctatgataaaatataaagaagttgttgcactaacactatgataatattaatcacgcacactctctaatacatcattat

SEQ ID NO: 106174 - DNA, 182 bp, Glycine max
catttactcaacgagcataattgtaacctttacgggtttaaaagctctatagttgggcctacgctttataagttttccttttgttaaggctttgtgtctttctgttttgaatttataatacaaggatctttctctatctgtacctggtctttaccagtctcattcatttgcattgttacttc

SEQ ID NO: 106175 - DNA, 222 bp, Glycine max
  unsure (1)..(222): unsure at all n locations
gcttatacggcctgtagtctcgagattttactttttttggctcacgccgcctataatcgagcatttatcaagaagtactagcgctctatgcaggcgcagggcgatacaccacatctgtctgtggaatgcctgtagagggcaacaaacgcaccgtcatcacctntagagtatatctctgctcatccacaaaaatgattgagtattgtctacaccacatggccg

SEQ ID NO: 106176 - DNA, 407 bp, Glycine max
cacaacaagttatcacatccacaatgcgcgcataaacccaccatcctctgttgcccacctccaactgagctcacgtactcccacgtagcccatatcctcgtttctctcaataccgggtccccatcaatccttccaagcttccacaacatccaagctaaacaacattcaaacagcacaagctatcacagccaagcataacagagcataggcagagaactctgctcacacatcaaccataatcacagtttctcacttaagacccagaacaatccttcaccaatcgtaccatggacgactcaaattactggagcttatacataccacttggacgtggactacacaacatctactatctgctaacttcaagcacccccaactttttgactggcaatctgtgcattacacaa

SEQ ID NO: 106177 - DNA, 119 bp, Glycine max
  unsure (1)..(119): unsure at all n locations
ttgaatgtggaatnctaatttctcaagtgatcaaagttgaaaatatgcacacacactgcctttatatatatctctaagtatcacacacaattggatggaaatatgaatttctaattaaa

SEQ ID NO: 106178 - DNA, 307 bp, Glycine max
  unsure (1)..(307): unsure at all n locations
ataagtgcgggttaagacgtgaaggccaagttgtcgttatatgtgaggatgactccccgaggagatctgatntggtatggccatgtcctnccgggttccgactangaaattggctagtggaggaacgcccanacgtttacgtgacatgcttaatgtaaccctttgttgctttgaaaactctactgttgagcctacgctttagagtatccttttgctaaggcattatgtctttcgttcttgaagtntaatataaagatctttcttcatctgttcctggcctctagcattctattaattgcatgtttat

SEQ ID NO: 106179 - DNA, 360 bp, Glycine max
  unsure (1)..(360): unsure at all n locations
actatgccataatatggtgatgtgagattttgctcgaaacttatgcgtgaaatatgctgccactgacaccaatagctcgacatgagacgccacntagttaccatcaccattaataatgtaattcagtttattctttgtcctcctaattgatgtcgaggcatggaagaatttataattcttgtcttcattcctcaatcaaaacaccttaggtatatgcctacaaaaattatgttctatgactaagagagtagtgatcttctccttcaacttgttaaatctctccaccacatcataacataataatataagagtatggtctaacaatagggaaatcatatagatgtatcgagttgtggatac

SEQ ID NO: 106180 - DNA, 326 bp, Glycine max
  unsure (1)..(326): unsure at all n locations
ccattattcgngtaatgctcttatgnttggttccaaaatttgtttacatcctttgaagcttgagacttcaagatatgaactccttgttccttngagcatgtcatgcaagcttcacttaaggaagggggattttccacttcttgaaccttataccttttgtctagcaaaatntatgtataacaacaagttaanggtctttgtangataaagttactttggatatgttggatcaagtggcctctgaataattaagaaggggggttgacataattattacttgaaccttactaanntaaaatgtacccttcttangctnttactataat

SEQ ID NO: 106181 - DNA, 275 bp, Glycine max
atctgagctcacgtacttacacgtagttcatatcctcgtttctctaaacaccaggtacccatcaatacctccaagcattcacaacatacaagcaaaacatcattcatatagtacaagctatcacagccaagcaaaacataacatatgccgatatctgttctataacactaaccaaaatcacagcttttctcacttatagacaccagttacagatccttctttccaattcgttacacgtggatcgactcaaaaattttactggaagactgtagtac

SEQ ID NO: 106182 - DNA, 307 bp, Glycine max
tgcatcttgtcgcctaacttctgtggattatgctcctctgccgaccaccacacagaccttgtccttctggcaacaatctgaagcaaatgaacaggctgaagcttatgctgcatacatctactagagacctgctcaacctcagcatcataatcagccacactagaacaattttgacctctccagcaacaggaacaaccgcgggaggggaatatatcaaccatagatggctgagactcacaacagcagcacaacacaactgtatatcctgaatgctgtggccacctcaccatcgtatctctactatact

SEQ ID NO: 106183 - DNA, 272 bp, Glycine max
  unsure (1)..(272): unsure at all n locations
aataggactaatgatgatgcatgagaacccatangtcctaatgtcctatggttactaaaccgttaaagtcattatcccacctctcatttatactctatattatttataatctataacttataatgaatggaattatatatattcaagaaaaaatggtttttaaacgacaattattcagctcctttttgatcgacctctagcttttttatgatttttaagcaagtacctttatgaggctatacaccgaaaagatactgattaaacacattgta

SEQ ID NO: 106184 - DNA, 460 bp, Glycine max
  unsure (1)..(460): unsure at all n locations
agtcacctgccgcatgcaagctngccgctggagctgactcattacactcttactccttagactggngatccctangctcttgaccttgactaggtacaacctctttataagcgaaggcgtttgactcgatcccatgttttactaaagagaaacaaatatcagtgcgaatcataactctaacatctatcatgggtggaatggatgaatgcatgaagaaaggcatatgacacacatgcaatttatgactacgatagcccgagaaatcgtctccttcttagatacaacgtctcgcggtagcacagtgtccgacgtatgtantttaagaaagtgacacgaaccctccgttgatctgctaaagagaggggatcaagacagaacccatgcatgatgcatatgcgaaaggcataacatggcgacgtacataatattcacaaacacataagcaaaggggacatgacac

SEQ ID NO: 106185 - DNA, 366 bp, Glycine max
  unsure (1)..(366): unsure at all n locations
tggcagcggaatggagaaagaagataggtgattggagatgccacttcaaggagaagatgagtcaaaaacaagctcaacaccataggaagccatggataagagctcgaaggtangaaaaaatgactggagggagagagagagagggggccaccaaatngatgcctcanatgaggtctgaactttgcaatctaatttctcaaattataaaagttccaaaaattatgcacacacaaggcctctatttattgccctaagtgtcacataaaatntgagggaaattcgaacttctattcacattcacttgaatttgaattgaatttgtgagccacatttgagccgaattcactaattatgattaatgaattc

SEQ ID NO: 106186 - DNA, 438 bp, Glycine max
  unsure (1)..(438): unsure at all n locations
aaccgagtaagctacgacaagtattcctattgaacaacctctatccatacatttctaagatagtgagaaggctaaccgacgaattatggaacttatatagactaactccttaactgatggcgtangtgacaatcatagtgaattactaaacaagattgtgtagttactatnggtcataccacatactcctctagcctcgaaaatacttcataatggaacataagtacctacaattaatttgtgtttaatgagatagtgaccaaactctgtaaccaactgnatatgatcagtgttaacaagaaatanatcatttactccttcactggacacacctctaatatatacaacgtccactgccctgactctatatagaagagtgaatatttatagttaggcatctctctatatgtctanatgcaatgataacatatgatcctc

SEQ ID NO: 106187 - DNA, 452 bp, Glycine max
  unsure (1)..(452): unsure at all n locations
ctgcagctctattagctgaccatttatcaataacacttgttgagtttattcagaaaattagaagttatctctcttatcttagagagagtgattctcctatattcttgagtgattcaagaacaccctggctgtatcanaggactatcacaacctttgtgtgttgccctcgctggaaagagtgantctttcctttcaatcatcttcacccttgttctttcaaaccacaatttcagagaatccacctctgcccagaaatatctcgtggccataactcccattntacgcactcanattaagtgattcttgagcctaaattgaatttcaaaacgagaactctcacctcgttntggaatcacctcatttggagccctgtagcttcagttattgtcatttctattattctgccagccaccacttaanctacatttttaccatccattcatnncatttat

SEQ ID NO: 106188 - DNA, 233 bp, Glycine max
  unsure (1)..(233): unsure at all n locations
ttgagttgctgcactagatgtccaacattatgtcatatattaatatcnnntnnncccatgcacaacgcaagataaagtgtcaaatgaagaattgaagctgcaggattcacgatgtcggatacaatgtccaggacatcctgcctgataatactggaattgctataagcattgaagctgcatgatccacgatgtcggatacaatgtccaggacatcctgcccgaaaatactggag

SEQ ID NO: 106189 - DNA, 279 bp, Glycine max
ctcaaatttctctaaaaagtattattattctttggtgatgatgttgcctaacaatgaaattgcttctattttcacaaaagatagttcgatgtattgccagtgagaaccaattgcaatcctaaacaaaaaattgagctatatcatatatgtattacttgaattttcgatagtaatgctatatttaagttacacaatcacgttataatttaaatcattttgaatggaaataattagattatttttctgtggccatgattcatatttcacattattctattt

SEQ ID NO: 106190 - DNA, 370 bp, Glycine max
cttaccaaatcagtctcctcctgagcagatgaagtatgccttggcaacgccagaataatacttggctgagtcaagatagaacgccacgtgcgactggattttatagcggcagaatgatatagaagcgtcggatctcgtggccttataataattaagatggaggttgaataattatcctacaccttactaatataaattactctctaagcctgtctatgttgtaagaaataggagtaaaagatctaaccaaagtaaagcggaattacaatgccagcggcagtaaagaggggaaacgaacaaccacagagtttatactgtcggtacaaccgtgctactcatcccaacacctgcatcttggattcatcacttg

SEQ ID NO: 106191 - DNA, 162 bp, Glycine max
atatttgtgagggggagatatagtgggttgcctttctatatggagtgaaggtccaatatgagaaggtctatatatatcatttatttaagcgatgagatggtagattataaagtgagatgcagtgatatggactcatttgataggataaatcagtacaaatta

SEQ ID NO: 106192 - DNA, 475 bp, Glycine max
  unsure (1)..(475): unsure at all n locations
caagcttatgatgaatcaagattgattcttcgagttatgtttgattcanagatgatgaccaanagctcataagtcatgatcacttcatgataacaacgattatgacatncaagaatgatgtcaagattgagtcacacacacttcacggatcaagaggaatattgatctcaagaatcaagatccaagactaatcaagatcaagattcaagactcaaagattcaagaatcacgagaagacttaatgaagataagtcttatatagtctttcataacatcgtgtggacaagatgtttcacataatcttaccacgagtttactctctggaatcgataccagttatagtattgatactagtggtttaaacgtaagatttcaattcacatgagagtcacatctgtgtgtgtacgatacacttatggatcattccgtgctgttcgaatatattccaagcacttttcatgcctgtctgaatctt

SEQ ID NO: 106193 - DNA, 395 bp, Glycine max
  unsure (1)..(395): unsure at all n locations
ttataccactgagatgccctcacctttaatatctnattatagaccatagtagtattctctatgcgacatgatattgttccttacaaggtnccgctccacaaacgtctagaaataattttcatggtgagatgacctattcttctatgccatatccattgatcacttntgaaggttgttagacaggattggctatgtaaggatactatacatattctatataggtttcactctcttataacagagaatagaaatcttctagttgatgctgtattaacttgacaagatatattgtcaaacttatctttatagccactgtcacacaattgactaatgcttaccaagtttacctacttctttgatgaaggctattctgttatcttcatagcaacatacta

SEQ ID NO: 106194 - DNA, 262 bp, Glycine max
  unsure (1)..(262): unsure at all n locations
tttttacttcttaacatctaactattcaaataatcaatattaagattccagatgtccaatacagacaagaaggtgtctacacataaccataaaacatccgcttctacattagatcactatgaattataatggaacagaggcacagaccaacttaaatagtagactaagatactggtcacttcaaatacccttacntattcagcattcaattatatggagcatgtngatcaccaatccagttgcagcagctcaagttccacat

SEQ ID NO: 106195 - DNA, 219 bp, Glycine max
tacgtgatatcttatatagtgatgtgtaatctctatacatgctactctagaatgaagcacatgatccttaaataagtaatggcgatagtattatcacatagcacacgtattttactctcatatttattgcaagtttctagctgctgcttgactcacaatagttgagaataacaagtagttgctggatgcatggtagttatatctatgtttgatgcatgt

SEQ ID NO: 106196 - DNA, 253 bp, Glycine max
  unsure (1)..(253): unsure at all n locations
cttttacttttatgtctgtattgagtccgtaacatatcgtgacgctctatattgtatgttgaacacttgagcctattcaaacgacaatgatagttgtttcggatgcgtgattgagatccgtcacatatcgatacgctcganattgaagatgaagctctgaccaattctactacgataactttctcacggatgtctgaagagtcccggacatatcgagaagctcgaaatgaatgtgaagctctgacctattcaa

SEQ ID NO: 106197 - DNA, 263 bp, Glycine max
cttcacagatggggcatgcatgatgacccttaacactgtaaccgctgagaattccatatgctgggaagcattaatggtacaaaaagcattgacgcatttatacgtctcttgtgaacacataaacactacacccctcgtccacactttctagatcttaacacggactagataacataatgcatttctgctgtctggcctgaatatcataacacatgttttccttatgccaccaagagcaattgtatactacaaactgctgactg

SEQ ID NO: 106198 - DNA, 265 bp, Glycine max
  unsure (1)..(265): unsure at all n locations
tgctgtcaaaacatggatgacgtcctaagaaaatcaatatcaaagaaaacatggatgaaatcacaatttaaaagcacaactacctatctttcagaagtccttggtaattnggcttctctccttatgtggnggggctntgtntaataatcttatactttggccttccaanaaaacttatcactaatcctcttttcattaatccaatttgatgttattgataaaagacatggttctcacctgctctactactctctcttctctcctt

SEQ ID NO: 106199 - DNA, 487 bp, Glycine max
  unsure (1)..(487): unsure at all n locations
tcattctaaatcacgaggtggtatagtgagaataagccaaatcagagttattcaaacaatcaccggataagttattcctcttaacacatataaaccctttggtttctatatataacagaatcatacaatnttaattggttagagacacagtcataaattctaagttgctcatacaatagcacgtatttccaccaccatcacaccaaataataaatatntattatggaaatacggcataatcattcacaattctgttataatgttngagacatattacacaatgtggaatatataataccaattaccaataatccagtattgtagatcgccacaacagatagtgtgagtctcgttggcgctatcacatntcttttacaagcaatgctatgcctctctcactgtgatgatgttgacacgcacctccctgttaacaggctgacacagggatatgcacaccctcgatgtgaataacaaatatcttctctac

SEQ ID NO: 106200 - DNA, 214 bp, Glycine max
  unsure (1)..(214): unsure at all n locations
aacagtcaattgacaagcaagtcacagtcttgcttctatagactctctatgtctggtcaagacaaccattatatgaattatgacctcgaaaaacctgaaaaccataggaagagcacatcctttgattcctattcacaactccgcactggtaatcgataccanaaccatgtattcgattacacacagctctctatgaaggacgactcttcacaat

SEQ ID NO: 106201 - DNA, 254 bp, Glycine max
  unsure (1)..(254): unsure at all n locations
gagtagcatatggtacatacaaagatatcatatacttaactatgattaatcatctagtctcatatanttgcaagtaaataattaattaccaagtaactacataagatgtactagttttgcttgatagttgatcgataaccttccttgtaagtacgtaggttccgttctatgcttttggtcatgttattccttacataatctctgggcttatggcanggaaaggaacncagtgggatttaacaagctggacacaa

SEQ ID NO: 106202 - DNA, 352 bp, Glycine max
  unsure (1)..(352): unsure at all n locations
catcttgccacacaatgtcatgttagcgataactcgcttgtgctttntcttccatgctatatgtagcacagtcattgatccactcaagtttgatgagttggaacatgaggccgcaattatactgtgccagttggagatgtattttctccctgctttctttgacatgatgattcactcgattgtgcacctggcatagaaatcaaatgttgcggtcctgtttattacggtggatgtcctcattgacgatcatgaaatctaaacggttactaaaattatatcttcatagcattattgcggaggacatgtgataagcattgatttgtcaaaacttagatgtaacctgtggtcctat

SEQ ID NO: 106203 - DNA, 366 bp, Glycine max
  unsure (1)..(366): unsure at all n locations
caaatcctgcgatgaagtgaattaacaatgacgaattgtatatgtctacaatcaatgtgaatttatttctcaataattcttaatctactatgtaccaagactatgaaataaattattaagaaagaaatttatgaaagaggagcttacatttgaccgatagaatcacattgtttcataagaacaccttcttgacaacatggcttatctaattatcagaactttctactatctctctgccactgatgtcaaaataccagtgcacatgtttaagtaggagggtagatgtntaacaaacattgcactcattacctatatatcattccaaactcaaattactaattggtatgtgaaccctgaatctatgtc

SEQ ID NO: 106204 - DNA, 338 bp, Glycine max
  unsure (1)..(338): unsure at all n locations
catgtgttatacaagtggcctcagatatcttaagaaggaggggtngaattaagatattccacactacttccccaattaaaaatctatttcactctttattcaagttatgaattcccttaatgacaatcttcttaaatattgattcanataaaacaatttgaatatgaatataaagcactaataaataaaggagatcaagggaagagagagtgcaactcagattatactggtttggcacacccttgtgctacgtcagtcccaacaacccgttgagagtcactattgtaatcctttacagtctaaccacaagacatccttctttggttagaatcttacac

SEQ ID NO: 106205 - DNA, 276 bp, Glycine max
  unsure (1)..(276): unsure at all n locations
agtacaccccctgccttntttggtgattctttttccgtaacgttatgaaactgtacgaatttcataacgatgctggtgttctttccgtaatgttatgaaaccttacggattacgtaatcatcccttttttgccttccggaacgttacagaactntacgaattgcacactaacacttccttttaatttctggcatatcacggaacttcacggattgtgctacaatgctttcttttgacttctggcatgtcacggaacttcacgaatngcctaacgat

SEQ ID NO: 106206 - DNA, 179 bp, Glycine max
  unsure (1)..(179): unsure at all n locations
ccctctacgtttctcaaggaagatntcttactttagctttccaaggaagctaccttccttgcttctaaaggaagcatcccatgtgctaggctataaatagaaacatgtgtaacacttgtgataactctgatgaatgtgaaacttgtgagagacacttcataagacaaattctctccata

SEQ ID NO: 106207 - DNA, 473 bp, Glycine max
  unsure (1)..(473): unsure at all n locations
atcttaagcaccgccgctgcagcttaataggctgatcaatatatgttatatttatactaagnntttacaagaatagtatgcatctctagtactctactatatacacgcacaaaaagtactctactacatctaaatcctttatactactaattntcanagtagttgacttgatgcctcccttggccttgacatatgtgtgccatgtgaactatagacttatatgcatataattgattattttttgaacactatatatgcatataataagttntggtataacaactagacaattataatatagaaatttatcagtacatttgaaagacatgaccgatgtcactccgtatatagacaatgcgtgatttgtgtggttgtgggtggtgaacaaggaaatataaaaaacatctatatataacatttaagtagtctaatctgtctactacatagttaaataaatctcctcgttaaaaata

SEQ ID NO: 106208 - DNA, 461 bp, Glycine max
  unsure (1)..(461): unsure at all n locations
gtatatagattgcttcctcaagtgaaacatggattaanncctctcacatctctctatcggtttggatggtatccttaatatctcattaaaagctcattngatatcatgatctctacataattcagagtaacttatagtccaagaagaataaatttattatcttgttatatttatgttaactagcttggacaattttattagctattagtcttaattaagcacgagattcatatatataaaattctcctaggtttagacaagcgtaattataacagagatattggtaacagtacctaacattataggcaatgaagattagtggaattatgagcttctttggacttgngtctaacctagcttatgttatgcccatgaggtactatatgtgtgcatgagtaccatttacacgtaggagcaatgatatatacagagctctcctatctgcctaagaagctcacaat

SEQ ID NO: 106209 - DNA, 77 bp, Glycine max
  unsure (1)..(77): unsure at all n locations
tcaaggcaactcaccccaaacnttggggagttaaccaggatgtaaagggaaagggtaagcacatcaacacacacaac

SEQ ID NO: 106210 - DNA, 325 bp, Glycine max
  unsure (1)..(325): unsure at all n locations
ctcaaggaagctacctagtctataaatagaagcatgtgttacacttgttgtaactttgatgaatgagagtcttgtgagacacaactcatagttcaacttctctccctgtttcttccttcaatatcgtgctcccccctctctctttctctccctctatcttttgctccattcaagcatcttctcctagcttcttatccaaagctcatcttggtggtgaagctccttcttccatggcttattccctagtggatggcgcctnctctcacctctgctcctttgtcttccactgcatctccatggtggaggatcaccattaaaggacctc

SEQ ID NO: 106211 - DNA, 282 bp, Glycine max
gaacttataaaaactaaatccttaattgaaagcgtatgtgacaatcatagcgaattactaaacaagaatagtatgttgcttaaggtcatttcatatactccccatgctgtggaaaatactttcaaaatggtaacaagaagtacctccaaattaattaatggtattaatgaagatagtgaccataacttaaattacacaactgatatatgatcagtgtcagaatagaatataattcattaaacttcaaacactggaagaccccctccaaatatattatcaacg

SEQ ID NO: 106212 - DNA, 407 bp, Glycine max
atagcttgtaaatgcatgcttcataaagcatacaatactaattgatcatactatccaacttgactatgattgggtttcttgacgatatactctttaggaagcaatcctgttagagtcaggcactgaattcaatcctgttttcttgatgaagacctagataaaggctagagctggcccatacttgctcttattttaccgtatctcacccatgggattttgtgtatgttccttccaggctgaccctgcccttttgggggacatggacacaaaaagacatgtgccatgaccacgtgagtatgttttaggacgaccaaacttcagcatttgtaatgatgatataccactagtattctcatcggaaataggcatatccaagtgattagctcctttataacctcttactttgt

SEQ ID NO: 106213 - DNA, 294 bp, Glycine max
  unsure (1)..(294): unsure at all n locations
catgcacctatgcctgattttttttcagtttaactgaatgttcatgtntacctattctatttctagaagctggaaaatctgcaaatacagaatggaaggagcaggtttatcaaacggtaataataacaactgttggttttcttcactatctttgtcttcttcttccttcgtttgttggctttatcggatctctgaaatctctgccttcatatagtatgcatgcatatattacttaatttgtcaaaatttactacagtgaactgtaaaggatgtatacattntgcataactgtat

SEQ ID NO: 106214 - DNA, 354 bp, Glycine max
  unsure (1)..(354): unsure at all n locations
atctctaagtcacctgccgctgcagcttctatagaaggtcgtcctaattctctacatttcatcacctctcaatgagctggtgaagaagaatgtggcatttacctgaggtgaaaaacaagagcaagccttngctttgctcaaagaanaacttactaaggcatctgttctagctcttcctgacatttctaaaacatttgagctataatgtgatgcctctggagtgggagttggagctgtattgatacaaggtgggcaccctattgttatttaatgaaaaactcatagtgccccctcactacccacctatataagagcttatccttataagaccctcaacttggaacttccttgttc

SEQ ID NO: 106215 - DNA, 301 bp, Glycine max
  unsure (1)..(301): unsure at all n locations
gactatgaacatgattttgggtatatttaaatgggtgtgtcatgtaatgtgtgattcttatgtgtatgagatatggatgtcatggtatatgagaaagatatgaaatgtttagagaacctagtccatgtgggatatgattctccatgtgacgtgataagtganaccatgtgtgtcctatatgatcaagcatcatcaaagtgcatatgtttttaagatgggagatgtagcatagcttaaccagggagggcatgaatgaattgactatgcctctgccttgggggtagttcaattggatctctgt

SEQ ID NO: 106216 - DNA, 184 bp, Glycine max
  unsure (1)..(184): unsure at all n locations
caacagaaaatgatgcacacatatgacataccaacatgcctagtctgagttccggtccggttattatttgcctctcagctcccaatcactatggcagaacagttggacagctagacaacanactcatgatctagcaaaaagaaagtcttgcaagcggtgagctacgttagccactgagcataca

SEQ ID NO: 106217 - DNA, 138 bp, Glycine max
  unsure (1)..(138): unsure at all n locations
cggtgccacaaaacaccttcaccgtgttccgtaagccttccaatagttgtagtcatgcaaaaactcttttcatatgangaagttgatacacaatttccacaattttctacccaaattgagttagaaaatattgcaata

SEQ ID NO: 106218 - DNA, 487 bp, Glycine max
  unsure (1)..(487): unsure at all n locations
gctatcaaccangcacctatcatgtgagacccgtctagggctgctctcctgagcccacacctgcacaggtcgaaccaatgccaactgatccaccatctctagtggccgatccatcttcttccgagctcgaagccagctccgcatcttcacctattattattattatctctanagactctacaaagtcagcatctggatgagctgctactccttctgctacccctgttctccatctgacagatgaagaggatacacaagaccagtcacaggaattctaanatcctggattttcatttttggatanntatataactatatgtttaagacattgggtttctgggatttggttataatataataatacttgattttcggaaagtagatgatgtttaacaacaaacgtaactgacttggatatcgtgaacattattttggaatgggataatttttgtgatgagatgagagatggtcttctaattacaggtat

SEQ ID NO: 106219 - DNA, 356 bp, Glycine max
ggaagaaggagcttcaccaccaagatgagccttggataagaagcttggagaggatgcttcattggaggaaaagaaagagggagagaaatagagaggggggagcacgacattgaaggaagaaaaagggagagaagttgaactttgagttgtgtctcacaagactctcattcatcaaagttacaacaagtggtacacatggcttctattatagagtaggtagcttccttgagaagctttcttgagaaaacttccttgagaagcttctttgtaaaacttcctgagaactagagctagctcacacaccctctaaaactagctacctcttgagagcttcttgaaagctgagctactccaca

SEQ ID NO: 106220 - DNA, 366 bp, Glycine max
  unsure (1)..(366): unsure at all n locations
gcagataggtctagaatatatatcttttgattattagcacgacattctatctaatngaactaataagttaattatattaaaaaataattaatgtcactatatgtaacattattatttntaatcattatatgtaacattaaaaattttaatcattatatgtaacattanannatttaatgtatcggaaaagagagcataacctaggttccttccgtccttgnngtgtgcccagtggcttggcaccaacggagtatgttttgctctctacaaacgtggggttcttctttatcctgggagtttaactgctcggcttaaagtttccttgttttccaatctatgcctatcacttttctcatctggctataa

SEQ ID NO: 106221 - DNA, 191 bp, Glycine max
ggactctatatgagaagtttttagggttaactgttacttgatgagagtaatagttataaaaggaggttaatactcactaacgtgaaataagggtcctttcttgaccagacaagtattctctctcacccatagtcatcatgaatggagagaggtatgacagaaaggcctaatgaagcgaaatcttatttctc

SEQ ID NO: 106222 - DNA, 421 bp, Glycine max
  unsure (1)..(421): unsure at all n locations
aagaatgagaaatcccacagagaaaatgtccggttgatattccgctttattttactaaaagatgnttttttttattattattatattattttgtacctctttttttgatttccaacgtggttaccgcacgaccgaacggtcggaattcattttaaccgaagtttacggataatacaattcatacgatcggtggaaanttatttatttttatgttatcgagaaatgcttaagtaaatgctaatcacgcagaggggttataagtaatgaatgaaataaataccaaaccatgggccacacggtctaaatgattaaagctggtcagactcccttgaatcaaacataaaacatgaacgtgaaacatgaccttgaatcttcgaacgtcgacgttgaagcttgtaattctctgacatttcacaatcaa

SEQ ID NO: 106223 - DNA, 273 bp, Glycine max
  unsure (1)..(273): unsure at all n locations
aaactntgtcaattcatagtanaattttaacaatagtgaagttatgtgttaaataataatattattctagtaacatatgggtgtctgcgtgtgtcggtaagtgtaccgattctcacaagtagtatataacggttagaccgactatcgtatcctcagagaatttgntcacctataccatgtacattcgatatgcaagcacttatccgataaaatacgcaatagtggttctgtctagaaatctattcaacataacaaatatataagtataaaaat

SEQ ID NO: 106224 - DNA, 360 bp, Glycine max
  unsure (1)..(360): unsure at all n locations
atcctctgagtcacctgccgctgcagcctgtggtgtactatacgtatattgtagcgttttcttgtatctcaaccgacatgctangtatagatccaaatctgctccatcacaaattggttttagatacctcggcatagcctatcatcctacacatgaagaaagttcggagaggataaaatacacgtcattactgatgacacaacgaatttgatctctgccaaccatgttagacaaattcaatatttgacttggctggtgaatgtggtgattggtataacgtctagtgtgcatcgataatatatggtgacgtcacagatctatactacgcatgctgtatggattcatatccactaccaaaca

SEQ ID NO: 106225 - DNA, 349 bp, Glycine max
  unsure (1)..(349): unsure at all n locations
tgcacaacatgtattccacatncacaaagcgcgcatatacccaccatcctctggtgcccaccttctactgagctcacgtactcccacggagcccataacctctgttcattcaacacctggtccccatcaatccttccaagcttccccaacattaaagtaaatcaacattctgacagcacaaattaccacagtcatgaaaacagggcagatgcagagaactctgcccaatacaccaaccaaatatacagcgttttcacttaaagacctcagtacaattccttcgatccaattcgtaaccgttggatcgactccaaaatatactggagtctatagacataacctacatttg

SEQ ID NO: 106226 - DNA, 388 bp, Glycine max
  unsure (1)..(388): unsure at all n locations
tgggcttagtgtaacaagagggatctgaggatgaagcttgattgattcggtctgacgagggatctgaggatgaagctnggattgattcggtctgacgagggatcgaggtttagtaatttaggctacaacatagaacacaagagcatgattgattagagaaatatatttatatgcatcagcttgtttgtgagtaagacccaacatatctacctattgctgcactnttacttacttgtatttacagattagcatanaagttagttgaatctgttgaaatatgaatatacatgtctctcacatgcttatttttaactaattagctacgtagttctgtgtcgaactcgatcatcgtttattttaatactgacgatcgtgcgcttcgaactga

SEQ ID NO: 106227 - DNA, 342 bp, Glycine max
  unsure (1)..(342): unsure at all n locations
aaatagagtggctaacaaaatttattttatgaaaagtggtataaatatttttgagaaaaatagttttcataactaatctttgatttctggagccaatcatgctatagaaagatgaacaatcttgattttggaccttataaaatttctaacaanaatagctaacgtntgaatgantaactagggtatagcatcttttcttaaacanagaatacttatttcatttcattcataaggagaaccacaatacaaattttggaattcactcaaattcatggatgctagcatacaacctagaaagccttgctaaagattgggtcacttganatgagatatatgtctaat

SEQ ID NO: 106228 - DNA, 248 bp, Glycine max
  unsure (1)..(248): unsure at all n locations
tctcctctcttctctttgttccgggtatggaatacctttatagggtgcttcatggtcttggatcacactataacttcaattaccaccccaagtgtgagaagctgaaaatcattatattgtggtttgcggatgatattcttatattnttaagaggagatcttggatcaatgaatttactgatgagtaaaatgaaggagttttctgctgctacaggtcttcagaatagtcattctaagagtaaagtctac

SEQ ID NO: 106229 - DNA, 316 bp, Glycine max
  unsure (1)..(316): unsure at all n locations
gattcacgactcaagagaagactctatcatgataagtactaaacaagttttctaaacattgagtagcacaagaatatttcacataatcttgtaccaaagagtttactctctggtgatcgattaccagaagatagtaatcgattaccagtagccagcatttgtttcaaaactgatttacatagctatattcgattaccataanaaccgaatcgattaccaatgttttaaaacgttagatntcagaattcatgagtcacaaccagtgataaaacactttcaaatcattttacacttgtgtaatcgattacacaatact

SEQ ID NO: 106230 - DNA, 216 bp, Glycine max
  unsure (1)..(216): unsure at all n locations
ataactttgatgagttatagtcctgtgagacacacttcagnagtanacttctcttcctctctttgctttattcccacgccactatcatttctgtctctctcattctcttgctccattgaagctttctctctaggcttcttagcgaaacactctcttggtgggaagctattcttccatggttactccctagtggatggcggctcctctcacctcttc

SEQ ID NO: 106231 - DNA, 407 bp, Glycine max
  unsure (1)..(407): unsure at all n locations
agcttcatacaattaatatagaacctatatcctaatgtcacatnctatcagagcgttgtgttcccgtgtcctctagcatgagggtcttcatagtcatccacctattcatctgctcccccgaacacaagttcaagatcatcacaggatccaaacacaacaacacacagggagtgangtatcacattcctagctaatagagaaacaagacaattnaatatacatattatataaatgagatnaccacttgctaaacatagctcacgtaacttcaccacttcgtcattcagaattcacttttcaatatcaatcacattacacaagagtcccacactttgatcaagatataataacacatcaattagcaagccatatgcatatgtatgctaagactcaatcctatatgcaat

SEQ ID NO: 106232 - DNA, 256 bp, Glycine max
  unsure (1)..(256): unsure at all n locations
gtaacaagttggtgtatagcttgagttgtagagctagaagtggcagtaattaatacttgtaactcgttgaagttaatagaacttggtgatctgccaagaactggacgtagtctcgggggttaagatgaaccagcataaccttctatgtcttatcttttattgggttctcttctttgctgtanactaactcttggttannattgatttatgttnttgaaaactctgtctattntaaaagatctagggttatcatctg

SEQ ID NO: 106233 - DNA, 249 bp, Glycine max
  unsure (1)..(249): unsure at all n locations
agctngttaaaacggaagaaaaagaaactgttattgttctanataaagatgagaaccannaaacaaganatgaattaaaagtcttggatgtggaaacttacccgttgaagaatgaagagcggacgaagaacggaggaaaacctccaaggattcgcttacggaaacctctcggaagcgttacggaagcacctcgccttgtgatttcttcacggaaacaatnnttttcacccacaacagctgaaatgcata

SEQ ID NO: 106234 - DNA, 204 bp, Glycine max
  unsure (1)..(204): unsure at all n locations
tctctaccagattttcatcaacaatctcagcacacatacatcacanagcatcatcatanaaccctaagacataatgggtaaatntgactcacatcaaacatgtncaagttagcatgctntcaacaaatntcttcacaaataactaccataaggcattaacctagtaaaactacccatcatatctcccanaaacccaatacccac

SEQ ID NO: 106235 - DNA, 497 bp, Glycine max
  unsure (1)..(497): unsure at all n locations
agcacctgcggctgcagctaancagacctgcattctcacacctgtcgaggttattaccctcaatactggtccacacttgtctgagcttggtggcttatgtactatctanggctcacacagtggatgtggcatgctacatatcactccaatacacacgtcaaccctccatgtcagccctggcccaagagcacanacgtatcacccttagtagccgggcttctagatcgacaggttatctctaagcacttcattattcgaatattaatgatattgttgcaacttccatatcaagtgacaggtagtcaattatctgtaagatacacattatctataagctagtaatatctactagttattatctacaagctagcaattatctgcaatgagttntacaccacccgaacagcccctactaacaagaatccgaagctcctacttcactctataagaaccaagtctatctcactctttcatctaccatctatatactcatgtct

SEQ ID NO: 106236 - DNA, 208 bp, Glycine max
  unsure (1)..(208): unsure at all n locations
gaaacttttaaaatcatnttggtactggtgatcgattacacaatcttgtaatcgactaccagagagtaaaaacttttggtaacatgtttngagaataatcatgtgctacttaagttttgaaaaaaccatttcatgcctatcttgagtaaagcttctcttaattctggaatctngagtcttgaatcttgatcttgattcttggaagctt

SEQ ID NO: 106237 - DNA, 296 bp, Glycine max
  unsure (1)..(296): unsure at all n locations
tatgtatgcagaaaaatgcttgtgcattgctggttattggaaaggtagaacatattggggtcttcattaatttctaacagatgccaacgggtcaaatgtagatgtatgtactatttacctgcagctaaaattttcaaggcgatccaccgattaaccgaatcataaatgaataatattgttctggtgtatatgatcancgatagttgtgatttttaatgtgttttgggagagtttctgctccacttatttcctggttagggagtcatgattttgaaatgaatagtggatatgggaac

SEQ ID NO: 106238 - DNA, 270 bp, Glycine max
  unsure (1)..(270): unsure at all n locations
acatattaatttaattttaatgaaaagactgtagataatcgtattatttgatatccagagatcatgtgctgattcatatctactcgtataatgtcaatgcttactgctggaattgaatagtggttgatatactaactgttggctatgacttaaaagcctctcattttgtggagatcaagtttctctntacctttaatggttcacgatcatgagaacgcaagatgattacatgggatctcaatttgataatctacttgttatgagacttgc

SEQ ID NO: 106239 - DNA, 210 bp, Glycine max
atgattatatagtgtaatttgaaatataattatgagtatgatattaggtgaactattagagctaaggtattattatgagaaccaagacatgtgtgaatggttagtatagatgcaagaaacatgaatggaagttttgatgggaagaagttaaaggaatgtctattaaatgagtattttacaaatagaggggaatataatcattgtttaagt

SEQ ID NO: 106240 - DNA, 375 bp, Glycine max
  unsure (1)..(375): unsure at all n locations
tagaactactaagtatttatatctttaacttaaagaacttataacactacanaataaccataagttggaggagttcgatacaatttacacaagttctatacacaanagttagttgtattcaccgactaactactaaaacgtgctggcgtggaagaactctctntaggcttatcctcatgcgctaagccactgttgtctcgcttagtggtttggtctcgcttaacgcatggttcaagctaactgagaaacactatttagcctcatacgatctccttttacctgaactgaagtgaatgacattaattgtataggatgctgttatgtgccatatgatatctactagaatattacaatctatctataataccattattt

SEQ ID NO: 106241 - DNA, 320 bp, Glycine max
agatctgttagaaagactgtagttttgtaatgtattctctgaatgttattgaactacatatacaatatgagctagcgatatgtacaccttgggtgatggacagacgtgactctattgctttgaacatatgttgaagatggaatggcctgaatatattgaacgagtgacctattatatatagtgatagggggaaaggcaggcaacttgaaggctgaccatctacatgatcttgagctgacatgacaagctataagatttattgatcgctgcctttaagttgctggcggctgctgaagtttaagctctacataaatatttat

SEQ ID NO: 106242 - DNA, 223 bp, Glycine max
  unsure (1)..(223): unsure at all n locations
agcttaccttgaatataattctatcattcgcaccctttttgagctgaatgagtttgtcaatancatgaaccctgcacctgaatggttctctccagataccttgcttagattctaggagagcatatagtttaagggcaatttaccncactnattggggagtggaactaatgggaatgcataggaaaagagaaagcatcagtacacacaacatataagttgtatg

SEQ ID NO: 106243 - DNA, 362 bp, Glycine max
  unsure (1)..(362): unsure at all n locations
tgcatgatgaagcatctttagaaactgctcacacaataacgacagacatatgtgtgttgaaacctaccactcagtgatacacaatatggctttctcaatgaacactctngcctttaccactctaattcccttgagttttaagcaatcaagagaatatggccacaacanagaacaattcaccaatatgtgtaaggtaaggctagaacaggaaaagggtaaccaagaaaaaggctaacaatgttntatgacnatgaagaacaaatcaaattagattagaacatctctcaccaaaatacttaaagtttttttagtctaacagacatcaccaatttttttttatttgtatacaattgttctttttt

SEQ ID NO: 106244 - DNA, 400 bp, Glycine max
  unsure (1)..(400): unsure at all n locations
agctnnttgtatngataccttatcgatattgtctgttggtaatgacttngaataatatttaaactcaacttagagtgattttatttgctaacataaaattttagcggacagatatgaaataacttgtaaagatcaacaaaaataggataattggatacactacaggtaacaaataaatgacaccattacagagatataaaaaatcagttatctaacacttaaaatcgatatgagctgatggataatacgataaaacttacacaattactatgactctaaatattggactactataacttaaaataaaacttttaattctagatatatggtacaaaacggaggaatcatatttgattacacaagaccactatcattaatgattgaacaactactttcacat

SEQ ID NO: 106245 - DNA, 307 bp, Glycine max
  unsure (1)..(307): unsure at all n locations
tacccttcctgatcttcgaaacccgtccatctanggcgaaagtatatgtacacatcttcaccaagtgaaactccttcagacttctgctgatctcttnatccacctagttaagtagcatgagttagcatacaactattagggactcttctttntctctctctctctctctctccacctttctctgccatgctcttcttagttacatcaatccnacctttgactatatgctgatgggctattcccntcatttaatgaagaaantagatacaatagtagccaagaaatcagagcatattaccggtcccat

SEQ ID NO: 106246 - DNA, 427 bp, Glycine max
  unsure (1)..(427): unsure at all n locations
gcagctatgctgcnatattacaatagacctcctcaactctcagcagctaaatctatcacagcagaacaattatgacctttccagcaacagatacaaccctggatggaggaatcaccctaacctcagatggtccagccctcaacaacaacaacagcctgctccttccttccaaaatgctgctggcccaagcagaccatacattcctccaccaatccaacaacagcaacaaccccagatacagccaacagttgaggcccctccacaaccttccctcgaagaactngtgaggcaaatgactatgcagaacatgcagtttcagcaagagaccagagcctccattcagagcttaaccaatcagatgtgacaattagctactcaatngaatcaacaacagtcccagaattctgacaagctgtcttctcaagct

SEQ ID NO: 106247 - DNA, 354 bp, Glycine max
  unsure (1)..(354): unsure at all n locations
cccacgacttcaacaatctcctcgacatggacaatctcgntgacaatggacaaccttntcgccacagccgctcaaacttanggcttatgtactgccaagaccacaaaacatgtgtcatgtatgggcaaacagacacacgtaacctcatgtaaccctgcacaggagccaaacaatgccccttacagtgggctctactgacagtatttaacatctaatattgatatatgcattttatcttggcggattaaacgccattttatnggacatattatacattatttagacatgtatttacatatctatagcctttttacggatatacaatcgatattcagtgtactacgacaccttaca

SEQ ID NO: 106248 - DNA, 210 bp, Glycine max
ctgcacttaccatgctactgataatcttgttccttttacctgatccttcctgttgactactcaccttaggaaacatatttcctatcttagaattgacttgaatgtttggaaatgtggggttgttctgacactgttgttcatctctgagtttggcatctagacatgtttgtaagtgacacaagaaatgtttaagcaaaaaaaattcaaaaa

SEQ ID NO: 106249 - DNA, 282 bp, Glycine max
  unsure (1)..(282): unsure at all n locations
tctttgaaggagagatgaatcttctccatcatgtncttcttaccaacatgtcgagcactcttttcacccaagagccatcatgctctctttgataaccaaatgatgcaatgactgaagcgcctattagaaaggatctctttgatggaacattatggtcagaatcaagaacgatgttaaagtgtttaatgaagagggtgactacgtgtggatatggcaatggagcattcaatcgcaatgccttatgcatgcgatatctaacaagatgtgcccaatgattggatg

SEQ ID NO: 106250 - DNA, 377 bp, Glycine max
gcacaacaagatgttcacatccacaatgcgcgcataaacccaccatcccctgttgcccacctccaactgagctcacgtactcccacgtagtccataatcctcgtttctctcaacaccgatgtcccatcaatcctcctaagctttcacaacattcaagcataacaacattcaaacagcacacgctattatagccaagcataacagatgcaaggcagaatactctgctcaacacacaaccaaaatacaggtttctacttaagacacagaacaatccttcatccaatcgttaccgtggatcactcataattactgaagatatatgcataccacattggacgcgggacatgcaaatcaaactatctgactattttcaagca

SEQ ID NO: 106251 - DNA, 232 bp, Glycine max
  unsure (1)..(232): unsure at all n locations
gagactgtgataagatttatacaagtttatacacaaaagttagtcgttgtcaccgactaacaactttcccaaatatacagttttgcttgtnctcaagtgantatgacatgtantgactatgtacagaggtgtatgcattaaaaattactgatttgcttgatgagaaaagacgaagcaatgtgcacctatcacttgtctttcacaaatatgtagttattcaaagagaagaata

SEQ ID NO: 106252 - DNA, 199 bp, Glycine max
tatcacatgaacatgttggttctatggaagcaacttaacattcgcattgtcactttcattaatattaacactcatctgctagagcttcacttctaacattattgttggcttccagcccaacttctattgcactactgtgcacaaagtctctgtacatataccactgtccgatgcaatgacggagatacttgaggataca

SEQ ID NO: 106253 - DNA, 416 bp, Glycine max
  unsure (1)..(416): unsure at all n locations
attataaagggataaatatgtgagattcttggacaaattaacagaaggaagcgaacctgtaatgttattgtaagacaagtctagatcaacaagttggctgagttctgagaatgaactatgaagtgtaccattatatcggcagcaagatagatcaattgcagataactgctttatattggagatgcacctggaacttttctggaaatttgttagcttagatcatgtcatgaaaaaccatgtgtggaagttgganaaaccctcaaatcttggtgctgaatgtcggacttcacgtgatattggagatttttggaaaaacattaaccccactttacttatgtattattgagaattcaatgattgactggctgctgtgtgtgttatttaacgctgaggaatctttgtagatatattgtcta

SEQ ID NO: 106254 - DNA, 430 bp, Glycine max
  unsure (1)..(430): unsure at all n locations
gcacctgcacgatgcagcttgcactgagctgctcatctctgcctcacttcttcagactggngatgtctaggctcttgaccttgacttgaagaaccctcttttagcgaaggcgctngactctatcccatgctatactaaagtgatacaaaacccagtgcgaaacagaactctgacatctatcatgggtggaatggatgaatgcatgaagaaatgcacatggcatagatgcaatntatgaatacgggagctcgggatatcgtcccttcttagatacaacattagggcagcatggcgcctgacgtatgtatataagaaggcgacacggaccctctgtcggtttgacatagtgagaggctcaagacgcaatctgtgcatgatgcatatgcgaaacgcacaacacagggatgtacatactacgacaatatccaca

SEQ ID NO: 106255 - DNA, 337 bp, Glycine max
tctctataactatatatggaactttatctattttcttaaattaccgcattataattcttagtttttaacttcctgtgacatacattaagaccattactaaaatcacctataaacccaagcagttctataacctaggctatttgatttggcaactatgagctttttaatgactgggggagatgatacattccactacatatgtggtaaaatttgaaaagattgaaatatatacatcaatgtatatttcaaattcttaatattattgcttaatattactaatataacctttgcacattatatcaacacattgtactttagatttgaaaaatgagtgtaa

SEQ ID NO: 106256 - DNA, 291 bp, Glycine max
gtcttttataaaaaccgggagtgcacacttattgaaaaattaaaaaccaaaagtttgaagtaaaataggtctgaattattctctctgcaaatatatacctcccgtcctccaagaatacacctttatgagtgtcagaacggactcatatattatattccttttatttcttttttttggtcacaaagggtgccttgtctatcctgtctactttttgggattaattaacgacaacaccgtctcaaatatataacgtttaccatattactaagactttttatttgaacctattat

SEQ ID NO: 106257 - DNA, 284 bp, Glycine max
accccacccagacatgaaggcatgtctacaataacccacgaacacaatgtgatcaagaagattctactatgttcagacatgtcgcagaatcgcttgagactataaagacgacttcagaattagagtacgaggagcaatctatcttgatggagtacctagttggaccgtgtcggtgtattcacttagacgttagctcgtgttccagagaagaggaaaataaagagcatgtgattcgatatgtaacgtggataggaagcttgatacggaactgagcgttggataag

SEQ ID NO: 106258 - DNA, 464 bp, Glycine max
  unsure (1)..(464): unsure at all n locations
tatgcaagtagtgctgacctgaatttacctaancncttggcttaaaaaattgaacaccctattgcttctgtagtcaactggatggttgtggggttggcctacaatggccactttgatgatgtgttgttgtactttccatggcagacgaaatagtgagcatgaagacaataggactctggatctntgttacactatcaaatatctatgccgctgatggtgaatggtaagagttgggaatgaatgaatggatgaaagaaaacattacatagcagctcgtttattggatgataagcagtgagatttgaaggacacaacaaaatgtacatatgcaggaatcgaatggagatggacgtatcatatcttgtgtttcccttcattattgaatcaccaaactgctgcttaattggtttctgaaagcttttccttttggcaaaactaatcaattttaccttgcatttatttat

SEQ ID NO: 106259 - DNA, 259 bp, Glycine max
  unsure (1)..(259): unsure at all n locations
tgcaagatctttgagtgagaaatctgtgttttagctttaaccctctttgtgagagagacctacttctgaattgtgcttacaaagcttgtaataatattagatagaactgcgagataagnttctgagtggatccttcttggaagtgaaatctataatttgtcataacagatctatntctcttgtaaagtctagcattggctggcgaaggtgaaagcacattatgtaattggtctagtcatggttacgattggatgtaatc

SEQ ID NO: 106260 - DNA, 264 bp, Glycine max
  unsure (1)..(264): unsure at all n locations
ttgaccgttcttcacattcttcattcgttctttgacttcaacggtaagtccttcaccaagcttttgtatcatttatgtactcgnggcggccacaatgtgtattgtgtttattattctcgattaattacttttataccccttttgacggctaagccatttattaagcattctcgttacctacaataaataaattccccgatcgttgattgattatcgttacttcgttaaatgaatccaccgtcggtcggccgaccacgtggaatc

SEQ ID NO: 106261 - DNA, 213 bp, Glycine max
aatgatggctgcaaatactaatacctaataaattgggccggggtactgattgatctttatctacttgcttttatactttcttatttaaaagaccaaatttttctctctttgtaccatcttttctttaaacactttgcctttttctctactattccatcttgttattttaaaatcttaattataaacataatcttttacaaacttatttataac

SEQ ID NO: 106262 - DNA, 490 bp, Glycine max
  unsure (1)..(490): unsure at all n locations
agtcacctgccgcatgcaagcntgtagaatatgggtaccatacatgtggtctatgtggcggncgggcgatggtgcacatcaagcttttcacatncacaatgcgcgcatanacccaccatcctctgttgcccacctccaactgagctcacgtactcccacgtagcccatattctcgtttctctcaataccgngtccccatcaatcctctcaagcttncacaacatccaaacaaaacaacattcanacagcacaagctatcacagccaagcanaacagagcagaggcagaaaactctggctcaacacatcaaccaaatcacagcttttctcacttaaagaccccagtaacaataccttcgatccaattttcgtaaccgtggatcgaactcanaannttaatggaagctatagtgcataagcctacattgtgaccgtgggatcgactagcaacatcagactcatctgtactactctntcacagccaccacaca

SEQ ID NO: 106263 - DNA, 243 bp, Glycine max
gctgcagctctaccaaaccgaccaccataaccctattcatgtgataagtcaaccttccttccgatccgaagaaaaagggactttcccctccgacatgaagaagaagatttcttcatggaaagcaataaaaaaaacgaaattccccacacagagtggagaagccaaaaaaagaagaaatttccatcaaatgggaaaagcaaaaagataaaaaaaggaaaaaatctcctgtcccggatcctacga

SEQ ID NO: 106264 - DNA, 231 bp, Glycine max
aatgacgtcatatttagatgcaacactttctaccaacaatcaatacaaaatcccctcaaattatgtgcccttgaaaaacacaaaaatttttaagctcttcttcaagctacaaggctgcgtcttcatgggtctccctctaattttaacaatctcccccttttggctttgataaagagaaactcgaaattccgttagtgccttggagggcttgatctttaaacggaaaactgc

SEQ ID NO: 106265 - DNA, 476 bp, Glycine max
agcttcaccggatgatgccgatcgaacatttcctaattaacatcatccatttgttattcaaggatcgaatagaataaacaatggccggtgtcggtcgctatatggccacaactgatatctatcagccgacattgcgcaattttctttacaaacgctggccgataatcgttttttatttaccgcagaggaagttttccgcttcgctgttgcctaaaaatatacaacagtagaccgttaggtttttccggccaaactcaaccgaaggttcggttcgacccacactagcatgttggtctcctatttaggagacaagaaactgttgccaccccgccaaaagaataaaacacattattctcggaattgataaaaaaatgaatgctgcctcacatgagaaagaccgtcgacgtcaaaaagaacatacctgtcacccgatcaactttctattacatatccaattcaatcaggttgataaaaca

SEQ ID NO: 106266 - DNA, 359 bp, Glycine max
cttgagcatcctactaggacgactgataaaactggggcatattgagagggggaggatgacgaagaatctcatgctgtgactgtcattactgtacggacaaagttttccacctacctcacagtgtctgtacttcacctattacaatctagttcctttccctcctgcccaaatatctcactaagccatccctaaatctaccacgaagtctgtctaccgcactttcaatgacgaacacccccgtttagcacgagccaagacactaatccagaagcgaattttgcagcgagaaagcctgtagaattcaacccaattccagtgtcctatgctgacttgctccatatatacttgataatcaatgg

SEQ ID NO: 106267 - DNA, 428 bp, Glycine max
cactgcagctgcagctgtacgatctcaaacatctctagaccttgagattcttgactccatctcattgaagcgcatgtccacttgtaatttcaaagtatcaaacctttcaccaactaaggtttgagaccatccaacctattcataatctgtttgagaagaagaagaatcttcttcaccatgttcttcttcataataagtcgagcaaccctttttacccacaagccatcatgcttcttttgataaccaaaggatgcaatgcaaccacgcctattataaaagatctcttgattggaacataacgttcagaatcaagagggatgctaaagcgttgaatgaagacggtgactagatgtggatattgccatgtaacatttaattgcattgccctatgcatgccatattcgactactcgtgcccacatcaatttt

SEQ ID NO: 106268 - DNA, 490 bp, Glycine max
aagtcacctgccgcatgcaagcttgaaggtagtcatacctcacaaaatatatatatgcatgtttaggtttaaagataccttacatatgcatgtatgtaaacaaagaaatacttcacaaaatatatatatgtatgtttaggtagaaagataccttatatatgcatgtatgtaacaaaaaaatacttcacaaaatatatatatgtatgtttaggtagaaagataccttagatatgcatgtatgtaaacaaaaaaacacttcacataatatatatatgtatgtttaggtagaaagttaccttcgatatgcatgtatgtaacaaaaaatactccacaaaatatatatatgtatgtttaggtagaaagataccttagatatgcatgtatgtaaacaaaaattacttcacaaaatatatatatgtatgtttaggtagaaagaataccttgatatgcatgtatatatccaaaatacctcacataatatatatatgta

SEQ ID NO: 106269 - DNA, 284 bp, Glycine max
  unsure (1)..(284): unsure at all n locations
tgctngtggngcttctgtggaggctggatctttgagcttcaatgaggtcctttaatggtgattttccaccatggagatgcagcggaagacaaaggagaagaggtgagaggaggcgtcatccactacggaataagccatggaagaaggagcttcaccaccaagatgagccttggataagaagcttggaaggatgcttcaatggaggaaaagaaagagggagagaaagagagaggggggagcacgaaattgaaggaataaaagaggagagaatggaatttgtaata

SEQ ID NO: 106270 - DNA, 412 bp, Glycine max
  unsure (1)..(412): unsure at all n locations
agcttcanatgcaaggtcaaaggaaagatgatatacgtttgaaacactcacactcgagatgacaacctatcaatactatatgcttngaagacatgagaaacgaacctacacgctatcattcatattctttatgtagagaactctgtgtctattcttattagagttggaaagctctcaaaacatcttgaatactctaaaacataaaactaaatgcttagaattcacatttgtttggaagatgagtaagaattatcagttaccaaacaaacaacatatcttttgatttgatagaaccaacagggcttggttgacaaaaataatcggttgtaaacttgatgataaccttgttggagagctaaaagaacttttgtgaaatagtgaaactgatgctaccaaaactgaatatctgaag

SEQ ID NO: 106271 - DNA, 352 bp, Glycine max
cttaaaatcacttacccactgaaagaccttaggtactccatttgaaatggactactgctacaaactggaggcaataattcacaatgtgaatgccccacatgaaatttacttagtgacctacactataacctatgtgtgtctttccctataaatattatttaccaaagataaaatcaacgtcttggttaaaggtattaattggcacatctgggaatgaagggattgtactaattaaaacataactaaatttgcatccttctttgacattctctattagacaaaaatacatgtctactcacacgctttaaaacaaggcgtcttggatactctttatactacactcccatatgtc

SEQ ID NO: 106272 - DNA, 234 bp, Glycine max
  unsure (1)..(234): unsure at all n locations
tgcacgcatgcaagctntcaagaatcaagatcaagactcaagaaacaagaatcaagagaaggctcaatctcgatcagtatgaataggggttttcaaaaactgagtagcacatggatttttctcaaaacatgtttaccaaatattttcttctctctggtaatcgaataccagattgtgtgaaacgattaccaatagcaaaatgaatctgaaagaattgcaattaattcacacctt

SEQ ID NO: 106273 - DNA, 298 bp, Glycine max
agctctagctcacactatatggaatcaaaagaaggaataagttgttggagctgctgagcatcacgggttatagcgcttccaacgaaataatccacatgctttcaatggatgattaaaccctgttggcgcttagaactgaataagggacgatgagataatcttcaaagtgatggtgtgtctatagagacacaaagatgcttttggtacatatactctcgtataagaaaatgaatattggtgggagaccactcgccaatgcttggaggatgatgggcaagttgtgacccgcgaaaccttc

SEQ ID NO: 106274 - DNA, 392 bp, Glycine max
gctcgcaaatctagagtctaaaccccttattgctggatttctagttgagaacgaaatgacagggataatttggagcaaactctatcccacagttatacataactaactctaaatgaataactaactcccaataaaattgaccctcacacccaatttaccctagaaatggctcttgttttcactttggtcactcattttcctcatttgctcagtacaagctttcccataagtcctaaatgacctttcaaactacgattaactcactttaatcttcaattaccactaaattcagatttagcttttcaaaccctcacagcatcacacttttacactcatatcacttcattcacaccttgtaaccctaggttaactctacacttcatctctatcaa

SEQ ID NO: 106275 - DNA, 378 bp, Glycine max
  unsure (1)..(378): unsure at all n locations
gcatgcaagcttctccttataagctncaaccatgtatgtggacataggcacaattatttataaccagggccaccaatttgtaaatcttntcaataattcattatacgattccttatccagagattgcaacaacagtttccaagcatccatgacatcttgccactctttaaccctattcatatagaatttgcattttgtggcgacattctctgtaatatggaatacacataacaagctgggtgaagaaagaaaaaaagtctcccacgcatcatgaaaatagatccctaacattgcaataacctgagacaacacataatcttcacagacaatctttcccatactaaagcccttaaaaatattcgtttctcataactaaat

SEQ ID NO: 106276 - DNA, 321 bp, Glycine max
acactatcgagacactatagcttgctctgacttacattgatgtgtgtatttatgggaggaggttgcatgtcattcttgtgttaagaatagcataccactgtggaaactaacttttcagatgtttgccttcacaagaatggccccgatgaacttggcttcaagaggtccatgaatgacaatgcggccgaaggaactatttacttcccagagtacaaaagtgaccgctttatgagcgttgtcactcagcagcgcttcaaaccatcaacggatggtcgttttttcggagccacgcgtcagctcaggaccacagtatactgattt

SEQ ID NO: 106277 - DNA, 373 bp, Glycine max
  unsure (1)..(373): unsure at all n locations
tccgcaacagatggcttatcttcggtacgatggtgctccataagcttctgttggacatcgctaagccactttcgttcttcggctcttgcgttgagttcttcatcaacctccttgtcctcaacggtggcttcatcatgatcgacattaacttcctctcaaggtgttagctcgacttccaaatgcatagatccgaagttttnngtttcgttatcatcctctgttttttatagctaattttacaattgcttgaagttagtccatctgcttcatgctcatcacctgttttattgcaagcaaaacttactaaacttgctcttcctttctttgtgggtgaaaagttgtggaaatctgcggcacccttctatatatattt

SEQ ID NO: 106278 - DNA, 446 bp, Glycine max
  unsure (1)..(446): unsure at all n locations
caagcttatatacacantagagctgcgacgcgaagagagatcacattttgacgttctctagaagcccaggagctggagacaagaggcactactgtgacgagacaaaagagtggcgatcacacacactatgtgccgcataacctcaaagaagatcacactaccaatgtcacctattggtcacattcgactttctacaatatatttgaaagagcattgaccacctcataccatacgaatttagaatgtcaagacaataattgcgtgttatgaacccacgatcttagtgacactaaggacatgactttcccatgaaagattttagtacttgaggatcaagtaattgttccatcgctctgtactatgagtcaagtgctatagcatatatcttctcaggattggacgatgacacacgatcattcaaagactgatactctctccatcgtcca

SEQ ID NO: 106279 - DNA, 203 bp, Glycine max
tggcttaagtataccacaatctgtgcaaacgtgaagtaacaattgaaacgctcattattacaactcattatgtgaaaagctctctatggagattattgaagagtacaaaagagctctcaaaacactttgctcatcctgacagaaaacgctactagcagaaattgtttattacactataaaaagatgaagtgatagacatgatg

SEQ ID NO: 106280 - DNA, 268 bp, Glycine max
tcgcgtctgttcctcttctctcggtcactcatctttcttcttctctcctcttccctatttcctctctccaccttctccccgatgccaccaccaccccatctacacattcctccaccgctcccattctcctttcctccagtggaaccgttaaaaaccctaacccccaaaaaacacaaaccccctactgcctggacttctcggtgttcgtaacctagtaagaaacttgcattgtgtcacgagcaagctgagaccaacttgcattgtgttt

SEQ ID NO: 106281 - DNA, 435 bp, Glycine max
agccttgagccacaatcctgactcaccatagaccttgtatcagagtgatatagtcaatccttaccttcggaagcggcaagaatacaacggatatctcctatcaaagaataggacagaaagaatattttcaatctaagataaagctaaagaagaaaacatggacaattccccaatcaaagagtgtgagatagccaaatgaaaagaaagaaaatctccactctatgaattgggagaatgtatacaatgatgaatatgaacgaaagaaagctccttatcccggatcgaaagaaaacataagatattgtctgataggtgtttggaccggacaatatctgaacaatacataattgtcacctaatgaacattaagaacgaaaggaaaccccgacctaatatggtcttcttcctttgattacctaccaaaatcccgtgcgct

SEQ ID NO: 106282 - DNA, 149 bp, Glycine max
tcaaacacgccagcgccccctataccgagactattttgggggtttaacaaagcagtatctagtgacccccccaaccctgaatgaagcacaaggaaggatctgcgaggaaacttgggcaatgtagtaagtaataaaaattcacaaaaaaa

SEQ ID NO: 106283 - DNA, 137 bp, Glycine max
ctccccttgaaatacccggcaacagagaagagaaccactagccccgctcacctcaaaacgccccctgactacccaccaacaagcggctaaccacgtacccactcgaaaaactgtacctcgggagaacggaaaaaagg

SEQ ID NO: 106284 - DNA, 480 bp, Glycine max
  unsure (1)..(480): unsure at all n locations
cacgcatgcaagctcgaaagaagacaattantaattaaagtaagctatattatattctattcttgagatcattcacgttgatcaacggtgatctacatctcatcaatataataaaaggcgggacttcattataagagatttaaggcgagacattttcttcaatgcctatgccaactagttaaaaatggaattagtacgattactcggtgactaattaaagtgtctaattatatgatagacgataattaaaatagggtagagttagaacaactcgaaaaaaatacatcttagactagcaaaaaaacctcttggtatgtactctggcatctatgaacttaatattaattaatatatcgtcataatcatagaatctccatgcctataatgtctatatttactggaaatattattttctnagcctcaatttagaacagataagggaactgcttgaacacaaatttcatctataacactactgca

SEQ ID NO: 106285 - DNA, 432 bp, Glycine max
  unsure (1)..(432): unsure at all n locations
gatccctaagtcacctgcacgctgcagctcgttgattatggngtacccatcacatgtggtactatgtggcggtccggcgatggtgcacaacaagtgtttcacatccacaaagtgcgcataaacccaccatcccctgttgcccaccttcaactgagctcacgttctcccacgtagcccatattctcatttctttcaacaccggggtcccatcaatcctcccaagctttcccaacatctaagcataacaacattcatacagcacaagctatcacagccaagctaaacagagcaaaggcggaaaactctgcccaaacaccaacccaatcacaacttttcttacttaaagaccccagtaacaattccttcgatccaattcgtatacccgtggagcgactccaaaattttactggaaggctataatacataagccta

SEQ ID NO: 106286 - DNA, 358 bp, Glycine max
tgtagaatggctagacataatacatggcggtgtttggtttgtttcatggataaaagggatgccccacattatttccatgacacatatgcaaaaatgatgacttggaaattctatgaaaaactggtcatgcatgcacctatgcggacactcaagcgtcaaaattttatggtcatgtgatgcgaagtctcacgagtcatttcctctattttaaatcaacccaatgtttccaaaatatgttcttttatccatttgtgcattcatccgagtccatttctggcgttcggggaaattttcacagcattcacccttcagtgtgtacactttttttttttcaaataggttatgaaacaagatattt

SEQ ID NO: 106287 - DNA, 328 bp, Glycine max
aattgaggagggaggctgtgatgtattactatgagacgttttacattagacgaattcgtgaacttacagacttactttatcgcctacctgatcatgcatgatacatatgtgaaacgacaaagactaggaggcaacacatactcctgcaatcggtacgtattacactcaagctagttgcgcttgttaaacacacagattcttcaagcgcttgttatagcttcaaggctccgtcataaatggtgctgcgcctatctctaacaatcatcccctatttggctgtgatgatgtgaaacatgaatttttcgtcagtgcattatgaggggctgaa

SEQ ID NO: 106288 - DNA, 453 bp, Glycine max
  unsure (1)..(453): unsure at all n locations
agcctaataagtacatctatggattgaaacaagcttcttttcaatggtatttattatttcatgaggtcatttcttcatttagctttgaagagaatgtcatggatcactgtatataccataatgtcagtgggagtaagatttgtatccttgtattatacgcatatgatattctgcttgcaactaatgataatggtatgctatatgaggtgaaacaacttctctcanagaactttgatatgaacgatatgggagaggcatcttatgtcatangcataaagatccatagagaaagatctcgacgcattttacgcttgtctcaagacacctatatcaacaaagttctagatagatttaatatgaaagatgtgtcaccaagtgtagcttccattgcgaagggtgacaaacttgctatgagtcattgccccaaaatgatttgagcggaacacattaaaa

SEQ ID NO: 106289 - DNA, 414 bp, Glycine max
atgcattattatttcgatgcctgactgcgacaatgtgatatacaataaatacctaccacactagagagttctggctatgcaaattaggaaagcatcaagaagtttcagattgtgtgattacattctctggcaccaaagctattgcattgataaattactacatacccacgattacttagaaaaattgcacagaatataacttggcgaaagagcagtctaaagctactatatcatcatgaacctcatgtagcaaaagcaaatacaaatggtaatgttgttgatgatgcacctgagtcttctcctatgaaaactggtcaattttggaaacacctctcaagacactattgacccaatagatggaggctttggaagaagattatgaagattgaaatgggaagaatgaatcaacgcagt

SEQ ID NO: 106290 - DNA, 425 bp, Glycine max
agcttatcaaatgtgcatcacttctgccatacaagatctttgtgcctgctataagccatacaaagcgctttttcaacccaatatactctctcctcttgtccatgaactaccaataccttaggctggcttaacaaaatctacttcttccaagcgcccatttcaaatagcagatttaacatccatgtgatgtataatccaatctttttgtgcagcaagaactaacaacaaccttaatggatccaaccctgcaacccgcagattaagtttttgataagtctaccccgaacatcttgcgcatattctttccaacaagcctcgccttatgtttgtttatagatccatcaccattcaacctcggttctataaactccatttcactccaatgacattttaatctctaagtttcttcgcgagctcccacgttt

SEQ ID NO: 106291 - DNA, 247 bp, Glycine max
ctgtaatctggctatattattataggatttgaacaatttgctattttcctatttgcgtggccaggttgaacaagattggtatttacgctatgtggattatatagttaaattatttatgagtgatgctcaatgggtcttacatgactgataaggtcgatggtttatcatacatgttggtcgcatgtttgatatacttgcatacttaacatatgataccccccttggctttttgatgatgaccaatagg

SEQ ID NO: 106292 - DNA, 210 bp, Glycine max
gcagctcgaagccctctaacgtctatggaattttttttgctttggctattaaacccgggccgtcgttgagctcaagaggtaacatgtgaccggtcgcctcaattaatcaaaaaaatctagtgtgtagctcctagaatcgaattatacaaacacataatgtggggataaacaaaaacaaagaatgtataatccaatgcgaacggtgaatcc

SEQ ID NO: 106293 - DNA, 460 bp, Glycine max
  unsure (1)..(460): unsure at all n locations
ctatacccatactaagctntaacctcatcgtctctcacagactttagattttggagcctatccagnccttgtgtgcggactctcagccacttatgatagccgccgatgaacccattactgcttcccctaagctctctgtcctttcttcacgccgcatcccatgccttgcgaactccttggagtaccctcgcatagtggtcacagaaacctcgtgcggtgaaaggcgtgatgcttatcgctgatagcactcctctcatgggacattcttcgcatgaagatagaatcctgattcttcctttccttctagcgagggaaccatctaacaaacgcccctccatgctagccaagagatggtgcacaacaaacaattcttgcgccgctcttttcacatccccggtcgaacgtgtcatacatggtcaaaatggcgacgatcgggctttccttgccatgatgaaaggcg

SEQ ID NO: 106294 - DNA, 228 bp, Glycine max
atgagcggagaatctatagcactcgggagccatgttagaaagcaagccgcacaccttcatggagacaacaaatgcctcaacaacccatgttatactgtgaggagtttgatgaccgaggtatagataatatggggacgttccctggctcatatgggtctatacaaatacccaatgctgatgaataaggtacaaaagaggtggaagcaaaacccacacagaacaaacgat

SEQ ID NO: 106295 - DNA, 335 bp, Glycine max
  unsure (1)..(335): unsure at all n locations
ngactaggcgagatgatgttagccttagttatcttcttattattagtcaatacggctaagaatgagaaatcccaaaaagaaaatgtccggttgattttccgctctattttactaaaagatgttttttttattattatattattttttacctctttttttgatttccaacgtggttacggttgacgaacggtctgaattcatttttaccgaagtttacagataatacaattcaaacgatcgctggaaatttattttatttttaggttaagcgagaaatgacttacgtaaaatggcttaagcacgtcaagagggggtattaaaaagtaaatgaaatg

SEQ ID NO: 106296 - DNA, 294 bp, Glycine max
atcttgagaacacttgcttgagaagctagagcttagctgctcacacccctctaatgactaagctcacctccttgagaagcttctctgagaagattcctaaagaagctagagcttagctacacacaccctctataatagctaagctcaccccgtgcccaaatacatgataatataaaaaaaaaagtccctaatacaaagactactcaaaatgcctgaaatacaaggctaaaaccctatactactataatgaccaatatacaaggcctaaaagaagaaaacatctattctaatatt

SEQ ID NO: 106297 - DNA, 275 bp, Glycine max
ctgcagctttgtcgtagctgattatataaattctagacttttatttcgggccagagattcatttcaagacatatatcactgggggtattaaccacttgcatatatttgtccgcccttaataaagatataatatccgcagtaattgcccattgtactttttacaattcagcctatggacatatattaatgggcatactgaccgctgcttgcccgttatatcaatttggattataactggatttttgtgtacctatactgcgtatctggatagtgtt

SEQ ID NO: 106298 - DNA, 442 bp, Glycine max
ccgcatgcagctctaaaattgaattaaaacgatgcgaaaccactgtgaagtcgattttatatttgcgggaccgaccacacagtggaaattaagaaatccagatttaagatctgctgtgaatcactattgggccacctgtaaaccgattacatccccctggcaatcgaataccagaaagtaaacttggccgaaaacgacttcttaacctaaaattctaggccaaacctttagctactacaattggaaatcccctcctatttaatacaccctttataaaactctagagactggctgatcctccacctggaaatctttaattccatggcttgaaaaagctatgaaaccgagtgaaactatgcatcacaaacatcaactggaccttggctaccctgctacccaaaagtgatctaaaaggaaacaattccggctcccgtatcaaaat

SEQ ID NO: 106299 - DNA, 173 bp, Glycine max
cctaaacagaagaagaagaggtgaaaatcctccactcggcaacatgccaaaccacggacaaagcaaccaggcattgagattgcatgaactccgggcgggacaacacccaaacgggaaagaccaagaccaggcgctaaaaaacccccaccgagagaggaagaggccccctgggg

SEQ ID NO: 106300 - DNA, 320 bp, Glycine max
tcatcactgtgggtcagatttccacactctatcagtcgcttgtaagctatgaattcatcgactctgtacctagagtagcgccttcatcgtcaattatccatgatggccaactgaggcattgcatagcctcaacttgttaattgtaatagttttagtcagcatatctggtggattctctgatcaaaagatattcaataaagatatgtctccatcatttatcaacttccttgaaaaaatggtatcataattgaatatgctcgcatctagaatggaagatgggattcctatcaccacatatagcactttgattgtcactgaac

SEQ ID NO: 106301 - DNA, 216 bp, Glycine max
aggaatcttctggagggcccaagtgggcctgtatgctattcgcacccccatatttactaaatatacccaatgcctttgtttggagattgctttttcataaagatgcggaaacttacgaactacgtaacaatactcgatttctttccttattgttccgaacctttcagataacataatcctgcctgttttgacatacggaatgttacagaacctcac

SEQ ID NO: 106302 - DNA, 442 bp, Glycine max
agcttcaagaatcaagatcaagattcaagattcaagaattatgagaagacttaatcattatacgtatgaagaggatttttcaaacattgagtagcacatggatttttctcaaaacatgtttaccaaagagtttttactctctggtaatccgataccagattattgtaatcgattaccagtagcaaaatggatttgaaaatagtgtcaaactggatttacaacgctccaatatattccaaaagctgtaattgattacaatgttttggaactcgagtgcctttgaacgttgacattcaaatcacatgtgaagaggcacattctttcacataaaagccttatgtaatcgattacactgattttgtaatcgattaccagtgattgtttctgaataaacaaaacaatgtaactcttcaaaagggttttgacttcttcaaattggttt

SEQ ID NO: 106303 - DNA, 278 bp, Glycine max
  unsure (1)..(278): unsure at all n locations
tctgcgtaantgatgagttctagagagaaaggtccaagttcctcatagttggagagatattgtagatgaagatctcagaaaccatagcttgaagaggagacctgtctgatagcatgagatgagagtgcgagtgaccgcgaggtcctacaagagggggagacatccccagaacttggaattttgccatctttaatccttctgttgtgttttgtcggaaggaggcttcccacgtctggaaggctaaatccgttgttggagctttcttgtatgtacatgat

SEQ ID NO: 106304 - DNA, 101 bp, Glycine max
gacttaagcactgagcagcactaaaccgtggtatactagacaagtgatttaacacaaccaagcaaggttccaacttcatggagaaaagatgaaaatagaaa

SEQ ID NO: 106305 - DNA, 306 bp, Glycine max
gacctatacatactcaagcattacttatgtggcaaggcaggctaccatcactttcatgtctccatcgcgagctacgaccacggatgttccgtgccgcgatgcatattttcatgtccgcctgagtgggctaatatcccaaaccatacttcccacgaattccttgggcatataataacgctagatatgccgaccgtgtctttgtctaaacccatatcgggtaagataccgtaccccaacagaacacgggccatcattactgttgcatcacacagacaaggctgcctagagaaagagtccacggccgga

SEQ ID NO: 106306 - DNA, 284 bp, Glycine max
tatgactctcttgatgcgaggagtagagatgttaaaacctttcgaatcggacacatgccacggatgagtgtgtctttattgatgcggatacacacgactacttaactcgcttcttttatgtgtaacgcatgaatgtggttagttgaagtatagagatattcttaatacatcgcttagtgaagaggaaaattcttacttctcatatggacaatatatacgtattatatgaaccctattatactatgtatgcttggagcatagtgtactacctaaattacatatat

SEQ ID NO: 106307 - DNA, 343 bp, Glycine max
  unsure (1)..(343): unsure at all n locations
acactacnaaactcagcttaaacttcttttgtggtggtgatgctgtggatatgcggtttccttgttctatgggtgtataactctgagcgtggaagaaacatggcttgtctttcaataccatgcaatactgggccatttgttaccccaactttggctacaaacaagatataacgcggtatgtggaagtttgtgcactatatcatttgcatttacaaccctacggttttaccaatgcatcaaattttactacgatggagctggataattaaaattccatatagacggtctctaggtgtgaagactccctatcgtggttagtcactacggatgggccactgtaccg

SEQ ID NO: 106308 - DNA, 106 bp, Glycine max
  unsure (1)..(106): unsure at all n locations
agcttcatacaatatattatagaacctatatcctaatgtttcatcctancagacgcgtgtgttccttgtcctctagcatgacggttttcatattcattcacctatt

SEQ ID NO: 106309 - DNA, 304 bp, Glycine max
  unsure (1)..(304): unsure at all n locations
ntntggatatgcttgtgaattcttataaagctctcaaaatatcttgaacaccttatgagagaaaactaagtacttagattgtatatttgtgtgccagctaaacaacaaatcttttaatttgtattagagcaagtagtggtttggtaggaccaagaatactggttgtaacaagtttggtgtatagcttgagttgtagagctagaagtggcagtaattaatacttggtaactcgttgaagttaatagaacatggtgatctgccaagaactggacgtactctctgtggttaagatgaaccatataac

SEQ ID NO: 106310 - DNA, 452 bp, Glycine max
  unsure (1)..(452): unsure at all n locations
agctctctccttngggctactatcatatcctcnttattatgtgtagaatgaagcttgacagattcaggtgcaggtgctgctactggtggagacacttgaatatggtgctagacctcaaggtgatggcactcacattcttccgattctgcacagctttggaaagaaatttgtcagaattatgggactgagcttggttcaactgagtagccatctgccccatctgatttgtcatactctgaatggaggcttttgtctctagctgaaattgcatattctggatggcatttgcctcactaactcttctaaagaaggtggaagaggaacctcacactctggtgtctttgttggatagctgctgtgtattggagaagaaatattgcttgttggacagcacattctggaaagaggacagttgtgttgtgggagaactttcattcaattggaaatcctcc

SEQ ID NO: 106311 - DNA, 269 bp, Glycine max
  unsure (1)..(269): unsure at all n locations
cgcaaatggtgtgtnttaacggcttagaacaatttatcaataataatcaaaggtctaaaaccactacctatgatcaaacccccattaattaatacaaaagtgttgtttgccgcagtcttaactaaacagaaaacaatacaaagtatagcaaactacaacaagcacaaaccagtacccgctaacatatattggaagaattgcatacgcatttcctacctgtatttggcaaatcttatataccacatccatttctacatgtattggcaaaa

SEQ ID NO: 106312 - DNA, 350 bp, Glycine max
tgagctcactgttaccgctccacaaatcttcacggaatatgtcacgggcatgctcttatcttgaaaccctcatgagttgattgctcaatggctactagcagtagctgcatgctcttctcataacacagctcactctttttgaacatctatagctgccatcttagatcaataattaccaagtcttgctatccctaatactgcttataaaactcatacattcatcatccttattcgaaacttgaaacatgtctaagatgataaaccttaacttggagagccaaactaaccctccctccgaccttacaccactcacgataaccaccatgatgccattactaaagcccctagtt

SEQ ID NO: 106313 - DNA, 387 bp, Glycine max
  unsure (1)..(387): unsure at all n locations
agcttgatgcaacatttggagaggttaatgaaacaactagatgatgcgctccatgagaggttggatcaaatggagaatagagatcataatgaagaagaaaggaggagaagagggaatgatggtgttcctagacaaaaccgaattgatggtattaaactcaacattcctccatttaaaggaaagaatgatccagaggcctacttggagtgggagatgaaaatagagcatgttttctcatgcaacaactatgaggaggaccagaaggtgaagcttgccgccacggagtnttccgactatgctcttgtgtggtggaacaagcttcaaaaggagagagcaagaaatgaagaaccaatggttgatacatggacggagatgaaaaagatcatg

SEQ ID NO: 106314 - DNA, 328 bp, Glycine max
  unsure (1)..(328): unsure at all n locations
agagatgaggaagcgtcgaacggtgaaacttcctgcttttattgttgaccacagagtggtacctggagatatgtcgcggcggtcacgagaccttggggacgtcatgtggggtgctattgcccaaaaccaaacttgaccaatcccgacccaacccgggcatagtcggtcagtgagaacctgtgatgtacctaagcacgcgagcttctggcagtcaacagataaaaggaacaaagaccacaaagcaaggaggcttgtggtaattggccagctgtgaaacttgactgatatgccagatatggtctntggtaatacgattaccacggtgggt

SEQ ID NO: 106315 - DNA, 492 bp, Glycine max
  unsure (1)..(492): unsure at all n locations
tgccgctgcagcttgaaccggtcaattgaccttactcccttgcaatatgtgatgattgntgctggacatgtcggcttcttcaaagaagtttccttccatactgatgtcttgactgcgaaagaagtgtcatgttgctgctgaatgcctggctgaagaaggttcggattttctgcagatacatggttactggaacttatagttttgttgctttgaacatttgtatcatagattgacataatgtcagtgatcatttttttgccatcttctggaactccgagtccggttagatcaattacagatggaacctagtttaccacagacggagtatttgtaggttttggcttgacataagactgtttgaggaatatgaccggctttgcctcactaacatgaaattttaaccttcataatctgttgaagcactgcctctataaagacacctcaattgatggcttgtcctagaatttctgcagccaaaccatggtgaattta

SEQ ID NO: 106316 - DNA, 414 bp, Glycine max
agctaggttatctccttcttcactacatcaagaatcactgggttgagtcttctttgttgttgtcttactggtttagctccatcctctaaatttattcgatgcatacatatggatacgctaataccaagaatgtctgccagggtccagcctataaccttctttagcttcttgagaactgacaacaactttttctcttgctcatcatcaacggaagcagaaattatcacttggaaactcttgctatcttccaggaagcgttatttaaattgatggaaaggctcaattctggtgggccggctgacagggtggaagggatggttctctcccttacctataaaaaagcaaaggttgtgtctcctgaacatgtatcccattgacttataataatctaaaggaaaacccccccagctgctt

SEQ ID NO: 106317 - DNA, 415 bp, Glycine max
gattggtcttcgctagagaaaggatcaaagtgggtctgataaatgcacatttaatcatcctgcttgggcgaatgagaaaactagtgcaaatgaagaaggtgaggatgagggagaaacccatgctgtgactgccattcctatacggccaagtttcccaccaacccaacaatgtcattactcagccaataacaaaacctctccttacccaccacccagttatccacaaaggccatccctaaatcaaccacaaagcctgtctaccacacttccaatgacgaataccactcttatcatagaccaaaacaccaacaaagaaatgtaatttgcagcgaaaaagcctgtaggttcaccccaaattccggtgtcatatgctaaacttactcccatatctacttgatattgcaatggtagccat

SEQ ID NO: 106318 - DNA, 233 bp, Glycine max
  unsure (1)..(233): unsure at all n locations
agctctgaagtgctctntgngtcttgaagatagnctttctcatcttttttttatttcgctcgccctagagaagacttggtgagaaaaaagtgttattcgtggatatatattcatatggcttgtccacaggaagaggagatgcatttgtggcaacacattgcttntttttattaaaagtggtgttggaaaagaaagatggtatgtggtttggtgtaccgttctatggtgcatat

SEQ ID NO: 106319 - DNA, 308 bp, Glycine max
  unsure (1)..(308): unsure at all n locations
acactattanattctcacgcttcttatccaaggctcagatcgtgggtgaagtctcttcttctatggcatattccttataggatggtgccacctatcaactactattactttgtctcacgctgctacatcatggtggaaaataaccattgaaggaccccattgaagctcatagattccacctccatagaagccccacgagcaagcttccatcaggaacccttaggccttaatttgaaatattagaccaatcttcttggagtcttctattcaaagaccttgnggggtatgaatgcatcaccatatgcccc

SEQ ID NO: 106320 - DNA, 444 bp, Glycine max
tgccgcatgcaagcttgacagagatagagacacgatttgctagatgtcctatcttgagcaagaaatgcactgtgcatagagtcacagagtaatacgtctctatatgagtggactctgtgcaaagttcactctgagtacatatatcccatgtgaggctaggacactaatataggaagttagcacactgatctagaagattaggataagatttattattcttaacaaatataatctctaccatttatggcgaaactctacttatatcttttatagctagatttggaaaaatacaagaaaccatataacgcatggctgagctcgtggagagcacctcaaagggcttccaagctgccaatttgccatattaatgggcatttgaagtgcttaaataaaaagataaggattaggccttgcaactccattggccaagcatatacccacaat

SEQ ID NO: 106321 - DNA, 330 bp, Glycine max
tgacactacacaatactctaccttgcttgcgcggctactatggaggctggacctttgagcttctatgaggttctataactggcgatctttccaccataggtgatgcagccggacgacatattgataataggtgaatatgaggcgccataccactatgtgaataaagccatggtaagcaaggagttctcaccaccatagatgaacccttggataaataatgcttggtaacgatgcttcaaatggaggaaataataagatggagaaaatgagagaggggtgagcacgatattgtaggaatataaagggagagaagttgaactttgcgctgtg

SEQ ID NO: 106322 - DNA, 363 bp, Glycine max
  unsure (1)..(363): unsure at all n locations
tccttgcacatattcctgaagaagctagagcttagctacactacaccctctaatagctaagctcacctccttgagatgagaagctaaaacttagctacacaccccctataatagcgaagctcaccctcatgacaaaatacatgataatacaagaganaagtgcctactacaaatactactcaaaatgcctcaaaacacaaggctaaaaccctatactactagaatggccaaaatacaaggtctaaacgaaggaaaaatacctattataatatttacaaagattagcgggctcatacttagtctatgggctcaaaatctaccctaaggctcatgagaaccctagggccttaccctggatctctg

SEQ ID NO: 106323 - DNA, 112 bp, Glycine max
tatataaactcacgctagctgcaacagtgacagatatatttagagaagaaccattttagtggtcaccaaagcagagaaactttgttcattgcagaagatatgacttcatctc

SEQ ID NO: 106324 - DNA, 303 bp, Glycine max
cgcctgggcagtactcactttacaagccaatgtggtgcttagttatgccctaaacccaaaatatacgacattgcaacgccacagactattgctttataaattatatctattataagaatcataacaggactgaagtcatattatctcctcacatcagtaaaacacaatttttaaatactccatacttcctaatgtgtatctaacagaatataacaatgtgcaatgtattacataacttgtacaacactgcataaattacatatcagttacgtgcagaacacaaacctacacaataactatgca

SEQ ID NO: 106325 - DNA, 203 bp, Glycine max
cgccttgtacacgagttatctcattatgtagacatatctcatgatgtttaaggttattatgacattcaggtaactaatacatgacaagttcccaaccgcgggaacaaaagataacctaatttgctctgacgtggaacttacctttctttaattaggagacctgtcatctgagggagctttatgtacacatttttaccatgtga

SEQ ID NO: 106326 - DNA, 400 bp, Glycine max
ctgccgcatgcaagctctgtcttcatatgtactttgccatacacattgatatgctcaaattgtttcaatatggtttccatctcctcagttatggtcacctcaccctcacataacccttgatctaaaaaagtaagcctacgccacaaaatgtggattatctttattggtatgaagccaacaacatattttaataactcacattcacatggaagacctggggtagtcctcatgacacatacacaacgtgaagggttattgccagcttagagtacacgctcatactcataagtaattctatttacagcgtaccttgataacagttctagcattattttgacaaggtaactatataacatgcccaaccatgtgatacatcgcacaaagatgttttaatttgggc

SEQ ID NO: 106327 - DNA, 344 bp, Glycine max
gacactatccactactcacgcttattgtatggcgattaccaagcacagaatagtcacaaaattcaaggttatctagtttatcaccacctaacagagtgtggttctcaagttcatgtaatcatctttcactaacatgacctaatctcaaatgccaaagttttgttttatgaatcaatgtattactaactaccgatgcatgccctacaatagtggaaccttccagaataaacaagccattacttttattcttgttacccttagctatgattaaagatccatttgaaatcttaagaacaccatctaacattctagctgaatatcatagatcatccaagatgtttatg

SEQ ID NO: 106328 - DNA, 410 bp, Glycine max
agcttctagccaaatggacttacctagagataattcctttgatagccctcttgagccttgtttccctttccttgttttgaagctcactacaagccttaagtgagaaaccatgatattaccatatccttaaagaattttggagctttggaattgttttgggaataagtgtgggggggttttgtttcattggacaacttgttttgttgactatgcttcatgatgtatttcgggccatacttgatgtacatggtatattggttaaatgttggacatgctgaatgaaatattgcttctcacaggcaaaaaaaataataaaaattcgaataaaaaaaaaaagaaaagccataaagttgagtgaataagatcttatatggcacaagagtgataaaactctcggttctactcttcat

SEQ ID NO: 106329 - DNA, 265 bp, Glycine max
aacgaatctaagagacatattattcgactatggtgattcttgactctttctcattgaaacgcatgtccacttgtagctccaaagaatgaaacctttcaccaaacaaggtttgaagaccatcgaacctatccaaaatctttgaaggagagatgaatcttctacatcatgtccttcttcaccaacatgtcgagcactctttttcacccaaaagccatcatgctctttttgataatcaaaggatgcaatgactgtagcgcctattaaa

SEQ ID NO: 106330 - DNA, 342 bp, Glycine max
  unsure (1)..(342): unsure at all n locations
nggactcacgagtggtaagtagaggtctaagcggattggttctttcgttgttactaatgtatgtccttatggcacagtggagatcaaaagtgactccacaaacaacaacatcaaggtcaatggacaccgactgaagacattactcacagacccttctttagtggacctaaaggaggaatatacattcttactccaccatgacttagggaggtgttcttttcctatctccttcattactattattacattagactgattctattagacggcataattgcttacaaccttaaaaccgtgctacattgaagactatgtgtagattaaaatggggggggggggggg

SEQ ID NO: 106331 - DNA, 248 bp, Glycine max
ctcactttacttcaatattcgtctttgtacaccccatttaaaggggggtgataattcactctctaaaagatccttttcacaaattctatactctttatttataatacattattatatatcactatatgaatagaaaaatcactaatatcagtcgcaccttccactcaacaacccgtgaacttttctaaactaaatgcactcaaagcactctttcaacgatagtatatgtatttctccctaccataacg

SEQ ID NO: 106332 - DNA, 288 bp, Glycine max
  unsure (1)..(288): unsure at all n locations
cgagannaagaataaacagagatgaacgagagagagagagttagagagagagagacctatgagtgagaggaagaaaagattgtaatggacagaaagaaaaacatatttttcgatggaggtggtagctcgtcacgtcaaggtgtgttgagagggagagagagatacacagagtgagcattgtgaggtacaatgttttgtacagagtgaggaattttaattcctttgtttttgctaagaatttgagattctgtcaagttagtatattaaaatgctttacaaaaatgataa

SEQ ID NO: 106333 - DNA, 279 bp, Glycine max
  unsure (1)..(279): unsure at all n locations
tatgagacttccaatctttataagcagaaatgtaaaatctatcatgactaanagctatcaaaaaggaatattcagcctggtcaacaagtattgtatataattcttgattaagaatatttctatgtaagctaaaatccaagtggtatggaccattcatcatcaatgaagttatgccacatggagcagtgatattggaggacccaaccaccaataggacatggatcgtgaatggaagcaatatcaaacactacctatgtggagatattcagaggataatca

SEQ ID NO: 106334 - DNA, 343 bp, Glycine max
  unsure (1)..(343): unsure at all n locations
cggacacaacaaactcaccttacagcagatttagtaatgacccactaacctataagtattataactnaatgccattaacctacggaattaaaaaaacataatggctgagtgtaactgaaatagtggccaccaaaagtcaccctcaacagcctacaaatcagccaccatttggtctaccacaaggctgatgcctaaggtgtccattgggcccttattacaacttgaactaaacctaacataaacccttatagttgattaaccaaaaacatatactcggcagccaacattacaaggagtgggccaccacttatacaaactaacactcttaattgagacatgtggc

SEQ ID NO: 106335 - DNA, 350 bp, Glycine max
  unsure (1)..(350): unsure at all n locations
tctagccanatggacttaccttgaattaatttctttgatttcccatttgagccttgtttccctttccttggtgtgaagctcactacaagccttaagtgaaaaaccatgatattaccatatccttaaggaattatggagctcttgaattgattcgggaataaatgtggggggttttagttttattggacaactagatttgctggctatgcttcatgaagaattttgggccatacttgatgtacatcgcatattggtttaatgttgaacatgctggatgacatgttgtttttcaaggctctagaatttaaaaataaaacatatgattctatatacgaaatttctcaaaaaaa

SEQ ID NO: 106336 - DNA, 147 bp, Glycine max
actgttaatcggtcttttgctacgctcaaaagttggtgatatactggtaatggcgattcgattcgtcagaagtggcatttactatgattacgcattcgatatgctcgaagttggcattcaccgtaatacgtattcgctatgctcata

SEQ ID NO: 106337 - DNA, 176 bp, Glycine max
aacaggcggcgtgtttgccatgttcttgccatggcattttaaactgcgtagttttcgaagagtttgttgttgctcaatcagagcgtgtttctcactcacagtggtcgcactgattcttattgcaaactaccccgccaaaattatccgatgtaaaaatctctgctgaaacacagtaa

SEQ ID NO: 106338 - DNA, 259 bp, Glycine max
gaggggaggacttgagttgttacaatctatctaagtcacaggtccatgcttttttgacaggacttctggagcttttgaaactctgaaactcttggaactctgaagtactactgccccttataagctctctgagtctgaatctaactactgtccctccttatagtctcccagcaatctaattaaagtcttcaacttaagctgtcagtaactcctagcatcagcagagaatttttcaaaagtcctgctgtaattctgttga

SEQ ID NO: 106339 - DNA, 292 bp, Glycine max
  unsure (1)..(292): unsure at all n locations
tttggatactaataggaaaaatgttcggaaaatcaccaggttcgacgttatgggttcaaatttacgtctgacgttgtgtttgggtctcgctatcgagtccaaaaaatttcattatcatgacctagggctattgttacggctatttattattacttgacctttgaggttagattatagcatttcctataaataaaattcacgcattgatgagatcgtatttgtaataatcacgtcagatgtgacacgtgaacaaagagtnatatattatataaattattttaataataaaata

SEQ ID NO: 106340 - DNA, 153 bp, Glycine max
gtgtcttgtgcggtaccaggactttcatcttggagacctccgggataaaagggtgtttatcatctcctccgtgcctaaaagtttagggtgaatattcaacttctcgcatataatgaagtgggtagaattaaactatctcgccttccactcaag

SEQ ID NO: 106341 - DNA, 335 bp, Glycine max
cctatcactgcaccaagacttatatgactttagaccactctcattggctaccactgctgtaacgtacgctaatctctggaaggaagtacttctttggcttctatacaccactctgtttttactcggtcccttgtacgcccttatataggtcatatccccaaacaaaaacaactgtgccttgtagctagctattaacaatatgcattaccacaaaactctatttctaactgagtggagaatggaatactcctggaaccaggtgtcataataagatgaataaacaattatcatggctttggctagcaatacttattgtcttgcatctaacaaaggtc

SEQ ID NO: 106342 - DNA, 397 bp, Glycine max
catcaaagcaaaaaatgcaaagtacacaagaatgtcaagcatctgatgtctgactttaagtcagaattaatttactcacaacaaagagatacggttgagctcaatagctctttctttgacgagacgctaaagaagctcagttctctacatccatattgcagtgacatattcgatactcttaacaaagtgagcctatgccaacatttcacatgattattattgagtaatgatatcgcaattacacatcattagtggaatctgatcattgctgtacatgattttaagtaaaactatctttattattttattgaaaaaacacttatttgcgacttctccttttagcaaaactatactttttcttaataacacgcagttcaaacacgcttgttatgataaa

SEQ ID NO: 106343 - DNA, 326 bp, Glycine max
agtctcattagctgccttttttttgtatgactatagcatctgttactctatattctatgactaagctgttgcagccctctgaagacttcaacattgtgtggaccattacactactgctgtacgttaattgtaacatggccactggctgtaactcccacttgcaatttatctttgtagatgtgattagcaaccctgaatctcatcgacttacacaatttttgttctctctaggattacgatggaccctgctacgttaacttcagaagagcgccatgtattactggctgcgtgaacaaaagtctaattgcatgctcagtacattacag

SEQ ID NO: 106344 - DNA, 234 bp, Glycine max
ctggaccactgctgattaatttcctgcaggtgggtggctttgtacactaaacttgcctcatcgcaacgagaatgacacctgactatgtgaaatttacaagactctcacctcgagcaaacaacacgtgacatatgaccttcacaacaatcacctggtgagatacctacctaatgccagctacacacacagagctgctctcttcaatgggctgccagaacatcatctcacatcaca

SEQ ID NO: 106345 - DNA, 307 bp, Glycine max
cttgaataggttctatatcctacagggcttggatgcaaggaatatatagatagttgactgaaggaactaaataaaaagtgtgtagtatcactaaagagttaatttagtgtgagctcacactatcttctaagagggagatggccttcaaatctttaacaacactctccctattaccaaataattatatacgaatcctttcgtgaatgattgttcttcttatttcaaatatacttgcaatactgatagagaccgaatttattatttttattattttttattctttatttaaaatccttttttcttttta

SEQ ID NO: 106346 - DNA, 114 bp, Glycine max
atgtataaaacctaaacctgacccccagccaaacataaaaaaattatacctctaaacatatattcttcaacttgagactgtcagcttaacaactgtcacgactcgacacacttc

SEQ ID NO: 106347 - DNA, 175 bp, Glycine max
aatttcgggccaactcaagtatggaagtcagaaagccttgagggggggttaggcaagagcttatactgaaggtggtgaaaaagtgtacctgcaactgtaaacttttcgagtcctgttttagtgttgtttccagctttaactcgttttcgctttcagattcagaatttgtggctct

SEQ ID NO: 106348 - DNA, 221 bp, Glycine max
  unsure (1)..(221): unsure at all n locations
caggaggaactggatgatctaacttgtgtcatggagtactagnggggtgtggtgatcaattatgtatatttggagtatgcgtttagcctttggcctttgaatgcnaaagttacaagtttatggtatcanataatgaagagtttaatgaataaataaagctctgctaagtaatagcagtttatgaacggcggaggtgtacaacactcatcaacacataaatc

SEQ ID NO: 106349 - DNA, 103 bp, Glycine max
ttcatgacattatacagtctgtgctgaaagcttgcagtatataatgatgaactaagttcgtgtatcacaaaatgtctacattctactattctgatgctattac

SEQ ID NO: 106350 - DNA, 138 bp, Glycine max
aactctggactttagaactctgaacttctagaactcttgagctttggaactctgaactagtactcccccttaactactactctgactttggagtactactccccttatctgctccctgcaaactgatcaaaatctctc

SEQ ID NO: 106351 - DNA, 208 bp, Glycine max
  unsure (1)..(208): unsure at all n locations
ctcaaagaactgctttttatacttcacattaatacttgaaactgagctngtatcatttctctttctgcaaactttagttttgttaaactgtctccaaacaaggttttttatttctctgcaaaatacagacagcgatcttggttttcttcaaaaacacgtatttggtcttcttaaatatgctcgattttctctcttcaatagcaccgat

SEQ ID NO: 106352 - DNA, 89 bp, Glycine max
ctccagcctaacctccgtgccactcagatacctcaggctattgtttacacgcctatctccagtccaatcagaaacttagcagttcacac

SEQ ID NO: 106353 - DNA, 107 bp, Glycine max
  unsure (1)..(107): unsure at all n locations
atgcaatgcctgtcgattctctccattgtgcgatttcaccattggccttatcactgttatgcctatacagcccacccacacctgacacctggnngtattattttagt

SEQ ID NO: 106354 - DNA, 254 bp, Glycine max
gttatatgtcagtgggaactgcctaaacatgcggtatttgcatgtgaccgccaaaatttttttgaggaactgatttttttatatatattcaacgcccaagctgtgatcctagacaactaaggtgctcaccacagccccaatcctcaagtaaatctcatcatttatacacctttaatacaataccaataaactgtgaaagtaggttttgttactacatagtactcctcttatggaagtcccaacacgtctgtctt

SEQ ID NO: 106355 - DNA, 109 bp, Glycine max
tgtgatgatcatatagcctcgttgatatgctttcaaaacatttcaaaagcaaatgagtgtctgtaaaactcacatagctagtgagaagaattattgattaaatacacta

SEQ ID NO: 106356 - DNA, 149 bp, Glycine max
aacacagtccgtagacaaaaatatttgaaggcaagaaaatcacttattacgattcacatttcgatcaagatatatgcactgactgaagtatctgcaacattatatacatttgcttgatgacagaaagcttccaaccaagaactcaacaa

SEQ ID NO: 106357 - DNA, 187 bp, Glycine max
gtgttacatatactatgatctgtttccagtctctggattgatccgaatagagaactgaagaagaattacttgtgtgttgtgttcaataatcacttcagtgcacttaatcatgcatctttcaatcttataacttgtgtattgctgaattaagaccatgggtaaaattttgtttttttaaaaaaatttt

SEQ ID NO: 106358 - DNA, 424 bp, Glycine max
  unsure (1)..(424): unsure at all n locations
gaccgcgatccttgagtcacctgcagctgcagctttgagttattaganactttgctcttcctccaccgacttctggagatctcatttagctcatcattaaatggaatatgatttccattntccacganatgtgcaatcatcatttccttctagtagtcatatttgatcctttcgaacaatagaggtttggcggtgtaataacctttntctatttctttctttgagcaaatcttttgctctgtattgttaaataatcaactgagaggccaaactctaatgtcatctgaaatatcacatatcacattaaaagaggagttgaatagtgtgttagaaaaatntaataactctatagcaaagaaagctctctcataatcatatttgtgaacacacagattctgactgtgtcgtttaattatagaaaaac

SEQ ID NO: 106359 - DNA, 103 bp, Glycine max
  unsure (1)..(103): unsure at all n locations
cactctnttctcatnccttctctctctctctctctcttatccttcttctcaagctcgtcttcttcgtggagacttactggatctgcaagagacnnaaagtcgt

SEQ ID NO: 106360 - DNA, 250 bp, Glycine max
  unsure (1)..(250): unsure at all n locations
ctctttatggtagacatatccatctaatattattgatacacactataatccattattgggaagatagcaactcatgctttgattataaaacactgccctgatggactcagactttctgataatgngtaatattctttatcgatagttataaagtacacagtccatatgatgcaaatgatttgatacgatgaacttaactagattaaaaatcgttgcatgatcacgccactatattgatagactaacatta

SEQ ID NO: 106361 - DNA, 326 bp, Glycine max
  unsure (1)..(326): unsure at all n locations
tttttcaatctctctaccacanacttgtggctaatttagctaaagagtggagagagtccctatactgatgggaaagggtaatgccattatcatactctccgtattaatagactatttatcaaaacagtcgatacacttaaaccacactactttcagaatatatataaaaaactaactcgatactcaatctttcacaactaaattaactatgtgttcctctcatctaacaatactattgttattattaatcgaaacatatcattgaaccatataatgtatcacataacaagtctgcaatgcactgcgatatctcattattctatcta

SEQ ID NO: 106362 - DNA, 296 bp, Glycine max
ttgagttatttgatgccttgaggaagtattacgtgtgaatcatctaatatgtttgagtatataaagcacaacatcttaatgcatcatgatagatgatattaaattttctggtagcctttaattaatatattattgagttagagcaaaagtaagctgacagcctacagctccacatcataccatttgtaccagagcacttttgctgacagaagggagaatactatcataagacatctgctctagcggaagcattgcctacggatgtagaggttgcttcaactcactttgaattcggc

SEQ ID NO: 106363 - DNA, 351 bp, Glycine max
  unsure (1)..(351): unsure at all n locations
tagtcaatatgaaacaattactgactatagttaataaatgtagcttacaaatttctattaatgagccacatgatgagcatggtatggtagagagggccaagctattctcgtggatatcgagagtttgatnttggggaacaaatatgtgnacatgaattgcatganagtgtgtgtcatttgatgagagaatcgtcttactgaatagtnntataaanaaaatctaaattgacatgaatgtgaaatttgtcaataattacgcctctctctatanatactaattcatttttttcatatggcagtatggcatgtgtattgaatcatatatagaacccaatcaatcgatgatagaaa

SEQ ID NO: 106364 - DNA, 311 bp, Glycine max
ataaactatgctacttgataacactatgtgtgactgaatggacaagacccacgcacagagcacttgctcaagtagctgtgcatgcctatcactgaaaccttatatacaacatttgcacttcagaggctttacaacctaatacagggatatctctctggctacacacactgatttctaatggtgtaaaatgcagatgtaactctgttctgttcctgatagccagctaggactgctgctgatgcatatttcttaaaatgctacattcttgtaaagaaaaactaggaacttctcgcctatgactgattttacct

SEQ ID NO: 106365 - DNA, 287 bp, Glycine max
  unsure (1)..(287): unsure at all n locations
tcgatctaccatatatgtgtaatcgattacacagagctatattttgatgtcaaatttaataactattggaaatcatgtntggccactggtaatcgattacattctctggtaatcgattaccgaagagtaatgtgttgaaaaagacttttaacttataattcttggccaaccctttgctcttcaattggattcctttctatttatataccctttctaaactctagaactatcttgacatccatcttgatattcttattcctttgctcgaataagcttgagacacatgt

SEQ ID NO: 106366 - DNA, 234 bp, Glycine max
acattagatcatttttcttgacaaaaatatttctatcattacgcactttgggtgtcatctgtcttcttggtatcactagagaattctactttactcttgaaacactgaactctatatctattgctatatacattagctagggaattgattaccttgattcatgctgtatatctaccttctatattcacatgttgctaacttattaaaccttcttaaattgctttctcatattga

SEQ ID NO: 106367 - DNA, 323 bp, Glycine max
  unsure (1)..(323): unsure at all n locations
gatgtgtaatcactctgagtcactctcataaagctctgatttcatgatgaacactgtaataaatttgtccatactagaaagtcaagaggcaagataaacaatattggtatcggtttatcgcctcataatctgcccttgtgagcttctacatgtcataataatatcaattaatgagtgctcgacaaacgatntgaatgaaacttattgatgtcttaagccatctgttttgaactaatagtcagctatagcaatactcaaacactatggcaacatgtgtattattgctctatagtgggttaactttatccatgataaatgttaaa

SEQ ID NO: 106368 - DNA, 402 bp, Glycine max
  unsure (1)..(402): unsure at all n locations
actgaccaactatgtttgctggtgagcctcattaagcaccaaccatgtatgacgagatgggaatacagtaatcttagcagtgtagagacacaggagagatgcagagagcatngatctgattactattgtcatagttgcttgagctaatcaccttaactaaccaagagaacatttcaccccgtgttatcatgaagtgtctcttgtataatatgactcctatgtggcatctaatgagccaataactaaactacctatcaacctcaatttaggatatgaataaaatatgtaccactgtgagggcttaatgaatcaaatagcttgattgtcatatgaccttcttagaactgattgccacatctatgctctcaattttgtcagcaaatgttacgattcaaaggtagt

SEQ ID NO: 106369 - DNA, 419 bp, Glycine max
  unsure (1)..(419): unsure at all n locations
gatctctgagtctcctgcggcatgcaagcttttgagatagttcttgagaagtagaacttagctcacacacncctctaatatcttagctcatctccttgagatgagaagctagagcttaactacatacaccccttccaatagctaagctcacccacatgccaagatacatgaaaatacaaaaaagttcttactacaaagactactaanaatgccctgaaatacaaagctaaaaccctatactactagaatggccaaaatacaaagcccaaaagaaggaaaacctatttaatatgtagaagcaagcttcatggtgaataaaggtgtttgatgaaacaatgatgatacaaaagatgatgacaaggtgatgacaaagctcaagatcaatcaagaacacttaagtgaataaagataatcaaaga

SEQ ID NO: 106370 - DNA, 89 bp, Glycine max
cactttcccagcacacaccattccatctcacgtcctttcttctcgggacgtaaagtacccaaacaaaccctcgctgacttgtgtcgact

SEQ ID NO: 106371 - DNA, 343 bp, Glycine max
cactgagctgcagctgacataccctctgacgatctagaattcaaattttccagcctcttttttgtttgaggcataagcttttttgtcttggaccaattgcaaagtttaaacaccgggtttttcaaacaacgtatcttagatcttgcatcatgcatcatagatcttgggtaatgaactttttaaaatattttttttatatagataaacagcttgtgaattaccagagtgctgggtaactgaagatcaatggacctacgtgtgggctgctgcaagggcacaatatcgttgctttttctaaccttatattgtattcatcatgtcttgacattaagttttaggattt

SEQ ID NO: 106372 - DNA, 327 bp, Glycine max
tctatcatcatacttatttcctattccccttgtttagttagctactgaataagtattaattattgagtcttgttaatcctatttctctcctctttggcagtaacaaaaagccacagggcgtgaggaaatataaacatacataaatgattataaagcataataccaaatggtagcacatatcactagacatatatcatccaaataattaagttaaaatctataacaattaagagtaagcaatatattctgttaattttactatcaatataaaagaatacttagtttcaatgtcataaaaataatcattggtaagtactacatttacag

SEQ ID NO: 106373 - DNA, 299 bp, Glycine max
gtggccacttcaagatgaaaacctactggtggttatcgcttatcgactcgagaacaggccttcgagaaactgtgttaaagcatgaaacctgttggttgcatcttcgtgtccggcctctcatggagtggctcttgcggccttatgagagacctatcgtgcggtccactactccgtcagctgtaacgaaagctctgaacccttcttttttttggaggtacaacactactgttgcatcttcactcgatgtaggcctaacttcggtcacttatttctaaaaccgttgtacttcaccgttcttt

SEQ ID NO: 106374 - DNA, 378 bp, Glycine max
  unsure (1)..(378): unsure at all n locations
gtctcgatatattacgggacacaatcgtacatccgagtaaaaagtagattttctttagaatttcctaagagcttatgttntcaatttcgagcatctcgatatattacgggtcccaatcggacatcagagtaaaaagtattgccgtaaaattgtctagagcttctgttttcaatacagcgtgcgatatactatggacacaatcaacattcagtaatagtattgcgctgaattgctacaagtctgtttgaatacagcgctcgtatcttcgaacacatcgacatcgagaaaagtattgtgttgcattctcgacttcggttcattcagctctgattatcggcatatgaactcaggaaattatctgttgattgttacttcttc

SEQ ID NO: 106375 - DNA, 252 bp, Glycine max
cacttcaagtgctccagatgcccagactgctaaagcagagcagcgcgcgactatcgtcgatcacgtacgttagacctgcacacacactcagcataggatgcgtttcggacaccgtcactagacacagatctgttcagagaattgcgcgcgggcatactgtctcctgcagttatcaaatatctgattatcatgctgcaaagagctctactaatcggtaggatgaccttatgcccttgcctctgattctggtga

SEQ ID NO: 106376 - DNA, 274 bp, Glycine max
  unsure (1)..(274): unsure at all n locations
cacaactctcggtaatgggagagaaatgttcatctaaagcatacaaagtcctagtattatcaaatcctaatatttgagctgctanggagccaaaaaatgtgtctcctagatagggcatcagctaccacatttttcttctctttttgtatttgataacatatggaaaatgctctaggtactctactcattttgcattgcctttagttaacatgttntgccctctaatgtacttagtgattgatgatcactatgaatgacacnattcttggaaaca

SEQ ID NO: 106377 - DNA, 376 bp, Glycine max
  unsure (1)..(376): unsure at all n locations
gaaaaatgcggaataaaagaatgccttaagccctctttattcagagaagtgacgaaaactgatgaataaaaaaaaggatttagttctcataagagattaacaagtttctaggaacaaaggaaatcaagaaaacanatttaatccatagaaaaaagagaagacttccttctgttcaaagtgtatgaatgtatcacctaacatctaaagttgattgccagtttcagaaagaatgagaagctgatggaaaaatttaagacaaaaagcnagaagttacatacttggaagatatgaatggatcatcagtgatcataaatgcatcataatgtggcctatgaccaaactatgattgcaatagaggtacatctttacttgacta

SEQ ID NO: 106378 - DNA, 254 bp, Glycine max
tgaaatataatgtgtttatgagaaatcgtagtgtgatgagtgaattgagagaaaggagttataatatttttgattgggaaaatgttaagataaaaaagttttgataatggagatttatgaatggagaagagaatagatatgatttgaagaaaaaataatgtttattgtgagatatgtaagagggtatgagaagtattgttgatagaatatgtttataagtataggtaagattagagttatagattgtaaaggaa

SEQ ID NO: 106379 - DNA, 399 bp, Glycine max
  unsure (1)..(399): unsure at all n locations
cccaaaatcattaatctgctctctcaggtataacgatatatctctcacatcgatattgaatctctcatcggtcattgcatccattgaaatctaattcttgtctanatgatattacaatcatgttctgcggcgcattaatctcacatgactgcatcacttaanaccaatttgtaccgattaaatcatagagacctgaataacctatcctttcttcttcggtctggagccatgatcattgaattatacagtngaataaatataaataatnagttatgtatcatctattatatctttgataattatgattatcttacatacattactattcaagttattatatattcttagtacatataattcttttaaaactttaaactatatattaatcagtatactcaa

SEQ ID NO: 106380 - DNA, 318 bp, Glycine max
  unsure (1)..(318): unsure at all n locations
cacttttctgnagcaaccattgtaatcaatattgatcctcatcaccatgcaanaagtactacctgaaccaaagaanaccataaatgattcaaagtggtatttatagaactaacttaattaagaaaaccaacagatggtgattagagcttgccttcaatgtcatgaagacaatcagagaaagagagagatggtgacaggaatttgaaaatccaaaatagtataagtgagctagcanaggcagagtgaatcttataaggcaagcaacaacaaaactttgagagccananaggatntataatgagttgggtagcattttcg

SEQ ID NO: 106381 - DNA, 181 bp, Glycine max
ctacacgttctatctttttgagtatttgctgacgaacattgagctatgtgtggatacatgaactaaggctgttcagaagccagtgaaagcttacttcactagaagcattcgatcgtgtactgtaagcgtgctcatacaaaataaaaccagtttcctggtttctgagctatttttcctgaat

SEQ ID NO: 106382 - DNA, 472 bp, Glycine max
  unsure (1)..(472): unsure at all n locations
ctgcagctaccactatggtcacctggtgtgaaatatttcacttaggtgtcgccagtggtctgcatctcacttccaaccaccttctcaccattagcatattaccctgcatagnttcctcttgaagctcttattccacttcttcttcactgattttagagtcactagtgagttctccatcttccttcatgatcataggcctcctgttgggcattcagaatcaatatgtcctctgcctaagcatttgaagcaatttatgtttctggtaccattgttggatgaggcagaattatgtttggtccatcactggacactactgactttccatgtggagatggtgctgatggactggatgaagtcctctcttcttcttggatctgtggcccaatttggtgaaagatagatgagttcttctgctacactttctctgagctatgtcacccgtctgcctatgcaccatcatccactcacatac

SEQ ID NO: 106383 - DNA, 351 bp, Glycine max
  unsure (1)..(351): unsure at all n locations
accttacttctgcctcttcctctaaatggtggctccttgtgctactgtaccctcttttatcagctcatggtggtaaccaaagcgcggccacttcctcttgcttgaattgtacctntctctgtatccaggagcaagttctgaaattgttctcatacatttattatgaagtcattgggggtgttgtaaaatgttcacgcttaaaagcagtttactctgactgtgttattctttaacattcaagaactacaactgacattaatcatctctcctcatcacttacatcaatcatatctaagcactcatataaactgttacttatatttccaacaactagggttctaattaaacgtt

SEQ ID NO: 106384 - DNA, 237 bp, Glycine max
  unsure (1)..(237): unsure at all n locations
tatgtatcaatacttgcttcaaagtatcaaaatcatttaaagctttcaagaacattttccactagtatcgatacatctctggtatcgataccaagagtaaactnttgaaaacatttaactatattcttgccaacctcttgtgctaacttgaattccttctaagcttaagatatctgacattatctgaattctggatcttggttgataaactgagagcgcactgacctctgattaact

SEQ ID NO: 106385 - DNA, 361 bp, Glycine max
  unsure (1)..(361): unsure at all n locations
tactttatacttgcgcaatctatgacgccgggtcggaaaataaccgtcttcgtattgaagtgggcgcatactcttatttacaataacatgcgaccgcgtcatttgtatatgatgggtatagtactacgcgtccttattcacgcctcattaaaaagcttttatactagtactgattggtatgttattncacagaagaatganagaacctagagtgttcatcaccctcaccaatccattccaccctagatttttaggtcatttcttcaaagatctccaaaattctttagaaagaatcaacactcttccttctacatcttcaaccctctgacacaaccttatggtcaccacttattagctctca

SEQ ID NO: 106386 - DNA, 363 bp, Glycine max
  unsure (1)..(363): unsure at all n locations
taacgtgtgatcataaaaattttcttgaaattttactaaattcttctaacaggagctgagcaactttaatgtctaatcgcatcaatatacatcaatgcctatagatagctgaaaccaaattttaaactcctcacttactaggtttactgtgctcctatttacggtatgctataaatatgtgaaacatatgttagaatgataaactgtgatgttactaaactaccnactctgctngcacttacctatgaatacatgacacacttgcatgtatgtggtgacatgaaaatgcatagagacatatgtatagacttgcatgaaaagtgactacataatactagcaaggtgaaatggaagagatgtgcc

SEQ ID NO: 106387 - DNA, 400 bp, Glycine max
  unsure (1)..(400): unsure at all n locations
tatatatatatatgtgtgagtgagtgtgcgtgtgtgtgtgagtgagtgagtgtgtgtgtgtgcgtctgagtgagtgagagagtgtgtgtatatgtatagatgtatgtanaaggagcacgatacctttgatatcgcttttatatatcanacatacgtcacaacatatatattgtatgctttgcagcagatacttggatcgcgtgtaatagcaaaaatactcacaaaaattatatatgtgtataccctatttcgccgggaccttgctgatgacagcgacatcttggccttggagtgttggccccatcgtggcatttgaattcagaatgcgaaaccaaaatgtgagccaatcaagtctgcactggaataatgagcttgtctattaggagtcgacttctagtaa

SEQ ID NO: 106388 - DNA, 434 bp, Glycine max
  unsure (1)..(434): unsure at all n locations
tgcatngatcatatcccggtgagagtgtgantccttatatttgagataaacgactatcatntagtactgaattttgcgtgaatctctgaagtatggactgaatgcatgaaattgaggatgatgaaagccatgtttgattgtgaaagccacttagccaanaagctgaccatgtgcttgaatgaattgcccttgtacccatttgagatgaatgaattagtgattgattgaaccctgagcctatacaatgttatctcctgctaccttgactanggttgagaagagcatatccacaggaagtggtggtcaaagcaaatntgtcccaaatttggggagtattatcaaggaaattgtctatattggggaggcactggtaaaatgaatgtcaaagaatacatcacacctgtttatgtaaaaactgtaaacaaggaatatag

SEQ ID NO: 106389 - DNA, 279 bp, Glycine max
  unsure (1)..(279): unsure at all n locations
aacttttacacatctggatgcgcaattacataactttaatgaccctacatgatactctaaactctcttaactcctacataaatatacttttatgcgaactaaaggctacttagtattcttcatctttantggattgcgtcctcaagccattattttgactatgttcctgctccctaccatagatagtagtcgttccctgatactgtattgtaccaatattaatgtgttctcaactttttaactacagtgttaccttttactacactttcaaaattttct

SEQ ID NO: 106390 - DNA, 334 bp, Glycine max
  unsure (1)..(334): unsure at all n locations
cactaatatatagagcgactactcagaaagaagagataggtctcgattagacccttccaatctacctaattaaagaaattacacaaaacacagccgctaactgcaacaccaattattaagtgtagaggttctgacttccaagctcacatcgaccctttgaaattgaagaattgngccagagcttatttgtgacaagatagaagctatataacttagctttctgaagactactcacatgctccatttggagttctgtagtgtcctatggaccctgcacaagacagataggtcaagtaaacataagatctaaaaatagctcaagtctcattaagtc

SEQ ID NO: 106391 - DNA, 315 bp, Glycine max
  unsure (1)..(315): unsure at all n locations
atctctatcacgtctaggttttgactctagttgtttatggaagcatgcttggtgtgtgtgtggcagatcgtgttacaaagcttnttcgtatatttttagggatatcatttgtatgtgtagatgcacattcaactaccatggtgtagtagttggtataaatggctactatgcttgtctagtctaattcctaacattagaatttctttntaaaaattccttatntcaacttgctcataanagcttntccacaaagatctcaagataactaaatcacactactgaactnggcttttataaattactgtaacatcttgt

SEQ ID NO: 106392 - DNA, 128 bp, Glycine max
ttgttctgctaatgttcctcctactttacgagcgattctgtgagaacatgattctagactctctccgccctgattactatacgatttctatattttaatgtgtaaggctattatgaaataatgcttgc

SEQ ID NO: 106393 - DNA, 438 bp, Glycine max
  unsure (1)..(438): unsure at all n locations
attggatgtgaatngtctacactatcaaacttatagaaggacttcagcatcagctacaatcattggtccagcaatcttagatcgctggttgtgtattatttgtcgacagtacagtgcataggtgcataatactggtcacatgtaatctaggctctgcgttccatcaagactacattagtttgacaacagaatcattggtctgtggtcttataatgcaccatgtgtaaatatagtacctctcggactcgactaatatattatctatcttcgctgagcaagaaacaatcanactcaaatctgatggttctatagaccgctataacgctcgttcggtgtgtcttggtaatcggcacgaatatggagtggattatgaggagacatttgcttctttaactaagatgactactagtcgtactatcttagctatcagtgcatcac

SEQ ID NO: 106394 - DNA, 316 bp, Glycine max
  unsure (1)..(316): unsure at all n locations
tctacttgtanaacaactacccggcatagacaaactcctcgcacaagaaatttctttgacctaacaatcgtcttgaagtaanataacattgtggatttataatagtgaaggtaaataaccagagaagatgattcaatgagatattccttgataatagtgtgttaaatatataatgcttggagtaacataaatgtgagttatatataaaatgccagaaaaaatgaaccaatgggcatctgttataagtataataaggttttggataaaaatataaaaaacgacgatctataatatgaagttaaatcaagctatcctt

SEQ ID NO: 106395 - DNA, 414 bp, Glycine max
  unsure (1)..(414): unsure at all n locations
tctctcaactggtcttcattcttncttctcttttcacttatgttcttcctttttcttgcacaaattttgtggctcttccattggtgatgatcatggaaagcttaacacttaantaatccatggatccactccaagccaggctgaatttgagttctgatntagtattctaattctgtgtgaatgttcatctttntcttcaatcctatatttgattntcgtgattatgaatatacttacgatcgaaaatagaatangttatggattcatttcctaatttcacaatttaatcacacattggtnggatgatattctaacctaattcgtgatcacaatgaagttatgaatttaatcgattgaactatctctaatgacattgacttgactntcacaatcagaacatcattcgtagcaact

SEQ ID NO: 106396 - DNA, 333 bp, Glycine max
  unsure (1)..(333): unsure at all n locations
tcagctctatcaggtatctgtgtgagctcttctctgctatcctatgagggcctctttctctttcttgcttcgtgattctgggaaaacctgagactatgactaaatcgctctaactccagcacttcatagtggatcaacacaaactcagaggtgctctaacctcattattttttcttacttctttcattgtgntcttattttctcatgatctctacatgctgtctaatatgtacagatcttaagtttcccgataactgcttaaataattgatttatggtaattctgtctagtttgaccatgatggtgagtacggtcttgagtttgctgtatttt

SEQ ID NO: 106397 - DNA, 383 bp, Glycine max
  unsure (1)..(383): unsure at all n locations
acaccgggtccgcataaatncttccaagcttacacaacatncaagtaattcaaaatctaagcatcatgaactaacacagccaagaaaacagggcagaggtagaaaactctgcccanaacacanatcaatatcacagctttccttacttaaagaccncagtaacatttccttcgttcccaatcgtcaccggtggatcgactcgaaaaatntactggaagtctctagtacataagtctacanttntgaccgggggatctgctagcanatgtccagacccaatatgactaccctntcacaaccagctacacagcatttctgacagtcaaattctgtgacatattgacacaaatctgataagtgaatntcgaatcatctgcttatca

SEQ ID NO: 106398 - DNA, 199 bp, Glycine max
gtgtaattcaagaattattaatgcttcactttcttagaacagctaatcaatgaaattattaacatcctttgacttcatataaaactcatgctcacatgctattactaccacataattacatacatacactacaactcacaaccttgcttacactgcttggcgaaaaactactctatactttagaaggtgaaatctctgg

SEQ ID NO: 106399 - DNA, 512 bp, Glycine max
  unsure (1)..(512): unsure at all n locations
tatcttgatagagtgtttaggtatgtgaattacctttttcctctggctcactactntccgaagttgatgtaactgcctatnntcctaatgccttcttttgagtgacttttctctactaatnataaatatagcatctaatatntaattagagataatctcccaattttctcccatcatgtatgtntgtgttagtgtgggtnttgtgattctagttgctgaatatacttgtatacatatattaaatgccatcaaatgtgtatttcanttcttttgatggccatgatgaggcagattcgaatgaagaagctaccttagataggaatatggcaacaacgagaatcaatggtaattatatactaaaggattccaacaatgctcttcatcaaatgccgacattgctctcanattcgacacctgacgatctannatattgtgtgataacatgctgctaaactgaantangatatntgaatagaaatntcatctttggtattacttccctanntatatat

SEQ ID NO: 106400 - DNA, 286 bp, Glycine max
gctaactcagccatactgggattatcaaaatcacacaggggagaccaccttatcctgcgctgcttatttcctcgactacgcccgagcatacctacgtcctactcttcgtacttgactctaccaacctctccccaagtaactggagccttatgaagagaccccattcagtactactccctgaggaggtgtccttcttccatggatactgatcggctacactatgctatcagcacaactattgctgctcattatttcgggacgtataggtcatgaacctatatacttt

SEQ ID NO: 106401 - DNA, 187 bp, Glycine max
cttcgtctattaagaaaatgttcctctgaataaattagctcactggtaatctttcccctcctaaaacgtgacacccgtatatttcatgtaactaatgtttaacttcactcttctatagtggtaaatttcttcatgtaatcggtcaatccacatgtttaaaattccaattcctaaataataattatct

SEQ ID NO: 106402 - DNA, 282 bp, Glycine max
  unsure (1)..(282): unsure at all n locations
tactactgcaatatgttcttctaacgagaatgatacctctagaaactatcacaagagatatgactacctngggggtatcactaatgcctattaagtctctccttatnacgtccttanatangggggcaccgagcgaatacgctgtgtgccattattcacacatgccatgcataagtatcatataccctcttgcttattgtcagtgaatattgtcatactatgtacatntcccgcattgtgtcttttgcatangcatcgcatatgggttctgtcttgatccct

SEQ ID NO: 106403 - DNA, 327 bp, Glycine max
  unsure (1)..(327): unsure at all n locations
agaacattccaggactctgatcactatgtcttgatctatcaacattcccaagcctttaaagagtggatgggtggtagcggcgttntctcacctttaagtgtgantgtgtcatcaagcanaactgatccatcgcaggcctgagcccaagaatgaacattntgttagtgtgtatttactnttttctcattagattcatattggctttctanaaatgaaactatagaactactaatagtaccataattaccaggtacgtggtaccgggtataaatatgactacatatgggtaagtgtcggtacacgggtggggtatccacttatacatta

SEQ ID NO: 106404 - DNA, 319 bp, Glycine max
  unsure (1)..(319): unsure at all n locations
tactatactatatacatttaatgaagctaaaactcatgattcgttattactaaaaagtttgatataatatttcatcctttgtttcacgtgtacgacacgaacgcaatattaccaatacgatatcatcaagtcgggaatattatttagtacgaaagatagtaatgctaacactacggggttgaagaatgacagacgaatccaaccattgcccccatctaatatcnaactggtagctacctgaatcaacatagacgcagacgtgaactccaatctcgaactcgaactcgaccctgtaattttcgacatttcacatcaaaaa

SEQ ID NO: 106405 - DNA, 355 bp, Glycine max
  unsure (1)..(355): unsure at all n locations
tcttagaagaaccctctatgttgaaaagaactagacgtagctcggcatcagtgaaccaatattaaaaaaacatgtgttctttctgctcttggtgtccttcgcatnttctgtgggtgagagactttatattttgaaaacattttgcgaaaagtgtgagaaaatgcacatggtcactattcaacctcatttctaatgtgtttgtgttatttcaattggatcaaagctcacctctttggctgacatttaacatgaggggtaaaattgatgcgcaatggaaacgaagatagcgattattacacctctctaaaaagcnattatactctaaacatgatgtgccttctaatctgctatgaat

SEQ ID NO: 106406 - DNA, 225 bp, Glycine max
  unsure (1)..(225): unsure at all n locations
gtcaagaattggacgtaatctcngtggtagagagggattaatataaaaccatgtgtgttctctttactgctttcattcngagttacctaataaagagnttgaatttgggtttagatcttatatatattatttatttgtgaataaaagtctttcatcatcatgtgatcaagcctttcactctgnctcttatattgttttagtgaaactcgtatcaaacgataacgt

SEQ ID NO: 106407 - DNA, 282 bp, Glycine max
tgcctctccatgtcctgttcaacttgcacaacgtcatctccttttttctgttttcaactgtcactttatagtgaaagcgattcgccgtgcagttcctgttctgcttatatatgcttgcaaaaagtggctgtttcggtgccgtacactgaattaagtcaaatttgcactttggagctgcaaactatttcatcaaagtacgtggtctctgtaacagggagtaagcttactcagaattcctcgtgtaccatatttctttactattccatacagaatggtactcat

SEQ ID NO: 106408 - DNA, 254 bp, Glycine max
  unsure (1)..(254): unsure at all n locations
ctgattccagctgggaaattggcgagtggaggaacgcccncgcatttacgcaacgagcataatgtanacctttacgggtntaaaagctctatagttgggcctaggcntagagntttcttttgtaaggctntgtgtcttttggtnttgaatntataatacaaggatctttcttcatctggtcctacgtctcttacccatttcatccatttgcatgnttacttctttatttctgaaacggcagatccgatgacgag

SEQ ID NO: 106409 - DNA, 397 bp, Glycine max
  unsure (1)..(397): unsure at all n locations
atgttgcagatgtttgtatgcattatgcaacaattcaatgaccatgatcattgcttnttcaccaactcgcacaagactttaacgtgatataatatcaccnaagaatgacnaatttgaatactcggtgcattcatcatanagcgattggtctccattnttaagtaaatcaaataattccttagtcactccatgatgcattgccggtatacctnctttcaccctcccactattgttcaagtgatgtggaaatgactcttcattggcacataatccagaccaaccaaatgcatcatttagcattatatgcatnggatattcagttagtggctctatcacatgatcttcatccatcgatatgtctttgattacanggtaagaaagaacatgttcccctgat

SEQ ID NO: 106410 - DNA, 447 bp, Glycine max
  unsure (1)..(447): unsure at all n locations
ttatttccaaccacacacatcanatattcacttaatgcacatgaaaagtacaaactacctctaatacannaagtagtctaggtgccctaatatacaanggctgaaaaattctacatttctanggtaccttacctatattatggagccctanatacaaggccaaaaataatgaaaccttaatctaatatgtacaaagataagtgggctcatacttagcccatgggcctgaaatctacctaatgcttatannaacctanggcttctcttgatctttgcctaatcttcttgagtcttctatcaaatgccttgaggtangaatgatcattagaaatcatcatatgctacaacatgtaaacacaagaaaactgatcaggagaacacacttgatcatcaatgcagaccnttgctgatgatgatctttctgactacagatgtacactactacat

SEQ ID NO: 106411 - DNA, 303 bp, Glycine max
  unsure (1)..(303): unsure at all n locations
actgtattctaccttctaaatacacaattacttaaaaggagctatgttatatgagaagtctctgtctctacatctgaaccaaatctatatcacgcgggtcactataacgagtaattaattagtaattatatatgatcagcagaactgtatgcagtctctgttacagaagaacaaatactctatgatcatatgtattccacactttaaagtcacaaaatacttaacgagggngctatgttatgataataacctactctgtctctactactatatcatctatcagttcaatctgtctagacatgg

SEQ ID NO: 106412 - DNA, 331 bp, Glycine max
  unsure (1)..(331): unsure at all n locations
gggagctgcatgtaatgggatcttctctacccaaaagtatgcctctgtggtgggaattccacttctggggtagggagggacagagttgtcattgtatgcccatggagaatttcctccagctcttcttcatatcaagctcgaatgttccaattgaagaaagaaatatggtggatagcactacaaagtcatatggaactccgcatgatatcatcttcataatcacctttccatatgggaggactaagtggggatacacatatntctcacttctctgctgaggagcggaaaggacttaatgtcctttcataatggcctcactatgctatgactt

SEQ ID NO: 106413 - DNA, 357 bp, Glycine max
cttgcttattcctgcaaagctggctacattatgctgcgtccgttatgataacataacaacactctttgtttcctgcactatgacagttgtgcgaaagttgattatatgataactagttggcttccaaatgttacatctactatctgtgcattaccatgaatgtgaatagtgatagagtatctcttgtgtaatttacaaacataatctgtaataccaccgtatgataaacacaagcttccaaattacttgcaatttgaggttcatcattaggtggatgtactatgtatctcgtgaataatcttcaaagtagtaagcagtcatgtgctgtaactctatctgtatgtatgcatgtacaat

SEQ ID NO: 106414 - DNA, 355 bp, Glycine max
  unsure (1)..(355): unsure at all n locations
tatcaactctctgcgnaaattatcgcggtgtaatgcttgtgtgaaatccggtttatgcagcgttgttttattccctattttgtagcatagaagcgcggctcgctcttttagctactggttctccgcacgcgtactttttcatcatatctggaatatgtatttgcaggaggtatgttctgcacaataactcctgcgcaaccatccacaaactacactctgatttagatccacacaactttactagaattcgcggtgaaaatccatctgtgaaatacggttcaacggcgatgttcatatctctacttggttatagaagcacggacgggaattataactacgacttcgcactgttgtt

SEQ ID NO: 106415 - DNA, 275 bp, Glycine max
ctcactgttgatgaagccctctttgtttccgctttcacatacttcgatttgtggtgaaccccctcgggtccatatgtttttagaacttgcttacctctatcctggtctagcatcagaattggccacaaacatacattggaggagtaaacagaagtacaaaagctctgttgcatgagataatcaatagattagtcatctagcacatttactagaattttagtctactcctcgcatttttttattgttcaattgtttttttttttacaaacaagtac

SEQ ID NO: 106416 - DNA, 108 bp, Glycine max
cataaaaatatcattgtataatcgtatataatcctgaatcaatagatagtatgaaatgtaattagacatttataactgagtaaaagcaagaatgtacagcacaaattt

SEQ ID NO: 106417 - DNA, 221 bp, Glycine max
agtcacaggtcctctttttgctgtctctggagctttaaactctggacttctaaactctggagctttaaactctggactctgaaactctggagtagtactcccccttaaacactactctgactttgactactactcccctttctactcctgcaaactgatcaaactccaacctagcgatcagtacttttatgcacagcaaaaacctttttcaaaggcctgct

SEQ ID NO: 106418 - DNA, 353 bp, Glycine max
actctcacattctctcttagataatatagcatagcttctctattctaaattctttatcagatagataacttccccatgaagtaatgtattttctgttagacgtggaagaagaaataactttctatcattattttatatgcctcatatttagtgtagctctgttgtaacgatattagtgtagttggcaaaatctcagcctcgatcttcgacggatggacaccttaataaatgatttaatatataatttataaattatttaagtgaatgatttgttggtattttatttagatcaattaaagtaaattagtaagaggtctatctaatataaatacttagatactttattaaagtaa

SEQ ID NO: 106419 - DNA, 336 bp, Glycine max
  unsure (1)..(336): unsure at all n locations
cgttcaactctgtagatgcctatatntgagaataaaattatttatttttgtaaggactnatctatctataatatttgaattatttcaaacaattaaaacttttaaattcttattntatagatgttntaagggatatntntatcatgggttggtattgtaatgaaaggtgtacaatcaaagtgttntaattcttgaaaaaaataaaatagacccattctgttgcactaattatttaaattaaatgtaacaaaactatgttcaacaaaatttgaaaaagacnagcaatcattttgaacacaatgccaaacatatttttaacttatgtccaaatgaact

SEQ ID NO: 106420 - DNA, 344 bp, Glycine max
gtttcagtgaaattacttcagatttggttctcgttatgcagtggaggaattctaattaacatgctaaataatcaaacgcggcattattaaataatccccaacacaatcttcattttttactatgaaaagttcaaatccaataaactacaaataagttatttttttcacacccattacatatactatcacacgacactctacactcaaaaaaaaagtacttgttgcgtacatgtaagtggaaagcatattataataaattttttttgtagacaactgtaagattcactaaaagaatggagatagggattctcttcactctatttttctctcacagcaacatgata

SEQ ID NO: 106421 - DNA, 230 bp, Glycine max
ttattcatgttaacttaatcctatataacatgatatacttcattgtaatttcagattgcaaaagctagcttaaacaacatgcctactgtgcttggggttaatttaaacagtgatgagaaaaaaaaaaggagactgtcatcgacctgccctatgtctcttcatcacactaatgaatgcgccaaacggcaacttgtgtcagatctcaatgagcttctgtatcatatggtggg

SEQ ID NO: 106422 - DNA, 408 bp, Glycine max
  unsure (1)..(408): unsure at all n locations
tgctctttgtgggtnngtgacatgtgtcacgatggtagaagatctaagttggaagatgatgggtattgacgatgtagaagatctaagttgagtggtgtcatgtttatangttttatgctatagtgctacttctgtngatntgtctctatttntttcttgtgtgtatccatacccagcacaaggccacataaacccaatgctcaagctagcannaactgtgatntcagttacacttagatgcttcacattgtcaataaactacccaagctactcttctcaccaatgatngtggtctagttctattatggctattctgtgatgtatattgcacttttactatttacttttctcactggaaagttgtgactattccgcaagttgttactatacctatatgctnttactatt

SEQ ID NO: 106423 - DNA, 205 bp, Glycine max
  unsure (1)..(205): unsure at all n locations
accgctgctggttggcagttacaggcggctggttgcaccttgaactaactacagggaactgttgtaccttgagataactaccagggactggttgtacctgaaccaatacagcaactggttgagctgaatcacggcgtattgattgcnactactagaacttgtttgagttgaatcaatatagatgctggtacaccttagtgccaaa

SEQ ID NO: 106424 - DNA, 373 bp, Glycine max
  unsure (1)..(373): unsure at all n locations
gtaacctgtgagatccctcagctatctggatttcatgtacatgattatctgagcatctttcttcttctgacatgatcatctgtgaagcctttctgttcttatatactgactttctactctgaggtttacctctcaaaaaacataggttaagaaaaaagtggtcaaatgggatatgaggtgtgactggaactcaggtgcttatgaagatgcattgtgctagtgtgcgagtctggaatatgggtatgggangaaaatgatgatcccacaacccacatataatgctacatataatgctattctaacaagtctatatataatcactatatattcanatcctggctggtgtaagtgatataatacaactcccttctcg

SEQ ID NO: 106425 - DNA, 80 bp, Glycine max
gacaatcaatgtagaagtctttgatgcgcttaaatctgaacagactagattaacattagtcacaatgactatgcatgatc

SEQ ID NO: 106426 - DNA, 240 bp, Glycine max
agctcggcttttcttcttcacactttcaaagaaaaatggcccgatggtagactacattgaacgtacaagtgttttatatgcgctaaatgtacccgtatcacgctctctactgtatttcacattagcttatacaatattgattgcacaatgtcatgctggctcttgtcatagaaaggttgtgtaaatgggcgttgatactttattggacttaggagtagatttcactgcgtttctgctaat

SEQ ID NO: 106427 - DNA, 351 bp, Glycine max
atttttcttcttaataagatgtgtcactgtatgcttagaacattagcttagatacatatctgtcatcaacattatatttacgtatgtatgccctctgtttatctgagcaaaactgacaaatttgtgtataaattaaagtaactttgttaagatcagttataattaccccattctctttattaaagagctatcttctataaatatacagtgtgtctgctgttgaagggattgggctgaaactgggttctataaggacagcatctgagatgatgcacaattattggatgtctgtgttctattacaacttctacatactttctatgaaatatgtgtatgataaactgattgatc

SEQ ID NO: 106428 - DNA, 288 bp, Glycine max
tttagtttgttcacctgacaattggatatcttattttttcttgcaaaaaatgcagacaccgctgatttttggtatttctttcaaaacagaaccgcgatttttggtctttctgcaaaatgacactgcgaaatttgtttcttccttcaagataagactcccgaatttttgtccttcaaataagttccctgacttgctacctgaggctctgggcagaggctactgtgtatgacacaggctttggtagttggagctcctgtgtaaaacaggagctctggttgtgaaggtcag

SEQ ID NO: 106429 - DNA, 241 bp, Glycine max
ttccttactagatattcctagatcaatattcttaatatattactcatataatagagagtacctaagaattaaccgacgaagtaaaagataaggaaaagatcaaatcgattatctggttgcacaccctcctcatcagcctaagcaattcactgacgatcaatacctttaaatccttacaatcataacaaaaagacttcctctttgttagtgttacacaaatgcatctactctgcatgaccca

SEQ ID NO: 106430 - DNA, 250 bp, Glycine max
  unsure (1)..(250): unsure at all n locations
catcagtcaatatctggtgtgtaagtgaccgacaaattgggcacaccgttgctgtcacgttttcttggaaacantttgtattgatcattcagtagggaccgtctttattcttatgtatgtggataaaaagtcgatcatatcataagtatgattactacttataatatataattaggcatntagattatcttaggattacttacagacagccacctacattttactaacaatttaatacttcaattaacac

SEQ ID NO: 106431 - DNA, 107 bp, Glycine max
gcgcctgactgctgggacccctgtgatcttagctgtgaagatagtacatgaaaattgatattgagttgatgtttaacatgacttccttctggttgtcatgattatct

SEQ ID NO: 106432 - DNA, 218 bp, Glycine max
ttcctttagatcacatgagatgaaatgcaattcatttaaatagtgacatgagaataaatagaatatgcgcatgattgtacaactttaagagtgagaaacttggaacacgctcaaagtcaactctctcctatttcttcaattccacgcacttctctctctctctcttctcttctattcttttctgcattaagcttctcttaagctcttatcaaagactc

SEQ ID NO: 106433 - DNA, 314 bp, Glycine max
gtcatcgtactatctttctcccttctttgatctgctattaaactagaaatatatctgatttaaaccattctttccttggaataaaagcaaggctataaaaatatctaatattatactccaactataccatataattagttatatttacaataccagtaacctactataccagtcgctatactacccatagactgaccgtaaatacatcaaagctaaccacaactgctaatataataacatgaggaggagcaaccacaaataattctactatggggtatcgacgctatgtagggcagaaactcaagtgactatgt

SEQ ID NO: 106434 - DNA, 355 bp, Glycine max
  unsure (1)..(355): unsure at all n locations
caatcatttcaaacaagggccaaacaacacttctcatggcacgagtgtcaacatgcactttataaaataatcatattggggtcgtgctgttntatgacacanacgtatttgcacacataanaattngtgtgaagcattntacgatacctatccatgtacatatgttatgacaaaccttgtcatgctacatcctatatatatacacacattntttggaaagcttcttttgttacctactcacanatacacatattttgagaaacactgttacgctacccatccaacactgtgtaagggcacttatgctatatatattcatattatgcaaaggcatttcatgctatatatattcata

SEQ ID NO: 106435 - DNA, 275 bp, Glycine max
aattaactcttcctcttttcttcattcgtcccctctctctctttcttattctttctcatgagttctcttagctctatcaagactttcgtggaactctctttatgttatctatggatggcctcttactttctcttattttgtgattcatgtgaatacatgagactatgactaaatccctctaaacttcacactcatagtggcattattgaaataaagttctttagctgattgcattaataagttactgttagattgaacttgtagactttgtttgg

SEQ ID NO: 106436 - DNA, 376 bp, Glycine max
  unsure (1)..(376): unsure at all n locations
aggtatctacttttgattggacttcttgcattaagaagtattgctttttacaagtctggattgtcatatgaaagaacttctctcatagactagcaatgggcatgatttgagtatttattctagtatttcttaaccctaacattgaagtgatgctatatatcttctatagattgttctaagtgcatttctttttcatatcatttgataaataaaaaaatattgattattgnactgttcaaaccgcagaaaccaattcatgagatatcatttgtgcgttggaacgcacaaatactacaaatctatatcactacaccgccaaacataccgcgtagtctacgatatccgacgtgaaaatattggagggttaccgtataat

SEQ ID NO: 106437 - DNA, 330 bp, Glycine max
  unsure (1)..(330): unsure at all n locations
tgaggaactatgatgtattctgtgctatctattgctatgcatgagtgattgtgggggcattnggctagtactttgtgagtacgaagccgatgattatttgatctaataacagtgtaagggactaaatatacgatctgcgctagttgttatgtcattgatccagggagatatgaatttattcatataaatggtaaatataacatattagtttatttatggttatttggacataggagcgtatctaacttattgctaatgacagcatgacttatttgaatataaaatttataaaaataaatgggtttatatataagatattaattgtgaaaa

SEQ ID NO: 106438 - DNA, 263 bp, Glycine max
  unsure (1)..(263): unsure at all n locations
gattgaagtgtcttggtcactctcgaacacttatgaaaaagaagtatcgagcaggactcctgataattgtcattgctcaaaacacctggtatcgatatgataggctgtatcaataaaccataaacatactctgcagctcatacacttgtgtattgatacatggcactgcacccatgtactacncacatcatcatctatgactcatcacatatctatctaatgcttatcacatcacatccctatttaaatcatatcacatcaca

SEQ ID NO: 106439 - DNA, 336 bp, Glycine max
cggacttagcattgcgctgcagctaaaaacttaagaagtatgttgcagttcatctttaactaaagatggctggagagacatgggagagagcgagagcttcctttaagagaaagcgcgctaaaagttgaccaataacctcataccataatattaaattaagcatgtgtttttagtggataagtgctttaatagcgctctatatatcatatggagaattattctgcctgatagtctttctaagaaacgaagcatgaaaacacaaagaaactgaggtaatttgcgttgatattcatcttaggagatttctaatttatatatatgtgcaatctgatctta

SEQ ID NO: 106440 - DNA, 163 bp, Glycine max
tagtgtggagagagccgttccttgaaacccttacgatgatactcgataaaccgagaactagcggttttgatacccatattagcgcacacgttaggaacgctgattactaaagggtataaacgctaatcaggattaatattttatggaagatttatataaaata

SEQ ID NO: 106441 - DNA, 292 bp, Glycine max
atctactgtatgactgtctccggcgcacgggtacgcataccccgtcatgacagaccaagtgatcacatgctataacatggtgagtgagccacttctattatggaagtataaggctgatgactgggtaccatttgggtggtgattattgtgctgattggtacatggcatgcatatgatctaaccatgtgaccatgacttagataaggctgctatactatttcatgatctgctcgactcggtctactttctacttgtagtgtgagtagtgtattacacattctgccgaaacgtc

SEQ ID NO: 106442 - DNA, 375 bp, Glycine max
tgcggttaagactctgagtcaagaaacaattgttgttgtacattttattaattctattctttctctagtggagattcttccataattggtttaatcaaaaataaaaattacaaaattggtgtaacttttaatttttttttccccgcttgaatggagcaagtcataaatgagaaggagggcattagaagcataatcgttcttatgatgatgcttatggtacctgttttattttgtatatatggaaagttttgattactcaatttttctttctttttctttttttattggctttatcctttttatatacaaattaaaaaatatatttttaaattaaagataaacttaataattttttaaataaaaaaatgataaaac

SEQ ID NO: 106443 - DNA, 377 bp, Glycine max
tgaagaggatgctttagtggaggaaaagaattagagatggggggagcacgaaactgaaggaataaaagagggagagaagtggaactttgaagtgtgtctcataagactctcattcatcaaagatacaacaagtgttacacatgcttctatttatagactaggtagcttccttgagaagctttcttgagaaaacttccttgagaagcttctttgagaaaacttccttgagaagctagagcttagctacacacacccctctcataactaagctcacctccttgagaagcatccttaagaagattcgtaaagaagctagagcttaactacacatacctctctaatagctaagctcacctccttgagatgagaagctagag

SEQ ID NO: 106444 - DNA, 225 bp, Glycine max
cattcgcgtttgtggaggaaacgtaatcaaactttcctcttttcatccaaactcgattctttccccggtcaacaccagatccgcaaagctggacggcatgtaacctactagcttctcataatagaacactggcagagtgtccaccatcatggtgatcatctctctctcaaccatgggaggagctacttgtgccggcaaatcccttcatcgctgcgcatattcttt

SEQ ID NO: 106445 - DNA, 366 bp, Glycine max
tggttctgggcaacagcaccccacctgacgttcccatgtctccagacccccgtgacatatctccaggtaccactctgtggtcaacaataaaagcaggaagtttcacccttcaacacttcctcatctcaagcttgtaggattatggggtacccatcacatgtggtactacgtggcggccgggcgatggtgcacaacaagttttacacatgcacagagcgcgcataaacccaccatcccctgttgcccacctccatctgagctcacgtactcccacgtaacccatatactgggatctctcaacaccgggaccccatcaattcttccaagctttcacaacatccaagcagaacaacttttttagctgac

SEQ ID NO: 106446 - DNA, 408 bp, Glycine max
gtatgatgtagcaaaatatttgcataatgaacattgtttcttaagttcaagatctatgtacgaaaccgcattaaatattggagtaagagaattattatcaattatacttctattgaattcaaataataatatctcttcgtggaagatacatatgtgttcataccaaaacaaatgagaatgtttttcttctttattctaaattattgcatggtttacccagctacttgatatctcaaaatacagggaaattgaacactcctagcgtacttaaactaatatttgatatatgattatcagtaacagatagaagttggcacttacagttatcttatcgaaacattgagtcttattaaaacgttataatggataatatatgacaaaaaatctgttggtaaaaaaccttcttaa

SEQ ID NO: 106447 - DNA, 371 bp, Glycine max
tgtcccccaattttctataaatagggggagatgtgatgtggaaaagggttcagccccttacgcacttatatctctttcgaagatgcttagaaaactagtttccgtgaagaacatacaagccaaggctcttccgtaacgtttccgtaacgtttacgggagtgaattcgcgaaggatttcgaccgttctatcacgctcttcattcgttcttcatcgtgcgtcagtcttcaatgggtaagtacctcgaaccaagcttttcaattcattctatgttcccagggtggcccacattgcgtttcgagtattctccttctcgttcatttacattttataccccctgttgacgtgcgtaagccattttatctaagtcatt

SEQ ID NO: 106448 - DNA, 372 bp, Glycine max
ttaaaggtggtcaagaaagtgactttccattgtggggaaaaatcttcagcagatacaggtataggctcaagaaacttatttaggacagctagaaggtgaagtttggcgttgacctacaaaagggcacaaatgagaatgctgtcacaagttgaacccaggggttcataattaaaattgaactctttttccaaactttataaatgaaatgtaaaatattatattacaatcatatttgagatatttcaatttcctcagtaacaaagatcagattaacataaaagaacacattttttataagctaaaaaattttaagatttcaattgaaatttgaggaaaaaaacctgtttgtaaaaataatccggttcgggacat

SEQ ID NO: 106449 - DNA, 369 bp, Glycine max
tgcccagagaaggaatccacagaggatgtgcttaccaccttcaaagaatggatagcggtttctaaagactcctctgcggtctccacataaggcatacaggatgggccgcacaccaagaaggattactcgccttatacgacgaccagatgcccttcaactactaatttcaacttgtgttggagtgtacagggaacaactcccactgagtggatgcacggacgccccttcagacagctgcatggggggttaatgtccattatttggaaggtaacccggcatgtgtgatggcctaactgtagtgggaggtggatctcttccctaacctctcagcgggtgccggcgaaagcacaaaccaccattgagatcagg

SEQ ID NO: 106450 - DNA, 373 bp, Glycine max
tatgcgcatacttctttacgaacgttcacttgcacaagacattcttataactaagaaaaatgcacccatatacaatcaaggcaccttcgttacctagattatttatatgtacttccaaggtgtatttgttacctacatctcatgcacttccttggctaaatttacatacatgcgtactcaaagcatttggggtaccaaaaattgcacatgtgcacattccggtatttctaatacttatgcatatacaaactttgtgatgaatcttggctatctacacaataaggtgatacattttatgctttactcaagtttttgctaccttaaaccgcatgcaaattcaagtatattttcttttgctgactaaaattgaatt

SEQ ID NO: 106451 - DNA, 383 bp, Glycine max
  unsure (1)..(383): unsure at all n locations
cagaaacaagtcacttgaagaaatgcgacctttggaaatgtattttttgtaaataggcagtggttatcgattaccattaaggtgcaatcaattacacatcagcagatgtgactctttattctaaattttgaaaatcttaacgttttaaaacactggtaatcngactactacacttntgtgtactcgatcaccagagagtataactctttggtgatgattttgtgaaacttcttgtgctctcaatgttatgaaaactattaatacttattttgacgagtcctctcttgatcttgaatcttgagcttgaatcttgattttgttcttgatctcgaactgaatcttgttgaacttgctaactctgatctttgcatatcaaatacctt

SEQ ID NO: 106452 - DNA, 234 bp, Glycine max
ctcctatacagagaaataaatggatctcctaaataaagtttgagaactaaactagtctacatgatttgccactcctaactgtataagttctctctaggccattattggccaaaccctcaaacatcgtatgaagcgtagaatacttaaggcctgtttagggcgtaaccccctccaggatggtccacaaaatatcttaaaaaatacccactctaacacttaaagaatgcgtttaca

SEQ ID NO: 106453 - DNA, 240 bp, Glycine max
  unsure (1)..(240): unsure at all n locations
tctcatggggcagttgagattaaaaatgaagttatcggctaagtcttcaaagtgaacggccaccaactcaagctttntcatgagagccccaagtggaggttgaatttgttgcagacctctctttggtcttgccaattttatgtaatgacgtggcttgaatgaaacttaaagagattccttccctttcttttacgtgttgtctctgtgtcttcatttcattacatgcttacattgaggaca

SEQ ID NO: 106454 - DNA, 374 bp, Glycine max
tataagaacaaaattgccttaatcatttcctaatatgcatgtgaattaggacgcatcaacaagaatcaagccaaggctattgtgcaagcaatcaatggggcaaaacacaccaaatgattataatgatggatggctcaaattctcacaaaggtaaaatcatcactttcaaattgagctttcaaaactatcatgacatgtagagaagaatcaaggatttcaagtcacaaaatgtcaagaacttttattttcaaaacaattacccatttcttgaacatatcctataattcaaagaaaaacatgcaaagtcgtacgtgcacacgaaattgacccaaaatattaaactgaaaatccgacgaaactaacaacattattaa

SEQ ID NO: 106455 - DNA, 287 bp, Glycine max
aagaatgtttattctaattaaaatcatcaaaattgaaaacaatttaaaatcacttccgtccataataagatcatcttaaattgttttattaagagcaagagaagtcacttactaattgagtgagagagatcccgaataactattttattaaattaaccatattattaatattatcttaattgagaaactaaagtaatacctggtaagaatattagtgaagatctttaacataatggatattagttaaataaaataatacttcactcataaataacaagacactttga

SEQ ID NO: 106456 - DNA, 307 bp, Glycine max
tggaccacttgtaaatggtgtcttggatcttttggaaaaggtgcagatttgttaacccaagataatgattcccacccaacatggacgattatattgtagtggaaaaacaaatgtcctgctttctgttcctctctactgcaaaaagggcaggggcttttgcatttatctgctcctgaccaaaatgcttggtaagcatttgatttgatactgcttgcctcatcatgcggctgatgatgtttacaatttaatgatgcttttctaccctgccccgagacacacaccggatacccccacctttatacaaatc

SEQ ID NO: 106457 - DNA, 354 bp, Glycine max
  unsure (1)..(354): unsure at all n locations
ttaagagattcctttaacatataaaggtctattaataatcatttctcttgttctcttgatcttggcttgaatcaacattgaatagcttcaatctttttggcatcatcaaaatcttcatacagcatatgcacttacaatatcccctttttcgatgatgacaacaatcagaaaacaagataaaggatatacgatttgcaatgcgtgcactcacccttactcccnncttaaattgcaattattgcctagttttagataagatctacccttagtttctttccccattgcaacatcaaagtccaaaagacagagaaatatcnagcacaaatattagagcagttcacaacataacaaaac

SEQ ID NO: 106458 - DNA, 366 bp, Glycine max
ttagctttttcatcttatcgcgtatttttgttgttctactccttatggcatcactgagtttggaggctttatcgttggaagataagggcgaagatataataatcccaaaagatgttagtgagtatgatatcctcgatttctccctccgtctcatgggatgttttctcacaatcagatcaatccacactcaaatcaagaaggaatgtatggtagacatatggtaaccaagaaagggtgtttccatcaaagaagttggcaacaagattttccttttctaattcttccactagatagacatgcaatgcattttgaagggagactcatggtcatttgatagggactatctcattctcaacatcatcaaag

SEQ ID NO: 106459 - DNA, 254 bp, Glycine max
accaccaatgagggaaccacaacagctgccagatcccaacatctacgaccgcaaccttaccaaagattcgtgccctcacttgcaaatgcactgcagcagcaacctatccggagccatatcagaatagaaccgatactgcctcgcgaaagcaaccataacgtccttccagaacggaatcgggaaagatccaaaccaatataccatgcgacagctgccccaacaagaccttcttagaagaaacggaccaccagtaa

SEQ ID NO: 106460 - DNA, 361 bp, Glycine max
  unsure (1)..(361): unsure at all n locations
gctctcgaattatgtggcccattctattgtttaatttttaaanaattaggtatgatgaaacagatagcatacatatgaaaccatgatgttaattccaagcgcccaaaatgattaaaagcccaacacaattgggaataacctcctattatttacttgagagtcgattataatagaattaaattgacaacattcgattcaatatgagttgcaaatataaagtatcttacatccacattggagagcataacattggcaatgttactaatgtaagcaggatccacaggaaagaagaaattgaagtttttacaactgcagtacagtcaaatagagcgatttgaaacttccagtaccacttcattca

SEQ ID NO: 106461 - DNA, 379 bp, Glycine max
  unsure (1)..(379): unsure at all n locations
tgttgatgctgctttcaagtntttgaacgatattgttaccaaggttgttgtcacggtgcctacttacttcaatgactcccaaaggattgccaccaaggatgccactcggattattggtctaaaggttcttcatattattaatgaaccaatcgctgcatccttggtttttggtttgaaaagaaaaacaacaaaactatccttgcttttgaccttggaggcagtacctttgatgtcactgttcaaggttggcaatggagtctttgaggtcctctctacttttggtgacacccacttgggtggtgatgactttgataaggaaccaaaatcacatgcatattttcttatatatttttttgaatatggttatgaatttggttta

SEQ ID NO: 106462 - DNA, 368 bp, Glycine max
catctcaactgactgatccctcatctgaacctcgtttaattaaacttctatatatttcgattctaatcaacggaaaacgtattccttcattcaaaacgaattcgacctctcttgtatcagctagcttctaacaaattaattacatattttgtaatagaaaattaacaatcctctacaacggaagttctaaagaaaaaattatgcaacaacactttcacttaacatcctacgccaacaaagttaactgaacaagataaaatgtatgaatataatgtcacattatttggcatagtgacgaaaatgaaataaaatacatttcattttctttaattgcactctttcaatggaaaacatttctaacattatat

SEQ ID NO: 106463 - DNA, 392 bp, Glycine max
aggacctaagaaactcagcttataacccgaaggtgacacgtttttttttatgtccaaaaaccatgaacagagacgcttacaaataattactcataataattttaaaataacgatggtaattccaaaagttattacacttaaacttgaccttcagtgtttagtctaacaaaaaaatttattacttcaactaatattttgtcaatcataaaaataaaaaaatttatttgcttgctcaattaaacttaaactaggcattcatactttattctaaaaaaattattactctaattaaataatttttgaaaaatttctcaacttcaaaatcaacaactatcacatataaatattcttaaggctgaaataccttccacataggcttatacatggaagag

SEQ ID NO: 106464 - DNA, 153 bp, Glycine max
  unsure (1)..(153): unsure at all n locations
gctgggaaattgggctttgctttgtgtaattaggtagattagatgggcctaaacaaggcccatcctcttcttctaagtagtcactatatatattagtggaaagtagttagntagttagttacttcattttgtaccanaaacagaattacttac

SEQ ID NO: 106465 - DNA, 334 bp, Glycine max
  unsure (1)..(334): unsure at all n locations
tctcccatgcgagctttgaccactgctcttccttcccgcgatgcttcttttcatgtccgcctgagtgggcttatatcctaaaccatacttcccacgatttccttgggcatttatcaggctagttatgccgccgttgtctttgcctaaacccattctgggttcataaccgttccccagcataactcgggccatcattactgctgcatcggacagacaaggctgcccagagaaggagtccacggaggaaatgctgaccacctcaaaagactggaaagcggnttctaacgattcttctgcggcttccacataatgcatataggatgggcagcttacc

SEQ ID NO: 106466 - DNA, 167 bp, Glycine max
cagaatgactcataatttaaagacttaagatgaagagcctctatttatataatgacaaaaaagaaaatttaagcttcctttttaataaaaataatttttctttaaaattaaatcacttgtattttaaaatactcctcttgactaaactctcttaaaagaaaaacttc

SEQ ID NO: 106467 - DNA, 345 bp, Glycine max
ggaacataaaactcagctgtcgatatggggtatccatattatgttactaggtggcggtcgggcgacggtgcaaaatgaatgaccacaaccacaaagcacgcatagcccaccatcccctgttgcccacctccaactgagcttacatactacaacgtagcccttatactcgtgcctctcaacgccgggtccccatcaatcctcccaagcttgcaaaacatccaagtaattccacatccaattatcttggactaacaaaatcaagcaaaactgggcaaaggccgataattttgggcaaaacacaactcgaaatgacaactttgaacatacaaataccctattaacatt

SEQ ID NO: 106468 - DNA, 257 bp, Glycine max
agaaaaatccttcccaattggcgcttgggctgtgaaaaaagctgccgggtgggagaggtatgtgtatgactctaattttcaatgggaggacctttgcgaattagcgggcactctatgctggacgagcacctgattgaaaggggttctaacctgggccgcaaaactaggtcggagtggggatatattgattgcgcgttgtaggggttgatcaagatattggtccattgagatgctgactgacaacatcggtatatctc

SEQ ID NO: 106469 - DNA, 291 bp, Glycine max
cgcacatccaaaatcccaatcctatgaacagcagcaacagagaaactagaagttccatgatcacttgcatcaaaatcatgaggaatgaactgctgctgcgatgcaatcttgcttattttgcttttgttatgatgcatactaccattgaccctgtcattaatattaaaaatagaatgtgtgacctttacaagggcagtagagggcacattggcaaaatgatcatggtcaagaagggaagctgcaacttctcttaaacctgtctccccaaccctcactgaacgtttcagtcct

SEQ ID NO: 106470 - DNA, 372 bp, Glycine max
tctttgagccatgaagtactcttttggtaaaaatcatatgcatatattatatgatgtatatgtatattgttgagctattagtgcttaacatgtgtgtgtacatgattgatttgtttatatggcattttttcccttcaaaaggagaaattttattatagaaaaaaacaaacagaattactaaagatttgtttttgtgacaaattatctctggttcatcttttcacatctaattattttaatgtagtccttgggtaggccaaacaatccaaggtcattcatcattgatggtttatgtcaggaaaaaaatgtcagaattaacgggtgttattagatagttatgtattagacatttatgggttgttatgtattata

SEQ ID NO: 106471 - DNA, 343 bp, Glycine max
tacacactaggatgttagccctcttaacattctcaacatacatgcttatttaaatgtttgcacaccaaatgggtgtttgtcatctacctacggcaacaatatatttatgcgcacccaccaagtactagagacaataatagtacatttctgtgcaccaactaagtgcccacagtgtacctaacgacaacaaccgtacatttttgtgccacaccgtgtaccaacgataaccacaacccatttcattctcaaaatatcatactcttattaatatttcattcaacaattaaacatatgttatcatgccaaccatgaaatttattaacactctcaaagtatctatatc

SEQ ID NO: 106472 - DNA, 445 bp, Glycine max
  unsure (1)..(445): unsure at all n locations
gacgtcccgatgccggccataacatatcgagactcttcgaattgaacgaagaatcttctcacaattaatactaccataacctttgaatcgaatgtccgatggagtcccaaaatatatagagaatcctgagattgaacgcggatgcttcaggcaaatttaaatggccataatctgccgactatcatatccgatggcgggccataacatattgagactctcaatattgaacatagaatctcctaaaataattcaagctagcacaacgtntgactcggatgtttgtctgagtcccataatatatcgagactcccgaaataaaacatcaaagttgcaagcaattcagatgctgaaacttctgactgattttcattgcgaccataaatatcgagaactcgaaattgncacaaagctacgggaaatccaactgcatacttttactcagtcc

SEQ ID NO: 106473 - DNA, 357 bp, Glycine max
  unsure (1)..(357): unsure at all n locations
ntcatatgtgaaattatgtgctaccatatttcttaagtactgaatggggtggaggatgtgccatgttctcataatgctcaaaatcatgatgttcaaaatcacccataacagaatgcacaaactcaccagtaatggaatgctcatgatgatcaaaaagtacaaaatgatgcctaactaaactatgaaatgttctatctatatcaagatcaaaagggtttgtaaatcacaatggatttgcctcgatgtatacacacaattcaacattgcccaactcgcttgccttcttatgttaattaaaagtgtacatttgaactacagttccccttaaatgaaattcagaggacttgaaattttgtg

SEQ ID NO: 106474 - DNA, 334 bp, Glycine max
ctcagcttgagaagaccagagagtctgcatgtgttaaacttttaaaggatcacccaaaccttggacagttgttcccgagagatcgcgagtattctgtttctgaggcggtagaccaggggattcttgccaacggactgctctattgggaataccttatatctggaaatttattcataatcttggtgataaaactcctggacggtggaggggagattatgcgcttgttgcacatcatcaacttacaggatcgggcaagctggtatgacaccaggtgagcgagccggtggttagggccttggagcgactgggtgtagtgattgttgaccggagaggc

SEQ ID NO: 106475 - DNA, 371 bp, Glycine max
agcttgatggatgctaagcctcacatatcgggcttcactttttctgctcagacgttccgcgaagcagacagcgctaagcccatcctgctgtgctattcctcgaatgcttacgggactttacaacttctagttgggctcatcgcgaggcataggctaaacgcttgggttttatactcaaaccgtcacgtgggcacgctaagtgcatctttacgcttagcacgccatacaaaattcaatttttaaaaatcattggcaaaggcactttacgtgctaccttggaaccgaatcctctcgaccttcctaacctttagcaagtgcgtattttgctgctagcgtaatgcttgtctgcattctcttcgcttcattttgag

SEQ ID NO: 106476 - DNA, 381 bp, Glycine max
  unsure (1)..(381): unsure at all n locations
tactnnagcttagcacgtaacaatgagatcctaaaactatattcccactgaaaataaagaagacatgactctgaaggctactcatggcgagtttgtgaaatgacttcaactcggatccctcacaacaaccataatatatttctatgaagagacagaaaaatatgaagctgaatgtatttcgattattgatgagttgaactcccatgtttgaaaacaccaaatatatgaaatcatggcgagtttaccataaaagcaatttgttgctgttttcaaaaatacttaataggtcaacccaccaccaatccaacacattaaactcatttctaagattggtactataatgggcctaaagaacaaggttctacacacttctaccaaaca

SEQ ID NO: 106477 - DNA, 380 bp, Glycine max
tggaagaagaagaagaaaatggattcctctttctcccatgaagaactcgtgcacaacaatggagaatgaaggttctaagtttgatttttttggagaagtgaatagataaggctttaaggcttgatccaaatgaaacttggttagtttaatgttgataaaatcaaattgacaacttgaatgatcattcaatagccatggtggacatgccaaatgcagccatgcataatgagtattttaccttttgaatttttaaccagaaatgactaaagtatacttaaagcaaaaatggttaaaattgtttttgctaaaactagtaaatcttatcctaatcttctagattagtgtgctaacctcccttggaatatgtgtactcaaagtga

SEQ ID NO: 106478 - DNA, 381 bp, Glycine max
tataccactactcaagcttgtaggaagttgaaacgacaataacttttttctattatgtccgattgcatcgggtaatatatcatgacgctcaaaattgagacttgaacctctaagaaaattgaaacgataataactttatacacggatttccgacagattgccgtaatatatcgagacgctttaaattgaaaaaagaagctcgtaggaaattcgaacgacaatatgtttttactcatatgtccgattgagtcccgtaataaaaaaagacgctcgaaattgagagcagaagctctgagcaatttcaaacgacaataactttatactcgaatgtcctgttgagacccgtaatatatcgagatgctccaaattgaaaatggaagc

SEQ ID NO: 106479 - DNA, 364 bp, Glycine max
  unsure (1)..(364): unsure at all n locations
tttaagattatttggaatctgaaaattccttcttagcaatngccttctgttggagaattttcagaaacagattgcctactaaggctaacttgaggaagagacacatcactttgccttcgtataggtgcccgttatgtgatagtgaagaggaagatattggccacatcatgttctcatgcagaatcactaggaatttatggtgggaggctttgagatgggtcaatagagtgggccctttccccattgaacctaaaaatcattttatgcaattctctcattggaatcgcaaaagctttatagacaatagatgtgaggtgttttggatagccctctctatgactatttggaagcatagaaatgtctt

SEQ ID NO: 106480 - DNA, 275 bp, Glycine max
  unsure (1)..(275): unsure at all n locations
agagctttggttgtgcgaagaatggcagagaactgatcatgaagaggaagtcatcctaagagcatgagatgaatctgtgagtgattgtgaggttctagaggtggaggagacatccccactacttgtatttcttcaatccttcattattctcttctctttgttgtaaggaagcttcccagatatggagagctaaatcctctgttggttcctccttgtaggcacttgatgtaaatacatgtatatcaacttaatgatgtnttatgtattctctatgc

SEQ ID NO: 106481 - DNA, 370 bp, Glycine max
atagagcaggatcaccaatggatttcaagcttgtggcaatggcgttgattcgaagaagcagaaatcattcaatattcttttttgagattgaggaattcggttctgagttgaccagccctcacttttgtgtgtgtgttgaaatgattatggatcctgttccatatttggaacaagtgtccaataacacatgtcaggatcgacactgagagacgattgaagccaggtgagcagaagttgatctataagttcccaggctcgatatgcagggttctctaaccctagaccatgatctttgttagacaggaactgcaggaatttttgactgaatcagaaatcgatgaagcagtcttcaagataggctccacttgtt

SEQ ID NO: 106482 - DNA, 222 bp, Glycine max
gatatgtgacaagattgtatgaccaactgaaggtgcaaattgcaaaaaagaatgaaagttatactaatccagcctacaagaaaaggaaggaagtggtacttgaacctggtgataatcttggacatttgaggacaaatgttttccaagaaggagggaatgatgagaatcatgaaactggccaaatacacgctaaaggctcaatgtggagaaggacgaaagcct

SEQ ID NO: 106483 - DNA, 346 bp, Glycine max
gctttactcggaagccgatacagttctatttaacgagacacccgacatcgaataacagaagcctctcggaacatcaaatggccacaaccttccacacggaagtccgaatcgggcgcataatatgctatagacgctcgaaattgaacaacggaaactctcgagaaattctaagtggccataaccttttcactcggaggaccgaatcaggcgcataacatatcgagacgctccgaattgaaaaacggagaccctccccaaactccacatgggcctaactctaaactcagaggcccgattcaggcgcatcatatatcgggacgctcgaagttgagcaacgaacggctct

SEQ ID NO: 106484 - DNA, 401 bp, Glycine max
  unsure (1)..(401): unsure at all n locations
gcacctgcggctgcagcttgaccaatacctgtggacctagagtatttcctntttttcttggacacacaatgaaagtctacatagagcagaatgtgatgtagttgtcaacattaatatatgattctataggccaatgaaatcaatttatattttcacccctaaatatttcaaattaatcccaataggcctatgtgaggtagctgtaaacgtaaatatatgattctatgatttctatctacaatgtgtgttaaccatcacccactgactgacccacagatgtataggtagaattatcgcgtaagaggagactaaatctgcagtaatcatgagagaaactaaatctgctcaatcataccatagacattatgtnctaccttattctggaaggtgtctcttggtac

SEQ ID NO: 106485 - DNA, 281 bp, Glycine max
gaactgagcttgagggtcgctgagtcaagtgcttatgcccctatgggttagtagcccttcggactaatgaaggtgatgtgatgcatgagtattgacgcggaagaaaatatattgactagagaactagactaagtgcgaaatgacaagcaatggtcgtgtatggggaggctttttgaccacttttgtcctgttaactggtgctattcgaccgctctatctttggcaagaaccctgaaggggagcctaataagtcgttaataggtctaattgcacaatcattt

SEQ ID NO: 106486 - DNA, 324 bp, Glycine max
ctgactgagtccccgttcacttcgagacgcttgaaattgattgttgaaattctgagcaaactaaaccgccataacttgttactctgattgcaaattgtatactgtaatatttcaagttgctaacaattgaatacccacactctgtcgaagtttgaaccacattaacgttatactcggatgtgtgattgagggccttaatatttccagacgctctaatttggatatcgaagctctgagcaaaattatacgataataagctttttctcggtttgcgtattgagtctcgtatatattggaacgctctaaattgattgttgtagcttt

SEQ ID NO: 106487 - DNA, 326 bp, Glycine max
atcatatataacattcttatgttctatctttttgaaagatgaaacagtttggatgttaataagatcctactgaaatggaagagaagaaagttgtcttgatgaagttggcatattttgtgtatatggcttcttgcactgtagagatttatctagttctgtgcattatctaactaccatgatttccaagggacttaaaccagtaaccgctgcttgggaaagtataaacaagctgtgtgatgctggaatctgaaaaagccctggagtgagtaagaaatagattagaggtggatcatgattttcattcaacatctttgtgaagccttttt

SEQ ID NO: 106488 - DNA, 305 bp, Glycine max
tttctatgatgccagctccatgggttctaattctactatccaaaccactgaaaaacaattgttagcccacatggccagttctattgataatgcaccagggcttgggaggaaataagtatacatctttatgattcttttcccgcactttgaataaataatgaacaagcccttgctcccaatgaatcaacttccgctttttttccaactccttttaacactgaagccctatctttttcgcatggagtttatgtgaaacgcgaacaaaaattacaacttcttcagaattatttgatgaaaccgtagtt

SEQ ID NO: 106489 - DNA, 375 bp, Glycine max
tgcctaattaacctgaaattgagagaaaatgattattaaacacacaaaatggaagttctaagtatttattacctatacttaacagaaaatacttataacactacaaaataaccataaattggaagattttgatacaatttatacaagttttatacacaaaagttagtcgttttcaccgactaacaccaccctacttccatctgtgtgtaataattttaggcaattttccctaaggatagtgagtgcttttttgggaaccttaaatgagatcatccaaactctcttaggatccgcctagtttacatttcttgcactttaatttcttgcttatttacatagcttattttctttactagtctcgcctagtttatcttg

SEQ ID NO: 106490 - DNA, 379 bp, Glycine max
ttgctcaattataatgttcattgactgaatattatacacatttggacttactcagactcatctttttctttctcagctaagctctcctgaggattcctgcagaaagatcacataactactgttaagttgaataactacacctaaacaagtttttgcacaagaaaaaaaatatggcttcactgcaaatagaagatattaacaacagttgcaggttaatgaacatctaaacaggacagggcaaaaaatatggacttcaagaccatgacaatgaagatcaaaatcgttcaatcaaaggaagtcatttccagcgtacacaatcacaaatgaatagtttgtactgtatatcctaagagatcgtatatagtctcactggatctac

SEQ ID NO: 106491 - DNA, 314 bp, Glycine max
acacaccttttagtagagaatctaggagggtcagacaaagttgaagagaaacaaaatcataagggggttttgagggagtcattgaatccaaacctttgaaggatacgacaactcggacaacgatgaatggaaaaagcagagaaaaaggttacgcgcgcgcgactgagaggaagctacttaattagtatggattccaggaataataagtaagcttattcaaagacagtcaaaaggaaaaaaccatctttgtactaccaatacaactaccataatctttgtcaacctatcggtggactccttaaactcactattga

SEQ ID NO: 106492 - DNA, 381 bp, Glycine max
tgtttaccccatgttgaatatgcttacaatatagctgttcatagcaccactaattctccttttgaagttttttatggttttaacccactaactcctcttgatcttttgcctatgcctaatgtttctgtttttaagcataaagaaggtcaagcaaaggcggactatgtgaagaagcttcatgagagagtcaaagatcaaattgagaggaaaaataaaagctatgcttaacaagccaacaaagggagaaagaaggttgtcttctaacccggagattgggtttgggtgcacatgagaaaagaaaggtttccggaacaaaggaaatcaaagcttcaaccaagtggaaatggaccatttcaagtgcttgaaagaatcaatgacaat

SEQ ID NO: 106493 - DNA, 346 bp, Glycine max
ctcaaagcttggagtatccaagtgccaatttgtcttcttctttattccagtcttcttctggcttcaattcatcagtgggctttccttctgtgtccaacatcttgggatgttcccagcctttgatgacagctttccacgttctgctatccagtgatttgagaaaggccaccatccttgctttccagtattcatagttggtcccatccacaaatggtggtctgttcactggtccgccttctttcctcatgttcatcagaatttatctccctagaatctcactcagtgatttcgagtggctgctctgatacccattgaaatctgaaactggggacagatagtcgtcagg

SEQ ID NO: 106494 - DNA, 249 bp, Glycine max
  unsure (1)..(249): unsure at all n locations
ttatggtgggagggatgagaatanagatatatgaatatgatcacaatgtatttgacgccacattaagtcaaattaatgtacactcattatatgtttctctatgttgccatgcacatgtgaatatctgtgattttcattcanaataaactcacttgacactcatagnggcaacttagatgcttttaatcggtagaattaatttatctatgtaaatattgctagaaactgagttgaccgatctgagatgaa

SEQ ID NO: 106495 - DNA, 374 bp, Glycine max
ttgggaaaattctgatggtctgtttataactaattaatccatagatgcttgacctatttcggaatttttaaatgcattcctatactataaaaatttacaattaggtccttaacaaatacatcatttgtaattcagtatctcgaatacagttccgtcaatttatagaaaatattcctgatctcagtcatgaattttaaaagtatagggacctagttaaacaagaatcatgtgatgctataactgcatccatataattaaacaagaagcatttgtattgggttagaaaaatatctccattctaatttttttgtaccaagtaaggaataaggtgaactcccccttaaagatatttgaggatccctgattcttttgcc

SEQ ID NO: 106496 - DNA, 193 bp, Glycine max
  unsure (1)..(193): unsure at all n locations
taacaatgcctatagggtggatctcccagaagagtatggagtcaacaccatttttagcatttctgatttaatttcttttgtaggtggagctgatattgaggaggaggaactaacagatttgaggtcaaatcctcttcaagggggaagggatgatggaatcctccctatganagcactattcactatagccatg

SEQ ID NO: 106497 - DNA, 365 bp, Glycine max
caatatactggtccttcatttaattgtctttgggcttggcgaccacgctcaacaaagtacttttgacacctactgtacgttgatttcaccaatgctgttatgggaatgttgcgacaatcctttaaaaccttattgatacattatgagaggttggttgccatgtggtcatatcgacgtccttctctatcataagccatcgtgcatttttcctttgaaatgcgatcaatccatgttgctatggctggactcagttgacgaaatttttctaaatcttgataaaaaatgtgcttgcaaggagtgtatgctgcataaaagtatttatgaataacaattttaagtatatatgaaagttaaataaacgtgac

SEQ ID NO: 106498 - DNA, 442 bp, Glycine max
  unsure (1)..(442): unsure at all n locations
gatccttnagtcacctgggctgcagcttacatgcaagaaatccaagataatccttctctgacttagcatcaaattttcctaagttatctcttccattattcaatacaaaacatttaccaccaaagatatgaagatgtgagatgttttggttttcttgccattgaacaattcatatggagttttctttaaaatgggtcttattacagccctatctgaaatgtagcatgcagtgttacggcttcacccaaagtattttgaagaggagtatcatttaataaaattctagcaatctcttccaaagatctattttgtctnttcacaacacccatttgttgaggtgttcttggtgcaaaaaagttgtgctccatctcatgcttatcacaanataattcaattctttatttcaaactccccccatgatcactctaatagatataacttg

SEQ ID NO: 106499 - DNA, 240 bp, Glycine max
gaggagaaaacaacatagtgtagtaaactaacataataaatccgatattcaatgaaataataacccttggccaaatcaaaatatcaaaatgtttggaaatgccaatttccacccagattggattttattgatggaaatggcaaaattaatactccttgactaaaacataggggatgagggttgtaccttccatttgaaacccaagaaactacagtgttttctaattcctttccatacttt

SEQ ID NO: 106500 - DNA, 353 bp, Glycine max
  unsure (1)..(353): unsure at all n locations
gctatgaagcctattttgcaatattatcctcttaattcagtagcatctctactacaataccagttatgaaaagaatgcacgaattctgaactgcaacacttaatagaagagtcaatttctaatggtcatatagcaattcaattcaaatccaaacataacgcatgttatatatattcatattccccaagagtctactgnttagatattaatttattttcatcaaacggtatgtgaatcatacaaagtaaaaaactgtgtgagtatgtcatagctgatatttgaaaacaacatgtgtgcacaaactttcacaccaataatatataangactctagagccctactccagggatacc

SEQ ID NO: 106501 - DNA, 348 bp, Glycine max
  unsure (1)..(348): unsure at all n locations
acacactttgtatagaatcaatattaaagaatctcacgccagaagcatatcttttattacattagaaagcccactggtccagaaaaacagagaaaatcctagctatgaaaccatagaaaacttactaccaggcgcactcttctcatagttaacatgaaaggatntacactgccttcattcatggattatcaatgtttacatctggtgcactcacttcctgaccttcatgtctgtgattcttgacatgaagaaaaattaaatgcttgattacaatcagcatccctataatttaagtgtgaaaaaactactatcttccattcatttgcataaattatcatcaaaatcatc

SEQ ID NO: 106502 - DNA, 360 bp, Glycine max
  unsure (1)..(360): unsure at all n locations
agcttatccttatggcctgcctccggacttcattctcgtgccaccccggaagaattaagccaagcccctactttcgcggggcaactcccaccttatgaagactatcccgggcaagatgatggggaagaagatacccatcttggccccctgctccacctcaaagatccgtccccacatgaactaccctaaccgaacatagtccaccatattccggcctcacccacacccagtaaagaatctgttcccttcgcacaagataatggaaagaatgaggcgcttgaagagaggttaagagcagtcgagggccttgngcattacccattctcggacttagcggatctatgtctcgtacccaatatc

SEQ ID NO: 106503 - DNA, 361 bp, Glycine max
tgagatgaggaagtgtagaagggtgaaacttcctgcttctattcgttgaccacagagtggtacctggagatatgtcgcgggggtcaggagaccttggggacgtcaggtggggtgctatttcccaaaaccaagcttgaccaatcccggcccaacccgggcatagtcagtcagtgagaacctgtgatgtacctaaacaggcgagctcctggcagtcaacagataaaaggaacaaagaccacaaagcaaggaggcttgtgtggtggctggccagctgtgaatcttgtgtgatatatgggttatggcctctggtaatcgattaccaagggtgggtaatcgattacaaggcttaaaaatgaagaca

SEQ ID NO: 106504 - DNA, 259 bp, Glycine max
atacaccgcgcggaacgacaaatattagtatatcgctctctcattgaggaggatcttatatatcaaagcacgaacataagcatatgtagcataattagttaaaccacgaggcttgacccaaataaaagaaaatagagaaagaaaagaaaacaatacaatcaagattggaactgagagatgatagaaatgtacctgcaacttaatctgttgtgaactattgaagagaaagaagaaaattggacgagctattgttgtgctg

SEQ ID NO: 106505 - DNA, 354 bp, Glycine max
tgtacgggtaaagtctttcaacaaagtcaggttaacgataactcgcctgtgctttttcttccatgctatatgtagcaaagtcattgatccagtcatgtttgatgacttggaaaatgaggccgcaattatactgtgccagtaggagatgtattttccccctgctttctttgacatcatgattcacttgattgtgcatctggtcatagaaatcaaatgttgtggtcctgtttatctatggtggatgtacccggctgagcgatacatgaagatcttaaaaaggtatacatataatctatatcctccagaagcatctattgttgagaagtacattgcagaaaaagccattgaattttt

SEQ ID NO: 106506 - DNA, 377 bp, Glycine max
  unsure (1)..(377): unsure at all n locations
taacaagcaacatttgatccctcgtgatgtttntgcttctagtgtcacctttcttaaaatgtcgcatgacgtaacctatttgctagctgttgtatattattattactgagagatatactatgtcttactcattgacaatggtggctagtgcattgtcaccctgcaccccgccccccaaatttagtagtagtaatattttaatgatttactgatagtaatacagcagttgtatgctgttggcttaaattgctttgagcttactaatgctcattaacttgctattcaatttaatgcttacaatcagcctggcattcaatttgtaacactagcgacatcatccaatcaaattgctcgattatgtattgtgacaattagta

SEQ ID NO: 106507 - DNA, 364 bp, Glycine max
tttgtccaaaagaattctgattttgcctaattgacaacatgaatgactactcatgtttaacgtgtcaattcatgcttcttataggcgttattgcttttgaaattttaaccataaatggctaaagtatacttatgcaaaaatggttaaaattgttttttccaaaattgataaatcctatcttaaacgtctagattgatgtgctaacttcataaattattgtgttaatcttcctacggataggtgtacttagattaaacctcacacagagaaatattacattgtgcgactcaatgcacagcacaattcttgcacatatgaaaatttgatcaaataatctctattttctataaatttcactaaactt

SEQ ID NO: 106508 - DNA, 107 bp, Glycine max
cttgatgccatattctgacttcatcttctttggaggatagacatgtggaggaagaactggtttcttgaggtgtccataagtaacagatgtcctttgatctgctgccc

SEQ ID NO: 106509 - DNA, 370 bp, Glycine max
  unsure (1)..(370): unsure at all n locations
ntaacctcatcgaccctcacaatctttagatttgggagccaatccaatccttgtgttcggactctcagccacttatgatagccgccgatgatcccattactgcttcccctaagctctctgtcctttctatacgccgcataccatgccttgcgaactccttggagtaccctagcgttgtgggcactggaacctcgtgcgatgaaaggcgtgatgctttcgtctgatggcacttctctcatggggtagccaagctgtcttatggcgaggacgggattataattaatacaaccccttgttcccatctagagaacatttggacatccttcgcatgaagatagaatactgatacttacttccttctatcgaggaa

SEQ ID NO: 106510 - DNA, 328 bp, Glycine max
tggtattctcatgtagctatctcggtaaagaggctgcccatccttagataaccgttggatcttttgggatctttgagaacacgtctaaagtgtgcacgatgtttctgtgacacccactacccctcacatgtatactgacagaggaataaaaacccccttatgaaccaattaagacacctctttacattctgaaatacaagtgtttccaagagataaatggcgtccattaattgccttttacatcatattcaaacttgtcgcaaaaaataataaaggtacattagtttaaacaagaccgcctaagacttcatacaatgaaaataaaacc

SEQ ID NO: 106511 - DNA, 369 bp, Glycine max
cgctcagcttctactcactcactcagaattttcttatattttcctcctaactataaggcattcttatcaatacccgtaaacattaacatgattatataacaattcaggggtacactctcacccttagaattatcccgaattactactaacaagcggtagctctcgcattgactttattcacgggatttttctgagccctcctaatacctgacaagaattcttcctttaggcttgttgcatctgacctaaagcagttatagcagtctcttactgacgtatcattgaccagaaggatagattctacgatgaaacttggaaataaagaacgagaagcattgttgcataagattttaaatgaaagccgtaaca

SEQ ID NO: 106512 - DNA, 378 bp, Glycine max
actcagcttcatcagtggtatcagagcacaagagcttcagttttgctccttaaacttccattaatttttttgctttaccttctcttccattgttgtttcttcattttttctccatgtatctcctcacatgtcttgtgctaaatgttgttaacatgattctttagagtttccaccaattaaacttgctatagaagctagatttgattttctatggttcaaatttcttgttcttgttcttaaaccatgaattgtgttgagtttaggttcctttgagttttgtcttgttattttttgtggcttaaacctaaaccataaaattcttacaaaaatattaaagtataagaaaaccttcaaaatctagaatggcttgttcaccta

SEQ ID NO: 106513 - DNA, 352 bp, Glycine max
ctcaagcctgcaactttgaaacaggaaaagatataaggtgttccttcctcctttgttcctcgcgactatgaaaatctaataaatattgatacatcggtttatgctacgaattgatcggtttgacaaggcttcttatctataaactacatgattaaatactgtcgagcccttacatggtcttcaattgtgacaccaaatattcgtgctcggacacaactgatgtcattacctcaacacttagaacttggaggatattatagaagcagattccattttgcacttataccaccgccatgcatgcataacaactatgtgttctttagttatttattacctgacggaaggatttatg

SEQ ID NO: 106514 - DNA, 351 bp, Glycine max
gtgctggatctacttcacatggacttgatggggcctatgcaagttgaaagccttggaggaaagaggtatgcctatgttgttgtggatgatttctccagatttacctgggtcaactttatcagagagaaatcagatacctttgaagtattcaaggagttgagtctaagacttcaaagagaaaaagactgtgtcatcaagagaatcaggagtgaccatggcagagagtttgaaaacagcaagtttactgaattttgcacatctgaaggcatcactcatgagttctctgcagccattacaccacaacaaaatggcatagttgaaaggaaaaacaggactttgcaagaagctgct

SEQ ID NO: 106515 - DNA, 107 bp, Glycine max
ttttaacatctctgatttaatttcttttgcacgtggaagctgatattgatcatgatgaactctacaaatttgagatcaaattctcttcaatgggaaggtgatgatgc

SEQ ID NO: 106516 - DNA, 387 bp, Glycine max
gacctatagaaactcagattgtgcagattgtcaacacaagtgatctcaaaaattttaacatagaaattaatcatcatattgtatcgataaaaaaatgtgcatacatcatgtacaaacgctacaaaacatagatagatcaaatagtaattttaactgaaaaatagaaaaagaatggaaaataaggcataagaaactaaagttagaaactagatttaaaaacaatatcaaaacccttgaaatttaaggtgtgtgagacagaactgaaccgaaggaattgtgacttttgaagagcaaatcaaagcgaaaataaatagaaaagggtgattgttctgaactaagaaatatatacttcatggcatggattttgaacagtcatattataatcgt

SEQ ID NO: 106517 - DNA, 425 bp, Glycine max
atccttaagtcacctgcggcatgcaagcttcgcctattctggagcagtgaatgtatggtttgcgagaactcgagatgattaagacacttacattcaatctaagagaatgagctattgataattccacagtggcacgttgcatgagctactcttttttcatcacattacatgatttcaccaaaaattcaaacgatgttcaacaagtaggtgttatattgaattccggtgctataaatggatcctatcaccattgcattcttacgctgcatgtttcttttcaccgaactacattacataattcaggtaatgacctgaattgtcgatggaaaaatcttttttttttaccccttatagttggaatatgaaaaacacaatatgagttcactatttcttttgattttattttataaattactatggaaaat

SEQ ID NO: 106518 - DNA, 375 bp, Glycine max
tactcagcttaggtaattgagtgacattctatgatcatttcttgtagtgggtcttgccagaattcttaagccaagaactgagtcttattttttggttctcctaagagggtctctgacatggtggcattatataaggattagaaatcttgtgaaatcattgtatgtatccatccttaaatacagcgttacacatgcaattgtgacttatatggatcaacttgagtgaagggtatttttgtctattcacataaaatactggtgcacctagcattacccaatttattacgggctagtgtacttcaagttgggcttggcccaaattgagaggtgacagccgtgcccatgggcccatgagcaggagtagcaatcgtctct

SEQ ID NO: 106519 - DNA, 304 bp, Glycine max
  unsure (1)..(304): unsure at all n locations
tcccacatccagtgtatttacattcttattatcacaaactaacaaaccacgccaaacagggcagaggcagataactctgcccaaaacacaactcataatcacagcttgtcacataccaataccccaggaacattttcttcggtccaattcgttaaccgttggatcgactctaaaattntactggaagtctctagtacataaagtctacatttntgactggtgggatctgcaagccaacatacagaactcattctgcactactctttccacaaacagcaaaacatagccattttctgcacttatg

SEQ ID NO: 106520 - DNA, 361 bp, Glycine max
tttcgattcattctattcacccgtagtggtccacattgtgtttcgtgcattcttattctcattttgtttactttttataccccctgttgacgtgcttaagccattttacttaagtcatttctcgcttaacttaaaaataaaataaatttccaccgaacgtttgaattatattatccgttaacttcggttaaaatcaattccgaccgttcggtcgtgccgtaaccacgttggaaatcataaagaggtgatatataatataataatcaaaaaatatctttttagttaaataaagcggaagatcgatctgacgttttctctttgggatttctgattcttaattgaattgattaataactaaagt

SEQ ID NO: 106521 - DNA, 471 bp, Glycine max
  unsure (1)..(471): unsure at all n locations
ttaagcaccgcggctgcagcttctcccaagatagccttcgcagtgtacctttcactttcggnggacccaggtactactattgatctatgcataanccagtgatggattccaagttttacaatgcatcaaaggtttgttattgagccatcatggatcttttaaaccaacagntttggctctctttgtgtgtgttttccttttgttgatgatattaatgcttgtgtagtgctcagctctactgagttctaaaagaatggctaagaattttgtaaaacataagcacttagacaatgaaggaaagctggagttgctgcacatgatgtccaacgttatgtcaaagaataagatcgggctgcacaatgcacaatgcaagatgaaatgtcaaatgaagaaatgaagctgcaggaattacgatgtcggatacaatgtccaggacatcctgcccgannaatactggagtgtaaaagcatt

SEQ ID NO: 106522 - DNA, 346 bp, Glycine max
ccttatttcattgtaaagccatcataatttaaaaaatatcagggacttaatgagaattcaatcataatatttaaatagaaaatataattccttttgctaggtgtagagaaaaaaataagaagggccacagtgcatagtaatcatattattttaatttaaattggaatacgaataaaataatatattgagttaggaacaagcatagtaataaaattatgtttcttagccacagtgcctcccagttcaatcacacaaacatctgcagggcccttctttctatccacgggaatcacaacaccctcaatccaatctttaatagcatcagtgatgtgcgagaccacctatt

SEQ ID NO: 106523 - DNA, 72 bp, Glycine max
  unsure (1)..(72): unsure at all n locations
tgcacttgaggagcttntnatattcacaatatgtatctcttggggttttcactggggcgttgtgctatacta

SEQ ID NO: 106524 - DNA, 374 bp, Glycine max
tggagagttatgtcgtgcatcggtataatctattacttgcttatcataatcgagtgcactgttgttttttagacaatgattgatttattcatgatactgcgtcttaattgactaccatgtgatatattcgattacttctattcctataaatatttcacaagagatcaagaacactttaatggactacattgaggatctaatcgattacattgtgcttgagaggtttccagtttttgggatgaacactttaatggattgagaagataatataattaactacttcattgaaataatcgattacattgtatatttaatcgattataggcagttataattgctttctctataaatattcaccctaggttctcacttct

SEQ ID NO: 106525 - DNA, 360 bp, Glycine max
tctcccataagctacaagtaaaaaaatttttttttagggagaagttaaaatcatttttagcttctccaaaaagttaattttaacttatgcataagctaattttaacttacagggtaaatttatttcattttttccttcttattttcttctcctatgtgtgtgtggtgtcatttttaacatttgggtagtgcactgaacaattaccttagaaaatagtcccttttttttcatatttagttttcaagattctaaacaacctaaaaagaaactcaaaaaaactgaatactttcccatcaacttcagagtgttgctaggtgcacccagcattattgttggtgcacccaacattcttaaaaaatg

SEQ ID NO: 106526 - DNA, 260 bp, Glycine max
tgcagctactggaattactatgatctttttttatgacaaacaataaagatgcccatttattttattataattatatattatatattaaattaatatatttataaataatatttattatttcgaggctggaaacccccccaacttaccaaaagaaattttctactttcctttattactacgcttgtgaagaatcaacgcggaacatccaccaaaaactaacttcctcgattttataaatagaaatgttataagtaggaaac

SEQ ID NO: 106527 - DNA, 375 bp, Glycine max
ctgactaagccatctctctcctgaagctttgtgatgctacgccgacgcaattcatttgtgaactgtctttgtcaaaggtgtttatggaggtaaaaacccctgttcgtgaagtgtttgttttccttccatgtgggtactatggttgaatctgttgccctttaaactgggatgtttgtggctaggacaacaatgcttaattattgttttgagctctatgaacttaggattaattgttagtactaaaccactatgagagacacattgacccattctaagcatttgccaactttgcctattctcttatagctagaaaggactagcaccaaagcttaaggtagacactacattgttagcatctcccctagtcaaattcta

SEQ ID NO: 106528 - DNA, 376 bp, Glycine max
ctcaagcttggagattacgatgttcagacagacctcttctcatttatccatgccaccgctcaaggtgatcctcctcatcattaccttctgaagagaaataaatgatcatcaacgcttaaaagcggattgaaagactatcagagatatctctgaggatataacagtgacaaggcgtcatctataaaaacaaatcatatagaacaattttcagctaattatgtaaagacattgtgagcgcatctaaagaacaatcaatggatgaccatttcactagcagtgtatcatgacaaactatagtgtgtttagattatgctaactcacaccacagttcaaaatactttgtagtatctaccaaactaatattatgccggaagaa

SEQ ID NO: 106529 - DNA, 376 bp, Glycine max
tgctcccttagaactatgacaagtttattcttaggtccaaagtaaatcactcatcctcgaataagagattccacaaagcatagcgagataccaccaaattggtcaacaagaccttcaactaggtgggaatcaaactaagtcctcatcgacctcaagtgagaagctccgcaaagcaaaatgaagcatcaccaagatgagtgacaagacctttaaccaagttgaaatcaaacctgagatgatcttatgtcatctaggtctctgtttcacacaaagccgacaagtcttgcatcatacgccaccaagatcctattctcatcaaagcggcttatccttactaccacaagcaatgaagcattgtatagaccaaagacacatg

SEQ ID NO: 106530 - DNA, 194 bp, Glycine max
cctcaaggaagctacctaggctattaatagtagcatgttgttccactagggcaacttgacgaataaaatctgggaaactacttaaaagttcaattttgtgcccttttttattccttaaattgggggctcccccctttattttatctccctcttgtctttcctccattggaagaatcttcccaagctttttatca

SEQ ID NO: 106531 - DNA, 278 bp, Glycine max
atcataagctacgaggaggttatatgttaattatctattaatgcacacgaacataccacaatctattaatgcactagctttctcggccacaatacttggatctggttcaatatgagtcaatctgcatatttcctctaactcttacctcttcttaaaaacaagatctttcattctgcttgcttttaagttggcaagcctgttcacttctgctgatcctataaaagaattttaatctggagcttatctcccagaattattgcaagaagaaaaatatatta

SEQ ID NO: 106532 - DNA, 369 bp, Glycine max
tgctcttagataagagatgtttttttttgtatcaagctccatatgcattctcaaaaccatgcctcctgaatcccaatagctttgtgctcactaatcttgatgatgtgtactccaagtattgacatgtttgtagtgcatgccaattgtttgacaatcactagtaatgtagaagtttgcaattaagttaaaaaaccataaaataccaaacaacattagaatttttttttaacttcaacttagtagtagtatcttcaaagataaaagctatgccaaacgctaggtaagttcatgctcctttaagttggcatatattaacttatttgattaaatgtatgttaatataaaaattgtatgtttgggaattcatta

SEQ ID NO: 106533 - DNA, 272 bp, Glycine max
aaaatctgcacctgtcgacaaactctgaggtttatgctcctctgccgacaaccacattaacctttgcccttctgtgcaacaatttaaagcaattgaacagctcgagctttgctgcaacatctcaatagacctctcacctcagcagcagaattagccacaacagaacaattatgacctctccagcaacaggtacaatcctgggtggaggaatcatctccaccttagatggtcgaattcttacaatagctagagaacgaaaacagcagccttat

SEQ ID NO: 106534 - DNA, 357 bp, Glycine max
tataaaacctaagctcgaaacgaggaagtgtgaaacggtgaaacttcctgcttttattcgtcgaccacagaggggtacctgcagatatgtctcgggggttatgagaccttggggacgtcaggtggggtgctattgcccacaaccaagcttgatcaatcccgacccaacccgagcatagttagtcagtgagaacctgtgatgtacctaaacaggcgagctcctatcagtcaacagataaaaggaacaaagaccacaacacaaggaggcttgtgtggtggctggccagctgtgaatcttgtgtgatatatgggttatggcctctagtaatcgatctccaagggtgggtaatcgattaca

SEQ ID NO: 106535 - DNA, 395 bp, Glycine max
  unsure (1)..(395): unsure at all n locations
atgactaacacaatggatagatgctgacttggccattatggagcttaacacaagagtcgaatatacactaacatgtgctctatctaaaaatgagtacaacatgctctataggcttaaaacaacccaagagatatgagactcactaagcataaactatgaaggcacagaagatgtcagactcaaaaaggttgcagctctgaccatactccatgaaaggacaatntatggatgacatgttngggagactgcatgttcttctaaacattctacaagcgttgggcccaacctacaccaaggctcaaatatacctaaaaggtctagatcactttcctagggtgttgaagccaagacacaattatacacctaaatgaatacatcggatggaggatctaaag

SEQ ID NO: 106536 - DNA, 374 bp, Glycine max
actccagctttgggccaaacctacaccaaagcttttaattacctaaaagttccaaacaactatcctaaagtgttggaacccaagacaacaattataacacctcaaatgaatcacattggaatgaaaagaatacaaaagttgtgtaggtatgcaactataagctgataatgacttaaaggaattaattggtgctacatgtaccaaaaagaagcatctacttttgagaaacccatcacttaagaacttcataattaaatgtgcttgacttaaaaagattatgggaaatatgaacctctatgaagttgtacaacggttgtttattgctggaaaaaattgtggacttaaggaacttgaacaaagacggagaatccaaa

SEQ ID NO: 106537 - DNA, 267 bp, Glycine max
cagctgggcacagaagcgcgttttcaatcccacttttttatccgaaaccctcgcataagcaaaaaattccagcttaggaccggcctgggaactattactggcccaaatggagctttaagccgagaaggtatttttgaataaagggcccatgggcacaaacttgtaggctagggccctattctgttggaaaaaatgcgcggatattttttgtcccgtgtgttttgaaagaaaacaaaccctcgccctctttttggcccaggaaaatat

SEQ ID NO: 106538 - DNA, 482 bp, Glycine max
ggacctaagcaccgagctgagctctccttaccaatattgatttgttgctattaaccatgcatgcttagcgcttgattaattgtctctgcgcctaaattatgttcatgcttaacgatcgttcatgattaattggtgtatgtgtcgcttaatcacataatgaatgccttatgctaaatttcgcttagtaatttaatttacggttggactaagtgggtgaactgataaaggatatattctcgtaacctaagataagagacttgcttgtgaatcatagagaagcaacgcgctttaattctgatatttctaatcaaaattattcgctgtttaattacaaaatcaacaacccccaatttgtactgtttatactatctgtatgacattgggtgaccatgctatgggaatgactagacacttctaatctgattttatgttattgatcggacactcacaaaccgtcattaactcatatgataaaaccttaa

SEQ ID NO: 106539 - DNA, 314 bp, Glycine max
  unsure (1)..(314): unsure at all n locations
ctaggggggagcccttttataaaattgtcaatcatcaataattatacgcgccaatacatgcatattcccttccatccgcggacgactacatcttcctacagatctggtgatgatgacggcatatcaactgcgtaccactgacaatgacagcttctgcgacttatgcaactttgacaggacattgtttgtgccccagattaagagagaatttaggagtcctctattctattgcgccaanaaggaagacgaaatcacatttgtgactgcctgaggagactgggtccacaacatacctttccaatactattgcaaaa

SEQ ID NO: 106540 - DNA, 254 bp, Glycine max
  unsure (1)..(254): unsure at all n locations
gcttggattgattcgatctgatggggatcaatggtatattttaggcttccacatagaacacaagagcatgattgattagagaaatatatntatatgcatcggctcatttgttagaaagacccaacatttctacctattgtggtcacttttacttactttgcatnttacagttttagcataaaagttagtttaaaatctgttggaaattatcaatcatacatgttctctcaaccatgcttcatttctgaacttaa

SEQ ID NO: 106541 - DNA, 380 bp, Glycine max
tccataaagtggtatcatagcacaagagcttttagtgtccagggaaggagcccagagtatgaagaacctcgggatttgaggtcaaatcctttccaaggtggagaggatgatgcaatcctaccccccaagggtattggatagaagactctaggaggcttaggctagagctactaaagaaggccctagggttctcatgaaccttagggtagctttttgagcccatgggtcaaggttggatccactcttctttgtaaatatcagaataggttttttccttctttttggccttgtattttggtcattctagtagtatagggttttagccttgtattttagggcattttgagtagtctttgtagtagggactttgtttttgtatt

SEQ ID NO: 106542 - DNA, 418 bp, Glycine max
  unsure (1)..(418): unsure at all n locations
gagctgcagctttttgcaggctttgaagattttgttattaaatgnncttctaaacaagaatagatgtaatgtttattagtacatagaagtacatactaacacttagattgggagaaataattaactggtccgaataagatattttttgtatttacttttctagggaaaaagaaattgcgctgactgtacattcttataaattaagtctcatcctgtcttttgtgtccaaactgaataataagatttcatgtagtaattttaaacttctttgttgtcgccttcctaattgaagaattggatatctccaccgaggatttaataaattactaacttgaaccataagcctaaaaattttaaatattatattataataatataatatattantctggcgcggaatatacacttttgtttttta

SEQ ID NO: 106543 - DNA, 380 bp, Glycine max
tgagatgaggaagtgttgaagggtgaaactttctgcttttattgttgaccacagagtggtacctggagatatgtcgcgggggtcaggagaccttggggacgtcaggtggggtgctattgcccaaaaccaagcttgaccaatcccgacccaacccgggcatagtcggtcagtgagaacctgtgatgtacctaaacaggcgagctcctggcagtcaacagataaaaggaaaacaagaccacaaagcaaggaggcttgtggtggctggccagctgtgaattttgtgtaatatgtgagatatggcctctggtaatcgattaccaagggtgggtaatcgattacaaggcttaaaaatgaagacaggaggctaagatggtctctgg

SEQ ID NO: 106544 - DNA, 358 bp, Glycine max
  unsure (1)..(358): unsure at all n locations
tcgatttgatccgtgaaattgcgtctaccttaagctttcttttcggcaggacaatttattttggataagcaatctcctaagagtgctttgtcccatattgttcgaacaacatcattaaaatcaggctccaatgaccaagtatctttgaatctgacaagtctatgaaaaaaatgtgtttcgaactgcatcaagcagtaaatcattgaaatcaccaaagatacaacaaggaagggtagtatctgctgccagagaatgaaaaagactttaggactctcttcttttatttctatcagattaggtgtagaaaccagttaatctccacggtgggtggtcaggatgaataacctanacattaatg

SEQ ID NO: 106545 - DNA, 376 bp, Glycine max
  unsure (1)..(376): unsure at all n locations
ttgagggcaaggaaaggttatagatgaactatttctttttgtatcttngatttgagactattacgggtgtaagaatgaaacgaaaagcaaatatctgctaaaagcaagaagtatatgaacagatacacacatgagaaatgcacactatggatcgacatgagcgtgcatgacatagattttatgcattatgtgtgttttgaaaagggttgcatcacattgggcgcacgtctttaaagccaagtgtaggataccaacatatatgacttactttgtagataaatagcaagacatttgatatctatctatctatatctatatatatagatacactaaaatgacttgcatgcatccactgtggattcaatcactcatctac

SEQ ID NO: 106546 - DNA, 269 bp, Glycine max
  unsure (1)..(269): unsure at all n locations
atccactatacttatgcaaagctggactttgagctcccgatcctcaactagagaatctagggttgtttcatgaacatcaaccttattctgtgaagatgtgtcactttgaccttacaattgccccacaaaatggaataagaattaaaagttatcagtnaaacaattcatgcgaataaatatttattatgaaaatattgacatcataaagatgcatgtccggtataactattgagatgtcccccacaatactattgacatataattatatc

SEQ ID NO: 106547 - DNA, 376 bp, Glycine max
tgctgccaatctctgtggggtcaacctgatttggcttgggaatggcagcctgctttgaatgctgctgggggactgctttgtgcttggaataataatattgtccaggttgactttcggttttctgacaaagatttcattatgctgggtggggtcttgctgcctgaaatgcaaagggtggttgtggtcaatatttatgcaccttgtgaccttctgggaaaaagacagctttggcagactctcaagagaaaaaagattcaatcccaagacacatgttggtgtcttgtaggggatttcaattgtattagacaccctttagaaagaatggggaataattgtagcagctatgacaccaacattatagatgaatttaatgact

SEQ ID NO: 106548 - DNA, 381 bp, Glycine max
  unsure (1)..(381): unsure at all n locations
taggccctagaggagagtggacgactttcgtgttatggangaggatacaataacaatggcctactagataggatcctcccagcaagacatataggagcctagcacgcacttcttaacgatttcgtaatttaacctccttcttgcactgtggaccatgatactcgaggaacgaggaactcaacaagattttaaggataacatcctcttcaacggaggcaggggatgatgaagatcctccctatgaagggaccagtcaccaaagccatgagcaagagactccaagaggatggcgctagagttgctgaagaaggtcctaagattctcatgaacctcagtgtatatttctgagcccatgggccaaggctgggtccacttttcttt

SEQ ID NO: 106549 - DNA, 224 bp, Glycine max
atgcatatgattgatggtggtgatgaccaagataatttgtgatcaaattacaagtagaataataaaatattatatcagaattttaaaaattgtaagtagattacaacctcagtagatagtactccttcacgtaatatatatacgctagttcgacgtatataccattgcgatgtattttgaatttcatgtaaaagaccttggtccatttcaccatgaacaatata

SEQ ID NO: 106550 - DNA, 377 bp, Glycine max
tgtagtgagcttcaaaacaaggatttggattcatggctcaaaagggctatcaaaggaattaatttaaggtaagtccatttggctagaagcttataagaacaaaattgcctcaatcatttccaaatatgcatgtgaattaggaagcatcaagaagaatcaagccaaggctattgtgcaagcaatcaatggggcaaaacacaccaaatgattatggtggtggatggctcaaattctcacaaaggtaaactcatcactttcaaattgagctttcaaaactatcatgacatgtagaggagaatcaaggatttcaagtcacaaaatgtcaagaacttttattttcaaaacaattacccatttcttgaaaatatcctataatt

SEQ ID NO: 106551 - DNA, 372 bp, Glycine max
tgctcgtggagcttctatggaggctggatttttgagctgcaatgaggacctttaatggtggtttgccaccatggagatgcagcggaagacaaatgagaacaggtgagaggagactccatccactagggaataagccatggaagaaggagcttcaccaccgagataagccttggatactaagcttgtagaggaggcttcaatggaggagaagatagacggtgagaatgagagagggggggcatgaccttgaatgaagaaaaatggagagaagttgaactttgagttgtgtctcacaagactctcattcatcaaagttactacaggaggtacacatgcttctatgtatagactaggtagcttgcttgagaacct

SEQ ID NO: 106552 - DNA, 330 bp, Glycine max
  unsure (1)..(330): unsure at all n locations
cacgaattatggaatactattatttatgaaacttaagctgaatagggtattaattcttctcaggaaaaaaaaatcaagaatagttcatggagaggaaaagaatgagaaaaatattttttcttataagaatatatcgtttatgttttacaaatgccagctcaatgactgcttactcacgtgtgagtacttaaatgtggttgactttcttaatcaactttctgattcaatcgcccgcatgcatgtggntcttgcttcttattgagggcccgtctatcgaagcggcagactttttatctcacatatatataatatcatcaataatatgagtat

SEQ ID NO: 106553 - DNA, 370 bp, Glycine max
ttgaaaagctctcaaaagcacttgtgcctttgtatccaatcagaccatccaacacaaaagctacaaagttgcttcaaactcaaaatcaattctgaactcgaattaattcctcaacgggaaaacaaacatgtgaacatttacttaaaatcacattggctgatatttcaaacatgcattgacatacctgaagtagaatcttgccgagacacatcctcatctgccaccctccactgaaagacgcgaccaatctatcagaatcctccggagcaaaaccaagctcaggcatcaacttactaatcttggcatcaacctcatcaaggttcacattctgcgccctcctctgaagcaaatcgaactcatccaaaagcct

SEQ ID NO: 106554 - DNA, 404 bp, Glycine max
  unsure (1)..(404): unsure at all n locations
ataaaccacaaagtctggcgataggtgcagattttttattcattggcagttggattaccaggttaaccaacgcatctaagttaccttcaagcttcttagtctcacttgatgaaatgaattcgnggctacttcatgcactcctctaatgacaataacatcatttctggcactgaattgctgggagttggaagccatcttctcaattaaatttctagcttcagcaggggttatgtctccaaaggctccaccactggcagcatctatcatacttctctccatgttgctgagtccttcataaaatattggaggagaagctgtctgaaatctggggtgaggcaactagcacataatttttaaatctctccagtatcatatatgctctctcactgagttgctaatgctga

SEQ ID NO: 106555 - DNA, 366 bp, Glycine max
ctcagcttgagctcatcagactagtatatataccaatttatatgagatgattctaccatatagcctactattctgctaacctttgccaagatgttatagacaaagacaatcacccaataagggattctcaatgtggaaatccataatacagtgagtaacaccctgacaaaaaattacaattcagacaaacagaggaaactttgtgttgtcatctatgtatgtatgtatttaattgcagcgattatatgtgtgtgtgtgtgtgtgtgtgtgtgtgtgattggtttagtgaaacttgatagagaaatagaaactgtttaagatagattttcatttgtgcaagaattgcactgcgtgtgtgtgtgtgta

SEQ ID NO: 106556 - DNA, 344 bp, Glycine max
  unsure (1)..(344): unsure at all n locations
gtttggcttntacatgcctaactnctttgagtgacatttgtattggttgttaacttgattgttgcatcttagtgtatttgatatttgntttgcattgtgcatcatcatagtgtgaatgagtaaaatcttctatattagaaaaatttcttcagaggcaaaaactctctgttaagtcgattgcagagtggcgcaatcgatataacaagtttctgaagctaaagagttaatctcgattggttaatcgatatgatagatttaatcgatacactgttgttgagacaatgactatttttaggagctctgcttaatcgataccaggtggataatcgatacttctctctctt

SEQ ID NO: 106557 - DNA, 364 bp, Glycine max
ttcaaccaaattaaaaactataaactgaaatttaaaagctgaaacataaacataaatctaaagactgaagcataaacataaatctaaagactgaagcataaacataaatctaaattataaaatgtactaaagacatgataataataaaactgttcaaaacacagggaattaaaaatcctgatcctgccaatgatcctgtgcagagtctatggcatgctcattcagatccagtgcaggagtgcctgatgatgaatcctgaggaaggggtaggtctggcactggtgcagatgactcaggctgagaagaagacatgtccagcactgtagtggaaggctctggtgtcacttgtggggtagctgctact

SEQ ID NO: 106558 - DNA, 329 bp, Glycine max
ttttttggaacagcatctgaagacagggctatgttaaaatatacattcactgatgtaaatattgcaataaatttcattacgtatttttatcaaacgacggatatttaaagaattacgagcatatgtctggcgcatttggaattgaacgggaagaggcgcacacacgaacctgaaagacagttttgatcttccatacccttacttactttgaatagatgatgtattttttctgaatagagaagtgggtttggtgatacaaaacttagagcaccccatcctatgtatagagtctgtccatcacaaaactcttagcttgttattatacagct

SEQ ID NO: 106559 - DNA, 386 bp, Glycine max
attaatatatatgtgaggggcagagggtgccacacaagacaaggtatgaaatttgataattgatagtggaagttggactaatagtgctagcaccttgttggttgagaaaatgaggtcgcccatactaatgaacccttatccatatagactttaatgactgaatgattatggagacataatggtgaccaaccaagtgttggtttcattatccgttggtaaatacaaagatgaagttctttgcgatgtgacacgtatacatgttggcatatacttcttgggctccatgactatttgaaaaagggtactatgtaggttcacaatataatgttgtgattgaaaatcacaccttgtgtataactctccgcccgctagcatatgtcatcaac

SEQ ID NO: 106560 - DNA, 374 bp, Glycine max
ttggagtttccaagtgccaattcgtcttcttctttattccagtcttcttctggcttcaatccatcagtgggctttccttctgtgtccagcatcttgggatgttcccagcctttgatgacagctttccaggttctgctatccagtgatttgaggaaggccaccatccttgctttccagtattcatagttggttccatccagaattggtggtctgttcactggtcctccttctttctccatgttcatcagaatttatctccctaggtctcactcagtgatttcgagtgcctgctctgataccaattgaaattctgataccaatgccagatgtcgtacaggatgtcacgacatcacgcttcagaacatgcagattat

SEQ ID NO: 106561 - DNA, 386 bp, Glycine max
acgagacaatacacaagcctccaacaagcgggatcagagcacaagagctttttgttgtgctccctaaaccgccactaatggtcagctttactttctcctccatagttgtatcttcgactctctccatgtatctacacacgtgacttgcgctgaatggagttaacataattttctagaaggtccaccgattaaacatgctatacaagctagaattgattttctatggggcaaattccttgttcttgttcttgaaccatgaatcgcgtcgagtttaagtacctgtgagaattataatgtcaattattgaggcagaaacctataccatacaatacttacaaaaacatgaaagtggaagaacaccggcgaaatctagaatgacatattca

SEQ ID NO: 106562 - DNA, 376 bp, Glycine max
  unsure (1)..(376): unsure at all n locations
ttctagcttttcattggtgtattttgatcttcttttggtgctttaaattgtgggaatgtgctcaaatatgtggggcaattttggtttgttttcttgcttggctgggttgaattgggggtttgtatgagatggccctaggcctataatgtattttgaagcaatggggcatgccacattgtccccgttctcttgctattgatgcctaaacgcgcgcccaccaagtgttcggtgaaatgcctcaatggcattagcgcgtgatttttgtagggaaacaacctatgggacaatttggtttgcacatgttttctantttttgggacatgtattcagtttcgtaagggctagagtaattgccccacatatatcctatgcctac

SEQ ID NO: 106563 - DNA, 375 bp, Glycine max
tccttaagaagattcctaaagaagtttgatcttagctacacatacctctctaatagctaagctcacctccttgagatgagaagctagagcttatctacaccccccctataatagctaagctcacccccatgacaaaaaacatgaaaatacaaaaaaaagtccttactacaaagactactcaaaatgccccaaaatacaaggctaaaaccctatactactagaatggccaaaatacaaggcccagacgaaggaaacacctattctaatatttacaaagataagcgggctcatacttagcccatgggctcgaaatctaccctaaagctgatgagaaccctagggcctttccttggatctctagccaatctacttgga

SEQ ID NO: 106564 - DNA, 206 bp, Glycine max
agagatttataggatggaaacgcagcccaatggtggccccctgacatatgtagacagtgatactacctgtctactatccgttaccacccctttgggaaaaaaagcagggtggccccaccctaattattgttacatcttctttttttataataaaggattaaaaaaagctgggtgggttgctcaccccatgcaaacttattgttttc

SEQ ID NO: 106565 - DNA, 374 bp, Glycine max
tgcatgcattggattttgtatccgttattgttagataaacgaagtgaacatttcacatgacagttgcaaaaaatattacagcaagaatataaactcaattaaaagtaaacagataaaaaaggtaaaacatttgaaattctaaaataaaactagaaaccagttgttcacacaaaatgatacacaattaacagcaatcaaaatttggaatttgtttaagtccacttctggaccttgaactccaaggcccatgagttaagacgtcgatatttacatataattcccttccatcaggtaattctataggtttaaacaacaattttagcaaaaaactctaaactgaggtagttgacaagagataataagaatactatttt

SEQ ID NO: 106566 - DNA, 429 bp, Glycine max
tctaatcccatgttaaggatcgatatacagattggttgcgcctctatcaaactaactccctaacttactaatattcacttatacatacagttactacttataaggaagtgatgagccttgattaggcccatctaatctacctaattaaacttattacacaaagcaaaggtcatatttgcagcccaattattcatgtgcagaggttgtgactctcaagtccaatttgactctcgaaatagtagaattggcctaagcttatatgtacaaaattgaatttcttttcttatcttgtagggactactacaaatccatttaaattcttatggcctatcgccatgccacggtgatagttatgaacacaaaatcaaaattaccacaatgtatgtactcatcattgctagacaaactattaagtggaatatagacaaa

SEQ ID NO: 106567 - DNA, 368 bp, Glycine max
tcttttggaccttgaacaagcaattaactcctctttcagaaccatgctatgtgctcgcgactggtccctttcttcccttcgcaacttgagttcattattgctaccccatagagctccgcgaaatttgttccggccatactcttccttgcgagccctcttggtctctttttcaagggctcttgcggtaattgcattctcttcccgtaacccggcgcactccttccgaacgtgtgtagcagccaacttgaacttctccttggcgagttttgcctttcctaactcgcttttgagagcttggacttcctcgttctcttgcggtgcttcaaaattctcttcgctgacgacttttaacttggcgagccaatcta

SEQ ID NO: 106568 - DNA, 311 bp, Glycine max
  unsure (1)..(311): unsure at all n locations
ctattgtgcaagcaatcaatggggcaaaacacaccatatgattatgatgatggatggctcaaattctcacaagggtaactcatcactttcaaaatgagctttcataactatcatgacatgtagagaagaatcaatgatgtcaagtcacaaaatgtcaagaactcttattttccaaacaataacccatctcttgaacatatcctataatntaaagaagaacatgcaaattcgtacgtgcacacaatattgacccaaaattnatactgataatgcgacgaaactaacaacattaacaaatttacacaactaac

SEQ ID NO: 106569 - DNA, 369 bp, Glycine max
tgccacccagctcgcccaggcgatctcaactctcccaggcgagcaggggtgcttcctccaaaagcaacagccttctggaggaatcttctggaggacccaagtgggcctggttgctatttgcacccccatttttactaagtacacccctaccattttttggtgattcttttttcgtaaacttacgaaaacttacgaatttcgtaacgatacttgttttctttccgtaatgatgccgaaccttgtggattacataatcatcccctttttgacttacagaatgttacggaacctcactaattgtgcaatgatgcttccatttgatttccggtgtggcacggaaccttaccgattgagcatcaatattttctt

SEQ ID NO: 106570 - DNA, 480 bp, Glycine max
  unsure (1)..(480): unsure at all n locations
ataatgaacagtaatctgagtcattntagaaaaacaggcactttctctccctcactatntctttctatgtcattcacttgccattactttctcaagaatctctggatattaattaagaataacaggaataataataaactattctatgacactaatctttgcggtgatacattaactcccacaatttccaatgacatactaattgctattaccatctccaacactattatatgagttgaattggttagaatataaatgaccatctactagtagttgcaaattctttaaccaccttttgntattatcttctctngtagctaatatngttgatgactatananaaggataaataaattatagatgtaatgtatatcacaagcctttagaacattcctgcttaagcttctaattgttattcttaaaatgcaggcactatcttcatatgtattcatagcagctaatgtcattctcaactcatct

SEQ ID NO: 106571 - DNA, 335 bp, Glycine max
cgcattttaaatgagttttacaaatctgattcgtgaaataaatatttttttttaagttcgtatcttgctcaccaaatctactaaaaaacacactcgttcccgtacctaaataatgatgtgaaaaaatattgtttgaagaattaaaaatgtttaaaattagaagaatttttctttcatattttaagctaaaatatatcacactaaaatatatcaacttttataatagtattaaacaataaatattaaagggttaatactaaaatatactaacatttataatagtctcaatattaaaagcatcataatgtcttacatactggtttatatcggtaatc

SEQ ID NO: 106572 - DNA, 319 bp, Glycine max
gtcaccgcagctgcagctggaactaatgatctcttcttgttcttacaacatgtgggcagggtggcttcccacccgccatccccataaaagattgattccgattcaattctcatgtcagaatcagccaatttataaccatttctttggcatcatctctaccatatatgacactttcactcattaaagatgtagatggccatatgcgtggcattttcctacctgatccaacctcaccaccactaccttctttatatctaaatcacccgtatggcttgagagatattctatgttgtgaaggacttctctcatccatgactca

SEQ ID NO: 106573 - DNA, 273 bp, Glycine max
tgcgtgtgctaagatttggacttcgttcactgacaaaaacttgatgagacgcttctgataaagttgaaaatttagctgcagtccatccatgctctggctgatgaagcaaaacgaaagcagtttgcagattcacgcgtgagaaactggcttcttgaggtcaacgatatggttctcgatgcagaggatctcttggatgaaatacaacaagaatcattccaatgggaactggaagctgaatctgaattttagacctgtacgagctggacttgctag

SEQ ID NO: 106574 - DNA, 220 bp, Glycine max
aatattcttatttcatgatcgcgggtgtatgaaatgatcgaatctgcaactgctctgctaaatgctagtcatgttttcattagatgaaaccaaaatgaaactgctagactggcataatccgttcaacattattagtggcattgctcgaggactcttgtatcttcattaacactctaggctgaggattattcacagagacctaataacttcaatattttac

SEQ ID NO: 106575 - DNA, 223 bp, Glycine max
tagagcactctgttcaatatatgtctcaatgggctgcactgccttttcttataatattcctacacttgatcatgtgtttccaagaatttccgggcatttcagagccactcctcactgcaaaggcatacaatacagatccaaatgtccgtggtctaccttggtcacgggatcttaagtttagtaacctttccttctactcgcatttaacttaaaaaccctctct

SEQ ID NO: 106576 - DNA, 236 bp, Glycine max
  unsure (1)..(236): unsure at all n locations
tcactcactcaaaaaaatggatgaactcttaatcgtgtcacttccattctctcgtcatcttcttctcaacacctncaccatcaccatgcgtacctgcanacaatcaccgaatgaagttagatgtgcctcgttntgatggcaccgaaccactaggttggatgttctatatcaaccaattcttcgaataccatggcacaccacagaatgaaagacttaccatagctttgttctacatg

SEQ ID NO: 106577 - DNA, 382 bp, Glycine max
ctatgactatattgttacgattataatcaataatatccttcttgacactttctaatagcttgacgtagagaaagcaagatagaatgttgtttggagaagaaagatgttgggggaaaatgattcatattccaggtcttctgaaatttcttctcattctgcaccaccagacacatataaaattaatgttcattggaatcgatgtcaaatatctattttttttaaaaagaatatactctatcaatatttcaacatatacagttgaacgtcagaagtaaactctctaccaaatccctggcacttgcattgatcactctgcctgcttcatattatgtctccacacccattctgtacataaaaaagggaaatatgtgaatacttgatt

SEQ ID NO: 106578 - DNA, 83 bp, Glycine max
taataaggaaacaccgggtggttattgatttgtgcacaattcattaaactagaacttgactgactcacgcgcaaaccattggt

SEQ ID NO: 106579 - DNA, 148 bp, Glycine max
accatcatcgcttctaagccatcaatggatggtctgttctccgggagcgacgcgtccatctcatggacgacgagtatactgattttcatgaggaaatatggcgccggcgatggtcaccactggttactcctatggccaatcttgatcc

SEQ ID NO: 106580 - DNA, 402 bp, Glycine max
  unsure (1)..(402): unsure at all n locations
acaataatatgcttacatgccgatgaggcattttaccgagcactcggtgggcacaccctcatgcattaatagcaagggaatggnggcaatgtgacatgcccaatcacttcagaatatgcaattggcctacaggcatgacatacaaccccccaatttcaacaaacaaacatgaattcaagcacacattgtctcacaaagtttgccaaatataacaattagagcacacaaatgaatcattgcagagctagagaaccaagaatgactacttacttgttggagtgactgaacgtaaaaggatacaaagcttacatggagctgagctgtatttctagtctatagtggttttgaaaagagggagaagtatggaaaaaccacctccttttactattggcagggtaccag

SEQ ID NO: 106581 - DNA, 196 bp, Glycine max
ttacatgttggtcatgttggtcataaaaatattgatttaattggaccctacacattgaattgtacatgcctttctttacaaattagcacattccatttgccttgaaatattggttaatctgataagcttacttgtagggttgtcacacttcataacactttaacactctacgatacatgttaaaaaaatatttttc

SEQ ID NO: 106582 - DNA, 224 bp, Glycine max
  unsure (1)..(224): unsure at all n locations
agttattacacttaaaccttaccttcaattattagtctaacaaaacaaaattattacttcaactaatattctgtcaatcataaaaataataaaatttatttgcttgctcaattatacttaaactacgcattcatactgtgatctataacaattattactctaataanataatgttttgaaaatgctttaacttcaagatcaacaactatcacatataaatattc

SEQ ID NO: 106583 - DNA, 114 bp, Glycine max
tctggtgggataactgtaatgttatatgcagaaaccgagaaaagtaagttgagtgaccactaggttcttatggagattaattttcacgtacttagcagttgtttaacttccgag

SEQ ID NO: 106584 - DNA, 57 bp, Glycine max
  unsure (1)..(57): unsure at all n locations
aaggaggggggggaaggggaaaggcgccacacaacaaaagggaaaagggangggggg

SEQ ID NO: 106585 - DNA, 226 bp, Glycine max
tcgcttcattcttggtggcgatagatacttcaccatatgttgtatataagcttcttataccaatgtcacgaggagtgtggtggtcagaatcataaagaaggaactgatttgtcgatacagacttcctatgaagatcattactgaccatggcaccaatctgaacaacaaaatgatgcaggaaatgtgcgaggatttcaagatccaacatcataacttcaccccttat

SEQ ID NO: 106586 - DNA, 325 bp, Glycine max
aaagaggaaagaaaaatttttgtttttaaaataagagaaactgaaaagaaaagataaaggaaaacaggaatggagggaaaaaagaaggggattgaaggaggggaaagaaaaaaaagggaaggtggaaaaaaagggagaagggaagaggatgggaagataatgggaagggagacaggagaaaaaaaaaaaagatggaaagaggtggaaaaaaaaagaaagcgtagataaaaagagcgggagaagaaataatataaaaaaatgaaaagataggaaaaaagaaaggaagaagatgaaaggacaacaacagaaggaggaagaaaaaaaa

SEQ ID NO: 106587 - DNA, 321 bp, Glycine max
tttttttacgacaagcacagggacacactggagaggctccattgggtgtgttcttaaacaactccgacggacatgtttttcaccctttggctggcccagatctaatgtttcctctttggttccttatcggctacagtacctaccccattttcctacaggtatagtaattagaagagaggtaactctggaatctctttgcaaagcactgacccgtttaactggatatcaaaccttgcaggataaaatcaggcctgatctgcgctcatatagacggccgtttattaccactgcaaattgctctctaaacggctacttttagaa

SEQ ID NO: 106588 - DNA, 186 bp, Glycine max
  unsure (1)..(186): unsure at all n locations
attttgcctgttggcgtggaattatggtgatggatcctgaaatcctcacacatttncttcatcatgtttgttgttcagattggtggcattatctgtgataatcttcttgggcaacccataccgtcatattatctctttctttatgaacttgaccaccacactccttgcacactggcttatgatcag

SEQ ID NO: 106589 - DNA, 88 bp, Glycine max
cgggagaatggacagcgagaaaacgcacggggagagagaccacaccccgccccccctgaggggcggatgggaagggggcaatcgacac

SEQ ID NO: 106590 - DNA, 327 bp, Glycine max
tagagaaactcttctttctaaaagatagaattccctacactaatattattatattaagaaagataaataaatcgatattcttattacttatctagagggcattgaatctgtcatcatttaactttaatcacctatattctatactgattctcacttattactaaacatggaggtttgtagacctcaccccgacgtggaaactacacagatatcgtggagtattcaccaactgataaacctaagatgaattcttgtatttctgaatatatataaatgaaaatttggaacaagtttaaatattcagtcattgccgtgaaccgttcttat

SEQ ID NO: 106591 - DNA, 217 bp, Glycine max
  unsure (1)..(217): unsure at all n locations
agcaaattcttatgagagtaacagaatatgtgaaaaccgaaaaaccaatggcatgaaatgctgtggaatacaactctagaatgatcacactcttgtcccttctcactcccccgaaattccattntcatcccacgaaataacgtggtttggattcatgaccttcaacaacgtacaccttanatatgtaacttacntggtcttctttcgcatcttttct

SEQ ID NO: 106592 - DNA, 313 bp, Glycine max
  unsure (1)..(313): unsure at all n locations
agcaatatctctattggtatcgtgtgtacaacttgcaaactaagaaactcgtcatnnatcgagatgtngaagttgatgagtatgcttcttggaattaggatgaagaagaggtaaacaagtggagaagaatggtcttatacctgctcaactacctcaagaagaagctgatgaagaagacccatgtgaaccaccttcaccttcaccacaacaacaagaataagaactatcatcaccagagtctactccaagacgagtaagatctttggtggacatatatganacctgtagcgggccatacttgaacctggaagct

SEQ ID NO: 106593 - DNA, 119 bp, Glycine max
gctcatctaactacaaagagttagctaggccatctgttttttcctccatattcaaatgacgaggtgtctaccatctttccctaaccttcttgaatccaacttaataataatttgggctt

SEQ ID NO: 106594 - DNA, 117 bp, Glycine max
tctgaagaaatttcctaacttagaaaaatttcttcactcacactatgatgatgcacaatgcaaaacatatatcaaatggtctaagatgcaacaatcaagttaacaaccaatacaaat

SEQ ID NO: 106595 - DNA, 239 bp, Glycine max
cgcaattgattgttttctgcaaacaatatttattttgccaaatatttgttatcgactaagtgaggggcctaaatggctggacatgttctttatttcaatctttcttgtctctttcacattaatcatcttgtccatttatggtcgacatactcattctgtttcctcataatctactagtcttttttcaatgatggtccataaggtaaaggaaaactcttcccctacatccaaacaatttt

SEQ ID NO: 106596 - DNA, 320 bp, Glycine max
  unsure (1)..(320): unsure at all n locations
tttttttcacnaacaggaaccgctgaattatgtgttcgaacacaccacctactccaaaatatgcagtatcgactacccagttgttcctctcatgtcgcctcacctctaaactgacagaggcaatcatagccaggaatattactacttacttgtatttgttcggcaagaccccttaaacctctgacctggtgaacacctaacttgacagtgtttcaagggtatgatcacccattatgaccctcgcctttgtcataagcgatgctagatctgtaaaaactaaatctggccccattgcatcaatgaatcattacatagaatcg

SEQ ID NO: 106597 - DNA, 257 bp, Glycine max
ttttctaagccccctttttttggaatctttcggaccacaacttacaattgacatctttttcttcgaggtccatcttacgaatgttaccttttacttgagaatacaaacacgatggcaacactttttgtgcgccatacgattacgacgcaccgctcttgattaacttggatatatggcaaagcccatttaacgtacaagggtgatagtatccgcaatggtaacactcaagatctgagtgccactaactcagtctcatt

SEQ ID NO: 106598 - DNA, 144 bp, Glycine max
gtttctcataattaagctacttaccctattccctgatactttgccttgctttgacacacattctcaattacttgacctcttcagtgaccatataattgacatgcggccttaactaaatattaactgcacttatacacagctttc

SEQ ID NO: 106599 - DNA, 136 bp, Glycine max
tttgttaagataataggtcaagtgaaaacatctacattacctttttcctcaattatcttgtgcaaaagtatacttaatgaacgttacctctcgtgggagtttgctaccttgatgtaaacttctacattattatgtg

SEQ ID NO: 106600 - DNA, 276 bp, Glycine max
  unsure (1)..(276): unsure at all n locations
tactcctcacgtnttgtttttttttggaaaaacatcataactaaatgcctncccaaagcattcctatcgcaccagatccaaatctagaacgatgggtgatcaaaatgagacacangaacagatgaaagtcgacatgttggctttgaaagagcaaatggcttccatgatggatgccatgttaggaatgagacaactcatggagaaaaacgtggccaccactgccgctgntagttcgactgccgaagcagacccaactcttctagctacttcacacca

SEQ ID NO: 106601 - DNA, 446 bp, Glycine max
ctgcagctgtgaaaacaatgtgttataaaatacatctttttttaactctttcgagggaccgatctatacctttccccatctcatatcccatgacataccttctgatctatgtaccagctttcttcattgacatgataatatgcattgcagcaaatacccttaagtttgagtagtttgtagtctgccattcaaacttcaataggagtttaagtctatattgttgagtgtctatgaacataaacaagttgtttgtagctctccacaaaactctgtgagaccacattaacaaaactctgtctttcaaagtgtaggcatcattagatctcatttgctaagagatcctacagatttgcatcaatcttctcttgaaattgtaatctatgacaacctcagtatatagtgtggattaacttccttcgttatttaaaaagttcttcttgagattg

SEQ ID NO: 106602 - DNA, 135 bp, Glycine max
acactttctagaagctctagaatgtcttaacctctccattaatgaggatccaacaaagcaacttgctttgattctttataatgctagaagatgaaattttttggttgcctttaagataggacatcaagtgacaaa

SEQ ID NO: 106603 - DNA, 303 bp, Glycine max
  unsure (1)..(303): unsure at all n locations
tgcagtgctgtgattcagaaaattcttccaccacagcacaaagaccctgggagtgtgaccattccttgctcaataagtgaagtcacagtgggaaaggctctcattgacttgggagccagtatcaatctgatgccactctacatgtgcagaagactgggagaagtgganatcatgcccactagaatgacttacagttgctaccgctcataacagacatatgagtattgaaatgtttggtcaaagaaacatttatgttccagcaacttgttgtatggaattatgaaatatgcattccttatcttg

SEQ ID NO: 106604 - DNA, 417 bp, Glycine max
aaaaaaaaaaagtggctgagactgatgacccgggggggggaggggggggaagggggggagggggggatatttttatggaaaaaggaaaggaaggaagaaggagggaaggggggaggaaagaaaggagggagaaaagaggagaagaatagaggaaaggaaggagagagggagaggagggggaagaagggaagaggaaagaaaaaaagggagaaaagggagggaaaggaagagagagaagggagaagagtaggagagagaagggggaaagaaaggagggagaaaagaagagggagaaggtaggaagaagaaaggagggaaggaaggaatgaaaagaaaaggaaggagaaaagggaagagggggaaagaggaaaaaagggagagaaaggaagaagaataaaaaaggaggagagaaaggaa

SEQ ID NO: 106605 - DNA, 387 bp, Glycine max
ccgcatcttatcacgcgctcactttagtttggttcaactgaactctttctcatttcatcctctcctgcaaaaatcgcagactacgtgatctacccctggatggttaaacccattatggcaaatcagaatgcctaggtctatacctaggtaattcggccatggatagtacacccactatttgaaaattagataggttcattattttggcctgtattagggctcatatgtatgagggaccctaaaattagatttcaccctgttttaggcccaacatttgatagggagttgaatcactccaatgatttgagggggtggaaaattatgatggagaccatccattattaatgggacactttgtctccccttgcctattatacctttctgtct

SEQ ID NO: 106606 - DNA, 178 bp, Glycine max
gctgctgcgacatcatccaacactgcgtaccaataaacacacaggaggattttaaaatagctgggatcaccattcatgctagtgatactccaattgtaatatgatgagctacccacaactctacttgttctaacatcaccacgactgtgtatatgggatcgcttcatgacatggactg

SEQ ID NO: 106607 - DNA, 240 bp, Glycine max
atcccctattcatttttacccttttaatatgtcccccatataccccttggtaaggtaactcattatatattatagtccctccaataccgttaacaagttactcctatcaaataatatgctccaaaacctttcggtagtaactatatatatattacagttgatttaccacatttgcatgtttctttaacctttattttataacaagaactattttactctcgaactctctactctaattag

SEQ ID NO: 106608 - DNA, 262 bp, Glycine max
  unsure (1)..(262): unsure at all n locations
tctcattaacaacttttttggcgagaaactgatgccttttactcacataaccacacccaatctggttccctgtcttctccatccatnatctaacgaacttctactgacacagcacaatcagtaacgtcacattatgaacacccatggcggacttagacacattttacatactaactccccagacctgacttgctctcattgaagcggcttgcctgtcaaatcaagacgcatgctgggcggtcacacttgagtcgttgcatac

SEQ ID NO: 106609 - DNA, 216 bp, Glycine max
tgtttgcgccacccaaacgtatgtcagctacgttttcttaaaacaaacgtatgtcccctacttttcttaatcaaacgtatgcacactagacttgtataacttttgaaaaaaacactacacctgtcaaacacagttttctatcatggatctgacagaacctgcaccagaaattaggtagttagctagactaacagctgtgctcatagtggctgcgcg

SEQ ID NO: 106610 - DNA, 214 bp, Glycine max
  unsure (1)..(214): unsure at all n locations
tcatttcttgcactattattgtaggaagtgaaagccatcttctcaatcaaattcctagcttcatcagggctcatatcaccaagagctccaccactggcagcatcaatcatactcctctccatgttgctaagtccctcatagaaatattgaagaaggagttgctcanaaatctggtggtgatggcaacttgcacacaatntcttgatcactccct

SEQ ID NO: 106611 - DNA, 138 bp, Glycine max
agattgacctgatgttggatattttttgggggagttttctcccccccctctctttaacacttcccctctacttgcccacctcactttctctttctcccctttttccacataccatctctcctcatctccttcctttct

SEQ ID NO: 106612 - DNA, 95 bp, Glycine max
gttggacaatggaaaccataatggggtaattcagaattattatacttactttatgagatagttatcaagaacttttaaatccttaaactataaat

SEQ ID NO: 106613 - DNA, 207 bp, Glycine max
caacacggatatggctcctgattggaactaacttcatagcatgaccaagcgggaacatgagtccattaaagaatatgctcataggtggaaagacctatcagcctaagtcatcccgcccatgactgagagggagatgatcacgattatggtagatacgttgcctatgttctactacgagaagctgatatgatacatgccatcttactt

SEQ ID NO: 106614 - DNA, 182 bp, Glycine max
gtcaagatcacaattgtctaactacttgtttctcctaaaagtcatactttgttctagaattgggttatgagagaacgtgtgatctgttacagtgttcgactttgtcatatatatagatgagttgcagatcatcgcttgaatttttaaaataaatacatatacgtgcacattgtttctgtttg

SEQ ID NO: 106615 - DNA, 364 bp, Glycine max
  unsure (1)..(364): unsure at all n locations
tatgacgccattggtacttaccctaaactncttatcttttatttgcactctattacatactttacggattctgtggagtatcttcacattaagctcattgaaccctcgcgcgatgaaaggcgcgatgatntccttcgtcagtgcacctctcatgggtagcctaactaatctatggccaagcacggaattataataatacagcccctcgtccctatcaagggggacattgggtatccctcacatgagcataacactcctgcccgtccttcttcactgtggaacaactaatgacgcctcatcatgcctgcagagtcttccaattgcttaccttttcaagacatgcatgacctgaggacaacagatg

SEQ ID NO: 106616 - DNA, 231 bp, Glycine max
  unsure (1)..(231): unsure at all n locations
ttgaaaaaaaaaggggaactgatagcccaaaatcatataagaacatgtgaatccaataaagccactccttcttcaagcctttggtaattggtctgctcctatgtggggggtttggttataatatatacnttttcttccaaaaaaactatgactgacctctttcataatccattttatgtatgataaaacatggtctcactgctcatctctctctctctttctctcgctctc

SEQ ID NO: 106617 - DNA, 131 bp, Glycine max
tttttttttaacgcacgagacatggttgcttgagagtcgggagacgataatgtgtaactccggcaatacttatacattcagaatctaacatgaagtaattcaccggatggatgtctcctaatatatacata

SEQ ID NO: 106618 - DNA, 270 bp, Glycine max
  unsure (1)..(270): unsure at all n locations
agaacatgtcttcaaggcttcccactggcagattatcaacttctcccatatactgagtcttcataaaatatggagaagaactggtctgaatctgatggtggggaactggacatagttcttaaattctccagtctcatacggctctctcactgagttgtcgatacctgaatatccttctgatggctgggtctggagcaggaaaaatttcaagacacttcttaagcatccactcggaggactggacanggatacagcgtcttgcctccttat

SEQ ID NO: 106619 - DNA, 309 bp, Glycine max
gttaaagttaaaaattaaaattggtttttttcttataaaataggagggagagggtacaaagacagatgaattgtatgaagggagtgactatgtgtaccctgtggtgaaaatgggtgccatttagaacctatctaaacttatgactgatgatatgaacatagggacaacaggtggttatttcgtggaaacaggaaatcttggtggaacgttcatgtggattctttgggctctgatttgaaaaggtctatgaggacaaaaattgtgtgttgacatccattgttacacttcaccctagctttcatcacaaat

SEQ ID NO: 106620 - DNA, 167 bp, Glycine max
tatattagatgttcttgtatgttgacatgggtaataagatactttctacacatgcgcgtgtgcataaatggattacatgagtttggtctaaatcagaagggctagcacgacattgttgtgttaatataagcattatcttgtaaaactaacttctaaatgtttgttct

SEQ ID NO: 106621 - DNA, 234 bp, Glycine max
  unsure (1)..(234): unsure at all n locations
aacaattgttatcaaagaacaaattgagcgaataatatgatgaagagctgcccacaccatttcgctattacccgangcctaanattagtaaatctacactactgcttcctgtgaacatgatcttcaaagaagaacaagatatgacacctatgagactcatttaatcgactgtatgcatcctgtttttctttatgataatctatagatgtacgtttgattacgattgctattgat

SEQ ID NO: 106622 - DNA, 136 bp, Glycine max
  unsure (1)..(136): unsure at all n locations
cataaaaatgtgtctcatcactcatgatagtacacatctatgaaacgaaaataaattatcaaaggataaaantagcattacaagcatagtgtggatccactcaaccatcataaagtaacatttttttttcttgaca

SEQ ID NO: 106623 - DNA, 338 bp, Glycine max
cttattgagataccagaaatctttttttttataacttctattttttctgtaataaacactccaccaaactaaatgcaagtggttctacttgacagtatatgttttttaagggcttaaaccctttatgatacgcgattacggttacccaaatttgaaagattattaatagtcacattcttcaaaacttttcttacactcattgtgaggtctaggaaaatatgtatgctctatcaaatataatatttttaaaaccatgcatctaaaatattaattctattgatcttgagttcaatgtgatgctttttatgtataggcatttctatattacagcatctatc

SEQ ID NO: 106624 - DNA, 364 bp, Glycine max
gccatcaatggggccaaacacaccaaatgattattatgatggatggctcaaattctcacaaacgtgaactcctcactttcaaattgagctttcaaaactatcatgacatgtagaggagaatcaaggatttcaagtcacaaaatgtccagaacttttattttcaaacaattacccatttcttgacatatcctatattcaaagaaaacatgcaagtcgacatcacaccaaagtgaccgaatattaactaagatccgcgaactaccacattacaattacacactacaataacagaccacaaactgcgaccaaaacactcccatactacaccatgctcatggccatcaaattaacataatatcaaaat

SEQ ID NO: 106625 - DNA, 241 bp, Glycine max
  unsure (1)..(241): unsure at all n locations
taataaaaaaaaaaagttgcgtgtgccggaccaacgagggcgcaatgatncaaaacgaagggatttttggtaactcaataaaaaaaagaaaggggaatgggacgaggaccaaacagggagggtgaaagaggaacgggtcggaaacaagagagagaacaggggactaaaaagaaaggggccaaccgcgagggctacgaacaggccagaccgttgaggaccagggaagggaggccgggagaag

SEQ ID NO: 106626 - DNA, 286 bp, Glycine max
  unsure (1)..(286): unsure at all n locations
tttatttacatccaatcaaaaatattaggagtcttgatttgtttaagacatanatgtaattttgatttaacaccatttctatacctctaaaaccnctacacattgatttgtttgattcaactagaacaancctttgtagtggtaaaagatattgacttcctggtgatgatgattacactagatggacatgaagttatgtcttaactcacaatgatgagtcactaaagatcttctataaacttntgtcacatggtcaaatgaaaaaggagtatgtatacttcaatgg

SEQ ID NO: 106627 - DNA, 400 bp, Glycine max
ttcgctctgatgctcaacattcaatggtcagcgtctcgatgtatgacgggactcaatcatacatacgagtaaaaagttattgtcgtttgaatttgctcagatgttcaacattcaatttcgagcgtctcgatatattacgggactcaatctgaaatccgagaatatggtattgtcgttgaattggctctagatctcaccattcatgttcaggcgttcgatttttacggactaatcagacagcaaggaaaagtattgcgttgaacgattcagaatcaaattaatctgagcgctcattattacggatcatctacatcgataataggtttgcgttgattggtcaaatcacattaattcaacgttcgttatactgactatctacttcagaaagtattgtgtggat

SEQ ID NO: 106628 - DNA, 207 bp, Glycine max
tcacttttatgtttaacataaataaggtatctaaaatctacatataagctcatataagctcaatgctctctgtattcgatcgagtgagatagcctggtaacaaattattatatcaattttaacagagctttaggtgtggtaatggctatccgatctaattgatctcctcatgatactatgaaatcaagttttaaagatgatgattta

SEQ ID NO: 106629 - DNA, 201 bp, Glycine max
ttcttgcacttgttcacccaacctgagtttgagggggcaattatggagtatatcttacatgatgttgaaaagctttgtgtagctcatgttatgcataatgacactcgtaaagctgttctagttaaccacaggtagctgtaacagactttatacacttacatctaacttctaaggttttggaattagccgtacagacttgaa

SEQ ID NO: 106630 - DNA, 223 bp, Glycine max
ttgcagaatattgaaaaattaaagaggggtgttgttcttctcttaaatgtgacaaaaaatttcttctattaaataattaaatctctttagaatatttttactcttatatatatcttaacgtggcattatactgaattatatatgtaattctgagcagttttattattgtcttttaaaataggattatacagctcttaatatagagtatatatataaatattat

SEQ ID NO: 106631 - DNA, 202 bp, Glycine max
tttcttaatgaaacaaacaaaagcataaccttactccataacaattcaaaatttaatgagaagaaaaagaaattattgaagaattggttaacctgtgatgctcacaaaggaagaagaagagaggatgaaggatgatcggaagatgaccaagaataatcggaaagaatgacgaagatcggaagcacgggagaggaaggcatgg

SEQ ID NO: 106632 - DNA, 210 bp, Glycine max
tggattgatttagtctaactagggatcgaggtttagtaatttaagctatagcatagaacacaaaagcacaattgattagagaaacatctttatatacatcagctggtctgttagaaagacccaacatctttacctattggtgtcaattttacttacttgcatttttactgtttttagcctagacttagtttaattctattctaaatcctc

SEQ ID NO: 106633 - DNA, 203 bp, Glycine max
tgcttccaagcttattttgatgatgccaaaaactcaagtctagaatcaagattcaagcaagtttcaagaatcaaagagtcattcaatcaagaatcaagattcaagtgaagattcaagagaagactcaggaaaagcatcaagataagtataaaaataactttcaaagaaaagattgaatatcacaatttgtccaaaagaatttg

SEQ ID NO: 106634 - DNA, 223 bp, Glycine max
tggttctaccctataacccagggaatggaaattttgatcgccaatatttcaacaacatttcatagggatgaaagactcgggaatacgcatgctatgcatgaaaaatgtaattatgagattgagatgcccgaagaaacatcttttcttagttaaccatgcattaggtaccttgttcactcattttgtttttaagtgaaacgggtttatgatcccaacattgttg

SEQ ID NO: 106635 - DNA, 168 bp, Glycine max
tcatgcttctgatcccaatgttcaaggagattagggatatgaacaaggatgcacttcctgaggacacttccaactcagtcctcgccttcaaagaagctctccaatctgcagggaaccctctaatttcaaaccaataatattaatgggggtttttttttttgggtttta

SEQ ID NO: 106636 - DNA, 219 bp, Glycine max
tgaaggtgtgtagcttaccatcttttcatagtagaaaactggtaatgtgtctactatcattgttatcatttttttctccgtcattgaggtgccacttgagctgccaggtctctccacctttgggcgtattctttgaaagatctgtgcccctttttgcacatgttctgtagttgcatcctatccggaaccatatcaaaattgtactgatactgcctaacg

SEQ ID NO: 106637 - DNA, 195 bp, Glycine max
tccgttcccaagagcatcccttatttaagcatttcagcctttgctttcttgtagcttaggaaaaatgccatgcttcttctttctttcttccaaatccatttctaaagttccaagtactttcttcatcacccacatccaccattagccaccacaaaccattattggtgttcattgaaaacccacaccgagaggaac

SEQ ID NO: 106638 - DNA, 218 bp, Glycine max
tccattttcaatttcgaccatctcgatatattaccggactcatccggacatccatgtataaagttattgtcaattcaatttactcagggcttcggatcttaattttgagcgtctcgatatattacaggactcattcagacatccgagtaaaaagttattgtcgtttgaatttgatacgagcttccgttttcaatttggagcatctatcgataaattat

SEQ ID NO: 106639 - DNA, 198 bp, Glycine max
tctcttagatagggataccacgccactgctgctccggctaaactgtcttgaaagaagtgcatcaacagctttttgtccgtaaaatatgcccccatccttcggcaatacatccgaagatgaccttttggacacgtcattcctttgtatttatcaaaatctggtactttaaacttgggagggatgacgatgtcatgtacc

SEQ ID NO: 106640 - DNA, 220 bp, Glycine max
tgccaccttgctcgcccaggcgagctaggttgcttcctccagaagcaatcgccttctggaggaatattctggaaggcccaagtgggtctggttgctatttgaaccctcatttttactaaatacacccccttgctcttttttggtgattctttttccgtaacgttatgaaattttatgaatttcgtaacgatgcttgttttctttctgtaatgttacgaaa

SEQ ID NO: 106641 - DNA, 202 bp, Glycine max
tcatgcttctatctagccaagattttacaaaagtgttacaacagaacctaacggtttctaattatatgggccatcgaatctatcatgtgttgacagtaattgattagcccgtgaatttcctctggggctgaacacacttcggccatggcctttgctttggctagtagtcatgggaggtcttgacttccatttaaggtcaagg

SEQ ID NO: 106642 - DNA, 220 bp, Glycine max
tttgcatgtttaggaagttctagagagagaaaggtccaagttccaaagagttctgagagatttttctgtttgaagatctgtagagatgcgagttcgaagcggaagccattatgagaacttgagatgagtttgtgagatcctagaggtgaatgagacatcctcaccacttttgtttttgcagtctttcatcttcttcttctctttgttgtaaaggaggttt

SEQ ID NO: 106643 - DNA, 199 bp, Glycine max
ttatcttaggctaaattagtctaaactttcgtaagctatttaagctgaatctagtccaacaagagggatctgaggacgaatcttagtttaagttagtctaaaccttggagggctatctaaattaagcctaatccaacaagagggatttgaggacgaagcttggattgattcagtctaactagggatctaggtttaataa

SEQ ID NO: 106644 - DNA, 219 bp, Glycine max
tctattatttataacctttatcttcaagtgtgttgtctcacaacgagtagatttctttacttgttcttcatctgaatgcacatcctttcttcatgcaaagagtccactctggttggctttcatgttgagcacttcaatagaaaatcacttctcatttgtcaaagcaagtttacacaacaaaatgcttcttttgatgaagctcggtacttttagatcttg

SEQ ID NO: 106645 - DNA, 204 bp, Glycine max
tttttcaagcttgtaagtatttattggtataatttgcctgttccattaggcttgtaatgtctttaaaggttacttcctcgttgacatcttttgttttgaatggaattgccatgacaggtttattattactgcctttgatatttggtagttgatattgtgttgtgggaggtaatttcgattggattaactcaccatctttcactt

SEQ ID NO: 106646 - DNA, 219 bp, Glycine max
tgtttttaacaaataaatcaaaatcaattttctgatcttcaaagcccagctccagcttccttctccccatatccactatgcaacttgcagttagcatgaatggccttcccaatattacaggaatgtcattatcttcacaaatatccattaccacaaagtcttccgggaagataaaatgtttcactctgaccagcacatcttcaattactccatatggtt

SEQ ID NO: 106647 - DNA, 208 bp, Glycine max
tgctgcatgcaagcttgtaggattatggggtacccatcacatgtggtactaggtggcggtcgggcgatggtgcaaaacaattctccacatccacaaatcacgtataaacccaccatcccctgttgcccacctcaactgagctcacatactcccacgtagcccttatcctcgttcctctcaacgctgggtccccatcaatcctcccaag

SEQ ID NO: 106648 - DNA, 217 bp, Glycine max
tgcttgtggagcttctatggaggctggatctttgagcttcaatgaggtccttcaatggtgatttttcaccatggagatgcagcggaaggcaaaggagaagaggagaggggaggcgccatccactagggaataagccatggaagaaggagcttcaccaccaagatgagccttggataagaagcttggaaggatgcttcaatggaggaaaagaaagagg

SEQ ID NO: 106649 - DNA, 200 bp, Glycine max
tctagcttccatcagtcaactcccccactggaagatggaaggtgttggtctccctatgtcacctctccacaaatgcatatataagttcaggatcgccggtgaccatagaacacccaatcaatgaacttaatctggtgccggcaactaggccttcaatctcaggcgctgaactcccaaatttatctactttcctaccgggg

SEQ ID NO: 106650 - DNA, 216 bp, Glycine max
tatgctgtaaacatttacaatagacctcctcaacctcaacagcaaaatttgtgacatcttggaaatttctactcgaaatttttgaaaacgatgtattttgaatgattatatatatatataagtattattcagtgtatatgcatatatgttcttggtagaagtaggaatagtgggggcaagatacccgggttaggctaattaaggaagagaaatcca

SEQ ID NO: 106651 - DNA, 199 bp, Glycine max
ttatttttttgctgcacactataagagacacacccactatttcgattctgagccttttactaaaatatttgaagaattgttttaaatcttgtgatgtgcttgtgaaagtagtgtgataaaccgaagttagtcttggggtggataaatgagaaatccttatattattgaaaaattttgatgtttgaggaaatgatatcca

SEQ ID NO: 106652 - DNA, 218 bp, Glycine max
ttctcttttattttgttatacgtaagaataatgaagtactttgcatgaataaagaatatatatggcattatttattgtcagaaaataaatatatttatattatttgtaaatcaaatagcttctacttttgattgttagtcaacaaaatacatactctttgatatagttttttttataccaaactctctaatataggtagatgctatagattgaaaaca

SEQ ID NO: 106653 - DNA, 204 bp, Glycine max
tcattcttgcaccacaaataagaagggtgctggatcagccatgtggggccaagtgctaatgtgctggatattgattctatcaatcgatagttcttagattatattatctttaaacattcctataattctggttaaaatgcaatttaatactttttttttagttccgttaagttttctaatctttaaaaaaagttcaattaattt

SEQ ID NO: 106654 - DNA, 222 bp, Glycine max
tgctctgtttgttttctgacaggttgaaaacattatatggtgaatcatcaagcaagagtgacaagtcatatgatccccaaactgttcccaatgaacaactgcagaggcttgaagctgaaaatgttgctgatgacagatcagatccactgttccccacaccttttggggactggtcacatccgtgcctagaatttgaaattgagactctttctggtgcgttgc

SEQ ID NO: 106655 - DNA, 200 bp, Glycine max
ttttacatttggttaaacttcatatcaaaaactggaacgcacaaggcatataataggattttagaacatcggcaatggaatacaatcttactaaaaagggataaaattattacactaagatatttataaattaatagggcattgggattcatgactaactatcaagcttatataggaagaatttcaatctatggagtgaa

SEQ ID NO: 106656 - DNA, 219 bp, Glycine max
tgtccagttatttttattttgagtctgagtacttcttataaaaaaaattagttatgatcctttgatcaaatatattatatatggaacgaattaacttatcatatgtataatgtatgtacttataccgtatcaaaatcaagataaaccattaactcaaattagtaattttcaaccctgtacatgtttaatccaatttaacttattttctttaaataataa

SEQ ID NO: 106657 - DNA, 203 bp, Glycine max
tcattcttattcgatataagctaggacctaaaaagttgaaagctagctaaaaacttgtaaactagttgatttaattaaaattattttgtaagactgactttaagttaattaataaatgtcaaatgatatatttaattgtgtgtaggctttaattaacaaaaaggaaattttttgcttttaatagaataaataaaaatcatgca

SEQ ID NO: 106658 - DNA, 222 bp, Glycine max
tgccttgtcccttgatatattagagggactcatggtcactatgaatgacaaattccttgggataaaggtagtgttgccatgttttcaaagcccgtactaaggcatacaactccttatcataagttgaatagttaagggtaggaccacttaacttttcactaaaataagcagtcggatggccttcttgcatcaacacagccccaatcccaacatttgaagcat

SEQ ID NO: 106659 - DNA, 206 bp, Glycine max
tcatgcttgtttcatcgtttatgcgagacggagaccaacatgctagctatcattggcaagtaccaagaagagttaggtttagccacggaccactagcataggatcgcggacgagtatgcccaagtatacgcggaaaaagaggctagaggaagggtgatcgactctttacaccaagaggcaaccatgtggatggatcggtttgccct

SEQ ID NO: 106660 - DNA, 221 bp, Glycine max
ttgcattttcgtatgtgtaaaacacccctatgttggttagagcccggagaaggcctcaccttaggaccagaaatggtacaacaaaccactgagaaagttaagttaattcagaaaaggataataactgctcagagtaggcagaaaagttatcatgataagaggaggaaagatctggaattcgaggttggtgatcatgtattcttgagagtcactccctggac

SEQ ID NO: 106661 - DNA, 203 bp, Glycine max
ttttttttatcttggcatataactaggcaaaaggagcagctgtaggaaccagtgaacagaaatagggtttttgtgttattgtattgtattagggttttgggaatttgttgtgtgggaagcttgcttttgtgttactgttgaaattgctacaaatttctataatattcttaaatataatatgtatgaatatggtagaacaatct

SEQ ID NO: 106662 - DNA, 220 bp, Glycine max
tttttactttttgatggaaacctaatttgcggatctaatttttagcattaacaaactgtggaacctatttaggactctctaaaattagggaaaagaaaaaggaaaaagcagaattagaaaaggagatggaaaaaacaatgtcacaatcttgaaagattgataagttgagaatgatttgccacaaagaatataattgtttgataagaatctaaggattcac

SEQ ID NO: 106663 - DNA, 202 bp, Glycine max
tcattcttgccttgtttgatgtatagtctaggtaacataggctgaaaaaaggctaggctgtaggtcattgataggccgcctgtcatattcccatttccctccccaattataaattacttttaaacatcaaatcttgtactttgaagatacaatcctttctcctgacagttatgctacttgtgaattcaatttctacccaatc

SEQ ID NO: 106664 - DNA, 219 bp, Glycine max
tgtgccatttgttccattgttgagaagttatggtgacacaattgcaactgcaaaatcaatcggacaatactgggaagaagatctctcttgtatgagttggctcgaccaacaacctcatggttctgtcttgtatgttgcctttggtagtttcactcattttgatcaaaaccaattcaatgaactagctcttggaattgacctcaccaatagaccttttct

SEQ ID NO: 106665 - DNA, 202 bp, Glycine max
tctttctttcttggttagctctgcattcaataatggcaggcacaaggtttatgatggtatcagagcactagtgctctgctacgcaactccatgatcttgaacctgaatctttccttttcttttttttttttcaccatgaccaatgagatttcttcacaagaccaatccctaaatgtccatagcccatactaccttcatccag

SEQ ID NO: 106666 - DNA, 218 bp, Glycine max
tgttatctattacacatatactgtaatcgattactagaagagagtttcaaaaaacattctcaacagtcaaatctttttgtgtggttcttgaatggctatcataggcctatatatatgtgacttgagacacgaatttgataagagtttttcataacaaaaaggtcttatcctcttataaagagaaatcgttttatcctcttacaaattccttggccaaa

SEQ ID NO: 106667 - DNA, 197 bp, Glycine max
ttttttttgagattttcgccagctggtcttttattatagattattgctaagacatggttgtttttatctgttttggaaaatgaaacttgaatttatgtctaatggaatattctagtgctggggaactatatatatgaatttattgcctgttatatattacttggtgttttcagtaaggcttcaagcctatttatatg

SEQ ID NO: 106668 - DNA, 235 bp, Glycine max
  unsure (1)..(235): unsure at all n locations
actatanaataattaagctttattttttgttttggtgaaactatggaggaatattttcaatattatttggacttttataaatgcttgaaatcgcttacttaagtttgttacattatgtttatattaattacttgcgcttatgttttttgtggtccaatagctcacaactttattcataaaacttcacctcaaattataattggtttgtcttcccgaagaaccccctctccccccc

SEQ ID NO: 106669 - DNA, 204 bp, Glycine max
tctagcttcttatccaagggaattcttggtggtgaagctccttcttccttggcttattgcctagtggatggtgcctcccctatcctcttctcctttgccttccgctgcatctccatggtgaaaaatcaccattgaaggacctcattgaagctcaaagatccagcctccgtagaagctccacaagcaagcttccatcaagtggta

SEQ ID NO: 106670 - DNA, 219 bp, Glycine max
tgtttctttctctgagtgtgaaaagttatgaccatttgaatttctcgaaagctttcgttgttcaatgtcgagcatctcgacatattatgcgctcgaatcgaacatccgagtgaaaagatatgaccatttgagtttctcgagagcttccgtggttcaattccgagcgtctcgacatattatgtgcccgaatctgaccttggtgtgaaaagttatgaccat

SEQ ID NO: 106671 - DNA, 207 bp, Glycine max
tcatgtcattcttgctttagtgaatccttggtgtagttttgcctgagtatatttcactttgtaaatttatgattagaatatttgcgtgtccagttatttatatattgcgtgggtatatatgtaatactatctatatatcatgaattgtgattgacattgagtataagcgacaagttgagcatgtgttaatttgcgagatacacatga

SEQ ID NO: 106672 - DNA, 217 bp, Glycine max
tcatctgttcaaaggcaacctgagtttcatcagtccagtgaaacgggtcaagcgtggtggccttcactagaggggcaacaatagtggcataccccttgataaaacggcgatagaagccgacgaggccgaggaaactgcgcaaggccttggtcgtgcggggaataggccattgacgcacggcggcgactttctcagctaaaggttcgactcccctggt

SEQ ID NO: 106673 - DNA, 202 bp, Glycine max
ttttcttgcttctacacctattttttactaaattctgtatctaagatagcttgctcattccactttgattcctttggttaaaaattgtcctttggatgtgtgggagatttggctggaaaagcttctacacccattttttgtccatgctcagcaagcacttagctgttcatggtctagtcttctacaagatggtagagcaatg

SEQ ID NO: 106674 - DNA, 197 bp, Glycine max
tgattatttttatgttaatgtgagtcaaattataagagaataatttgagacaaaatgaacaagtgctgtaacgttgtttgttttattggacgaagaaaactagagcaaatttagtgaatcttagctttgctaagttagtgagtttcattgtattcgagcttattgtgtaaacactctttgagtgattaagaatatat

SEQ ID NO: 106675 - DNA, 205 bp, Glycine max
tcattcttgcacaactagtggttaattttgttttttttttcttttcaaaatgaagtaactaactaaataacactaatatatagagtgactactcagaaggaagagatgggtctcgattagacctttccaatctacctaattaaagtaattacacaaaacaaagcctaaacttgcaacccaattattcaagtgtaaaggttctgac

SEQ ID NO: 106676 - DNA, 222 bp, Glycine max
tggcattgtaattggaatctagcatcatattgcttgattttaggtcacgatgcaccacacaattttcacattcttcatgacgatagagcaataatgatccaaccctaatgctattttgtacctttcattcaaactttgactattactactaaaatttttgttgtttccaaacaaatgattactaaggcttccatttggcatgtgctcatatacaagaagaaa

SEQ ID NO: 106677 - DNA, 201 bp, Glycine max
ttcttaaaaccccttgctcattactaaacaaactgaaattaatcacaatcacaagcaataactacatgcaagagataagaatgaaaaataggaaagggaaagaaaagctgggttgcctccaagtaagtgctcttttaacgtcactagcttaacgcatcatcctgttatctaggagccgacggagtggctacttcaaggacc

SEQ ID NO: 106678 - DNA, 223 bp, Glycine max
tcatattttgttaaaggaagataacttaactaaacatatgagcacaaactcattatagaaatcaaacaagacaaacaaataaaattttgttagtcatcatataaacaagttaaataaaagagaaatttcaaccaacttaattttaaaagataatggttttgatgttacctttttcatgattcaagtgcttaaatctttaaagatggaagtcagacttttgttt

SEQ ID NO: 106679 - DNA, 199 bp, Glycine max
ttctttttcttgattttttctaagttctttaacaagctttgaacaatatacttgcccttcatttaactgtctctgcgcttggcggccacgctcaacaaagtactttcgacacctactgtacgttgatttgaccaatgctgttatgggaatgttgcgacaatccttcaaaaccttgttgatacattctgagaggttggtt

SEQ ID NO: 106680 - DNA, 220 bp, Glycine max
tactaggatacttcttcaaatgttttggttcttccgggatagcaatgtcagcatccatggatggtataaattgacaacaatgtctccaccaggtattatactccgccttgcatccaaaaaatacacatgagaatgacaaaaatataagaactgacactagtgatataaaagtatgaaacataaagcatgattgttgggataaaccatttcttctggtgaa

SEQ ID NO: 106681 - DNA, 199 bp, Glycine max
ttcttgtctccacgcccaagtgaatatccctccatgacccatttaatgacacttgtattgaagtctcttgatgcatagtggatcacccacaattctccgtgtttcttcaggcatgatccacactctagtttatgttcacctcaactttcaattcaatatagtgcttcaaagtttaaaaaacacttcatatgattttcag

SEQ ID NO: 106682 - DNA, 205 bp, Glycine max
  unsure (1)..(205): unsure at all n locations
ttgctatgtgatgttgtgacnctcacatttggattttattttcaaccgtcaaagggcctgggtatccattccccaaaccttggtatcgattaccaccttttgaaaataattgggaccgtgtaaattcaatttgaaaacctttttaaagtcactttgcgactcgggaacgcaatcacacacatatgggatggcgctccccagagag

SEQ ID NO: 106683 - DNA, 208 bp, Glycine max
tcaattctttacaagtgaatcatggtggtccactatctaacaactgtcagatctattattaaaatgttgaagggtgtaagttagttatgtgcaactttttgtgtgttattaataattaaaattaattttttcaggtttggtgagggtgatttattttgtcactattcgatttgaatccaccattgggtttgcggttgtgaatgagttg

SEQ ID NO: 106684 - DNA, 220 bp, Glycine max
tacatttccagtttctcaaatctccttttcgggaatctgatcccaaaataaggcttggacaataatgtcctcaagaaaatttcaaaatgacaagcataccctcctcatttttctgaaccctaaaattttctctcgttcctgagaacttgccgggctatgccttcctcgaaatttttctctcatgcttctgatctacttcgtcacctcttacgatcatcct

SEQ ID NO: 106685 - DNA, 207 bp, Glycine max
  unsure (1)..(207): unsure at all n locations
tgtcattcttgcttgaatttggtttagacatganngatacatgatttgggacttgtaggaattgatttgggcaagattggatgagaggaagtgtgattttcgaaatctgcacttatgcagaatttttgctgtgaaattgtgcagcagaattttgcacaagtgcagaaaaatgcttgtgtgtggttggctgtggaaagtctagtgcag

SEQ ID NO: 106686 - DNA, 220 bp, Glycine max
tatgcgcttatttccctacgaacgttcacttgcacaagacatcctattaactaagaaaaatgcacccatatacaatcaaggtagcttcattacctagattatttacatgtacttccaaggtgtatttgttatttacatcacacacgcctccttggctaaatttacatacatgcatactcaaagcatttcggggtaccaaaaattgcacatgcgctcatct

SEQ ID NO: 106687 - DNA, 198 bp, Glycine max
tttctttatcaaatggatgttaaaagtgcttttctaaatggcttaattcaagaagaagtatatgttgaacaacctccaggttttgaaatatcagataagccaaatcatgtttatagattgaaaaaggctttatatggtttgaaacaagcccctagggcatggtatgaacgtctaagcaaatttcttttagagaaagat

SEQ ID NO: 106688 - DNA, 218 bp, Glycine max
tgtttagtcattttagcacaattaataattgtatcccgaagtttaacggaggcatcgatcttcatgaaattcttattgatctacaattgttaccccactaccaccttagtgacaactcagaggcataattatggaagtggtaaagtggaaggaggtgaatgaggaaggaagaatttattagataacatttagtgaaatcaccttatttattgacgctc

SEQ ID NO: 106689 - DNA, 201 bp, Glycine max
tttttgcttctcgtctcattttttttgtcggtgtgacatcgttgtggaatccctcaaaggtgaccatagtatccacatcgaactgctcccttgatttttttttgttttctatttttgttctagtttgtgtgaccttcaaatgttctttctctgactgaagtgtttgttttaattactagagcaatgtgtaattgtctcatt

SEQ ID NO: 106690 - DNA, 216 bp, Glycine max
tcactgatgattacagtcgtaagatatggatatacttccttgttgaaaagtctgaagcttttattacctttaagaattaaaaaaatcttgttgaaaaagagacgagttctgataagcataagcataagccacacatcaccaaggtatacacccgtaaacagcgagcaagagaagaaataaccatggaccaccagcagcagggcacacaacacccaa

SEQ ID NO: 106691 - DNA, 202 bp, Glycine max
ttctttcttagactatcaacttagatacaatttgtattcattttatctaaataactgagtaataatattaataataatttggaaacataaaacatctcaatagataacaagcaatgtgatttttttgttatgtgatttttacctacaattaaagcctataagtacaagtaaatgaattgtatctattgtctttcaatggtaa

SEQ ID NO: 106692 - DNA, 219 bp, Glycine max
tgtttaattctattggaatgtttccactaagcttatttgagaataaggcaagtgtgctgagctttgtcaagtttccaatagtggaaagaattggccctgagagtttatttgagcgcagactgagtttggggagctttgtcaagtttcctatagtggaaggaattggtccacagagattattcacaccttaaccaagaagagtaagttgtgacagaaccc

SEQ ID NO: 106693 - DNA, 201 bp, Glycine max
  unsure (1)..(201): unsure at all n locations
agcttaattacatatanatgntataaaaannattatttttattgggaaagtttaactcaattgattaaacataatatataaataagnacaaaanntatgatacataatttttattcttactcataaaaaattatcttcttttttattgttcattttgtggacctaaaagcttacttgaaaatatctttataacgaggatat

SEQ ID NO: 106694 - DNA, 218 bp, Glycine max
ttaagagttattcccttctttttcttatcattttcttcgtgttgatttaatctcaacagttccatttcgtgttcctataattttccaaatagtgtagcaagagatatgttagataaatcttgtgattcagtaatggttgttaccttaggttgccattctctgcttaaacatctcaatactttatttatgagatcttcatttggaaaaaatttccctaa

SEQ ID NO: 106695 - DNA, 184 bp, Glycine max
tctagctttaagccaatggatacgacaataactttttactcggaagtatgattgagtcccttaatataaccaaacggtcgaaaatgtatgtggaagccttgagccaagttcaacgatagtaacttttttctcaggtgttcgagcgactctcttgggatatggacacactcgaaagtgaatgttg

SEQ ID NO: 106696 - DNA, 217 bp, Glycine max
tgaacactctatttcgagcgactaggcatatgtggggagtcacacgcacctccgagaaaaaagatattgtcaatagacttgggttgaaggttcaacattcaattacaagcgtctcaagatattacgtgactcagtcagacattcgagggacaagatattgacgcttgaattggctaacagctgcaacatgggggttgaagcgtatcgatatgttacg

SEQ ID NO: 106697 - DNA, 204 bp, Glycine max
tgcttttaagcttgaagtgaaaaggataggatttttgtttgctttgccatttttgttagttgtgttctctattttacttcaaaaagtaattggaaaaggaaacgttaaaaggaataggaaaataagccaataaaaataatgaggaatataaagggaatgaactgaatctcttaaaactagtaaaaagaatgaaacgacagtcaa

SEQ ID NO: 106698 - DNA, 214 bp, Glycine max
tcaagaataggccaaactcctcttccaaaatctgatttcaggcttaaataggtggctttgttcgtgcctgcgcgcttagcacaactctgaaccgcttagcacgcatttgtgaattttggcttagcgcacgccttctcgctcagcggatggactcaagcggtgcgcttagcgggatgaacccttattcagcgaacatgcacaactcatccttctt

SEQ ID NO: 106699 - DNA, 205 bp, Glycine max
tctttttttgtccagccattctaagccatattttagccgtatctaagccatatcctacagtttttttttaaatataaaaaacatttggatactttttggatacgtatcagagcatgtcggaggagtatcggttttccgacacacgacaccgatgctttcccatctttcccattttgaagtatctaggcttcatagcctaaattgt

SEQ ID NO: 106700 - DNA, 223 bp, Glycine max
ttaggaataagatttttagacatcactcttttgatagaattcaaattcacatgtgcaagcctagcatgccacatatcagaacattcaacatttgcacaaaagaagaaacactagatattttattaatagaaagagatataagacttaacttaaacatataatcacaaatgtagcctttaccaataaaaacaccatgtctagtaataacaactctattggactc

SEQ ID NO: 106701 - DNA, 204 bp, Glycine max
tcattcttcttattttcagatgatgcagatgggtttgtagctacctcatgcactcctctaatgactatggcatcatttctggcactaaactgctgggagttggaggccatcttctcaattaaatttctggcttcagtaggagtcatgtctccaagggctccaccactggcagcatctatcatacttctctccatattactgagt

SEQ ID NO: 106702 - DNA, 223 bp, Glycine max
tctgtgttcagtagctatatatatagtgcaaaaagctacagttaaacctagtgccagctgtggcagttataaatgccttacaacaataacagctgagagtaataaagacatacacaatgcaaaataaagagaaatggtattctcttacatgactgctgtccaaaagtctgtgcaggcttatgttgcagtttataacaattccttttgttgtgccttgtctgga

SEQ ID NO: 106703 - DNA, 201 bp, Glycine max
atcttcacatctctggataagcacaaattgcagaaatattttttgtgttgtagaaagcgctaagcacagcctgccgcgctaagccctagatgcttacgggactttacaacttcaaggtgggcttagcgctagggtaggctaagcgcttgggttttaaactcaaacgtcacgttggcacgctaagcgcaactgtgcgctaag

SEQ ID NO: 106704 - DNA, 221 bp, Glycine max
tgtattcttaggaatcacttggactagactcacccaccggctatcagaaatggggtagatgattccaacttgcaagagcttggtcacctcctttttcaccacatctagaatgatggggttaagtcgtcgttgtggctgcctcactggcttagctccatcctctaaaagtatcctatgcatgcaggtagatgggctaatactaggaatgtttgctaaagtcc

SEQ ID NO: 106705 - DNA, 204 bp, Glycine max
tctttctttgtgtaatcgattacacttatttggtaatcgattaccagtgtttgattctgaaaaatctaaagatgtaactcttcaaaaaggttttgactttttcaaatgggttttaagtttttctaaaagttataactcttctgaatggtcttcttgaccagacataaagagtctataaaagcaaggctttgttttgcattttta

SEQ ID NO: 106706 - DNA, 206 bp, Glycine max
ttcagcttcaggctgctcaattgctccaggttgctgcatggaagggcaaaggtttgtatggtggtcaacagaggagcacaaaccataaacccttgcgacaggtacagatttctgattcaaggccagctgggttaccaagttaaccaatgcatccagtttgccttcaagcttcttagtttcagatgatgcagatgggtttgtagcta

SEQ ID NO: 106707 - DNA, 221 bp, Glycine max
tgttcattttgagataataggtggtcatcctcatttgaagttgatggtgcaacatatttatttggcctaacaggaactccaatatttttacagcttctaatgttatgattggtttggccacaccttccacatgtaaactcagccaatttcctctttagcttatgtcctgtgacattgtcctcatctacagatctccttctatttttctttggccttcctct

SEQ ID NO: 106708 - DNA, 208 bp, Glycine max
tgtctttcttgcttccaccagcatctgactttgagaagaagacagagctttgaacatagctccatctaagttaggtctaggcaaacaaggttctgcaaatctgtctttaaagtgcttgagaactgcttccttaatgactgagggtttatcaacccaacctccattgagatgcatcccccttagggtattccttcttctacttgagttg

SEQ ID NO: 106709 - DNA, 220 bp, Glycine max
tctcaaggaagttttctcaagaaagcttctcaaggaagctacctagtctataaatagaagcatgtgtaacacttgttgtaactttgatgaatgagagtcttgtgagacacaactctaagttcaacttctctcccttttttttcttccttcaatttcgtgctcccccctctctctttctctccctctttcatttcctccattgaagcatcctctccaagct

SEQ ID NO: 106710 - DNA, 200 bp, Glycine max
tgctttttaatgctggcatgttcagagatcctggaagtgctacaatcgaggtgtcaaaagaattaaatgaaagcttcagaaatgtcaaggactcacaggaaaagatgtaggggcaaaactcgaaactctgtctgaagcttaaatttagagatactgtaaactgctgaacattgtgcagcacagcatatttcatcagcctg

SEQ ID NO: 106711 - DNA, 220 bp, Glycine max
tgtgcctttttatcttctgagccaggtagtgtgtctagtcttcctttttgtaattgcgcttggagcatttgaaggtggaggggaactcggcggtgttgccatgggtcctgtaaaaaaacaaaaatagaaatgaaacactagttaattacaacaacatgtaagtatgaaattctaaataaagacagttaattgtaaataaaccaaatataattttccaaca

SEQ ID NO: 106712 - DNA, 208 bp, Glycine max
tgcttttttttcttagggaaggtgcattgaatcaatgtaaacatgcaatcttaccttttctctaccttcaaacatctttattgcaattaagctaacattttagagcttttgagaagtccttcgtattcaataattttaaattttacaacctctaaactcatttggcattgttattgatttattatttaacatttattgtacaaaaaaa

SEQ ID NO: 106713 - DNA, 217 bp, Glycine max
tatttctttataggatggacctttccaggttttggagaggatcaataataatgcctataggttggacctcccagaatagtatggagtcagcaccacttttaacatttctgatttaattccttttgtaggtggagcttatgttgaggaggatgaacaaacagatttgaggtcaaatcctcttcaagggggagaagatgatgcaatcctccctaagaag

SEQ ID NO: 106714 - DNA, 201 bp, Glycine max
tcattcttgctgtttaattaattattaatgtattcattggttgttaaaaatgttttgtacatatcatatgacttcgcaattccatgcacatgcaaaatcatagcccatgtttcataggctcttaatttgatgctatgtatatcaagccttttggggagttatgtccttgcaattcaacacttttgggtgagtatttgtttc

SEQ ID NO: 106715 - DNA, 218 bp, Glycine max
tctttgatccttgaagtactcttttggtaaaaatcatatgcatatattatatgatgtatatgtatattgttgagctattagtgcttaacatgtgtgtgtacatgattgatttgtttatatggcattttttcccttcaaaaggagaaattttattacagaaaaaaacaaacagaattactaaagatttgttcttgtgacaaattatctctgggtcatct

SEQ ID NO: 106716 - DNA, 203 bp, Glycine max
tcttgctttataagcgtgggtctgggagacgaaggtcaagcggtctcgatatacgaagatgatgttgcgggtacattggatttggtacgaccatacccttctgatttccagctgggaaattggcgagtggaggaacgccccggcatttacgcaacgagcataatgtaaacctttacggttttaaaagctctatagttaggcct

SEQ ID NO: 106717 - DNA, 218 bp, Glycine max
ttttttctatttttaccactaacttttgtatacaaaagttttcaaaaatatatctatttctcctaatttatgggtctctttggtaggattataaatatttcttgtttagtttttatatttgctcagcagaagctttccatatgaatttaatgtaaatttcacttcaattccaagtgaaatggagaaacatttgaaggtgcacaagctgctatctcgct

SEQ ID NO: 106718 - DNA, 200 bp, Glycine max
tctagcttaataagcgcaggtttgggaaaccaaggtcaactggtcgcgatgtaccaaaatgatgttccaagtacattggatttggtacgaccatgccctactgaattctagctgggaaattggcgagtggaggaatgccccggcttttacgcaccgagcatagtgtaaacctttacggctttaaaagctctatagttggg

SEQ ID NO: 106719 - DNA, 216 bp, Glycine max
tccaatttattcaatgcaccctttgtggtccattcttgatttgtatgctttcatcttcttctcgtttagtttcggtatccttttcttctgtttttaactagcttcgcccgattgtttaagtcgttatcttgcctaataaatgataaaataaatttcaaccgatcatttgtgttggaatctcgtctaatcactgttaaaataaaattcaaccgatcg

SEQ ID NO: 106720 - DNA, 197 bp, Glycine max
tttttcttatgctgcaaatatttataatagaccttctcaacctcagcagaaaaatcaaccacagcagagcaattatgacctttccagcaacagatccctccctggatggaggaatcaccctaacctcagatggtccagccctcagcaagaacaacagaagcctgctccttcctttcaaaatgctggtgggccaagcc

SEQ ID NO: 106721 - DNA, 216 bp, Glycine max
tcaaccatggggagatggaccatttcaagtgcttgaaagaatcaatgacaatgcatacaaagttgagctgcccggtgagtataatgttagctccaccttcaatgtctctgacttatctctttttgatgcagatggagaatccgatttgaggacaaatccttctcaagagggagagaatgatgagtacatgaccaagagcaagggcaaggatccact

SEQ ID NO: 106722 - DNA, 203 bp, Glycine max
ccccgcggacgattacattcaattctgtcgcctgctttctttttggcctacaaataccatttttgggacttatgtgcacagatgaaagtgtatcaacgctaaaggataaatgacaaccaattataggccaaggacgctatactcaaaactatggtggacattacctaaaggcggaacacccccgttctgtccccgcatcataa

SEQ ID NO: 106723 - DNA, 168 bp, Glycine max
tgccgacttattttttattggggaaggacaagaagtttcatcctgatccttcggctacgcacttcattgcgaagctacacatgacctctgattccgtttggaaccaattcttccccaacggtatacccttaattttccctttgccctgaacccaattattggacgaga

SEQ ID NO: 106724 - DNA, 204 bp, Glycine max
tttctttatgctccttgtcatagcaacttttacactctctgtgtgagacttagctcaatatttactatgaagctattgaaggacttgtcaactaactgattacccaattaacgcacgccaatgttgggggtttttatggctaccttacaactttaacggttggacatggtgacttgcataaactgagctagtgtctctgctaaa

SEQ ID NO: 106725 - DNA, 222 bp, Glycine max
tcctcctttgtttttggcttactgtgcctaagtaacttgatcaggggactcgccttctctactagctttgctaggaccttggacacatatgctatcttttcggaaagaaatggactactccggcatagatcgcggcgtgcacttctgacaatgaagcagcatcaggcaggggccggctcctattccattacatgtgaacgtgaacctctagatcatgcctga

SEQ ID NO: 106726 - DNA, 186 bp, Glycine max
agcttttggtgcaaaaaagaaaacgatgtccaacacgattcatggcttgtaaaggagagtaagatagtgagttggagagcattcaagactggatgaatcattgattcgaaacgcaaatcaaagtgttgcttcttatagactcttcatgtctgggagctaagaccatccacaagagttataactttt

SEQ ID NO: 106727 - DNA, 217 bp, Glycine max
tctatcctattggacttaccctgaatgaatgcctttgatggcccattggagcccatgacccctttctgtggttcgaagctcattaggagcattaatcgaaaaaacatgacatcaccttacccttaaagaatttgagacctccggaatctttttgtgaataattgtgtggggggggagtacgttccattggaacatatgattcttagccctgcttaat

SEQ ID NO: 106728 - DNA, 204 bp, Glycine max
tttttcttcaatgaggtccttcaacggtgattttcagccatggagttgtagtggaagataaaggaaaagaggtgagatgagactgatcgaggccgtacccgaatcaaataaacatgagaatgcagtaactaggaagtgatcctaggtcgtttcccaacgagcagtgacaaaccaaatgttcataatatacttgcagtaacagta

SEQ ID NO: 106729 - DNA, 222 bp, Glycine max
tcttgagatgtgaaccaagatctatcaaatctggcctgggtaggtgtagaaagagccttccttttcttagatgccatctgtaaaatataagacaaaacacaagagattagcacaggttattttcacaaaaacataaaaataaaactgaaattttgctgggcacttagcgcagcaggctgagattagcacgccttatgaaactttactcaggcactaagcgca

SEQ ID NO: 106730 - DNA, 206 bp, Glycine max
tcattcttgtgaatcatctatgttttgatgatgtcgaaaagaaatcacatgattgtcatcatcaaaaagggggagaatgtgaatgtatgtatacatgattttgatgatgtcaaagaagaatcaaacaaggccgcttcaaaaggataagcatttgcttcaagtgtaatacaagattgcttaaacaaacaaatccttgattcaagatt

SEQ ID NO: 106731 - DNA, 220 bp, Glycine max
tcaaccttggggagatggaccatttcaagtgcttgaaagaatcaatgacaatgcttacaaagttgagctgcccggtgagtataatgttagttccaccttcaatgtctctgatttatctctttttgatgcagatggagaatccgatttgaggacaaatccttctcaagagggagagaatgatgaggacatgaccaagagcaagggcaaggatccacttgaa

SEQ ID NO: 106732 - DNA, 192 bp, Glycine max
agcttgtccggaaaaagtcaaacgaaatgtgccggctcaagcaacaatggaaaggcgaggctatacgaaacatctggcctaacatagaccagtaagggatatctagacagtgccgattcttccatattatatgaagaccattcatctatccatgcatgaatgacgagttagaaaatgatgttgcttttactc

SEQ ID NO: 106733 - DNA, 217 bp, Glycine max
tttctttttgagatgtaggacggaaaccgctgctcgtgggactaatgccgctcccgactttattagctctcatctgatgagctctagactccattctctgctcaaagccttccatggataggtcatttctcgcaaaatacacttcctcatataggaccacaacttgaccggatttcattatgatatatcttggccttggaccccccccccccccccc

SEQ ID NO: 106734 - DNA, 199 bp, Glycine max
agcttatcaaatgacattaaataataaacattgttcagtcatattgcatacataattgatagaaaacctaaaaaatcctaaaagtcttatgtgttttccatacaccaccttcctctttatcgaacatatacattctgttgtgcaatcacacctcttgcgatccttaggcactcttcgctgatagtgtatgcttttgttc

SEQ ID NO: 106735 - DNA, 207 bp, Glycine max
actaacaatatgcaataacgagccctccaactggatccccactacaacacacccatgattttccttttcaaagccgttacaaccttcctcaagaaaaagaataaaatgctcaaattcaagaaaaatggtggaagcctgagatctttagtttctagaaaagaatatattaggttatcttttaaaaatgttattttttttaaaccatat

SEQ ID NO: 106736 - DNA, 205 bp, Glycine max
tttttctatctttatgcaacttaagatgctacctgatagcttgaccgtgtcattcaacttgatcggaggagctcgaggtcaggctaaatgacataataatatatttgtattattagtttaatatgattttaattatttgtttcaattatgtgtttttatttttaatattgtaagatcttagtgatttgtgtattaaatataattt

SEQ ID NO: 106737 - DNA, 219 bp, Glycine max
tattcgatttttcaatcagggctgtcctaagcataaggcggctcaagcccttgcttttagcaccccccaataaaagttatttagtattagtattgataaattatattaatatcttgtccagtgtagtggaaactaggagtgttttttatctcggtgaatggggtttgaaccctgttagaggaaaaaagcattttattttttggatgattcctaattttt

SEQ ID NO: 106738 - DNA, 205 bp, Glycine max
ggtcttcatcttctagccaaatggacttaccttgaattaattcctttgatagcccttttgagccttgtttccctttccttgttttgaagctcactacaagccttaagtgaaaaaccatgatattaccatatccttaaggaattttggagctttggaattgttttgggaataagtgtggggggggttttgtttcattggacaactt

SEQ ID NO: 106739 - DNA, 219 bp, Glycine max
tcatgcttttttattgctccaggttgctgcatggaagggcaaaggtctgtatggtggtcaacagaggagcacaaaccacaaacccttgcaacaggtacagatttctgattcaaggccagctgggttaccaagttaaccaatgcatccagtttgccttcaagcttcttagtctcagatgatgcagctgagtttgtagctacctcatgcactcctctaatg

SEQ ID NO: 106740 - DNA, 203 bp, Glycine max
tcaagcttgtagtagccaggtttttgtgtactatgttatatatatatatatatatatatatatatatatatataagggttggttacctacaaaaacttatttttagtaatatttttttctaacatttaataaaaatattactataatattttttaattacatttaaaaaaatattatcaaattataaataaatattattcata

SEQ ID NO: 106741 - DNA, 218 bp, Glycine max
tgattcgttttatggaggaacattggtccaagagatggtgaagggtttggtgagtgggtgacttcaactggtgccatatggttttgttgatttgtgtttgtagagagccaacacaaaaaaggcgggaaccaacgctcgcaggtttcagtttcaaagcggagaacatgaaatcaaaccagatattaggttcccaaggttcttgtgtttgtatcaatcct

SEQ ID NO: 106742 - DNA, 196 bp, Glycine max
agcttaagctccttcaactgcacaaggctcttaatatttgaagagtatccttgtggaaccttcacccgacgaagacactaacaaaaacttatcttctccttcttggacaaagtatggcaggctgggggcaagtaaattttcttcccatcagaccttggatgcaactgtgatcttatacccatatcagctagatctt

SEQ ID NO: 106743 - DNA, 216 bp, Glycine max
tcttagtttcagatgatgcagctgagtttgtagctacctcatgcactcctctaatgactatagcatcatttctggcgctaaactgctgggagttggaagccatcttctcaattaaatttttggcttcagcaggagtcatgtctccaagggctccaccactggcagcatctatcatacttctctccatattattgagtccttcataaaaatattgga

SEQ ID NO: 106744 - DNA, 203 bp, Glycine max
atgctttcaagagagagctctcttgggaagaaagaagcaacaaggtgtgtttagaaggtttgtttaaattatacaagggctttggaatgattcagaactcacccacaactcattccctctctttgcaccccacaactcacccaccccattcctatcagtcaaggtttactcacctagaccctaaacactttaaaaaccaactg

SEQ ID NO: 106745 - DNA, 204 bp, Glycine max
tctttcttgaaatgaggaagtgtggaagggtgagacttcctacttttattcgttgaccacagagtggtacctggagatatgtcgcgggggttaggagaccttggggacgtcaggtggggtgctattgcccaaaaccaagcttgaccaatcccgacccaacccgggcatagtcagtcagtgagaacctgtgatgtacctaaacag

SEQ ID NO: 106746 - DNA, 224 bp, Glycine max
ttgatgatgtctataaagaaatcacatgtttgtcatcatcaaaaagagggagaatgtgaatgtatgtatacatgattttgatgatgccaaagaagaatcaaacaaggctgcttcaaatgataagcatttgcttcaagaataattcaagattgcttcaacaaacaaagccttgtttcaagattcactaaacaccaagtcttgccttaaaacaaagtgctttcaag

SEQ ID NO: 106747 - DNA, 203 bp, Glycine max
ttattctttttggcgagacgctctatctccaacatggcattctattttggaatacttttatggggttcccatggtggcgtggtcgctttacgcggagcaaaaaatgaacgtgtttctactgtcggaggagcttggggtggcagtgctcatggtgcaggaggagggagaagttgtgcaaaaaatacatggataagggttttgat

SEQ ID NO: 106748 - DNA, 221 bp, Glycine max
tgtgctgtgattgtggaaaagacacaagtctgaaaccgtgttggcctcaatattggaagcactttgagggtaggggtagccagactttggtgtatgctcagattgatcattgttggattttctgggcatatgctattggcctaagatagctcctctgtcgactgttctgcaaacttaagttcgaggacttacacgaatattcggttgtggaaagtcgtttt

SEQ ID NO: 106749 - DNA, 205 bp, Glycine max
tctattcttgacaggttcaggtgtaggtgctgctactggtggaggcacttgaatttggttgtcagacctcaaggtgatggcactcacatttttcagattctgcacaatttgtgaaggcaatttgtcagaattttgggactgagcttggttcaactgagtggccatctgccccatctgatttgtcagactctaaatggaggctctt

SEQ ID NO: 106750 - DNA, 226 bp, Glycine max
ctaagctttatattgcgtgtctgggagacaaaggtcaagtggtcgcaatatgcgaagatgatgttccgagtacattggatttggtacgaccatgccctcctgatttccagctgggaaattggcgagtggaggaacgccccggcatttacgcaacgagcataatgtaaacctttacgattttaaaagctctatagttgggcctaggctctagagtttttccttttgt

SEQ ID NO: 106751 - DNA, 207 bp, Glycine max
tcattctttggaaattggaagcggtgaagcaaacaaagacaagacgattcaaaaagataaaagcatcttccaaaattggcccttaatgtcatccatcattgtttactgtgttttttcactacatgatgttgcttaccaaaaggcattgttcttacttaatgatttttctattttgactctctctcttacttatactaatttactatc

SEQ ID NO: 106752 - DNA, 221 bp, Glycine max
tagcttttcttttttatttctaggcacattcaatcagattgcaaagaaaatttggtccctatgagatggcattttgttcaaataaatctaatcttagaatattcaagcttttatcaagaaaacaaaataatgttgagcctttgtccctaaaacattagacaagaaattgttttaaacttagtttgtaggagaactggtaatggtatatatatgaaggggca

SEQ ID NO: 106753 - DNA, 222 bp, Glycine max
tcatatcattttttttcgagggtcgcgatatattacgggactcaatcggacatccgagaaaaaagttattgtcatttgtatttgctcagagcatcaacattcaagttcgagcgtgttgatatattacgggactcaatgagacatgcgagtaaaaagttattgtcgcttgaatttgctcagagtttacgtattctatttcaagcgtctcgatatattacaggg

SEQ ID NO: 106754 - DNA, 201 bp, Glycine max
tctagcttctctttcccttcaatataccatccatgacgcttgagaatcaaagagatgtgcggaaaatttaaactaaactctgagaggttaaaaccttggattcctatttttgctttggtaggttggtcatacatgtacagtaatttaagctaaacgacgcatagtaaatgacaaataatatttttttccctgagtattcat

SEQ ID NO: 106755 - DNA, 218 bp, Glycine max
tcatcttttgctgcatttcggtatcagctcctcttattgaagaacgatatgcacttcttgcattataaatttgctttatcgcggagcaactgtcggcattgggttccttcaacgttagccagatgtttttcggtttcaccatcgactttgtcatatcagcaataattttcttttattacttagtcaatcttccggcgtatggatgtccaactaatgac

SEQ ID NO: 106756 - DNA, 206 bp, Glycine max
tgtttttttcttaccttttggtcctcctcatagttgaggcatgagaaaacatgctctattttcatctcccactccaagtaggcctccggatcattcttttctttaaagggaggaatgttgagtttaataccatcagttcggttttgtctaggaacaccatcattccctcttctcctcctttcttctttattatgatctctgttctg

SEQ ID NO: 106757 - DNA, 234 bp, Glycine max
ccataaaaaagcaagctatttgttttttgggaacccaacgcatgtgggactaggtggccgtcgggcgatggtgcacaacaagttttccacatccacaatgcgcgcataaacccaccatcccctgttgcccacctccaactgagctcacgtactcccacgtagcccatattctcgtttctctcaacaccgggtccccattaatcctctcaagcttccacaacatccaagcagaac

SEQ ID NO: 106758 - DNA, 202 bp, Glycine max
tctttcttcatgatgatgaatcaagttgattaaagttgttttgataatgacagatgatgacaaaaagcctaaagaatgatttcaagattaagtcaacaagttcaagatcaagtttaatttcaagtttcatgagaagaaatcaagaagattcaagaatttagagaagtttgatttcaagattcaagagaagaaatcaagaaga

SEQ ID NO: 106759 - DNA, 203 bp, Glycine max
ggacacggatgttcattcattccaacatgctcatacacgcgaattgaaattgaaattgtgagacgaaataggaatacatataggaaaacgatcggacggtgggaatggaatgggaaagatgagatccacgggtgaggatggatgggaccatttatgctcactgctgtttaatgcacctctttgccctcccccctccccccccc

SEQ ID NO: 106760 - DNA, 203 bp, Glycine max
tcttgcttcttgatgggttttccttcttgccacctgacaaagcatcactgctaagtggtaacattcaattggcagagataggtcttatctcaaaagataatgcttgaggtatctcaaaattgtgatagagttcactagttccttttttattatcacgcagccatttgttatctatgttctttttgcatgaaaattttccattt

SEQ ID NO: 106761 - DNA, 219 bp, Glycine max
tgcctactttttcacatccaagcacagttccaattgaataggagctgaacaagctcaaatcatgggaaacatcatcttcctctgagggggaaagaattttctttggtctttctggccttgcaaacttgtacaagtgcatggaagatcttttgaagttgccactcacccaacaagcactatctcatcatcacaaccaaaaatgggttgatgagttgctag

SEQ ID NO: 106762 - DNA, 212 bp, Glycine max
  unsure (1)..(212): unsure at all n locations
tttttccttactgattccccagtttagacactgttgacattgtcgattcctgatgacactttttgctttctggtttattattataattatggatttagtacaataattcccttttgctaattttatttatgggtagtaacttggctcatcctgaagcattaagaacaggttgacttgttttttatgacanggcagtaaaacacttttatcat

SEQ ID NO: 106763 - DNA, 199 bp, Glycine max
tcaagcttctacttatgtggcagggcgggcttccttcactttcttgtctccaacgcgagctttgaccactgttcttccttcccgcgatgcttcttttcatgtccgcctgagtgggtttatagcctaaaccatacttcccacgatttccttgggtatttatcaggctagttatgccaccgttgtctttgcctaaacccat

SEQ ID NO: 106764 - DNA, 214 bp, Glycine max
tgttcttctatctatgctttctttaaattatttatccatgttaatagcatggttgttttatgttgcaatgtgcatattgaattattcatatgcaacctattggaattgctaaataagaaactcatgttatacatatcaatgtatcatggtagttataatattctcaatggcacaggcacaaggttgtgctatgcatgtatgcacaaagttcttt

SEQ ID NO: 106765 - DNA, 205 bp, Glycine max
tcatgctttgagaggatgctttaatggaggaaaagaaagagaaaaggggggagcacgaaattgaaggaataaaagagggagaaaagtataactttgaagtgtgtctcataagactttcattcatcaaagttacaataagtgttacacatgcttctattaatagcctaggtagcttccttgagaaacttccttgagaagctagagc

SEQ ID NO: 106766 - DNA, 223 bp, Glycine max
ttgaattttcctttaaagtttttacactaaagagaaatcatatgacaattctgaagaagaacattataaagcataccctcttcatcgtctaatgaagcaaaagaagaggtagcaaatttagaacatgttttaatcttgaccttatcgtctttatctaccacgggacaaatgttggctagttcatcatctaaactgccactcttatcattgtctgagtcatccc

SEQ ID NO: 106767 - DNA, 198 bp, Glycine max
ttcttctccctcattttcctataaatagggggaggagggaagaacaaaaatgttcaaccctcctggtatctgagaatcacttaaaattagtgagaaaaattgtttccgtgaagaaaatccaagccgaggcgcttccgtaacgcttccgagacgtttccgtgggtgattctccgaagattttcccccgtactttgacgt

SEQ ID NO: 106768 - DNA, 223 bp, Glycine max
tattgcatttgctgcactttgcgtttggacttctccagcatttgaatggtgggtgacccattttgccacaatggtgacaaggtgggtaatttttatttttacccttacttttactttggtcatttacagtacttccacctttatattgcttggctggtaaagcaccatcaaccacacaatcttgtctcataagccttcgctgctcctgggcttgcaaggcatg

SEQ ID NO: 106769 - DNA, 200 bp, Glycine max
atctttcacacgaatgtccgattcgggcgcataacaaattgaacaacgaaagctctcgagaaattcaaatggtcataacttttaacacagaagtctgattctggcgcatcacatatagagaagctcaaaattgaataacgaaagctatcgagaaattcaaatggtcataacttttaactcgaaagtctgattcaggcgca

SEQ ID NO: 106770 - DNA, 216 bp, Glycine max
agaatctgtcttccgtgtgacaacttacgagcatttggatttgacgagaggtattgttgttgagtttcgagtgtttctttatgtgaggctccatatttggtaattctggataggagatccgagcgtttggatatgaccatagctatcgctctagagctctgagcgtttagttttgagatttgcctgatttgaagatgcgtgagccaacacaccccc

SEQ ID NO: 106771 - DNA, 201 bp, Glycine max
ttcttgaaaaccacgtaaagcacaatcaactaccacaacaaaatgaaaccccacattacaattcttattgatacttttatatggttagccaagtggacaaaatgacccaataatttgataagaaccttcggacattgccaccgcactgattaaaaacttaataagaagagcaacaaactaaggtagagctcataccttgtt

SEQ ID NO: 106772 - DNA, 222 bp, Glycine max
tcttgcgtagctgctcttggtgctcagaaaatcccaaaaacaaatccctcttattactagctattttgaattctttagttcctgaatatacaaccttcaaattgttgctcgttcccctctttcttttctgcaaaaaagaaaatcaatatcaaagaaaacatggatgaaatcctaagaaaatcaatatcaaagaaaacatggatgaaatgacaattaaaaagc

SEQ ID NO: 106773 - DNA, 207 bp, Glycine max
tcattcttattcagtaaacactctgtgagtgattaagaatgcattttcttttaaaaatatattgtttgtgaaaggaaggattaacttattgacaaagaattctttggtcttaatcaaaaaattaattaggggaacccttccttattttaaggagaactggacgtaacccaagagttggggcgaactacttcaatatatgtgtgtgtt

SEQ ID NO: 106774 - DNA, 219 bp, Glycine max
tggctctggcctacttagctaaaaggatgcatcttaagtacaaaggagcatgcgcttagctgagagggactcacttagcgctcatattgccgcaatgaatctcgcttagctgccatgactggcgcttagcatcatggacctcaattatggctataaggaattgcgcttggcgacaataggtcacacctagccacggataagttgtcgcttagcgatcag

SEQ ID NO: 106775 - DNA, 201 bp, Glycine max
tctagcttgttccgtgaagtggtagattataaagttgcaaaacatcaacatagaagaaaattggcagctggtgataaacctatggcatgaggatttttatagattttgtcaagaacccttataatgtagggcgggcccattgcattctgttatttattgatttccctaattgatgggaagattttggaatttgaatttagt

SEQ ID NO: 106776 - DNA, 200 bp, Glycine max
ttgttctttggaattaatgctatgattgcgaatttggtatccatgataattgagctatgcaatcttatttgttgttcctttttttttggttaattggcatatggcacattgttgttcatacttttctctgtctctttaaatgccattgatgttgtttgcagacccccgtgagtcagagactttccggccattggacatgc

SEQ ID NO: 106777 - DNA, 199 bp, Glycine max
atcttatgcgcatacttcttcacgaacgttcacttgcacaagacattcttataactaagaaaaatgcacccatatacaatcaaggcaccttcgttacctagattctttacatgtacttccaaggtgtatttgttacctacatcacacacatttcctttgctaaattcacatacatgcatactctaaacactttggctat

SEQ ID NO: 106778 - DNA, 176 bp, Glycine max
  unsure (1)..(176): unsure at all n locations
gcattcgctgttccctccggtaagactaagcttaacttaaatagcgtgatgacccatcatatcccaaagactaaaacctcgcaatccatccctggtaacgtaactatttattcacctaacaacacacacaaatgggtgatcanaccaagagcatgcagcacttaagcattgaaaga

SEQ ID NO: 106779 - DNA, 198 bp, Glycine max
agcttctcagatctggtcatggaaagacttggcaactgccttcgttaggcagtaccaatacaacacggatatggctcctgattggaactaacttcagagcatgaccaagcgggaacatgagtccattaaagaatatgctcaaaggtggaaagacctagcagcctaagtcatcccgcccatgactgagagggagatgat

SEQ ID NO: 106780 - DNA, 218 bp, Glycine max
tgcttgttgagcttctatggaggctggatctttgagcttcaatgaggtcctttaatggtggttttccaccatggagatgcagcggaagacaaaggagaagaggtgagaggagacgccatccactagggaataagccatggaagaaggagcttcaccaccaagataagccttggataagaagcttggagaggaggcttcaacggaggaaaagaaagagg

SEQ ID NO: 106781 - DNA, 198 bp, Glycine max
atgctttgtccaccaaaaaaaaaatcactaaaaaccgttttaaggtccaacgccttaaacgatgctctttgcttttatcagttaacatggaccgttcaaaagcataaaatcaacatgtaaccttaccgcttttgcgagaactacgtaggtctgatttcctcttcgatggaggatatgtaggagcaaaagccccgcttt

SEQ ID NO: 106782 - DNA, 218 bp, Glycine max
tgcttttggtttaaatatgatttatacatgatttaggacttgtaggatccaatttgagaaaaattggatgtgggcaagatggatttcgaaatctgccaaattgttcagcaaaaagctgtcaaatttgtgcagcaaaatttttgttcttgtgcagaaaatgcttgtgcattgctgattatgggaaaggtagtaaatatttggttctggacattttctaa

SEQ ID NO: 106783 - DNA, 201 bp, Glycine max
tctagcttagttcatacccttggcatttaatttaacaacctaagtttatcatgcacctaaaataatggttgaacatgtgtaaagatcattacccattcaagcttcaaaatcacatagaatagtcattgtgacatttcattaaacagttggtgtgtgcatgttaaaacatgtataaatgagggataaggagcaatatgacat

SEQ ID NO: 106784 - DNA, 215 bp, Glycine max
tgatatgtggaagtatagaagggtgaaacttcctgcttttattcgttgaccacagagtggtacctggagatatgtcgcgggggtcaggagacctcggggacgtcaggtggggtgctattgcccaaaaccaagcttgaccaatcccgacccaacccgggcatagtcggtcagtgagaacctgtgatgtacctaaacaggcgagctcctggcagtca

SEQ ID NO: 106785 - DNA, 200 bp, Glycine max
tttctagcttagcacgtgaagacatggcgcttactgcaagggttgcacttagcgggtggaaaactaaaaaattattctaagtctttgctgtccatcttttcacctaggcttaaaaagcccccttggtgactactaaaccaactgaaaaattaatcattatcataagcaactatcctaattacatgcaagagattcaaaat

SEQ ID NO: 106786 - DNA, 207 bp, Glycine max
tcttagtttcgcctgatgaggatgaatttgtggctacttcatgcactcctctaatgacaataacatcacttctggcactaaatttctgggagttggaagccatcttctcaattaaatttctagcttcagtaggggtcatgtctccaagggctccaccactggcagcatctatcatacttctctccatgttgttgagtcctttataaa

SEQ ID NO: 106787 - DNA, 196 bp, Glycine max
agcttctacttatgtggcagggcgggcttccttcactttcttgtctccaacgcgagctctgaccactggttttccttcccgcgatgcttcttttcatgttcgcctgaatgggcctaatacccaaacccttccttccaccaattccctggggttttaatcaggctagttatgccgccattgtctttgcctaaaccca

SEQ ID NO: 106788 - DNA, 215 bp, Glycine max
tgctcaattaactaaatttgtttttggtaaaaaatgaagtaaatatgataagggaccacttaggatcatcttgaaaacaagtataaaaagaaaggaacttgacactaaccacgacctgcagatagaaccaaagttattcaaagaaacttgaccctaaccgcgacctgtcagtagaaccaatgttatcaaacgagcatgaccctaactacgacttg

SEQ ID NO: 106789 - DNA, 190 bp, Glycine max
tttttattaggaatgccaagcttgatgagaataggggcaatatcacccaaaccattctataggaatatgaattggatgaattggaaaaacctttaacttttttaaaagattataaaaatgcctagatttattcaaagtttcgactaaggtaaagaattttttgcgtggcgaaattgtaataagaggggta

SEQ ID NO: 106790 - DNA, 223 bp, Glycine max
tgccttatcaactatccaccacaaagagatcatatttcttgaatgactagttgtccacatcatgatcacgtcacgctctacacaatttcaccatgacctaaacgagaatgggcttcccctctccttctatactcacaaacaagttttatcatacaagaatcaaactcaacttatgaaaacacatgtatcatgcaccacaacaacacatcacaacacacaacaa

SEQ ID NO: 106791 - DNA, 203 bp, Glycine max
attcttttatatttcacacttgttacatgccaagatgtatgttgtcctatacctccaagcacaaccatcgtcatacacaaatgataattagctttggtgagtttgatagaaatgtcttgaagatagctcctttgctcacatgatactgctgcaaagcatgttatacttcttctttttttttttacaatgcatcccttcaaaga

SEQ ID NO: 106792 - DNA, 223 bp, Glycine max
tgcaatcgattttctaaagttctaaacattttataacagtctttaaaaatttgaatttaaatttcaaagcctgtaatccattatagcttgtgtgtaattgattgccacacattaaaattcaaatttcaagactgaagagtcacaactcttcagaagctaactgcataatcgattaccacatttatgtaatcgattaccagtagggaattttcgaaaataactt

SEQ ID NO: 106793 - DNA, 202 bp, Glycine max
  unsure (1)..(202): unsure at all n locations
tcatgcttgaatgagaactcatgagaatcaaagagtgtctccccactagaagggagggccgggnaggggnaggccgaagatataccagggtccagttggaccccatgggtaccaggttcctaactacagaaacgcgtgtgcctaaccggatggggcacttttggtttatggcaaaggggctggcctgccattggtctgaaaa

SEQ ID NO: 106794 - DNA, 213 bp, Glycine max
tttgaattctgttagctattcacatagaaatccaattaggtgatacaacgtttttcaaagctaaggcaagggtggacatgttacataatatatattactcacttgccctccataatctttagaaaccggatgcactgctaatgacatcactggatcaagaacatctataaaaaacattgagtattaaactgaaccgcgattgaaagtatctac

SEQ ID NO: 106795 - DNA, 202 bp, Glycine max
tgcttatttatactttcttaccaaaatggaactgtacagtaaagggaagaagcccatttgatgcataatacacaataatctagtggtcaaagaagtgtaacacgctatatggaatcaaaggacaatgttgaatataacgatcaatttcagatatctgagaagatgataagagaagaagcggtaaatgttccaagattaatat

SEQ ID NO: 106796 - DNA, 221 bp, Glycine max
  unsure (1)..(221): unsure at all n locations
tgctaatttggttccgaaaatcatttcattagagcaaaagggtttcattcaaggaagaaaattaaagagtgtattggcatcacatatgaaatgttcaacatgttgcattctaataattttggtggtaatatggtgcgaaaaattgatgttaggaaagcttttgacacattggattgagatttttttnctaaaggttcttcaatcttttggttttaatttga

SEQ ID NO: 106797 - DNA, 215 bp, Glycine max
taattattccatctatggattgaaacaagcctcctgccaatggtatttaaaatttcatgaggtcatttcttcatttagctttgaagagaatgtcatggatcactgtatataccagaaggtcagtgggagtaagatttgtttccttgtattatacgtagatgacattctgcttgcgactaatgataagggtatgctatatgaggtgaaacaatttc

SEQ ID NO: 106798 - DNA, 202 bp, Glycine max
tcttgcttagacgaccttgtttaagttgagaatactttattatttatttggacaagtttgaatatgatgtagaagaaaatgaatgtgagcctttttcccctttgaaagacttgtaaaaaaaaatgttttaaaaatacttttaactaatatttgaattttttttcttcttattagtatatatgtgaggggtagagggtgtcac

SEQ ID NO: 106799 - DNA, 222 bp, Glycine max
gctttgtgttttataaagcttgaagatgttaatgtaaaaaaaagtcgaattacaagagaattgtcagtccactggacaaaagaaactttagcaaattgagtgaatcttagctttgctaagttagtgagtttcattgtattcaagcttattgtgtaaacactctttgagtgattaagaatacattttctataaaaaaaatatattgtttgtgaaagccaggag

SEQ ID NO: 106800 - DNA, 199 bp, Glycine max
atcttgctaagaaggtggcggatcttgaggcccgggcgaaggagtcagagtccatgctaaaggagaccgagctacaggctactgcagagagggaggctatcaagaagcttgaagatgagttgctaattttcaagagggaggccatggagcaccatgaaaagggcttcaacaaggtcgttaggtaggccgggttcttcgg

SEQ ID NO: 106801 - DNA, 199 bp, Glycine max
  unsure (1)..(199): unsure at all n locations
gtagcttgggganccatggaagctnctaatatnttcccaantgtttggggtgggccattctgggaaggccttgattttctcagggtccacttggaccccatttctaccaactaccaaacctaaagaaaactatattatctacccaaaaggtacacttctctatatttgcatagagggtggttttcctaaggactgaaag

SEQ ID NO: 106802 - DNA, 218 bp, Glycine max
tattcttttcttttacagattgcaaccaaaaatacctttctatcttcattaactagcccatcagatttcctcccttgaatattggcatttcaagagttctccgccaatttcttctttgtgaagcattccccttattctctcctattgaattgtctcgcaacctgccctttggcgggggtgtgaaaaggcctatcgaatgggccaagggtgcatcttcc

SEQ ID NO: 106803 - DNA, 228 bp, Glycine max
tctgcttgcctgtctttcttgtggtgttggttagcttttggggttaaaacctccagttttggagccttttgaaaccttgaaacccaacccccctcttttaaaatcaataatggttaaaatggaatatggagttttgaacttataatgttttatgttgtttttgaaatacacattggagaactttacttttatgcttttccttttcttagttgttcacaatattttctt

SEQ ID NO: 106804 - DNA, 218 bp, Glycine max
tcataatatacatgccaattggttggaattaactgagatgtctccttatgtgatcaagtacaagaatggtaaggaaaacatagtggttgatgctttatccgaaaggtatgctttgcttacttctttgcaaactaaatttcttggttttgagcttgtgaaggacttgaatgctactgattctaactttggcaaagtatggaattcttgttctaaacatg

SEQ ID NO: 106805 - DNA, 199 bp, Glycine max
tcaagcttagtgcttgattaattgtctctgcgcttaatttacgttcatgcttaatgatcatttatgagtaattggtgtatgtgttgcttaatcacataacgaatgtcttatgttaaatttctcttaataatttaatttagggttggattaagtggttaaactgataaaggataaattctcgcaacctaggataagagac

SEQ ID NO: 106806 - DNA, 215 bp, Glycine max
tttgaacttaacctcttgattaaccaagaaatcatcaactgcttcgaccttcgatgaccccataatgtattgagggggacttggtgatttcttgccgaatgtaattcataaggtgagagtcctatactcgagtgttgggaagtgttgtagaaccattctgcccatagcaagaaccttccccaagaagaaggatgtttatgaacaaatgctcgaag

SEQ ID NO: 106807 - DNA, 199 bp, Glycine max
tctggcttttaggagtagaaacatgggaccacctcattttatttcaaaaaggaagtcatatctagaccaggtctgagagaccatacaagtttcctaacgatttctaattatgagggccattaagtctatcatatgctgacgatatccgataatcccatgaatctcttcgggggcggagtaggtgtctgccatccccttg

SEQ ID NO: 106808 - DNA, 215 bp, Glycine max
tgcttgataagcttctatggagactggatctttgagctttataaggtccttcaatggtgatttttacccatggagttgcagtggaaaataaaggaaaaaaaataaaaggagggcccttccttaaaaaatagcccttggaaaaaaaacctcacccaccaaaaaagtgccttggataatgaccttaaaaaggaaccttcattggaggaaaaaaatga

SEQ ID NO: 106809 - DNA, 155 bp, Glycine max
cctgtttgcattcttgcttggttaccccatgtggaatttgcttacaataaagctgttcatagcaccactaattggtctccttttgaagttgtttatggttttaacccactaactccccttgaactttttgcctatgcccaaagtttctgggtttt

SEQ ID NO: 106810 - DNA, 215 bp, Glycine max
tctacttatgtggcagggcgggcttccttcactttcttgtccccaatgcgagctctgaccactgttcttccttcccgcgatgcttcttttcatgtccgcctgagtgggcttatagcctaaaccatacttcccacgatttccttgggtttttatcaggctagttatgccgccattgtctttgcctaaacccatcccgggttcataaccgttcccca

SEQ ID NO: 106811 - DNA, 378 bp, Glycine max
agcttgcataaatcatcaagttcttttacaaaacaaacaaaagattacaagaattattcataaacattgtagttaccaaaaagcagcttcaaaaataaaatttcctgcagggttgtatccttttattgtttttcatgttttttctttgttgcatacatttttaagtttacgaaaatcatattttagatagaataaaattattccctcactaaaaataattttcaaacaagtttaaaaatgaaaagcaacatttctcttcaaagaaaatataaatatcaaaatatgttattaaatagaatctgacaatttttcaaaacaaatttgagaagtagctttttattacataaacttggttcataatcgttttttttctttaca

SEQ ID NO: 106812 - DNA, 378 bp, Glycine max
catgcagcttggagggttgtggggtttcttgctgataggaacgaggatgagggttacgtaagagtgcgtgagctcacttgaaaagtgggcaactggggatggtgtgtttatgtttgacttttggaagtgggagagttgatttgcgccatagcccgatcgccacctattaccacatatgacgggtgccccataatccaataagcttgatgtgagaaagcgtggaagagtcaatcttcctacttttgtttgttgaccacagagtggtacctggagatatgttgcgggggtcaggacaccttggggatgtcaggtgggtgctattgcccaaaaccaagcttggctaatcccgacccaacccgggcatagtcagtcagtgag

SEQ ID NO: 106813 - DNA, 270 bp, Glycine max
  unsure (1)..(270): unsure at all n locations
ntttatttttagatgatgcagctgagtttgtatctacctcatgcactcctctaacgactatagcatcatttctggcgctaaactgctaggagttggaagccatcttctcattaaatttctggcttcagtatgaatcatgtcttcaagggctccaccactggcagcatctatcatacttctctccatattactgagtccttcataaaatttttggagaagcaactgctctgaaatttgatggtgagggcaattgccacatagttttttaaa

SEQ ID NO: 106814 - DNA, 380 bp, Glycine max
  unsure (1)..(380): unsure at all n locations
agcagctttaacctaantctaattttctctaatcctttataataacaatcaaaatctataggagagtacacaagttcagatcaagataaagagaacataatttatcacacatttcggcaccaacgactataatcctttcaacataaactcaaaaaccagataggtcctataacctaatcagttgtctaagtgggcggagtgagatgaacatttttagtattagaaattgaatttaggcaaggtatttaaaaaaagtagtgaaagaaaaaaattactgaaagatgataggaattgatcctcttctcatttacagtatagtgaagtgacgaaagaatctgttgcgattggagaccctcgcatctcttcttctgcacactctc

SEQ ID NO: 106815 - DNA, 164 bp, Glycine max
atgctccataaacccccaacaaatttttgcatctacctacacctccaatgctgccaactcatttttgtccatcggattcgcacacatgctttgatgcttactgttccaaacatgactcttaacagcttgcaccgattaaactcgttatccgagctaaaattgca

SEQ ID NO: 106816 - DNA, 374 bp, Glycine max
ctttcttgttttgatctttttctttttgtatttccttcccccactggaatggttctgttatcatggccttgaccagaggggcggtattggtggaatacccctgaatgaagcgcctacagaaccccgcgagtcccaagaaactgcggagagctctatttgtcctaggtgttggccactgatcaatggtccccaatttagcagctcctggtgccactcctccttgtgacacaatatggcccaaatattcgacctgggactgcgcgaagaagcatttatataacttaagaacacctttattgtcaagaagtacctgaaatatggtcgttaaatgttgcaagtgctcacgaaaagaggcactatagattaagatgtcg

SEQ ID NO: 106817 - DNA, 393 bp, Glycine max
ataaaactagcttctcaatgcgctttggatcactcctttatgaaaactatatcctcatgcacgaaaattgtttatagggtgtactatcggcattgtgttccttcaacgctacgaagaagtttctcggcttcaccatcgactttgctatatcaccaataaattttctttctaccttagacaatccgtcggcgtgtggatgtccaactaacgacttcgccaattcatgattatgaaatccacagatcaaccttcaccgattcaacccttcccctacacgcactggtttcccacgaagcctgaacggacaaccacatgttctactcccggggtcttttctaacgaatcctatatttctacacttgtacataccactactttcacaccccattaaca

SEQ ID NO: 106818 - DNA, 376 bp, Glycine max
gcagcttgcctacagagatctattatttatttttctgctgaaggaaccagttccgctcccgaatatgacagccaccattatatgagcgctgagcaccagcaacgcttcgaggctgtcaagggatggtcatttctccgggagcgacgcgttcagcttaggaacgacgagtataccgacttccaggaggagatagttcgtcggcgatgggccatcactggttacccccatggccaagttcgacccagacatagacctcgaattttatgccaatgcttggcctacagaggagggtgtgccagatatgcgatcctgggtaaggggtcagcggatcccattcgatgcggatgctctcaaccagttcctgcgatacccttta

SEQ ID NO: 106819 - DNA, 293 bp, Glycine max
atgactacttaatgggacctcttaggtcaatgacacattcaactcctataaaataccaacctatggtcgcacgaataacacatatctagaaaacgaagtatggaattgatggactcgcaatttagaacactaccaaacttagctccctatgcttccctattggtcttatctacttctctcaacgctccacacttttgaccctattccctttaagactcccctatgatgcctatttataagcaaaaggccactatggggctgttggatacttgcccagagaacttaacaattgt

SEQ ID NO: 106820 - DNA, 330 bp, Glycine max
  unsure (1)..(330): unsure at all n locations
acccaggatgacggggctcataccctagcggagaggccccactgccgcttttacaaagaatgcgcggcatgtccaaggccgaaaaacaccaataaaggaccccattgaagctcaaagatccagcctccctagaagccccacaagcaagtaaccatcagctgacgcaccacagaaaccaaggcaacaagatttccctcaagcaccttactcttacccgacgaagaagaatctgcggccacatcacggactcccgcaaggacaaaagcatcaacgcatgcactgaacagangggagttggaaaccaccacctcaaacagagccccaacctca

SEQ ID NO: 106821 - DNA, 370 bp, Glycine max
ttgcttgataacacgcattttctttcttttttgaagcgaccttactgaatcccggcagacaagatacgtcgatatgtggagatgtatgtcatgttccgcgctcacatgatctgccatattgacttttgagtgacgctgacgggcggaaatacccgagtggttattcatataaagattggctgcctgaaagacgaaaagccctctagcacgcagagactaacgtcgtcttttgcgcccttcgtcaatcatggacgacaagccccttgacatgctgaaatttacgtcttccctccccctcacaagaattggcatactgacttttgaatcacgctgacgggcggaaatacccgaggggttatccgtataaact

SEQ ID NO: 106822 - DNA, 315 bp, Glycine max
atattatccctatgagattctgtagagtaacggcgatcaaataggccatatcttggattataagcgttgaacccatctcatgctttcacatgatggctcatccagtcaaagttgaaatatggacagtaactcgttttgcaaatattggtgctaaaagactaatcacatcacttgcttcgtctactggcaaacatatgtatgactgtcgatgaccctggtacttccagttacaccttgacaaagatcgtatggaccctgttgataaatcgaattggattcaaccccatatcctgcgtaaaatatcgccatactatc

SEQ ID NO: 106823 - DNA, 372 bp, Glycine max
  unsure (1)..(372): unsure at all n locations
agctttgaatgctctatttatgtagttgacaagaatatcttcagactgatcaacacatgcacagtggccaaagatgcatgggagatcctgaaaaccactcatgaaggaacctccaaagtgaagatgtccagattgcaactattggccacaaaattcgaaaatctgaagatgaaggaggaagagtgtattcatgacttccacatgaacattcttgaaattgccaatgcttgcactgccttgggagaaaggatgacagatgaaaagctggtgagaaagatcctcacatcccttcctaagagatttgacatgaaagtcactgcaatagaggaggcccaagacattngcaacatgagagtagatgaactcattggt

SEQ ID NO: 106824 - DNA, 399 bp, Glycine max
tggggctgctgttctcgtaatttccgtgagctttggggtgtttgaagtgagggggaagagttttgggtgaagaaaacgttccccctccacccctttatattttcgtacaggggttgctcgcccacgcgagctcagcttgcccaggcgagctaacctgtactttctttttcttttttttttttaaaggggaacattaaccatgtcccctttttccttatgggttagcatttgcccacttgacctacttaaattagaattaggtgtctattactcttttaaaacaaacaattgtatagaaaactgcgaatgcataagatactgggttgccttgcatcacgttcttcgcttgattatcgccgggaatgtgatacgatcgggcgggcgcgatcctatcctcca

SEQ ID NO: 106825 - DNA, 373 bp, Glycine max
  unsure (1)..(373): unsure at all n locations
tncttcaagaaaaggcttttcttccctttcaaaatctgatttcaggcttaaatgggtggctntgttcgtgcttgtgcgcttagcgtaattctgaaccgcttagtgcacattattgaatttcggcttagcgcggcagtgaacatgtatagcttatccttcttccatattcttcgtcgcgctctgccaaggagtgttgcgctccgcggatggctcactaagccgacaggttggcttagcgagagggtgaaaatcagcactatacatactcgcctaattaacctgaaattggcagaaaataattattaaacacacaaaatggaagtactaagtatttattacctatctttacccaaaagtaattacaacactaaaa

SEQ ID NO: 106826 - DNA, 396 bp, Glycine max
tgagaatgtacaatggtgatactttctgcctttattcggtgaccacacagtggcacctggagatatgtcgcggcgtgtaagagaccttggggacgtctggaggggtgctattgcccaaaaccaagcttgaccaatcctcgaccaacccgggcatattcagtcagagagaacctgtgatgtacctaaacaagcgagctgctgtccgtttatatataaaagaattaagaccacataccatcgatgctcgtgtggcggctggccacctgagaactctgagtgttatatgggatatggcctctgtaatcgattaccaagatgggtcatcgattactaagcttaaagtgaacactggaaactaaatggccttggtcatcggcaccaggcgtgctatcatta

SEQ ID NO: 106827 - DNA, 100 bp, Glycine max
agcttgcttgtgaggctttcttggtatgctggatctttgagcttcaatgaggtcctttaatggagattttccaccatgaagatgtagcatacgaccaagg

SEQ ID NO: 106828 - DNA, 144 bp, Glycine max
tgcatacaccggaacaacaataatggttgcatttatttttgggatatgatttcacaatagaggatattccgggaaaaaaccatttggccgtcgatgcactctcttgaagtatgactttgtcatggtctgagcccgtgaattcat

SEQ ID NO: 106829 - DNA, 367 bp, Glycine max
agcatatgcatataaaattgtttaagacaattttttgtgggttacactgatcacatttatatatatacattactggctatagtatattggcatttaatttgtattaatagttcacagctaattgtttgacgcgcaaaatttttagctagctagtaactgaggacgtgaggatgaattgcgcaaaattaatcaggctaaacaaatgtagacaattttgtgtgtcttactaatcatatcacaattatatacattgtggtggagcaggtgagagtgaaactttctttcagaaagccatccaacagcaagggagagccactatcatggacaccatccaagagattcaggagaggcacgacacgatgaaaga

SEQ ID NO: 106830 - DNA, 264 bp, Glycine max
tcagagagaccaagctgcttagaataattgggataccaattgaaaacctggtgaaccaatcacttaaatcaccccgaaggatgggaatttactgggatgtaattgaatagtataaaaatctcattgccattccccttccaaacacaggcttgataggctatggtggctaagatcagcatcacaggcataatgtttctctttatattggaaaggggaattgtgggctaaatcgaatttgttctgagactagataaaaaccccccc

SEQ ID NO: 106831 - DNA, 364 bp, Glycine max
agcttctaccattttgatggttttaacatttcctttgccatataacaatttacactgaagggattctagtctttggcattgagatccatagactcttgggcgcgattaggagagatactcaaagttgcattcgctatatgcaaaaccaggcggaaaaccaaggttgatctaatgtatattaaacaaggaaaggacctccccctctaaaaatatgtcactaggtttaacaacgaaggtagggaaatgtttggcatcctcccgggcatcatccttatgtttggaactcatatattaaaggaaggctcatgtgcccatatgtcaatagtcaagtttcctcttgaggagtccctcacacgagtggaga

SEQ ID NO: 106832 - DNA, 379 bp, Glycine max
  unsure (1)..(379): unsure at all n locations
agctntgagaaaaggatcctcctaaagcaccacactatctgttttcacaaaaaactaggagagaggattctaggcttgcagaagtgtcactgcctccgcaaaccagtaccctccctcttcagttcacacaaccctgtaataaagatgagtattgtttctcttgcttacctgcaaattacatcaaaacagcattaaagaagaacaactataacaacactgaaaaacatgtgaagttcgctgaagttatcattcatgtcatgccattatttgagcaattaaaacaaataagctttactcagctagacaagaaattatgtgcgtgtgtgtgtattatttagaccaattcctattatcctatagtattaactattaaatgaca

SEQ ID NO: 106833 - DNA, 196 bp, Glycine max
  unsure (1)..(196): unsure at all n locations
gcttaacctaataaaagcctaagagatggttaacctaacttattacaaccctcactaacctgattttggcaaaagtgatcttcgagtcgtgaagttcgagctagttcgagtcaatatacttcttcactctttcgtcgggtccgagtcacgagcttttagccgtgaaagaagatgaaaatgttgntgaaaacttcaa

SEQ ID NO: 106834 - DNA, 366 bp, Glycine max
agcctggcctcaaacttcctgtttttttgctgccacacactccagcttttagaactcgcccctactggaagtccaagataacagaaaggaatatccagctggctatagttaagaaattgagctgcatccctacaccaaccctttgattttcctatgcaaccgaagggacttttagcataatttatcttgaggccagaaaccatcctcaaacacctcagtatagattgtaggactctaacattatccgtagttacagccccaaaaaacagagtgtcatctgcatattggagaacctaacatcctccttttgactccccacttgatagctgctgaacatattcttagaaatggctggcctcatcaaac

SEQ ID NO: 106835 - DNA, 372 bp, Glycine max
agcttctcgacatatgatgctctccttatcggtcatccgtgtgaaaaggtatgaccatttaaatttcgcgagagttttcgatgtttaatttcgagcgtatcgatatattataagcctgagtcgtacatccgtgttaaatgttatgaccatttgaatttctcaagagcttctgttgttcaatttcgagcctctcgacatattatgcccccgaatcggacatccgtgtgaaaagttatggccatttgaatttctcgagagtttccgatgtttaatttcgagcgtatcgatatatctttagcctgaatcggacttccgtgtgaaaagttatgaccatttgaatttcacgagagattccgttgttcaattttgagt

SEQ ID NO: 106836 - DNA, 376 bp, Glycine max
agcttgtagaatggctagacattatacatgtcagggtttggtttggttcaaggataaaagggatgccccacattatttccatgacacaaaatgcaaaaatgatgatttggaaattttatgcaaaactggtcatgcatgcacctatgtggacgctcaactgttaaatttctatggtcatgtgatactagggctcaggattcatttcttctatttttagtcaacccaatgtttccaaaatatgtccttttatcaatttgtgcattcatccgagtccatttcgggcgtccggggaaattttcacagcattcacccctcaggtgtatacacattttttttaaaaaactagttatgaattttttttcaaagaaaagttgga

SEQ ID NO: 106837 - DNA, 402 bp, Glycine max
ttagcttggtttcgaatctatttacggagcttcttcaggaggtgagcttacttacgacaggggtgtgtgtacctaagctctcacctcctcacgacgttttctccaagaagcttctgagggaagttttctcatcatagcctctgaaggaagccacctagactatacatgaagcatgtgtcacacttgtcgtgactttgatgaatgataatcctgtgagacatacttctcagttcgccttctctacccctgttattacttcaattacctgcttcccccttctatctgtctatacctccattagagcatccatttcacgccttttattcaggcaattcttggtggtgaaactccttgtcctggcatattccctaggggaggagcctgaccttccttgatccttgc

SEQ ID NO: 106838 - DNA, 375 bp, Glycine max
agcttgagatgaggaagtgttgtatgttgaattttcctgcttttattgacgaccacagagtggttcctacatatatgtcgcgggggtcatgagaccttggggacgtcaggtggggtgctattgcccaaaaccaaacttgaccaatcccgacccaacccgggcatagtcggtcagtgagaacctgtgatgtacctaagcaggcgaacccctggctgtcatcagataaaaggaacaaagaccacaaagcaagggggcttgtggtggctggccagctgtgaaacttgattcatatggcgagatatggtctctggtaatcgatcaccaagggtgggtaatcgattacaaggcttaaaagcgaagacaggaggctaagat

SEQ ID NO: 106839 - DNA, 366 bp, Glycine max
  unsure (1)..(366): unsure at all n locations
agcttgaacctattnttcttttttgcttcctaacagaagggctctctctagacctcattcatgtgtaccgttgaactgcaattaagatcgggccaaccaatattaggtctgcggccattctattgcaacttgcacgagtgccaatcattacttagacaaagcaatccatgtgtgtcttatcaaacttgcaagacaagaaccattaaaacctaatagtgacaagaaacagtaagcctttgagcccaagatgcttccagccaaccgttcaattttagattcgtccttgacgcaattatgtgaatccattactaccgcttatgtgcgtgtcaaacaaaaatataatttactccttacattttaaagagt

SEQ ID NO: 106840 - DNA, 159 bp, Glycine max
caacttgtttttgactttttacttaataaaatggacttccatgactgcaaagtactccccattccatcttggaaagtgaaatattgattggttttaagctactttgaatgctatttgctcatgttaaggtgtatgtgtcccacatttttcaataaaggt

SEQ ID NO: 106841 - DNA, 370 bp, Glycine max
  unsure (1)..(370): unsure at all n locations
agctttggagtttccaagtgcctattcgtcttcttcttttggccagncttcttctggcttcaattcatcagtgggctttccttttgtgtccagcatcttgggatgttcccagcctttgatgacagctttccaggttctgctatccagtgatttgaggaaggccaccatccttgctttccagtattcatagttggttccatccagaattggtggtctgttcactggtcctccttctttctccatgttcatcagaatttatctccctagatctcactcagtgatttcgagcgcctgctctgataccaattgaaattctgatactggggacagatgtcgtacaggatgtcacgacatcgcgcttcagaacatg

SEQ ID NO: 106842 - DNA, 371 bp, Glycine max
tataagaacaaaattgccttaatcatttccaaatatgcatgtgaattaagacgcatcaacaagaatcaagccaaggctattgtgcaagcaatcaatggggcaaaacacaccaaatgattataatgatggatggctcaaattctcacaaaggtaaattcatcactttcaaattgagctttcaaaactatcatgacatgtagagaagaatcaaggatttcaagtcacaaaatgtcaagaacttttattttcaaaacaattacccatttcttgaacatatcctataattcaaagaaaaacatgcaaagtcgtacgtgcacacgaaattgatccaaaatattaaactgaaaatccgacgaaactaacagctttaa

SEQ ID NO: 106843 - DNA, 356 bp, Glycine max
agcttctacatcagacctcttttttagtgctggaactacttcacacggacttgatggggcctatgcaagaatgaagccttggacgaaagaggcatgcctatgctggtgtggatgatttctccagatttacctgggtcagttctatcagagaaaaatcatacacctttgaagtattcaaagagctgatgctaaaactttagagagaaaaagactgcgtcatcaagagaatgaggagtgaccatggctgatagtatgaaaacagcaggtttactgaattctgcacatctgaccggcatactcatgagttctgtgcagccattacaccacaacagaatgggatcattgagaggaaaaac

SEQ ID NO: 106844 - DNA, 372 bp, Glycine max
agcttaaattccaaatttcatttgaaactaattcaatagaaacctaatctaatgttagcaattggactttaatatcaaagcactccatttattataattaaaataaatctaaaacacttaaataaaatttaaatttgattgcatgtttatagttgacacattgttattccacttggatcaaatgcattttggggatttctttctcactttaaggttggacttataggtattgatctcttttcaagcaaaatcaatatctcctttactttcttagttcttgctctagtttcttggcctcctagcctaattaggttgtcccattcccaagctcttcattttcccttcatctatattagactccccttaagtgta

SEQ ID NO: 106845 - DNA, 416 bp, Glycine max
aactggatgcgttggcaacttggtaacccagctggccttgaatcaaaaatctgtacctgtcgcaaggctttgtggtttgtgctcctctgctgaccaccatacagacctttgcccttccatgcagcaacctggagcaattgagcagcctgaagcttatgctgcaaatatttacaatagaccttctcaacctcaacagctaaatcaaccacagcagaacaattatgacctttccagcaatagatacaaccctggatggaagaatcaccctaaccttagatggtccagccctcaacaacaacaacagtctgctcctttctttcaaaatgctgctggcccaagcagaccatacattcctccaccaatccaacaacagcaacaaccccagaaacagccaacagttgaggcccctccacaac

SEQ ID NO: 106846 - DNA, 374 bp, Glycine max
agcttcatgatgatgaatcattttgattcaagtagttttgatgatgataaaaagcccaagagaatgatttcaagattgagtcaacaagttcaagatcaagattaaatcaagattaatttcaagtttcatgagaagaaatcaagaagattcaagattcaagagaagtttgatctcaagattcaagagaagatgaattcaagattcaagagaagaaatcaagaagacttcacaagggaagtattgaaaagatttttcaaaaaacaaacatagcacagttttgtttttcaaaaaggtttttctcaaaattttctaagttccagagtttttactctctagtaatcgattaccaattacctgtaattgattaccagtgg

SEQ ID NO: 106847 - DNA, 277 bp, Glycine max
accacaaagtggtgcctggagatatgtcgcgggggtcaacagacctctgggactgttaagtggggtgctattgcccaaaaccaagcttgaccaattccgacccaacccgggcatagtctgtcagtgagaatttgtgatgcacctatacaggcgagctcccgtcaggctacagattaaaccaacatataccacatccgccggatgcttgtgtggcggctggccaacctggaaccttgtattatattgtgagatatggcctctggttatcaatcaccca

SEQ ID NO: 106848 - DNA, 368 bp, Glycine max
  unsure (1)..(368): unsure at all n locations
agcttcaatattaacatagaattcccaagtatatgtagatagtttctgcattctaccaaacaatttttttttagaaataagcaataggatgcttgttttggcttaacacaacaccaactcccctccctgaagcatcagtttctaatacaaaaagtttattgaaattaggaatagccaagacaggtgcagaagtcatggctatcttaagtttttggaaagcctgngcagtagcttgaccccatttgaaagagtccttcttcaatagaacagtcagaggtgttgccgtggtagcataggtcttaacaaatcttctataataacctgtaagtcctaggaagccccttaatttctttagattcataggctct

SEQ ID NO: 106849 - DNA, 380 bp, Glycine max
cagcttggaagctcttttgaagagaaaattttgatcttgtaaatgccgaacaaagaacgatttgtatgagtctatttgttaccctatttgctaatcgattaaatttgttaaaactataaatacctttgcttattctcactaccagaaaaaatgattttaacgagggttatttttggccttaaggagggtttaaacccccgtgaagtatgttatctattgttggtgttctcattggcaaaacattcacgaaaaatggtttaccaatggtttttgtgaaccctctaaaacacaagaattacttgatgttttgaaacccctgtaattaccaagggtttattaaccctattaacaccacaatcttggtggcgatttaaaacctt

SEQ ID NO: 106850 - DNA, 364 bp, Glycine max
agctttggcattattattattattattattatttcaaatgactttgaaattttccggtacgtatacgaatgatattgaaagtcccatggttcaattgtttcgagattctttattatatggtaaatgaatattattttatgacctagaagaatgaaattagtaagaatattacgaattgttggtagcaataaaaatctgcaggttgaatgtttatttagaattaagtggacgatagatttattagtcattaaagtgatcaaatttttaagtttgtttaattttcgattaatgataatttttcaattacccataaaataatagatgttgaaatatataattattgattaataggtacattgaaatt

SEQ ID NO: 106851 - DNA, 227 bp, Glycine max
cataacggggagtggcgctccacagcccgtagggcacttgaacagcctcatgcttgccaactgacctgccgtaacaagaagtcatctctcgcacaagccggatcgaccaacttgccagagtcctcattgctcgacaacttcacctatcatcgaagaggatcaacactcactgtcgaggttagagaggacttgtatcttagaacgttgtccctcactcactcgtagcc

SEQ ID NO: 106852 - DNA, 375 bp, Glycine max
agcttaagctccttcaactgctttatgctcctaatatttgaagagtatccttgtggaaccttcacccgacgaagacattgacaaaaacttatcttcttcttcttggacaaagtatggcaggctgggggcaagtaaattttcttcccatcagacattggatgcaactgtgatcgtatacccatatcagctagatcttgacgggtattcaagccatccttcatcttgccttgaatgttaaagagcgtcccaataacactgtcacaaacatttttctccacattcataacatcaactcaatgtctaacgtcaagatcacaccagtacggaagatcaaagaaaatggacctcttcttccatatgcaactctgactttta

SEQ ID NO: 106853 - DNA, 342 bp, Glycine max
aagtgttcacatactgaatatacaaagtctatgtgaaacaaattccctgtggatacgatactcggtcttaccgtttttttactacttgtgtgaatcggtacacttgctgaccacattcgaacaagtttttggcaccgttgctgggaaatttctttccacttagatagtatacttcagtttggaaacattcattctttattctttgattgcttcttgtgaatagttagaattcaaattttatctcttgacttggctaaatgctgctctgtttaattgcttcttgtatgcgaggtataacttcaacgggaatgtagctccattagatttagagattgaagcttc

SEQ ID NO: 106854 - DNA, 377 bp, Glycine max
agcttttaaaatttaaattcatttttcttaaagctgctacaaacagtttaaacttttggtaatcgattacataccctgtgtaatcgattacaggcttttaaattcaaattcaaaattttcaaattgttttagaaatcaatttagccactggtaatcgattaccagagaggaaatatcatatttttgaacagataattgttcttaaaaaacttttgtaaaatatttcctttagccaaacctgtgtagcatcaattaaggaattctttctaagatcctaactaagtatatcgttctttttgtatttctaaattcttgacttgaattgtgctcatttttgccatcatcaaaacttcatatcatatatgcatctacaaaaa

SEQ ID NO: 106855 - DNA, 419 bp, Glycine max
  unsure (1)..(419): unsure at all n locations
gataacccaaccgctcaacaagcatcatgggatgctgggaacgattagacctanaagaaacagaacaacttaatttttctgagactcatttcactcgtcagtcgtcaccgtcgggaagcccttggccatcaacagtggacaacggattgggtcggatcaagaaagtgattttgatagtatataattttatacatttaactattaacactattttttaactactagtctaatcctataatcttatgaaacttattccattgcatggtaaaaattaaatcatttcttacattataactagatgttaaaactgcacggatttctttaaataatattttaattaaatggtatttgattcttatatttaaaattgaaatattttgattttcttatttaaacaatacaattttatcttctatttt

SEQ ID NO: 106856 - DNA, 375 bp, Glycine max
  unsure (1)..(375): unsure at all n locations
agctttgatgaaaanggcgatttattataatgttcagaacccttcctgcgctgggatgacttcaaaaccttgatgtcactgtgcacactaaggatgactgaggagagttaacccaacctagggatgctatggaggcacatcatatgctcgttttttacagcatcacaaaaacatgtacggacatacatatgtttaggatgctccgccccacaaattaatttcagaatttagctgactacatttgttatcacatgaaaataaaaataccaacctaaaggtgtctaggagaacaaccaatacaagctcagctaccacaatattgtgagcatcctgaccaacaaattttatctgccagataatgaatgactattattg

SEQ ID NO: 106857 - DNA, 253 bp, Glycine max
caagacactggctcatacaaatctccttttctattggtcatagtgagatcaagcaggggcagataaattttcatgccataaaaccttggattctacggagatcggaggcccatattagctatatcttgacgggtagacaagccatgcttccgacttgcctagtatgatagacgattgtccaaatgacactgaaaaatacatgttcattgaatagctaacatgaatacatagtcgaacatcatatatagaccag

SEQ ID NO: 106858 - DNA, 376 bp, Glycine max
  unsure (1)..(376): unsure at all n locations
agctttgcagatttagttntgtttgttgaggatcgaagtgggtctgagaagaggcaagtttgattatactgcttcgacgaataggaagcctggggcaaacagagagaataagaaggagggaggaacccatgctgtgactgccattcctacatggccaaattttccactagctcaacaatatcaatactcagccaatatcgctccctctcatttcccacccccccaccagccaagaacacccaatcatccacaaaggccgaccctaaatcagccacaaaacccacctactacagacccgaggccaaacaccacccttaatacgcacgaaaacaccaaccggggaagaaattttccagaaaagaagcttgtagaattc

SEQ ID NO: 106859 - DNA, 382 bp, Glycine max
tggcggctgctgctctcgtagttcccgagagcttgtgggtttttgaagtgagggggaagacttctgggtgaaaaaaacgttccccctccacccctttatatttccgaacaggggttgctcgcccatgcgagctcagctcgcccaggcgagctaacctgtacttcttattcgtttttctttataaaggggaacatgaaccatgttccctccttccttatgggttagcattcgcccacttgaacctacttaaattagaattaggtgtcgattactcatttaaaacaaaccatagttaaagacaactgctaatgcataagatacctgggttgccttgcagcgaccttcttcgcttgttattcgcccggaaagggcatccatcggt

SEQ ID NO: 106860 - DNA, 373 bp, Glycine max
  unsure (1)..(373): unsure at all n locations
agctttgagactggtgggtattatcttcaagttgtgaanccgaacgaaatggttaagagggtattggcatgttttctcccaactgagttctctgttgcagttcatgtggatggtgcaagcaagttgtttgatcagacatgttttctggatgttaagggatactgtcgcgaaaagaggaaccacaaatggcttggaatgggtggttctcttgtctaccaaaaatttgccaagacttgtgactgtggttcacctaaatcaactctgaagtgctggaaagaggaagatgaaaaacactaantttcttaagtgtctctattatgtccttgcgaaaataagtccggttttccagacagtgattgtttttctttggtgg

SEQ ID NO: 106861 - DNA, 331 bp, Glycine max
attcacactttcaaaaaagatggattatccttcaaaaatcattagcggtgacctttaccacaattccttgattatatcatgccatagaggtttggaatgaactcattgtctgttaatgatatccatttgctactttcacgaatctctgacgtcaatcaaaatctttggctctgatgatgaatatggcatggtattcgacttaaaacacattctcgttctttgaaacattatcgatagtgtatgagtgaacaaagcatggcgtttcattctcacttttagtcaaataaacatttcaaagtacatttacttacttgtaaatgaaactatgaaa

SEQ ID NO: 106862 - DNA, 320 bp, Glycine max
acacaagaatataaaagaaaccgaattcccccttttctgtaattattcattttaaagccgaggaatgtatgctgcagtagcatgtctaaatgtctttaaatgggtatgtggaagattgagtgatctttgtgagtattttttttcagctactgaattttccaaaactgtcgcaaacagcgtccgatgctcgatcaaatagtgtatttttcaaattcagtgactttgttcggatttgatcaatttagccctagttctgatgcaaaacgcggtttcagaattcaatatacacctctctttttttggaaaaataaaataaaacc

SEQ ID NO: 106863 - DNA, 219 bp, Glycine max
ttaaccaaaaatacctatcttgagaaaaaacttttcccatctagaggattattcctgttctaaaatccaaccttgacaatctaagtgagacccttctatggttagtctaaacaatcaaaggcctttttatagaatcgatcccggttcatgcttgattaaaacaaagtctcctgaataactggaggatatttaaacttaaacctctttttagtttactcc

SEQ ID NO: 106864 - DNA, 371 bp, Glycine max
agcttatcctaaatgacactttttgtaccaccaaattcctaactcaatcacttttaatgtcttgctgaatgagtacaaagtgacttgttgcagtttggtgagtaactcagcactgtatataatcagtacaaaagatttgttttttctaaaaaccgatgttgtggtttactaacagcggttttcaaaaaacgatgttggtgaccataaactaacatcggtttttcaaaatccgatgttaacattgatactttaacatcagtagtttaaacatcgattaataaccgatgtcggaagtccttattaaccaatattaaaagtctattttctagtagttctcgtaacctaccctatgatgggtgtgtgagcgtaaa

SEQ ID NO: 106865 - DNA, 412 bp, Glycine max
  unsure (1)..(412): unsure at all n locations
ctcagcttcatgcttaactatgtatggcaaaacttcattactgttgttcaagacataccagtgagcttgtaacaaatcttctacacttggagtgatcacttgcagtcctcttgaacccttaccacccactctgtcatcatgctgacactcaggaagcccaacagctttagccttctctaagtattctgaacaaaattcaatggcttcttttgcaatgtacctctcaacaatagatgcttccggatgatatagattctttgtatacccttttaagatcttcatgtatcgctcaaccgggtacatccaccgtagataaacaggaccgcaacatttgatttctctgacttgatgcacaatcaagtgaatcatgatgncaaagaaagcanggggaaaatacatcttccactggcac

SEQ ID NO: 106866 - DNA, 369 bp, Glycine max
agctttgaatgctctattatttgagttgacaagaatatcttcagactgatcaacacatgcacagtggccaaagatgcatgggagatcctgaaaaccactcatgaaggaacctccaaagtgaagatgtccagattgcaactattggccacaaaattcgaaaatctgaagatgaaggaggaagagtgtattcatgacttccacatgaacattcttgaaattgccaatgcttgcactgccttgggagaaaggatgacagatgaaaagctggtgagaaagatcctcagatccctgcctaagagatttgacatgaaagtcactgcaatagaggaggcccaagacatttgcaacatgagagtagatgaactcatt

SEQ ID NO: 106867 - DNA, 371 bp, Glycine max
agctttaacataaagagtattcttatttttacaacgaacaaacccattgtcttggaagtacttgtcaatgcgactattccatgccctcggtgcttgctttagaccatacaacgccttgttcaatttcaagatatttccttcttgacctttgatgagaaaacccattggttgttcaacataaacattttcttcaagatagccctttagcaatgccgattttacatcaagctgaaaaactctccacttcatttgagctgccaaggaaataaaaagacgaattgtctccatctcgacaaccggtgcaaacacttcatcataatcaactccatattgttgcttgtagcctttaactacgagtcttgctttgtgtc

SEQ ID NO: 106868 - DNA, 395 bp, Glycine max
actaccctttgtaacccaactgtgcctacgatatgctttaatatctgtggagggtggactctgctcatgtgttgagcatttaatattcgagataaggcgcccatttgtgtaaccttggctagctagctagtgttacctaaaccatccagtgattgcatgatcaaagaatcgagtatgtgcttgaaagagggcattctttaaagaacagagaagggtgatgcatcctcgtttaattcattctctacatgacaatttaagagagtttttccaggcttatctctgtattttgagatagataaggaaaaatcttctatggacttgttgaataaactagaatcaagcttaattatgcttcatttgtccaactgttcttgcgttggatgttgaccagcttg

SEQ ID NO: 106869 - DNA, 374 bp, Glycine max
agctttttctacaaccttcatttttctacaaccaaccttttctccccctttggcaacatcaaaaagccaaagaactagggaatcaacacagatataacaaaggagtagaaagatataaatatcagagtataaaacacaataatccaaactcacaaacaagaaataatcaaaccagaatccaaataacttaaaatgtcaacaaccacaaaatatccaagactaaaattgaaaaaccacaagataaataagcaaagtacttagcataataatgtaaattctaagaaactaaaagccaaaatacacggcttataaaagacatataatcagaaactaaaatctaagaagacggaggtggtggtggaagatcgaaactc

SEQ ID NO: 106870 - DNA, 398 bp, Glycine max
  unsure (1)..(398): unsure at all n locations
tctcccccaattttctataaatatggggagaagtgatgtacaaaagggttcagccccttaggcacttctctctctttcgaatttgcttaaaaaaattatttccgtgaagaaaatccaagccgaggcgcttccgtaacgtttccgtgagtgatttcgcgaaggttttcgaccgttcttcgacgttcttcattcgttcttcagtcttcaacgggtaagtacctcaaaccaagcctttcaattcattctatgtgcccgtggtggtccacatttggtttcatgtatttttattctcgcnttcatttactttttatacccccttttgatgtgcttaagccatttatttaagtcatttctcgcttaacctaaaaataaaataaatttccaccgatcggttgaat

SEQ ID NO: 106871 - DNA, 368 bp, Glycine max
agcttgccacccagctcgcccatgcgagctcagctcgcccaggcgagcaggttgcttcctccaaaagcaacagccttctggaggaatcttctggagggcccaagtgggcctggttgctttttgcatccccatttttactaagtatacctccccctgcctttttttggtgattcttttttcgtaaagttacggaaacttacgaatttcgtaacgatacttgttttctttccgtaatgttacggaaccttgcggattacataatcatcccctttttgacttacggaatgttacggaacctcactaattgtgcaacgatgcttccatttgatttccggtgtgtcacggaaccttacggattgtgcatcaat

SEQ ID NO: 106872 - DNA, 370 bp, Glycine max
tctagaggaaacctctttatgaagcttctagagaaaactacatggagcctcatcggttaaaatgctgcccagccttctttaaccgttggatcgtctcgaaatttggtttgcaacttcaaaagacacttttccatgatctgaccgttgagatctgtgcgaagatgtctggagtgtgctagaagcttccgttcccgagagcatctcttatttaagcatttcagcctttgctttcttgtagcttaggaaaaatgccatttcttcttctttctttcttccaaatccatttctaaagttccaagtactttctccatcacccacatccaccattagccaccacaaaccatcattgtgtctcattgaaaacccacac

SEQ ID NO: 106873 - DNA, 368 bp, Glycine max
agcttatagtggataacaaatatgttaaaaggatcagtatgtttatgttattactacaagttgtttgcatatcaagggcactactttttattatgcaactgctaagcacataacacagcgaatcagaataacaatccagcatgaatataattgcatatgtcagtgctagctcaccatccttctctaccacagacagcaatcaccagttccaccacctactccaaaataatacttctttgctgccatgtacacaactccatcaggatgttgcaagcactgtgcatcggtacttcagtagataagcaaaacaatatttttataattaaaaatacacagataattgtacatttatctgtgtattatatatt

SEQ ID NO: 106874 - DNA, 418 bp, Glycine max
actcaagcttctcgaggtagccgcttaatgaagcttctcagtgatgcctcttgaagaggccttaataaaaacattgttcagacctcgttaaccgttggaaattatcgaaatttggcttacagcttcacaagacacttgttcacggtctgaccgttgggatctttgaacagatgtctagcgtgtgcacgacagttccgttccggagagcattactcacttgtgcgttttgagccttgtcgtccaaatagcttaggaaaaacgccatttcttatcctttctttcttgcagaaccatttccaacatttcaagctgtttgtccatcacccacagcctccattagccaggacaaaccgtggatgttctccgttgaaacccacaccgagaggaacccttcaaccaaagcgaaatcttgcaactt

SEQ ID NO: 106875 - DNA, 379 bp, Glycine max
  unsure (1)..(379): unsure at all n locations
agcttcatggcctctctactttatgatgaatgggacataattaataggcttgcctaccatagacagatgtaggagacaagacacatcatccagagtgatggtcatctctccgatagacaggtgtaaggatgatgtctcttaatgccacctctccacaagggcactcatgaaacccttgtttacgccagggtaccgtgtcgtaactccggctgataacctcaatcgtaccacataagccctcactgttggctcaatggggagtggtaagacctangcactgaggttgaccagttccatctctagtcgcacctgttggatccatacatgaccaacagagtggtctctgtaagatcgaatcaatgataaatcaatcagacct

SEQ ID NO: 106876 - DNA, 357 bp, Glycine max
ttgctaactaagtgctcacctttagtaaaggagaatctcttaggttcgtttcatagtaaaccctcttcctccacatgaccattaacgaatgtcgttttcacatacatttgatgtaactcaaagtccaaatgagctattaatgccataattactcggaaagaatcttttttatatacaggagaaaaagcctttgtgtaatcaattccttatctttgagtgaaccctttggcaacaagtattgccttatgtctctcaatgatgcttgtgagtctttcttggttgtaaaaaccatctacatctaatggcatttacaccactatgcaacagtacaagatccacatcggttaaacccctaaa

SEQ ID NO: 106877 - DNA, 379 bp, Glycine max
agctttgattgtgcggagagttcttcttaagaggcaagagcaacagcaacactgcttgcttgagaagacttggcagccgccacaatggcctcgccaagactcttaaaaggtgcaggagtggaaggtgactgaccaagaccaatcaatccaaccctttttgatccaagtcctgtaattctaagaacagttgactgaccaactttgccagagaaatcctcttcagaagaggcttcagctaataaaccacccaactttgagtcaatcttgctcaaaatcacattctcaaacttcgagcttgcatctctagccaaatctttttccgtaacacccactgccagaatgtcccctttccattccgtcacatcaacatccttagcac

SEQ ID NO: 106878 - DNA, 348 bp, Glycine max
  unsure (1)..(348): unsure at all n locations
tactccagcttatactaatggtagggaactgtggctactaggtttactaactagctttgccatactgtgcaaactgctagaattgtgtgccataattaatttgtccaacattttatactaccaatttgtttccacaactctcaatatacatttctattccaatttggattatagctttgcatcttattttctattaatgtttttgaatcttaagcttggcctgtagcagttgcattaaatttgtattcttatttatcttaattgaatttgggtcctttaattcatcatataaggcatcttatcaatctggaagtatactcttgcagntgtgatatgtttgtgtgcact

SEQ ID NO: 106879 - DNA, 377 bp, Glycine max
agcttactgggcagtgaagacttgcttcttctctatggatcaagctggtgaggaaagaaagttgcaactgagtgagttagatgaaatccgcctagaagcctacgagaatgccaagttctacaaagaaaagaccaagaagttccatgatagcatgatagttaaaaaggacttcatggttgggcaaaaagtgttattgtataattcttggcttggactcatgagtggtaagttgaggtctaagtggattggtccttttgttgctactaatgtttttccttatggtacagttgagatcaaaatcgactccacaaacaagagcttcaaggtcaatggacatcgacttaagccattcctcacgaacccttctttagtggacg

SEQ ID NO: 106880 - DNA, 365 bp, Glycine max
  unsure (1)..(365): unsure at all n locations
gattagacgtgacttcttcaattgtaatggagtcctttcctgtactggaagaactcaaaaaattcacattcaagggaggaagaaaggctaataaaatcattgcttgatctttttcttccatcttgacagtaatgcccgtagctccatcagaatatagtttatctcatcaagatgttccttcattggaataccttccctaatttggaggccaagcaaacgccatttcaaaagaaacttggtgtagattaattttgttatgaaagtttctctaatnttagtcaaagcccaacaattgtcaagttttttagaaacctgctaaagaaccttctcatacaaagataagagaaatagcgaatgtgactttt

SEQ ID NO: 106881 - DNA, 375 bp, Glycine max
agcttgtgaccttcctcatcttatacttttgcatctatgcccacatgaataggagtattatattcaagtataaaaattcatactggggaaacaagcttatatgtgaattcacctctgtctacctccaaccatcttcattaagcgcttaaatgtacttgctttctttgatttcgaatgcaagcaaaaaaatatatctgtgtctttggtaactgttaaatatgagttatttcataataaaaatatattgaaaatatctttgaaaatatttatttaacagttatttttttgcttaacagataagaattgatacttttattatttatggcttgcagatataaaaagataagattacaagatctaaaagatattgataac

SEQ ID NO: 106882 - DNA, 406 bp, Glycine max
  unsure (1)..(406): unsure at all n locations
ntgtgagtagtgaagcttctcaattatgacatgtaggtagctggtgagaaaaggaagctcgattagaatgaagtggatgaaattcgtttgaatgcatacgaaaatgccataatttacaaggaacagaccaagagatggcatgaccaactcattcactggaggcaattcatagaaggagacattgttctcctttataattctaggttgaaactatttcttggaaagttaaattcaaggtggcctggaccttttaaggttcagaaggtgtttcttaatggagctatggagattgaaagcaaaaaaaactagcttactcaaggttagcggtcaaaggttgaagttgtacttcaatagagagaanattgataagttaatggttgttgtccttctagacctcatgtctagt

SEQ ID NO: 106883 - DNA, 375 bp, Glycine max
agctttggagtttccaagtgctctttcgtcctcttctttagtccagtcttcttctggcttcaattcatcagtgggctttccttctgtgtccaacatcttgggatgttcccagcctttgatgacagctttccaggttctgctatccagtgatttgaggaaggccaccattcttgctttccagtattcatagttgcttccatcaagaattggtggtctgttcactggtcctccttctttctccatgttcatcagaatttatctccccagatctcactctgtgatttcgagtgttggctctgataccaattgaaattctgataccaggggacagatgtcgtacaggatgtcacgacatcacgcttcagaacatgcaga

SEQ ID NO: 106884 - DNA, 387 bp, Glycine max
  unsure (1)..(387): unsure at all n locations
tcttgcgtagccgctcttggtgctcagaaaatcccaaaaacaaatccctcttattactagctattttgaattctttagttcctgaatgtacaaccttcaaattgttgctcgttccactctttgtttctgcaaaaaagaaaatcaatatcaaagaaaacatggagagaattgtcatggttattattactcgaaccagaaggaataacatctaaacaagtcattttattcttagaatgtgaaaactctgcatatttatggagaacatggggtatggtggcacgtaagcatgtgaataccgcaagtcattntcttccattcaagggctngattaattgctctacgaaaaaagcatacatttggtatattgtttggtttgcagctgtttgg

SEQ ID NO: 106885 - DNA, 374 bp, Glycine max
  unsure (1)..(374): unsure at all n locations
agctttgaagggttatgntgtttttattgccataccgaaagaggaatacagagaaggccttgaagactgcaaaagttatttgcatagcaggattcttttggcaaagggtgtccctcctccaagagtttctgatttgcaagccaaagctttggcatcctttgggacgttgacatatggtcccaattggaaaaggctattgcacctcttctttctccttagttcaagatttacgtaaggtgtggtggtagggatttggaacctaaaccctagcactctgaggcttttcaacggaaccccgaactttaaccctaatttggtgaaacaaaccagtacccagtgttgtatttgaattctagggttaccacacaagtata

SEQ ID NO: 106886 - DNA, 329 bp, Glycine max
  unsure (1)..(329): unsure at all n locations
tttcatagagaacgtgggtattgtatctaccataatcgtgatcatctctctctccgtcatgggcggcacgacttgggctgcgagatctctccatctttgggcatattccttaatggactcatgccctcgcttagtcatactctgaagctggttccgatcgggagccatatccgcattgtactggaactgcctaatgaaagcaattgtcaagtccttccatgatcggatctgggaagcttccagattggtataccatgctacagctgctccggtcaagctgtcttgaaagaaatggacccataactttttctnccggcaaatacaccccc

SEQ ID NO: 106887 - DNA, 374 bp, Glycine max
agcttaatacccaaaatcacatctacatgaccaaggttcttcatatcaaaattattagacaagaaagacttcacatcatttatgaaatgtatattactaccaaatatcaatatgtcatccacatacaaacataaaatgacacatccactttcatcaaattgtttcacgtacacacattaatcactattattgatttgaaaaccatatgaaagaacgacttgaccaaacattttgtgtcatttctttggagcttgtttcaaaccatataaagatttaacaagtttgcaaacgttcttttctttacctggttctacaaagccttcaagttggctcatataaatttcttcttctaactcaccatttaaaaaagtagt

SEQ ID NO: 106888 - DNA, 321 bp, Glycine max
ctcagctttgattcacgtaagttatacttggaagctctcaatgtaaatcaaacatgcagtttatcttctataacataagtaatgtcttaaacctcttgctagagtgagtcacaaaatacatgtgatcataaaaaaatggaccaatacttgtaattgggttcatttgtgaaccaaatagatttatagatagtgagtaagaagcttaattataggcaacatattgctcaaatttaacttattcatttaaataagtcaaatttaaagttgtacttatcaaaattgagttgtctcacgtttgggtggatgtggacaaggtgtgct

SEQ ID NO: 106889 - DNA, 368 bp, Glycine max
agctttagcctttgagtattctccatgttgctccccctatctctaacaatttccccttttttggcttggatgaggacaaactttaactatgacattgagtgcatttggagagtcttgagattggattggagactttaatccttagtcttatcctgaaaatttcttaacactttagaagagattaattcatcatcattatcatatatctcaattcatcaacatatataataatgcagtgctcaatgctatgcaatgcaatcaatatgcaatatgcaatagtgtatattctcccccttttggcattaacaaggccaaaaagtgtgattatacagaaaatagaactcacaagtaaaaaaacaaaataaaac

SEQ ID NO: 106890 - DNA, 372 bp, Glycine max
agcttgagatgaggaagtgtttaagggtgaaacttcctgcttttattgctgaccacagagtggtacctggagatatgtcgcgggggtcaggagaccttggggacgtcaggtggggtgctattgcccaaaaccaagcttgaccaatcccgacccaacccgggcatagtcggtcagtgagaacctgtgatgtacctaaacagccgagctcctggcagtcaacagataaaaggaacaaagaccacaaagcaaggaggcttgtggtggctggccagttgtgaattttgtgtgatatgtaaagtaatggcctctggtaatcgattaccaagggtgggtaatcgattacaaggcttagaaatgaagacaggaggctaa

SEQ ID NO: 106891 - DNA, 189 bp, Glycine max
attccggttatacccttgttctctcaaaaccctttttattggctgcaacccgccgaacctttgtcagaaaattgacgatctcgaacccgttcaccgttggatccttgtgaaatttgagtatcatgttctcaacacatttgcgtgcattctcaccgttgggaatattgatatcttgtctgaactgagaga

SEQ ID NO: 106892 - DNA, 365 bp, Glycine max
ttggttcccaacgctctgttaagctctcccaaaatctaaaggtgaatctaggatctctatcaaatacaatgctagatggcacaccatgtaacctgataacctcacttatatacaaggtggtcaacttctccaaggaaaatatgatattaatgggaatgaagtgagcagacttagtcaatctgtcaacaataacccagacagaatctaaacctctaggggttctaggtagtcctaccacaaaatccatggaaatactgtcccacttccactggggtatctctaaggggtgtaacttccctagaggtctctgatgttctatcttagccttctgaaagactaggcatgcatacacaaactcactaacc

SEQ ID NO: 106893 - DNA, 407 bp, Glycine max
cgagcttagctacacatacctctctaatagctaagctcacctccttgagatgagaagctagagcttaactacacacctcgtataatagctaagctcacccccatgacaaaaaacataaagatacaaaaaaaagtccttactacaaagactactcaaaatgccccgaaatacaaggctaaaaccctatactactagaatggccaaaatacaaggcctagacgaaggaaatacctattctaatatttacaaagataagcgggctcatacttagcccatgggctcgaaatctaccctaaggctcatgagaacgctagggccttcccttggatctctagccaatctacttggagtcttctacccaatgcccttgcggggtaggattgcatcattccctccaccttggaaag

SEQ ID NO: 106894 - DNA, 369 bp, Glycine max
agcttgtactaatataagaattatcttcttcgaccttggtgattcttgactccatctcattgaagtgcatgtccacttgtaactccaaagtatcaaacctttcaccaacaaaggtttgaagaccatcgaacctatccaaaatctttagaagaagagatgaatcttctccaccatgtccttcttcatcaacatgtccagcaccctttttcacccaagagccatcatgctctttttcataaccaaaggatgcaatgacagtagcgcctattagaaaggatctcttgcttggaacataaggttcagaatcaagagggatgttaaagtgttgaaggaagagggtgactaggtgtggataaggcaatggagcat

SEQ ID NO: 106895 - DNA, 251 bp, Glycine max
tgcttgagaagcttctatgaagggctgtatctttgtatcttcaatgtaggtccttcaatggtgagttgtcaaccatggatatgccgtagaagataaaggagaagatatgagaggaggcgtcattcactaaggaataagccatggaaggaggagcttcaccatcaagagagtgccttggataagaagcttagagagtaagcttcaatggaggaaaagaatgagagagagggggggggcatgatatttaatga

SEQ ID NO: 106896 - DNA, 344 bp, Glycine max
agcttcattctacacctgaaatagaggatgagatagttgcacaaaagagaaagcttcctaacaaaaattttcatgcaagttgaccttcttctagtaattatgacttaccgcagcctcctatccctcttctgtggcgtccctaaattaatgactggtttgatagtaataatttaaataacaaaaaccatggtaaattttttttcttctttttctttttcatttctttctcttttcaccataactaggtttagaaggaaaatcctcactatagagtcctgaatggccagttcacaactctattcaaagtcgtttctttcttaccgctcataatctctaaactaatt

SEQ ID NO: 106897 - DNA, 327 bp, Glycine max
cttaaaccttgttaaaacataccccctttctccccgaacgccatctccgcatgctgcacgtgatgactaaccttctctcaccggatcatatcaggctgcacactgcacaatgcgctatacaacgttcaatgaacactcctttctgcatgatccacaatgttggataccatgtgctggacctcctgcccgactttactggtcgcataaaactgatataccttcaacatattaaagtgcaggcaacaagctattaagctatctatgcttaggaacgaataaaaagatagttgtttttcgaattacaaagctgaatagttcgctcatgga

SEQ ID NO: 106898 - DNA, 377 bp, Glycine max
agcttctagggctcttttccctaaataggcactgtggtatgctctaaaatccgtgccctttcttctgcctacaatttgtctaaaaatctgtaaaagtgtgtgtcaaagtgtacccgaattctgcacaagacaggctttaaataggctctgaattcgcgacgttgcgcttagcgccaccctcgcgcttagcgcgggtaagtggattctagcttagcgccagttgttgctagtcggtgaaaacgactaacttttgtgtatattgaatcaaacttctccaatttatagttgtttcgtaatattataagtactttatgttaaatataggtaatagatgatttatacttttgttttgtgtgtttaataatcaatttctctca

SEQ ID NO: 106899 - DNA, 269 bp, Glycine max
caagagtcttcacaaattaccatcatgaagcataaaactaacaaaactacccatcatatctcccaaaaccccatacccacgaaatttaagagagaaagaagtccacccaaacctgaatttttgaagtcccactcgtagccacgcacttcacgaccccgaaaatgctctcctttcacgatttggggcagaaatgagcaccaaaggttgaagctttgtgtggagcttcaatggtgaatgagggaggaagaaaagcaacgtgagggagaggg

SEQ ID NO: 106900 - DNA, 376 bp, Glycine max
agcttacaaatattttcatattatgtctacaacttaaaatgaagataatcataatgaccaattgaatagttaaatctttatttttcttcacatggtgtatgctatgtgtgaccaagtatttctaagcattttcctaatgagaacaattttctaattcggaggtcgttattctggaacttttgttttgtaaatttgaaattatttaccttgatttgctagtctgaaagagctgctcggaaagcaacggctttacaaatggcaactatgtataccgtattatgagcaactctgctcaatcttggtatcactctgagcagccaaggcaacataactattgcgaatggatctttcattggtgcaggtgactatatattat

SEQ ID NO: 106901 - DNA, 59 bp, Glycine max
ccccaacagccgcagacggaaacccacgacggccccgcaccgcaacaaacagaaaaaca

SEQ ID NO: 106902 - DNA, 354 bp, Glycine max
  unsure (1)..(354): unsure at all n locations
aacttgctaaatagctgtggtttgtttctcttattacggctgcgtatatattaaaacgagttccaatcatagttgtcttatagacactctttgagttattcaaaggttggaaattatgtttgccacatttactcgtttggggatgcctgtctaaagtaagatttttttatcctcaatataagaatctatacccttatactatgacgtgngttttcattggatatgcagataggtctatagggtataagttctattgtccatcccactacactatgattgtggaaccaaggactcgaaagttacttgaaaataactatgtcagtgggagtgaacaatatcagaacatttattttg

SEQ ID NO: 106903 - DNA, 372 bp, Glycine max
  unsure (1)..(372): unsure at all n locations
agcttggaggggttgatggggtccttatgctgagaggaacgaggataagggctacgcangagtgcgtgagctcagttgaaaggtgggcaaccggggatggtcggtttatatttgacttgtggaagtgggagagttgatttgcgccatcgcctgatcgccacctagtaccacatatgacgggtaccccataatccactaagcttgttgtgagaaagcgtggaagagtcaatcttcctacttttgtttgttgaccacagagtggtacctggagatatgtcgcgggggtcaggacaccttggggacgtcaggtggggtgctgttgcccaaaaccatgcttgaccaatcccggcccaacccgggcatagtcattca

SEQ ID NO: 106904 - DNA, 407 bp, Glycine max
cggccaatgactttcggatgttatacctgagttttcttccgtaccaccggctcactctccttatatattggccccccgggcatctgtttcgcttgatctctttgatatcgaggaagatttgcaaaaagcttatcccttccaatgaaaatattgtctagcttcatggcgaatcattccggctcttgaatccggcaaacacgagcaaaaccgaatcttttacccatcctatttctccttgtctgaatcaccacctcttgcaagtcaccatagctcctgagactgttgaacaagtgcttcgcattcatctcctccgcaaaattggtaatgtaaatcgttgttgattgtagttgctccttactcctttggtccctggattgataaatatctggtttggcctaaccagaccc

SEQ ID NO: 106905 - DNA, 280 bp, Glycine max
  unsure (1)..(280): unsure at all n locations
aaatggagggtggantaggtgagtagaagattttttttttttgggntttgaggatggaggggaggatagtggaaagntggattttaaataataaaggttattgtgattaaagtttttntttaattagtagaagtgtggtatgtttntgaatagaaaaagaattagngataaaggttaatgagcaatttaaagagaaagtgaaatgatttaatgaaattagattatatggatagtggggaaaaaataatatagaatttaatttatgggaatgatataatga

SEQ ID NO: 106906 - DNA, 379 bp, Glycine max
  unsure (1)..(379): unsure at all n locations
agtcgaccagatagcatgcaagattacagactctatttttatttttcttcctaaggagtcgggaaaaaaaaataaaatataatgctccacatgccaaatagtatacaagcaaatttgggatacaaggcaaaactgactctgctaaaacaaactaataaacaaccgaacattgtaaagggtgatttaaaagactgggattgacagaaaccaaattttaaagccaatgataaaaatgtttgggcttaccgntcgaatagaaaccgccttcttctgcgaaaaggaggggagggtgaagaaatgccactggaccttgggtttcgattgctattggaaaagcatctcttattgtgatttcaactttttcttacaactcattgat

SEQ ID NO: 106907 - DNA, 370 bp, Glycine max
  unsure (1)..(370): unsure at all n locations
agcttttaatgataagaaagtttttatttttacatnacatgggataaaaatgatatggatgtagaagcaagcttcatgatgaatcaagattgattcaaagaattttttatgataacaaaggtgatgacaaaaagctctaagatcaagaacaattcatgataacaaagatgatgatctcaagaatcaaagaatgagttcaacaggttcaagattgaattaagaacacttctaggttcaagaggaaatttgatttcaagaatcaagaatcaagattcaaggttcaagcttcccagaatcatgatcaagattcaaggctcaagattcaagaatcaagagaagaattaatcaagatatgtatgaaaaagttttt

SEQ ID NO: 106908 - DNA, 272 bp, Glycine max
aaccagcatgagaggcgcacagcgaccacaattagatttgtcgccatctaccaacacgttgccgaaagaccagagaaagcaccacaaccagaagaccgaagaaaaaacaaccgctaaacgatagcgcgaaaaacgcaaacctaacgtggcaaaatcccccagcacatgtgatgacgaaagctaaaaggcactgagaaaaaacgaaggcgaaacttagcaagccagggcagagcatagggcaggaaaaaccgaaatactaacatccaaaccgg

SEQ ID NO: 106909 - DNA, 367 bp, Glycine max
agcttccatcatgggcttttttgtaatatggaaggttgctgtctattggaaacccatgaatggactccctcctacttcaatcagtataaaagtattgagttatctcattgctagttacttaatcaattaccttttagtaaaaaaaaaaaatacaaattttggcagggagaaaagccgtagatttgatattgccatttggcgaaattgaggttcttaaggaaaactgggacttgatcaagagacaaataggtctagaaaatgtggaaattttatctgcagcaaatgtccattcctaggccagagctggaccattagcttctttactaaatcaaaatcctccttcacctggaaagccaattgccatctt

SEQ ID NO: 106910 - DNA, 373 bp, Glycine max
agcttgcttctacattgtattctcttatctccttttccggggtaggaattgtagattgattattattgcttgtcagaattattgatgcatagtggaaatctaattcaagttgtggattaaataactggattagcttatctaaaaatagagagtgaaccagtataaaagattgtgtctttttctctcttgctcacatctttccctcattcaaggtttaatcaactcattcaagttttattcaaggtttgaaaacattcaagttttatgattttgaaataaaggatgttacctaaggatcatgtgtaaggaaggattgattaagtattgattacatttttcatggaatgccatcattaaaggttcttttattccc

SEQ ID NO: 106911 - DNA, 407 bp, Glycine max
  unsure (1)..(407): unsure at all n locations
tacacaccaacaaagaataaaggtatgggtcgtcctataatctaatagnacaagtaacagaatcccatttatgaaacacttaccatggattaaatctttggatttcgaggattcaccactgctaagggtaaagactctttcagtggccttcggttgtctaatttgaccgtttaagcccccaccatgttgctccttcttggggtgtggacaatctctttgaatatgtcctttctgtccacaattaaaacatgttatgcctttatcggggcaatttgaggaaatgtgccctggcttactacatctgtaacatatgatatgagtggggaaagtactgggtttgctaccactaccacccacaaattccatagcaaaggcctctaactattgggacggttaccatattgctt

SEQ ID NO: 106912 - DNA, 361 bp, Glycine max
agcttggacaaccagaatccttccgatttatcccacacaaacacgaagcactgtatcactggccttcatagtgacagaccctcattcaattaatagtgaaatcggaaaacattgaaaatcacaaactcacgtttcgtcgacgcctcctgtggtttcggaggagatagagcagaaaggaatctcgcagatggcgaccgaagccccgtagttggcagttaatcgagcagttcggacgccgccgatgccggctgccgatggtgaagaagcccaaaccctagtgtgcggggaccgcataagcgccgatttgggattctttgcagacagccaatgtgcggcggtgcttggagatagacaggaggga

SEQ ID NO: 106913 - DNA, 365 bp, Glycine max
agcttgtacacacccgatcttttttgtttcctactcaaaccctttcattcttcacgccccggtgacaaccttcacatcataaccttaacagtgctcactaaggatgatcatcttatcatttaacctctagttatattgaacacacaccagacagctgactccaagctagaagtccttgttcaatggcaaggattactatcggatgatacttcatggaaagactggacccaacttcaaactgattaccaccttgaggacaaggtgcttttggaaggcatagggactgatagcaacacagaaaaaccagaagcaacaaaagcacgaccacaaaggatgagcagggccccaacttaccttaaagattt

SEQ ID NO: 106914 - DNA, 409 bp, Glycine max
tgctgatatcaattatgcattaatcttcaactattaacttacacttctagcttagttggtttggtccttagatgggtttcgtgtatattgactaactgtcctaaaatgttgagcatggttagtatagatacatttccatttgatatgaccctacctacttcaaattaataacttaaccatccaattttctcactgcctattaaagcttaacttgtaaattaacatagagaaatatgataataataactgctacacgtgtcgctttcttcatacctaactaaccgtgtgacctaaaagtaagtagtacccaaacgaagctccagatccaaatcataacctataggaaaacctatctccaagtctatcctaagaatctttccattcttcaacattgtgcacccatcatgat

SEQ ID NO: 106915 - DNA, 360 bp, Glycine max
agcttgttgtgcaccatcgttctaccgccacctagtaccacatgtgatgggtaccccataattctacaagcttgatatgaagaagtgttgaagggtgaaacttcctgcttttattgttgaccacaaagtggtacctggagatatgtcgcgggggtcaagagaccttggggacgtcaggtggggtgctattgcccaccaccaagcttgaccaatcccgacccaacccgggcatagtcggtcagtgagaacctgtgatgtacctaagcaggcgagctcctggcacgcaacagataaaaggaaaacaagaccacaaagcaaggaggcttgtggtggccggccagctgtgaattttgtgtaata

SEQ ID NO: 106916 - DNA, 336 bp, Glycine max
accggaacttaaatctctactgtgggactgatgggacctggcgtctatagaaacgagggacatacctgcatgggagtgcgtgaacccaggtggcacgtgggcaaccatgggatggtgagttcatgcgctcatatgacgatgttatcaacttattgggcacatttctctatctttgcataaaaggatatgttactggggaccgataaaactaccctcatgtgatctagaagagtataaaggctactattgctcactatattgttgtccacataaaggactacgaatagatctatgaatggtcttgagacatgatgcataatcctcatagaggtgctt

SEQ ID NO: 106917 - DNA, 375 bp, Glycine max
atccttaagtcacctgcggctgcagcttgagataacactagtccgtagttttataataattttttttttaaaaaataaaaatatgtttttggttgtttgacacaaccacaagcaagagagagacacaatgtaatgagaaatatgacgtgcaagagagaggtgcaatgcgtagagaggggcggcgtgcatgagccgagaaggaggaagtgacctcacgcagtgtttgatcggggtaagggaagcacgacgtggtgctagtcgagggagggaggtcatgcacaagtcgaggaagagaaagtgacatctatgccctccggcagagtgagggttggggaaaaagacacatggcgaagtgaggtaggggaaggaaatgca

SEQ ID NO: 106918 - DNA, 409 bp, Glycine max
  unsure (1)..(409): unsure at all n locations
actcacgcttgcttccatatatacaaaaccaacatattattaattattctcactctctgcgtttaatatgatataaccatggatggattgagatagaatcatgtttagcatgatgatgtattcttgtatacatgggtatctctgatatatatatatatatatatatatagtactcccattgcttcaacttcttaatcgaacatcaaggcaaagagtcctccactcagttctggacgtaacaacattcccatgcatatctctaatgcccattcaatccaaaacttatcaagttcaaatcattgaaaaatgaagcatcgctattaattattgcatcacagtgtacccagaaacacaataaatatataaataaaggcaanaatgacttttataacgagggcaaccaatgtga

SEQ ID NO: 106919 - DNA, 376 bp, Glycine max
  unsure (1)..(376): unsure at all n locations
agcttgggggacttatgtactgtctatgattcacaaatngatgnggcaagtgacgtgacattaaaatatgcacgtcaaccctggtacaggaacatggataccactcgcttagcaactgagtcattgggctaataagtngttaatatatttgaactttaatgataatgtcattgtcctcttatcaaattgcaggtacccacttatcttggagcaatgaattatctatagggttgctacgctactataataagctcaacaatcaaagaccttgggctcccatccgactttgtaaataattaggttctaccttcatttttcatttattctcaactcactcacataataaagttccatccaacataaattgtaataaaaa

SEQ ID NO: 106920 - DNA, 265 bp, Glycine max
  unsure (1)..(265): unsure at all n locations
ccagctgcttgcacgccttatggagctggatcttgtcttcatgatgtccttcactgggaggntacaccatggagatgcatcggaaggcaaacgaaaataggagaggggaggcaccatccactatggaataagccaatgaagaaggagctctaccaccaagaattgccttggataagaagcttgaggaggatgctctaatggaggaaaacaaagagaaaaggggggagtaccaaattgaacgaataaaagagggagagaaatggaa

SEQ ID NO: 106921 - DNA, 374 bp, Glycine max
agctttgacttgagtcatcattagattataaatatgtgaccatggcatgagtttcaacaataattatcatcatcaatcatctatctttcaatcttctctcaacatcattcaatatctttcaattctttctacagaattttctgattctttttctcttcatctttctaaaagttttttatcgacactttttcttcaaagaaaagttccttgttcaaaaacttgtgttattcatctttttcattctcttctttctttgccaaaagaacgaaggactaaccgcctgaattcttttgcatctctcttctcccttttccaaaagaacgaaggactaaccgcctgaattcttttgtgtctctctttcccctttcaaaaga

SEQ ID NO: 106922 - DNA, 414 bp, Glycine max
ttcttatacaagacattcttggtggtgaagctccttcttccttggcttattccctagaggatggtgcctcccctcatatcttctcctttgccttccgctgcatctccatggtgaaaaaccaccattgaaagacctcattgaagctcaaagatccagcctccatagaagctccataagcaagctttcatcaagtggtaatcagagcacaagagcttcaagtaggtgctctttaaacctccattaattctttgctttaccttctcctccattgttgtttcttactttttttctccatgtatctactcacatgtcttgtgctaaatgttgttaacatgactctttacatcttccaccaattaaacttgctataaaagctagatttgattctctatggttcacatttcttgatcttgt

SEQ ID NO: 106923 - DNA, 142 bp, Glycine max
acataacccgagctcacttagacaaacctttttctacacaccgggtttgtatttcagaacaggtattaagaggataagttaaatagttatatgatctccagtaaggtatcatgacgattttgaaataaatttctaaaaacat

SEQ ID NO: 106924 - DNA, 402 bp, Glycine max
tcattaagaggcttctagcacactccagatatcttctcaaagatcccaacggttagatcatgtacacgtgtcttttgaagtagcagaccaaatttcaagaagatccaacgtttaacaaaggctgggcagcatttttaccgaggcagcttcatgtagatttctctagaagcttcattaagaggcttcctccagaagctttctcgtggcttctttgagaagctatctcaagaggcttctttgagaagttagatccttatctatccaaacccctctattaactaaattaacttccttaaaaataattacggatgaaaataacgcaacaaataatcaaacatcaaacataattactaataatatatagatatatatatcacggtgttacatatattcacatatata

SEQ ID NO: 106925 - DNA, 379 bp, Glycine max
  unsure (1)..(379): unsure at all n locations
agcttgtatgattatggggttctcttcttatgtggtactangnggcagccgggcgattgtgcacaacaatttttccacatacacaaattgcgcataaatccaccatcccctgttgcctaccttcaactgaactcacgtactcccatgtagcccatatcctcgtttttctcaacaccgggtccccatcaatcctcccaagcttcccccacatccatgtaattcaacattctaacagcacaaactaccccagtcaataaaacagggcaaaagctgaaaactcttcccaaaacacccacccaaaacaccgctttttctcacttatagaccccagtaacatttcctttgtttcaattcgttcaccggtggatcgactccaaca

SEQ ID NO: 106926 - DNA, 375 bp, Glycine max
agcttatgcgcatattttcttttatacgttctccgaaaaaaatgcacccatatacaatcaaggcagcttcgttacctaaattatttacacgtacttccaaggtgtatttgttacttacatcacacacatctccttggctaaattcacatacatgcatacccaaagcattgtggggtaccaaaaattgcacatgtgcacatctcggtatctctaatacctatacatacacaaacttcatgatgaatcttgactatctacacaataaggtgctacatttcatgctcttttcagctttttgctacctaaagccgcatgcaaattcaagtatattttcctttgctgactaaaattgtattcaaattaaaaggtatacat

SEQ ID NO: 106927 - DNA, 308 bp, Glycine max
ctctgtgacttctttaaattttgtatttggtggtatagactccaactagtgggtttgtgttaacttcttatgtgtgtttgaattgtcctgtggaaatttctggtagaacatttgtgattgatctgatttgttttcctttgagccaaattgatgttattctaggtatggactggttatcttccaaccatgtcttggtaaactattttgataaaactgtggtgtttgatggttctgaagtgagtaaggatatggtgtttatctctgccaaaccagttatgagacatctttaaaaaaaagatgctcaagtg

SEQ ID NO: 106928 - DNA, 356 bp, Glycine max
  unsure (1)..(356): unsure at all n locations
agcttgtaaagaggnggtttgttatatgaattccagaagatagggagatagtgacaactatttctcgggaggtaaaaggcatggtgattatttgataactaagatggtggagaatattgcattaaatacatttgcagccctcaatgttgttttattttttgtgcttaaatttgtctattttagaggattgttagactaactttgtttgacagaatgacactcgtaaaactttccattttatggggacagctctatttagagtattattatagattatagactagtgcaaaaaagatatatcgcgctagcacctgaaagttacctaggtatgtacttagtgggatatattggttctt

SEQ ID NO: 106929 - DNA, 316 bp, Glycine max
tctatcacagtgtgagctcgcttgaatgcccatatgtccatattaatcgccttgcatctggagcatgatcatcactattcccgaaccacccagaagcctgcttggttgatccttagtcagaatctgcggacagaaggcaatccatgaaagacaaaccgttcgtgagtacatcggtgtgatccgtgatcagagatacggacccagatccggcgaattcagagaatgcatttcacgatctcacatagtttaatacgaacctatcatagccacgtggggtagcactcttagccgcatcgatatatgccagtcctactat

SEQ ID NO: 106930 - DNA, 371 bp, Glycine max
tgcttattttggacctttaattttccatcaactcctctttcagaaccatgctatgtgcgcgcgactggtccctttcttccctttgcaacttgagttcactattgctaccccatagagctccgcgaaatttgttccggccatactcttccttgcgagccctcttggtctcttgttcaagggctcttgtggtaattgcattcctttcccgtaacccggcacactccttccgaacgtgtgtagcagccaacttgaacttctccttggcgagctttgcctttcctaactcgcttttgagagcttggacttcttcgtcctcttccggtgcttcaaaattctcttcgctgacgacttttaacttggcgagccaatct

SEQ ID NO: 106931 - DNA, 371 bp, Glycine max
agcttttcctctttgcttcttttatggctctttacccgaaataggcactatggctgctgtgccaaatttgtgccaatcatcatcttaccctaattttgcataaaacaggctttaaataagctctaaattcacgatgttgcgcttagcgccatcctcgcgcttagcttgggtaagtggaattgggcctagcgtcagtctcccgccttagcctggctgaaggcacctgctgcgcttaggacattgatcttgcgcttagcgcgcagctttgatgctgatgctatgccatatctttctttgcgctaagcacgctgaagttgtccttagcggtggatatgcgcttagcccaactgctgagcttagcccaactgcta

SEQ ID NO: 106932 - DNA, 372 bp, Glycine max
  unsure (1)..(372): unsure at all n locations
agcttcacaaactttttttctattgtatacaaattattctattcctttattgggaatcgtattatatgaacaaacatctattcaatatgaatcacgtggtcatcgcattttgactcaataattaaaagattttattctcttttatattccttctttgatctttctctcgcctttcttgactaacaaatcgatacgtgtgtctcacagtaaaacaaattgaaatttgtggaaagaaattgagtactcctaaaggacacttccaaatttgtgcagaacttcaccatatctaattaatcttaaattttcacgcacatttntcaaatctttagatacatatattattaaaaatcatattttatttcgacgatcatt

SEQ ID NO: 106933 - DNA, 409 bp, Glycine max
tgtcacatataagggaatcaatggaagacggtgatattgaatagggatcaataagtggtgtagaggaagaagaacaatcaccatagccacacaagtcgaaggaatcgccctacaaaatggtggtgcagcggcaaagcctacgtaaagaatactatcattgatatgttctctattaaaaaagagggtaaaccccagcaactccttcgaaatcttatactttcgttttggtgatggggaaaattaaaaatttcccaaaacggatgggtcacatgcaattgtaaattactttttttagtggtggcttaatacgctgtttataaaaaaaaatcttactttagtgtgtcacatgtagatttaaattacttaaaattagataaaagtacttatataagcaattagtccttatgag

SEQ ID NO: 106934 - DNA, 352 bp, Glycine max
agcttcttttttcaattactttcatctcgatatattacgggactcaatcggacatccgagtaaaaagttattgtcgttttatttttctcagagcttcagttttcaatttcggacatccgattcaaaagttattgtcgttggaatttgccgagtgcttctgttttcaattttgagcgtctcgatattttacggggctctatacgacattcgagttaaaatttattgtcgtttgatttttcttagagcttcccttttcaattacgagcgtctcgatatactatgagacacaatcggacaccctagttaaaagttattgtcgtttgaatatgcttagagcttctgttttcaatta

SEQ ID NO: 106935 - DNA, 390 bp, Glycine max
  unsure (1)..(390): unsure at all n locations
ttgagaaacatcaaacgaccataactattgactctgatgtccgattgagtcccgtaatatatcgagacgctcgttattgaaaacagaagttctgagcaaattcgaacgacaataacttttgactcggatgtccgactgagtcccgtaatatatcgagacgctcgtaatngaaaacaaaagctctgagaaaaatcgaacgacaataacttttgactcggatgtccgattgtgtcccatagtatatcgacacgctcggaattgaaaactgaagctctgagaaaaatcaaacgacaataactttttactcggatgtctgattgagtcccgtaatataccgagacgctcgtaattgaaaacagaagctctgagcaaattcaaacgaccataatt

SEQ ID NO: 106936 - DNA, 359 bp, Glycine max
  unsure (1)..(359): unsure at all n locations
agcttgtagttatgtggnatgtgtttcanantananttttgtgatttgaaagaggagctatgatcaatgtcctttctttcaaggatgttactttttatgtgcgactgagtgggcttataccctaaaccatacttcccacgatatccttgggttgttatcaggataaatatgcagtgattgtgtatgcctaaacccaacgcgggttcataacacgtccggaacatagatcgggccatcattaccgccgtatcagacagacaaagttgccgaatgagggagtccacgaagaaatgtgaccactacgaaagactggaaacggtttttaacattcttctgggctccacctcccgccccccccc

SEQ ID NO: 106937 - DNA, 376 bp, Glycine max
agcttgcttaccacagttttatgaattcaatatacacttaggatcaaaatttcagccagtaattcagtcaccaaaactcaaattcacaatagacacaatcataaggaaacttaaaagttcaagaaaaggttcacaatcaaagactctctaagaattatacatgaacatgttaaggactaattaacatgcaagatttgactcaaatcaaataataggctaaaaaatttcatacactcatgaataaatgagttagacaaagaaacaagaaaaataaaattcaacacaacataaggaatcttatgtgacaagtttcatgactagacattacttctatgacaaaactacaataggtgaacatgtcattctagatttttga

SEQ ID NO: 106938 - DNA, 420 bp, Glycine max
  unsure (1)..(420): unsure at all n locations
tactcacgcttttgagccnaaatcctgtctcaccataaaccttgacccagggtgagaatgtcaatccttaccctcggaagcaaaaaaggagagaatgaaaatttccaatcaaaggaaaaaaagagaggaaaggaaattcccaatcaaagaatgggagaaagaatgggagaaagttaagaaagaaaagaagaaagctcctggtcaaaggaaccagaagaaatgtgcaaagaggtctttagaccggacagtatctgaacaatacagaattgtcaccaaatgaacaaaaagaaggaaaggaaaccatgacctaaaatggtcttctccctttaattgccaaccagaatcagtgcgctagcgacttgttcgcctcgcgcaaaccaaaacagaaagaaaaagccacaaaaaaatcaaagccaaaac

SEQ ID NO: 106939 - DNA, 377 bp, Glycine max
  unsure (1)..(377): unsure at all n locations
agctntgttagaacttanaattaatgtgtttttttcttgtcctttttacctattaatctttacatcctttcaatgcttgaaacaccaaactttgtcaaaatacagttctgttgaaactttctagatcaatctaagcagaatctcctataaattcatatgaggctataacttcagatgggttcaacacaatcatgataagtgcatccctctagttcatgcatcacaagtcacaaatcacaacctaaggcaatgcattccaaaagatttacatgggattgtattagaaattgctcttatctttaatcatttatttttaaccaaacaaatgaacaactcaatcgtaaaaaagaaaactgtacaaatttctggtctatata

SEQ ID NO: 106940 - DNA, 349 bp, Glycine max
ctgtttaaacctcaaatattggaaaagacctgcttatgccaatagaaaatataaatccagacctggttataaaaactaaggatattcagtatgggaattttgaacaagaggaatgtataaaccacataaaatccctcttggatctaaatagtattgtatctagcactaattctcataaaagtcctgcttttattggtaataaacattcagaacaaaaaagaggaaaaactaaaatggtttacaattataaaagcttaatgattacccttacataatggaacactattccttctaaaatgtgttgattaaacgatacacaaagcccatggttttcgaaatttgattaaat

SEQ ID NO: 106941 - DNA, 376 bp, Glycine max
agcttgagaatggagaattgctcaattcaatctctacgcatggctccaaagtcgaaggtttaaaacacatgaacgaaaacgcaattcatggggctccgaaaaaggggttaagaatggagaattgcactaatcaatcactacgcatggctccaaactcgtaggtggaggacacatgaacgaaaacgcaattcatggggctccgaaaaccgggttgagaatggagaattgcactaagcgatcactacgcatggctccaaactcgaaggtggaggacgcatgaacgaaaactcaatgcatggggctccgaaaaagggtgagaatggagaattgcactaaaaaatcactacgcaaagcttcaaactcgaaggtggaggac

SEQ ID NO: 106942 - DNA, 397 bp, Glycine max
  unsure (1)..(397): unsure at all n locations
gcttatcgcgcgaagagatggcgcttagcacttggattgtgcttaacggataatcaatctgaaaattttactaagtcattttatgcatatctcttccacataatataaaaaccctttttgttcatttctaaacaagctgaaataaaatacaatcactagcaagatgtcctaactacatgcgataaatagaattgaagattgagaacggaaagaaaaactgggttgcctcctaagaagtgcttctttaaagtcactagcttgatgcatcatgctattatcttggatctaataaagttcccacttcaaggacctttttctcaagtcttcttttctccatcacatgaactttaaaacanacattccggtcacgtggatctttatcttcatgaaatagatc

SEQ ID NO: 106943 - DNA, 316 bp, Glycine max
agcttgtgattctgagctagttatttttgaaggagccctaatgtctgtggattatggtataaatacgatcgttgaccaaatcctattttatgattcaccccaataggcaatcataagtgtaccattagagtgcgcactgaatgaccattggatacaagatctttcttgacataatatcacacggctgagaggcaccaacccagccgttatgaacggaaagcttatagactggtcagtggcttcagaaagccgaaaactgcataaactaaaagatggcctcttgcatactatatttgtataccttgctcaggtcaca

SEQ ID NO: 106944 - DNA, 407 bp, Glycine max
tgccggcatggagatttccgatattgctcttgtgtggtggaacaagccacaaaaggagagagctagaaatgaatagccaatggttgatacatggacggaaaagaaaataatcatgaggaagcgatatgtgccggctatttactcaagggacttgaaattcaagctccataaactaacccaaggcaacaagggggttgaggagtatttcaaggaaatggatgtgctcatgattcaagcaaagattaaagaaaatgaggaagtaactatggctcaatttcttaatggtttgactaatgatatccgtgatattgttgagctgcacgagtttgttgaaatggatgatttgcttcacaaagcaattccagtaaagcaacaattaaaaaggaaaggagtggctaagaagagtt

SEQ ID NO: 106945 - DNA, 375 bp, Glycine max
gagcttctaaactatgtacaattttgatttctctgataccacttgttagacaagtggcctcagatatcttaagaaaggggggttgaattaatatatttcacaccgtctcccctaattgacaacaactataacactttttaatcaagttatgaattcccttaatgacaatcttcttaaatattaagaccaaatgaagcaacttgaattctcaatataaagccataattaataaaggagattaagggaagagaaaatgcaaactcagttttatactggttcggccacacccttgtgccttcgtccagtccccaagcaacccgcttgagagttccactatcttgtaaattccttttacaagttctaaacacacaagga

SEQ ID NO: 106946 - DNA, 373 bp, Glycine max
agcttgccgccacagagtttttcgactatgctcttgtgtgggggaacaagctacaaaaggagagagcaagaaatgaagagccaatggttgatacatggacggagatgaaaaagatcatgaggaagcggtatgtgccggctagttactcaagggtgaaattctgatactggggacagatgtcgtacaggatgtcacgacatcccgcttcagaacatgcagattatatttgacagtgtgaacagtttaaacaagtaaataacacaagagaattgttaacccagttcggtgcaacctcacctacatctgggggctaccaagccagggaggaaatccactaaaatagtgttagttcgaagatctaacagccactgtt

SEQ ID NO: 106947 - DNA, 334 bp, Glycine max
tggagaggttttgcaaagaatactctatgaatcctatagaggcttttccaagtaatattcatggagcttgtcgaggcttaaagaatactagtgttacgagcttatggggctttgaaaaaaaaaaaagaatatcattggggggtgcttggtctttgaggagaaagtctataggagcacgtagtggatgtagcccatgttagggtgaaccatgtataatttcttggtgtgatagtgcctttctatattgctccttctttacttatgaagttgtgtacttaaaatctgtttttgtaaaactgtgttgtccaaaattatagctctgagattttagtat

SEQ ID NO: 106948 - DNA, 367 bp, Glycine max
agcttgtcgtgatggctaacttctcaaatggtcctatagaatggatgggttggtaaattcttggatgggttggtaaattcctagataggttaaggcctttgcaagccttactgaggtaagcaactacccacactcatccattattttttataaaaccctacttcctatgtagggttaatttgaatctccccaaatggttaaactctagagtacgactatattaaggaatgtgcttaggttaattgctcgagaggggaaatcttccagaagtgaagagtctgcatgacataccatgatatatagacatgtgcattgataattatgacttcagaatgatgtgctacttgattgttagacaaatgtggcc

SEQ ID NO: 106949 - DNA, 221 bp, Glycine max
gaatctcagctttcttagcttgctaaacttttctccccttggcacacaaaagccaagaactcgaaatcacacaggtttacatggggtagcaagatatagcatcacaagtttaaataccaatagcgcaactcacaaaccagaaatatatcaaccagaatccaattactgaaaatgtcaacaaccaccaaacatccaagactgagatttaaaatccacaagat

SEQ ID NO: 106950 - DNA, 370 bp, Glycine max
agcttgaaccatatcctgtgatagtgcgatcttaaattgtgagtgaatgactagcattgagtaatagtctctgtatcagtctttgaattttagaatgaaatgcataagttggaatgtgatgaaggccattgttctatttttaaactacttgaccagaaaacttaccttgacttataattgtatcctttgcaccctttgtgacctgaaatttcaaattgaaccctagcttgaatgaatatctccatctaccttgcttaggttctaggagagaatgtggttcaaggcaacttgctccaaatttgggggagttagttgggatgtgaagtgaaaaggtaagacacatcatcacacacaacaaataagttatgtt

SEQ ID NO: 106951 - DNA, 351 bp, Glycine max
agctttgaattcattctatgttctcttaggggtccatccttgcggggcatgtctttatcttcattcttctaccatcggtgatatttttctttgctttaagcaagtttcgactgatcgtttaagccgtaatctcacttaatcaatgttaaaatgaatttcaaccaattgtttgtgttgtaatcttgtttaatcacctttaaactaaaattcaaccgatcatttgtgttgtaagctcggttaatcatcaaaaaattaattttaaccagccatttactgcgaaagttatcctttatatgagttgaaaaataatcaagtgaaaccaaagctaaaattaactcataaacaagcttt

SEQ ID NO: 106952 - DNA, 367 bp, Glycine max
agcttgaatacaaataaattttcttagcaaagaatagacagtatgatcttaagtgtatcatccaatgatttagtagagtttcgcttcaaagattttgctaatctcttctatatttttccctgttatgcttttgagtagagactgtcttttatagacttaagagaaggatccattataggattagcactgaatcttgatatggttgttgtctcgcatgtgggggcgagacaacgtgacacgctttgatttgagaggaaaggaacaaaagtacagacaacaacatatgctcctctttcgcgtcaaaaacgacttctagcggaattttctgtgaataccctctattctcttctataatgtcatttcctta

SEQ ID NO: 106953 - DNA, 405 bp, Glycine max
tgacacttcaaatctaagcttcaagtacaactttttaatagggatactaactatcaatcttatctcaagaccccgtgcctaaatagctaataggccatttaccaagtttcaatttaaggaacaaaaaagatttctaccgtacctattggctatgacttatgtctcacagaaaatactttccctagccagctaaaaagcccaactaccaaaatgaacctccttcccttctttcatgcacacacaaactatattaccctcttgcttatgtcacccattccctcttaatgctaatgacctaccatctctttccatttacttagaacccttcatattctttttagactacacttctgtgagctttttccattgttggcccaacatattaaatgatttactatatcaaag

SEQ ID NO: 106954 - DNA, 367 bp, Glycine max
agcttgtgtgacattatccactgctgaagtagaatacattgcaattggaagttgttgtgctctaagtatttggataaagtaacaacttcaagactttggggtaactcttgatcatattccattgaaatgttatcacactagtgctataaatctatctaagaatctaattatgcattctagaatgaagcatatagaacgcatcattttctaagagatcatgtatctaaaggtgattgttgcattgaatttattgatagtgaacacccactagttgatatctttacaaaacctcttgctaaagataggaacttctctataaaaaaatgagctaggaatccaagatgaatctagcattgaatgatgttat

SEQ ID NO: 106955 - DNA, 394 bp, Glycine max
  unsure (1)..(394): unsure at all n locations
tgattcttgaattcattcgtcttcttgaatcttgaagtgttcttcaacttttcctcttgagtcttaaattattcttgaatccctcttgaacatcttgaactcatcctttgattgacctttgagctttttgtcatcacctttgtcatcatcttttgttatcatctttgttatcatcaaaacatctttgaatcattcttgattcaccatgaaagcttgcttctacactagcttcacccgtgaactccgatgttgcaagcggtactacacttaagatctggggcaatngaagaagtcactgcatgttcttttatttttgggggtcctcatgattccccctgggatactgtcctctgaaatttctcatccaagctttaaaaaaaagaacttgatggag

SEQ ID NO: 106956 - DNA, 363 bp, Glycine max
agcttggagtatatatccaattatttagtatcattaaggggtacttgtagtatattgccctttgaacaattatgaaaagcagggcatattttctggtgtttctcttcatgtttgcttcttgttggttgaatttgtatacatatatttgtttaccttgtgcttagactcattctcttataagctgagcttttaacttaaaaatttgtttaagggaaattagacatgtaaaagtttctaatggttttaaaatacatgggttcgatttctaatgaagaaaaactccttgaggcagttctttgatttgtattggaattttatggaagaaatttgaccataatttatgttgtttggttggtaagtgta

SEQ ID NO: 106957 - DNA, 376 bp, Glycine max
agcttgacatcggtttttgatttaactgatgttaatataacatacaacatcgatttcttttattaaaatcgatgttattttttaggattttttttaatatgctgtctatttttttaataaccacaaaattaacctacaaattttaatagcagaaccacacaacatataattttcattctgttttaaaacaatttttttcccataagtttcatcataaatttattatttactatgaattaaaagaatatttaatgttgaggagacatggattgtaaaaaatgtaaagtaactaaactacaattacgaaattgcctaaacatcctaggtttcatttttaactttcaaataatattttttccactcgatgcaaagcgcc

SEQ ID NO: 106958 - DNA, 376 bp, Glycine max
  unsure (1)..(376): unsure at all n locations
ctttagaatgtgacanacaaaaaaactacaaatgatcttccaagaaaaatttgacagaccatttcaaaaatgagaagagtatgatagtatcaacacccaaaagtgggatgagtgaacaaaaataaaactaacccatccaccaaagtagtagcatgctctttagtacatatggcacatgatgaagatatcaaatactacagatttgccagcagcccagcacaagtgcaagaagatgctcaagaggtgtttatacggtgtatcgaccctttgatgctcctttggttctagaatcatcctgcaacacatagagatgtaagaatcatagatatttatgcattacgctagtcaatcaaaacttatgagcataagtttacat

SEQ ID NO: 106959 - DNA, 363 bp, Glycine max
agcttgtttctacaatctccctcttttttatgatggcaatcctgaaatcaggaaacacatacacattctttttcctagtcgatcagtcacttaattctccatattctccccctttgtttttgagtttaagcttcacttgaaattaagttatttaattatatgagttattgatttaatccctattttctctccccctttggcatcaacaaaaagccaaagtgcgtaaagcatacatgattttagaaaaatcatacacatagcatccattataaatcaatcataaaagattctaacctaatcatgaagcaagacatgaataaaccaaactaaaatataaaccacatagtcatataacataattca

SEQ ID NO: 106960 - DNA, 374 bp, Glycine max
ttataagtgcgggttcgggagacaaaggtcaagcgttcgcgatatgctaagatgatattccgagtactttggatttggtacgaccatgctctcctgatttccagctgggaaattggcgaatggaggaacgccccagcatttacgcaacaagcataatgtaaacctttacggttttaaaagctctatagttgggcctaagctatagagctttcattttgttaaggctttgtgtcttttgtttttgaatttataatacaaggatctttcttcatctgttcttggtctctacccattctcattcatttgcatgtttacttctttttctaaaaacggcagattcgatgacgagtcccccgaagtactaatacctggga

SEQ ID NO: 106961 - DNA, 325 bp, Glycine max
agctttctatggccttaagcatgccctaaacaatggtttgaaagactgcaatctactcttcttcaatttggttttgtggcaaacaagtgtgatccctctcttttcatttacaagacttgctctcacactacttatctcttagtctatgtagatgataacatcattaatggcagttcttcatagttgattcaacacctaaccactcccctcaactcaaaattttctcttaaacaacttggtcaactggattactattttggcattgagactaaatctctttctgacaggtctttacttctcactcaaagcaagtataaatgggatt

SEQ ID NO: 106962 - DNA, 429 bp, Glycine max
aactcaagcttgagcttggttcaaccccgtaatccaaggaatgttaattctgatcgccaatactttaacaacatctcatagggatgaatgactcgggcatactttaagcttatgcacagaaaatgtaattatgaaattgagatgcccgatgaaacaccatttcctaatgaaccatgcattacgtaccatgttcaattattttgtttttaagtgaaacgggtttatgatcccaacactgttggctcgtggtgcctaacacatgaaactaagaatgtagtgtgaagtttcacgcttcccccttttttgtttttgttctgtagaggaaaacgcaaggatgagcaaacattaaaacaaatggtatgcaattttgcatatcaaaaagtttgttgaacgcatatgcatgatgatgccatgactcatgcaaaatgt

SEQ ID NO: 106963 - DNA, 374 bp, Glycine max
agctttgaacaatatacttggtcttcatttaactgtctttgggcttggcggccacgctcaacaaagtactttcgacacctactatacgttgatttcaccaatgctgttatgggaatgttgtgacaatcctttaaaaccttattgatacattctgagaggttcgttgtcatgtggccatatcgacgtccttctctatcgtaagccaccgtccatttttcctttgagatgcgatcaatccatgttgctatagctggactcagttcacaaaatttttctaaattttgataaaaaatcggcttgcatggagtgtaggctgcataaaattagttatgaataacaattttaagtataaatgaaagtaaaataaacgtgac

SEQ ID NO: 106964 - DNA, 404 bp, Glycine max
ttacgagcaagatttaagtttagttagctcacttgcaaatctaaaaaaagacgattaacgaaaatcatgggtgataagctattgcagtatttcatgcaactcgaattggtaccaccaataagcaatttcctttaagctttccgatcaaaacgcacgaatcaaagttattggaggcatacaaaaatggcaaatatatatattctacattggcatgtcccgccaattagattggcggcatgcttccagcattttaatatgggtgtgtctcacaggaggaactgacgagatcagtgcacatcagcatgtctcgcctgtgccactggcgacaccctccagttagcgtacttctcgccatctgcaatggcggaacacctatgtagccagttcttctggcggcatccatg

SEQ ID NO: 106965 - DNA, 367 bp, Glycine max
agcttcaagtgttttatcctttctagattagcattcggcttggacaaaaatatggcagaggggttttgaaccaacgaaagcttattttggatgggccaaaaactaacagaatgatgcttttgctccacggggttttggcccaacaaggatttgtttggttgggtcagaaaacgacacaatggagtaattccccttaattctttgaacatctccgcccattatactctaatatatttttgtccatcatccactttctaaacgtaatctaaccttctcacaaatgaaatagaaccatcaattccttactctccatttagtcctcttgacatttgtcatagaatcgattgcgtagcccccatgccatgtc

SEQ ID NO: 106966 - DNA, 373 bp, Glycine max
agcttgcttacccatgttatcttctaatatctcccacactttttggggtgggccattcttggatggccttgattttctcacggtccactaggacccgagttctaccaacttaacaccctaaattgtcaattacaaaataggcctcaatttaggtggttgagctctctttggtgaatcactcaatttggagtgcttattaactcaatacctcttaaggtggtgggcccatttcttcttgactcaaattcttggagggatgacaccaatccttctttccaatgccctacatggcaattcacacacaaggaatcaaagatgcaagcgttaacctaagaccgttgaaaaatctaatgaaggcttacccacctcaccc

SEQ ID NO: 106967 - DNA, 307 bp, Glycine max
tttaccagggggacactactcttaaaacaaaaatggcatattaccccctcttataaataccaacatcaatgtaaacttagagcctacttatgcccatgtttccttacgaacgttctgttgcacaatacattctattaactaagaaaaatgcgcccatatacaatctaggcagctgacttacctatattatttacacctactttcaaggtgtatttgatacttacatcacacacatctccttggctaaatttacatacttgcatacttcgagcattctggggtaccaaaaattgcacatgtgcacatc

SEQ ID NO: 106968 - DNA, 372 bp, Glycine max
agctttgcttggagcgtcaatgtagaatgaagaagaataaaatggcaacgtgagggacaaataaagctgtctgaaaagtgtgggggctgattgaagaaatacaaaagctttttgggtttaaataaaagggttttcctctttttctattattttattataaactatgccacatgtctccatttgagtggagcaagaagggccccctttctcttttgattgtgacccatactcagccacataagtgaggaaaatctgacctttgaaacgctaaaatcctgcctcagtttacgtgccgtttgtctggttacagttcctcacgtttctctgcgtacgtcggggccagtttttcaaagtacgcattatatatatata

SEQ ID NO: 106969 - DNA, 406 bp, Glycine max
tgcccgagaaggagtcccggaggaaatgcttatcacctcaaaagactggaaagcggtttctaatgactcctctgcggcttccacataaggcatagaggatgggcctctcaccaagatgtcttcctcgcctgatacgatgaccagatgcccttccactacgaatttcaacttttggtggagggttgagggaacaactcccactgagtggatccatggccgccccaacagacagctgtaggggggttaatatccattatttggaaggtaacttgacaggtgtgagggcctatctgtaccgggagatcgatctcccccctaacctctcgacgggtgccgtcgaaggcacgaaccaccattgaacttggctttaagtgggaggcattgaatggtaatttctccaaagtgc

SEQ ID NO: 106970 - DNA, 372 bp, Glycine max
agcttgttgattttaacttttatgatgagatgggaattgaaaggaagacgcatagcaaacaaacaaacaaatctttaattatataagagtaaaaaatcaagaatattttttagttgcttaagagggacaaatatagcaaactagaagcaacaagtaacacatcacatacctttttctgacttgatcccggaggagtgcaaaacaatgtctgtgatgccggtgtcggaagagtggaggtggcatccatagttgatggttggagttagaatgttggaattaaaattggaaagaacccaagtgcaagtagaagaagagtctcaaaagtcaaaactcattaataaataaagcatcatcatttgatgatcattgcat

SEQ ID NO: 106971 - DNA, 371 bp, Glycine max
agctttagctggaggtgtattctcttttattcctcaaggctgttaatgttatcagtgtggctccttaggatttaagaaatgtctagatgaatactctattctactgtggcccaaatggagtttcgtgtctcccatattttctgagatagtaatgtatgcgctgatcatttggctaactatggtgtagaattactctattatgtgggaagataaactttgaatttggatgaggtgtacaaggggagatacttggtgttgcaaggacagaaaaataaaggtaaccttttctatttggatggacaagccttgaagagaaaccatgatagcaaagtgaagaagaaaatgaagttttctaatagtgtagaaatgtt

SEQ ID NO: 106972 - DNA, 281 bp, Glycine max
actcaagcttttgggtcgcacctcgattgctagattcaaatctttgaactcctctatcaatctctgctctaaactcatcatagtcgcaacatgtaaagatttccggcttagcgcatcggctactaaattagcctttcccggatggtaggaaagaccaaaatcataatccttgaggaactccatccatctccgttggctcgtattgagttccttctgatcgaacaagtatttgagactcttgtggtcactgagaacttcaaaacgagtaccgtataagtaat

SEQ ID NO: 106973 - DNA, 368 bp, Glycine max
agcttataagaacgacattgtctaaatcatttccaaatatgcatgtgaattaggaagcatcaacaagaatcaagccacggctattgtgcaagcaatcaatggggcaaaacacaccaaaagattatgatgatggatggctcgaattctcacaaaggtaaacttatcactttcaaattgagctttcaaaactatcatgatctgtaaaggaaaaacaagaatttcaagtcacaaaatgtcaagagacttttattttcagaacaattacccattacttgaacatatcctataattcaaagaaaaacatgcaaagttgtacatgcaaacagaattgacctaaaatattaaactagaaacccaacaaaactaac

SEQ ID NO: 106974 - DNA, 344 bp, Glycine max
gatatcttctctatataaaaccataataacatctgcataagccaaatgagatagctgtatacctgcacaattgggatgaaaattaaaattggcatcatccttgcggttgatcatatctctggaaaagtactccaagcaaacctcaaaccaatatggggagagaggatccccttgaataagaccccgttgccctctgaagtcgccataaatggctccattgactcccacactgagggaagtggaataaacacataccatgatccaagtatacaacattgctgtgaagccaatggacttaagcttccaatgtaataattcccaggaaatggcatcataagctctat

SEQ ID NO: 106975 - DNA, 349 bp, Glycine max
  unsure (1)..(349): unsure at all n locations
tgtcattctcgtttaagaatagtatccactgtaaaataactttcaaatgttgccttcncnngantggccccgaggaagcttgcctcatagatgtccaggaatgacaangcatcataaggaactatttccgctccggagtatgatagtcaccgctttaggagcgcggtacaccatcagcgcttttaagccgtcatagggttgtctctttctccgggagcgacgcgttcatctcatggactacgagtatactgattntcaggatgaaatatggcgccggtggtggcaccactggtactcccatggcaagtttgatcagaaaaatccttgagtttatgcaatgcttggcaac

SEQ ID NO: 106976 - DNA, 224 bp, Glycine max
gacatttgtcatgcacactccatttcagtttaaagtgcctgtgcttacacaatacagcagcaattaccatttcagcgagtttttcagccattgactcatcgagatgacaacatattgcaaatgaattttttacctttgacaacagccatgattgggcatattcagcatacagaccaatctaatacacatatactactatttgtaacaatgataggaaaaatgta

SEQ ID NO: 106977 - DNA, 178 bp, Glycine max
  unsure (1)..(178): unsure at all n locations
attctattgattgaaattacgtatatagttcttttttaacatatanacctagatatcttattaccagcccaattaaaatccgcaggatggcaactgataattgttataattgagaaaattacaatgtgggacactattacaacagaagaaatattatgttctagggtagataagtcca

SEQ ID NO: 106978 - DNA, 112 bp, Glycine max
aagaaaatatattataaatcaatggagatatgagattcctttcaaacacttggttgttaaattgcttggactggaggtcttcttttctttttgtctttgatttgatttttgg

SEQ ID NO: 106979 - DNA, 172 bp, Glycine max
  unsure (1)..(172): unsure at all n locations
agctgtgatacaggtcctacttctaatttcatatcacgactatgaacagaaaactgctgtttctcangaatgacacgtctattaactgcttcctgngctatatataaatagaagcagatctatgggatgcataactctgatctacataccctggttgtatatcaattttcta

SEQ ID NO: 106980 - DNA, 99 bp, Glycine max
tgctccttctacaactatatattatcactgagttgacgtctaatgtgtgcactattgcgccatcatgtcttatttcagtgctggttaaatgtagagaca

SEQ ID NO: 106981 - DNA, 139 bp, Glycine max
tgttcaacctcgctttcgcgcgacgattttttattcgtataatttgcgatgctcgtttgcgaatggctgcttcaccaaagtgtggtccaacgcctgatttatctactaagaacactgcgaaactttgccgcgttaaaat

SEQ ID NO: 106982 - DNA, 144 bp, Glycine max
cgttctactcggatgtccgtatgagtcccgtaatatatcgagacgctcgtaattgataacagaagctctgatcaaattcagacgacaataacctttactcggatgtgcgattgagtcccgtaatatatcgagacgctcgtaatt

SEQ ID NO: 106983 - DNA, 274 bp, Glycine max
gttatacagcgtgtttacgaccacacatggaagattcttatgtaacttgttcatacacgtgttatcggctcctcgcatcataagtatgcgtgtttttaagctctttatacagattcaatctcgaccatcaccccagggagtttggttgatctcagtctgttaatacacggtgatatacgaccatcgctccacaaagtatgcgtgattgtaacttagttcattgagcgcttttcatggaccattgactcacaaagatagtgtgattgcttactat

SEQ ID NO: 106984 - DNA, 321 bp, Glycine max
tggccggtgtcttcaaagacggtacctcgttaaccgacactacactggactagagtccgtgttgatatacattacagccgaaaaggtaaaaatgggctggactggtaggggcctgcttacttctaagtaatgaggaagataaatcgtggtgctatataaagagggaggatgaaaaccccactcattatagctaaggcgaggatggattaatgagggatcactctaccacggcctggaagaagatgatacttggtgctagggggacagggaggttcataggcatatagaataatgatattttgcgggatcaccttcgccaaa

SEQ ID NO: 106985 - DNA, 362 bp, Glycine max
  unsure (1)..(362): unsure at all n locations
tcaccatcgatctgtacctnatactaaaatggtcatcatgacatttcaatggtaaggcatgttaacatgaatatcaaatctcttttgatatattattctagtttgaatgttngaacacatctctatcaaataccttctctttatatattattcagatttgcagtcttatgataaaccattaacacgccttcttttattttatgtatccatttttngcgtatccaatactttttccacactacaaacgaaaaacataataagcgtctacaaaattatttgttcattaaaactaattatagacaagagtcatctagctagatactcnggaatagttatcanaattattctagtcatacataatc

SEQ ID NO: 106986 - DNA, 209 bp, Glycine max
aatttatggcatggaataggcagatattctcttttatcaccatgttcaaaatgtcttatcattggctcatcagacatttgcgtcggaatttaacatacctcaggtaccttttaaacatagacatgattttaaatagtgagatttttaaacagtgtttcactacatattctttcccttttcttttatgaagctttcgtgggtctcctttt

SEQ ID NO: 106987 - DNA, 363 bp, Glycine max
  unsure (1)..(363): unsure at all n locations
atagaacatgttntctcatgcaacgactatgaggaggaccacnaggtgaagctcgctgccacngagntttcgactatgctcttgtgtggtggaacaagctacacaaggagagagcatgacatgaagagccaatggttgatacatggacagagatgaataagatcatgaggaagcggtatgtgccggctagttactcaagggacttgtaaattaagctccataaactaacccaaggcaacaaggtggttgaggagtattttaaggaaatggatgtgctcatgattcaagcaaagattgaagaagatgaggaggtaactatggctcgatctcttaatgggttgactaatgatatccgtgatattg

SEQ ID NO: 106988 - DNA, 163 bp, Glycine max
ctcactttgattatgggcagcaattattgtacctatttgtaactaatttttgaacaatttatgaataataagcatttattgcttaattaaaacgttaaaactaaatttcccgtcctttattttattgatgggcatgtattacctgaaaagacattttattatt

SEQ ID NO: 106989 - DNA, 509 bp, Glycine max
  unsure (1)..(509): unsure at all n locations
ctctaagcacctgagcatgcacttctccagtttcctcctacctataattcatatcttcgattccactcgaatctcaccatatcacgttccagaaagcccaatcttcctctatttcactcctctttctctgccaccgatcacacatcagagatacttcatcaaatggcagagccatcaaagaagagaaagggatcatcttccatcgtcaccgctgctgctcatcgtcgtcacgtgccatccggagcacccacaggacctattccttcttttttgtatcttcaagacatcacactgtttcatccgagatcaacgctacggtaccttctcagtttttctagataatcctagacctacgacctnacgtaaagttttaatgataaacgttgatgctatcaatgtcaaatctggcctgtgattatgtatttaatgcatatatctgactagaaggctctctgcataaaatcagatgatattatctgaggctctttatgcatgacacacttcttttt

SEQ ID NO: 106990 - DNA, 167 bp, Glycine max
tggagataggaaaaggattttttttttaaggaggggaatgtttgggaataaagcgcagtgttttagtaagaaggagttacatcagttgtagacacggaaggggaatacaatataatagttcacacgggcttgaggaatggaaaatagtaggctgggagataaaaatt

SEQ ID NO: 106991 - DNA, 438 bp, Glycine max
  unsure (1)..(438): unsure at all n locations
aacatcatatacacatgtntcagcaaatgtggcctacattcacaagagatgcaatcttactatatatttatggtaatcaagattcaagatcaagtttctttaatacagagcctatctcccttggctgctcttgtctcttctgtttcactctctaaaaaataattccaagaacccctagctttatctcttgtgctcacaccctcaatatatctgttcactttgatttttcacagtataaagcttcagtgttattgcagaaggtttagcatatatctcagttagataatgaagagaaaaatatacatctatatatgcatcactacctgtattaccaaccatctgagatctttcagctatatgttngttatggccagtaactaaccaacatctactgcttcacaactaactttganaactgattctgagacacatttcaca

SEQ ID NO: 106992 - DNA, 168 bp, Glycine max
atcatcgacttaaagctgtcgcacagcacatgctcagtgatggagtcagttgcagacatcccaaatttgaaagtacatcttttggtgctattccaaatttgtgttggcgaccctgctgaagccactgatgagggaaatggcagacattttggaagcactactctatgc

SEQ ID NO: 106993 - DNA, 407 bp, Glycine max
  unsure (1)..(407): unsure at all n locations
accacactagctcacttgtaaatagaacgccaaacagctatgccatatgaaagacataccccgagggaaagagaagcccantgaaagatgaagccanagcanacactataagacataatgtgctaagcccaatattgaggccagtaatattctatataatatttatgatttgaccaactgttaaagccatgcatttttatcttttgtcagctacacatagaatggttgtgttgaataaaaactttggattgaaaagtggggagagtctcttgggtcctgtaaccaatataactatcaagaaccttggggttaccaactatctcttacggaaggggttactgctatttctaccgagtggttactgatatttcttacgaggggctactgatatttctaccgagtggtac

SEQ ID NO: 106994 - DNA, 129 bp, Glycine max
taatacatatccaactctatcataatatcaccgaatcaatactatatgcacacccaaattcagatgaccagaaatacaagtctacttatgtatctaaacaaaccaaaccgttttaatatacgattaatt

SEQ ID NO: 106995 - DNA, 413 bp, Glycine max
  unsure (1)..(413): unsure at all n locations
acatcttcttctatctatgtgattctagactccatctcattgaagcgcangtgcactcgtaacttcaaagtatgaacctttcccaacnaaggaggaagaccatcgaacctatccataatctttgaaagaagagatgaatcttctccaccatgtccttcttcatcaacatgtcgagcactctttntcacccaagagccatcatgctctttttgataaccaaaggatgcattgactgacgttcctattataaaggatctcttgattggaacatagggatcagaatcaagaagggatgtaaagtgttgaaggataatggtgactatgtgtggatatggcaatggagcattctatcgcaatgccttatgcatgcgatatctaacaagaagtgcccaatcaatattgagacctttatg

SEQ ID NO: 106996 - DNA, 441 bp, Glycine max
  unsure (1)..(441): unsure at all n locations
gcttaagctggtagcattntctgttcaatcatttttagaattggctnngatatttccctgatgaggaggtggactgtatttgtcttatattaagtggcctgctgggataactgtactgcaagtctcatcgttctgactagtgagagcaagacatctagtatgccattcagtatggttgaaatgtgaatgccaagtgcataaaatctgtattgatcgttacttatatccatagggtaacaagagaagtgccgttgtacagatgacgagagaaatcatttcaaagaacttttatctaggggattttagataccttagaaggcacatcctggtgttatgatatacatattgnggtaccgcatggtggacgcagttaaacaggtattttacacactcttaaatgattattatatattactgtggtgtaaatctagggatatgata

SEQ ID NO: 106997 - DNA, 403 bp, Glycine max
  unsure (1)..(403): unsure at all n locations
gatgccagcttggcctcattcaccgccttcttggcatctatcttagcaaccacataattttctcattttcaaaatcatacacaaatccacgctgtataacattctcttttaaccttatcttaatattgcacactagcattcctccaacaagattatttaaccttatcgtcccaacctcttaatatatcaacgatctaatttgttacctatttactaccattcacccatatgtcctatatatttgcactttccaggcccatcctcaagaactgtccatcttggctcttgcttactctcttctcaactcctatattcaagacctgacctgactctgagttggtgagtcattatacaaagctctcctcatgtatgactgtgtaatccatgcanagtattctgtctg

SEQ ID NO: 106998 - DNA, 88 bp, Glycine max
atacactcgataattagtattcttatttcatggtggttgacaatatgaatatgtatatgacatgtgtctttatatatctatcatgttc

SEQ ID NO: 106999 - DNA, 326 bp, Glycine max
cgaccgtcttcaatacagttagggaagcagaaccggtgctacagcccgcaataaacttgtgttgagatataaacacgactatagcggtcggaggtatagtcctcaagcttacccttatggcttgcctccggacgatatgagccaagtccctacctttgaggggcaactccctccttatgccgactatctcctgcaagaagacgaataaaaaagatgcgcatctaaggcctttggttgccctcaaggatccggtcccccatgaatttccccaaccaaacatagtccgtcatgatccgtctccacccgcacccattaaggaatccatt

SEQ ID NO: 107000 - DNA, 284 bp, Glycine max
gacccttaataggtgaaggagtggaaggtgactgaccaagaccaatcaatccagccctctttgatcccagccctgtgatgctaacaacagtagactgaccaactttgccatagaaatcctctgcagaagaggcttcagctaataaaccacccaactgtgagtcgatctttctcagaatcacattctcaaacgtcgagtttgcattttagccaatcttcttcgaacaccactgccaaatggctctttctatcgtccatcaacatctagaccaaagagacttcacg

SEQ ID NO: 107001 - DNA, 266 bp, Glycine max
tcccctattgtaaaaccattctactgcttgagttgcgacaaaaacgattctgtactgtgtgtaattttcacaagtctgcctcacggttgctgattgataattaatattgcaaattcaacaagatttatgctatatgatttcttgagaatttaacctagaatcaacatcttttgtaggaaatgtggtgcccagttggctcattatagcgacatttgggcgaaatctccacagtgtgctaccaacaaaatgtgtgccaatcagtgaat

SEQ ID NO: 107002 - DNA, 447 bp, Glycine max
  unsure (1)..(447): unsure at all n locations
gcttctcaaggatgctacctagtctataaatagaagcatgtgtaacatttggtgtaactntgatgaatgaaagtcttatgagatacacttcanagtgcacttctctgcctcttttattccttcaatttcgggctccccccttctctctttcttttcctccattgaagcatcctcttcaagcttcttgtccaaggcaattctgggtggtgaagctncttcttccttgggctaataccaagaggatggtgcctcccctgacctcttctcctttgccttccgctgcatctccatggggaaaatcaccatggaaggacctcatcanagctcatagatccagtctccatagaaagctcacaagcaagcgttcatcatgaaccacatatggacaccccttccttggtgtaaaaaattcttacaacttaagagactcacagtctcttaaacaac

SEQ ID NO: 107003 - DNA, 144 bp, Glycine max
tagttaagtttttgtatgcttggcttgtttaattataacaggacttctattgtctactttaccattatcattgatgtactttatttgaacgaatcatgacatcccgatgtcatactggccgcttactctcaaacataacgaaga

SEQ ID NO: 107004 - DNA, 393 bp, Glycine max
  unsure (1)..(393): unsure at all n locations
atcaacttacacgtgcatagttctccttgatcantttgacacttcatgtcttataaatngcatttggagggaactctgcttactctatcttttgagctattggacttatattactattaatttctggtttcaatgtcttggctcagatgtattgttttcctagtggaaaagcctcttacatttattactaggatataggtctgcaataaataatgttgagaacaacccaagtcttggctagagatggtgtcaatataaagtatataagtggngacaaccctcacactattagctagctttcggnggtgagttagatccgaactcacattctaagataaaatgagtgcacaattgcacatatatgtacatgtgtatgaatttntataacttctg

SEQ ID NO: 107005 - DNA, 57 bp, Glycine max
cctgagtgtgtatttgcggattgtgaatatgattgattgtgtcctttacaacacgct

SEQ ID NO: 107006 - DNA, 334 bp, Glycine max
  unsure (1)..(334): unsure at all n locations
aatagctaagctcacctgcttgagatgagaagctagaacttaactacacacccccaataatagctaattcacccgcatgacaaataacatgaaaatacaaaaaaaaagttcttactactaagactactcacaatgccctgaaatacaaggcttaaaccctatactactagaatgggcaaaatacaacgtccanatagaaggagaaacctattctattatttacaaagataagcgggctcatacttagtccatgggctcgaaatctaccctaatgctcatgagaaccctanggccttcccttggatctctagcctaatctactnggagacttcta

SEQ ID NO: 107007 - DNA, 181 bp, Glycine max
cggattaggaatcattgacaattaatgtgttgctggtaggaggtgctaattactcattaattcatctcaaccaaaatcttgatgaggatggacacaaattggtgttgttgactgactgtaactatgtcagatggctgagattattgcaaatgataagacggattcaactgcttcaattgtg

SEQ ID NO: 107008 - DNA, 391 bp, Glycine max
  unsure (1)..(391): unsure at all n locations
tgctcttaaaagtgcatggatggatgtgtgatgtgtacacattcatatatctatgagttgatgaagaggtctcatcttaatttattttcttgggcttctactgcgtgaaaatgataaccattgtttaagtcattcaatttttttattgattaacaaacgattctcaatatagtttagaagaaaaaaaatcttatctaaaataatgcccaattcctttaacaattttttaacttgtttcaaaaacttggctctaacgtgaagtggcagagcaacacaaacaccttcgcattcaaaattngtgtcggcccacggggtataaatgttaactattaataataatgtctctttcatagaccattattatttatagaattgaattccaatttatact

SEQ ID NO: 107009 - DNA, 246 bp, Glycine max
  unsure (1)..(246): unsure at all n locations
gtctataggtctattcctaatatcacctggataatgtactgcagtntatcttccttgtgtgtcttgcctctctttactctgtgatttatgataatgatattcctgactttgcatctggcatactttttactgagagagatatcacagacatgtgatttatacattatgcatatatgaaactacactcttatactaacatcactgataattccgaagaaaaggcatactatactacatgtaataaaa

SEQ ID NO: 107010 - DNA, 291 bp, Glycine max
  unsure (1)..(291): unsure at all n locations
taaatatagagaactctntagacaaccattgtcgtttgtagttcatcctacataaatacactctataaactactaccatgcatcaatatcaatactctaatgtcactaaacaaaactcatctactcatttagtactcctccttacaccataacctnttatttagagagatgagacaaacaaagagaaagtttcgaaataaaaattaaaattcttacaatacagtagcagccatttcaatcacaatgcttccatcttttcgagttcgagtgtcaatataatattctacccga

SEQ ID NO: 107011 - DNA, 183 bp, Glycine max
tgcttctatcgaattccacaccacatgctactaaccttctacaccccagtatcacaagtatctaaaaacacaaacactctcacactatctacacactttacaacaaaaccacatgagaactgacaaagcataatacctatcgagcatggctgtcaatcaccaatatgtgcaacctgctgtcta

SEQ ID NO: 107012 - DNA, 303 bp, Glycine max
aacaaccatagttagactcatatgagcttcacaagttatcattcaatatttaataagaagataagccttaatagggatcaagatatataaataaataaatactcttgttgacaaaacaagacaatcgtgcgttatgaatttcaactccataacactctaaatcagctaaatccattttcacaacattctataggaagaataaagagtgaaaaataaaataagaaatgtaacttcgtaactcgcacttagaccaaagtgcagatgttaggtatatcaaagaatgaatatctgaccctaaaaatg

SEQ ID NO: 107013 - DNA, 389 bp, Glycine max
  unsure (1)..(389): unsure at all n locations
tactcctgcatctatttctatctatgcattttctttctntacccacatctcatatatgtntttatanggaaaaacaccataactaaacgcgccacatgcatgcctatcgcaccagatccatatctataacgatgggtgatcaagaggagacactcgaatatatgaaagctcacctgtcagctctgaaagaacaaatggcttccatgatggaaaccatgtcttggatgaggcagctcaatggaaagaaaggggccaccgctgtcgctatctagtcggctgccgaagcaaacccaactctcttggaactgcgcaccatcctccctcaaacgtatgaggacggtgaagggacacactgtggcacgatggcatccctcacctgggatacaacc

SEQ ID NO: 107014 - DNA, 207 bp, Glycine max
agtatgcttgattgcaactcacattattgacgctgttattcggatatcaactcggtaaagatgcgtgattgtaagctccattattcacgctgtatacgctataactccaaaagatgcgtgatgtaggctaataatttcgtcggtttcgctacactcgcaagttggttgatcttggtaatcattaggctctataggatcccccgaaag

SEQ ID NO: 107015 - DNA, 458 bp, Glycine max
  unsure (1)..(458): unsure at all n locations
gcacctgggctgcagctnctttagctttatcaggccttctgggggattttcttctggtattcctagggatgggcctctctctctcttctctttatcttctgctgcnnaccattgctaagaatcaccattgaaggaccttagtgaagctcaaagatccagccttcatagaagcttctcaagaaagcttccatcaagtggtatcagagcacaagagcttcaagtaggtgctccttaaaccctccattaaccttattggtggtgcttcattatctccatgtatatctctcaggcttgtgtgaatgtaataacatgattcttagaatttcaccantaaacttgctcagaactaatttgattcctaggtcacattctcgtcttgtcttgaccatgaatatgtgagttaggctctttgagttgtctgctatttttgggctgaactaaccataatcttacaaaca

SEQ ID NO: 107016 - DNA, 91 bp, Glycine max
taccctggttagtgtcagcaaaaatgtgactggtatggcactgcatccaatatctagataggatgatcattatctaccggggagatgtttt

SEQ ID NO: 107017 - DNA, 325 bp, Glycine max
  unsure (1)..(325): unsure at all n locations
acatgatcatacattcatggatctttatcttattatcacaatcaatcggtcaaagcataggggttttggaacatgacgncgacgttccggatgatntgtagggaaagtctctcgaggagaccttatcagaatntctgaacttcaacaagagatatatggcctcacgcaaggttccttctctgtcactgaattntattctcgagtaaaaatactttgggaagaactataaacatatatgccgtttgcactgtggttcctgtaccattaaatgcacttgtgctgcaatgagaaatgccagacattttcatactcttaaatatgctat

SEQ ID NO: 107018 - DNA, 237 bp, Glycine max
gttaagtcatgcaattaatttctcatactcggataaataagagcgctcgattatacggattattagacatcgagaaaaagtattgtgttgagatatatcaacttccgtttctattgacatcttcataatacgacctttgcggcatcaataaaagtatgcagggaattctaaagtctgtccaaatgacgtttaattattggactcacttcatcggataagtttttattaaaagctaag

SEQ ID NO: 107019 - DNA, 374 bp, Glycine max
aacactactttccatgcctggtcgaattcgtttctatgaacgagccgacaatgaacacataattatcacgtgtcgcaatctctattatagatgctcaatgaaaggaagtcgatatatcaacacatactttactctgtgctgtgagccgttaatgcacctcaattaatcagccgtcaataatacatattatccggtgcgtggccaattttgacccaatgaacgacttcaaacaacaattttactcggcaaatcgattataaccctccgaacacctgaatacgcatttttccgtgctggccatttaacctaataaatacctcctctagaaatttctctgcctgcttcctagccactacgccttatgaacattttcg

SEQ ID NO: 107020 - DNA, 297 bp, Glycine max
  unsure (1)..(297): unsure at all n locations
gaactgcgccgttagatggcaccgaccctgcgcgccggcgttacaatttatgtgaagtatataatttgcttatcgtatatattatcagcgacacagcgttaggcccatactgctaaaaattacgcccgcctgcactatccagactgtgtattattacatttgcgacatgagcattacaacgatgtgaactgatcgcacggatacacctgcgcttggttatattgccatgtgaaacgggggagaantgtctattgcacttaataaactggaactaccggatggtgacaaaacttttat

SEQ ID NO: 107021 - DNA, 216 bp, Glycine max
acttgatcttatgcggagatgttctctttatacattcaggagaaacttctagtcatggttccaattccgcattgaatactaaacgcagaggaaggacttcccaagggtgcagaatggtcgaggctgatcataatcatgatggaaaggtcacacaaaattctgaagtgacattatctgctggaattgtgactagagaagacactttgtcaatcagtg

SEQ ID NO: 107022 - DNA, 262 bp, Glycine max
  unsure (1)..(262): unsure at all n locations
tttctttacatntacctggatctagaagggctggaataatcttgctgtattatccatcatgagaactctggagagatgggtgaaatttgtgttacacagctcctaaaatacgacgttgatttcttgaagtcattgctactcaaaatatatatagtacttgagcaccatttatggaaaagtacaatacattaaatgcccaactttgtcgattaggctcgcttggtatctaaaaaatgggaaaatcattttttttctaaaaaaa

SEQ ID NO: 107023 - DNA, 270 bp, Glycine max
  unsure (1)..(270): unsure at all n locations
cactatggctactctggagattcgtgcgatgtccattctgtacaantgtgcagaagctaacatataatgttgccctaattgtacacaagacaggcttcaaatacgctctgaattcaaaacgttgcgcttagcgccaccctcacgcttagcgtgagtaaggggaattgagcttatctccattctcgcgctaagccttgctaaatgcaccttgctgggcttagggaactaatctcggcgcttaaggcgtgactatgatactgatgctctgcc

SEQ ID NO: 107024 - DNA, 198 bp, Glycine max
aaattgttccgccactaatcgtattctcatttcgaaaagctagagggacatttcacaagcacaggaggcgtgttactatgagaaactccatgtcaagcatgaggaaaccatccccgaaatatggcttgttgcaaatatactaggccctataatgtggaactgtggttaactgcggacacctttttttttttttttttg

SEQ ID NO: 107025 - DNA, 282 bp, Glycine max
attttaccgaatttatatattaatgatgttatttatataataatagctatcaaaatctattattaattggatatcaattatgacttatttatattataggccgaaacaaaaaaaatatgaacatttttaagatgtgccccccattgcacggcaaaatgtcagcatatgattatgttaggaaagaaaactgaaggagggtaaatgccacttacagactgaaacaataagtgataaaaaaactaattaaaaggctttcttattttctcacttttattatgtctc

SEQ ID NO: 107026 - DNA, 305 bp, Glycine max
ctaaatactgccggactgactttcaccaataatttacagtgggacacttcatcctacgtatctcacatctaaggtctatgtctctattctcaacctagattataataaccaccacactgtcagaacatgataatgtatgatcctgaatgagacatatacaccatggtgcaatactgttgcatccagcaaccatttgaatttctctaccgatgaatcccacgcactattgaatacgcccccatggacaaacatctgtagattgttttatactgtaagcgttcaacacatccctcctttcccaaccc

SEQ ID NO: 107027 - DNA, 430 bp, Glycine max
  unsure (1)..(430): unsure at all n locations
tcctactatgccttgccaccagactttagctngtggatagaataaaccctcttctaacccatcctataattatccatacattgccttaagagaattgacctanatacctccttatctgagagaagcctccaatgccactttgccaaaagactataagagtgaactggtgtagaattttcaccctcagccccttatctttctttggcagacatacgcaatcncaactaatccacataaatcttgctgttctaatgataaagctactttgaatagctgggagttctttaatgatcaactgtggggctatatagaaggcaaagtaataaagaggaacactaccaagaacaaaattctgcagtacaattctaccaccaaatgagatcttcttacccttataaacaaccatatgtttntaagacattataactag

SEQ ID NO: 107028 - DNA, 122 bp, Glycine max
ctattatatgcaaactgaccatttcaattcaccgaccaccttcctgattttgatataaaaatagttgatactaagaacactgatacattccgtggaggacatcacgtaagaaactaagttgg

SEQ ID NO: 107029 - DNA, 232 bp, Glycine max
caggaatttctttgtataagacacaaatgtactcttccacagaggtactacttatgaatgagaagtaccctagcgcatattctttttggatgtgtagatgaacatgtgccatattcctctctacaactcgagaatgctaaaagtttctatatatattattctcccatggcccaaatattacccttgttttttccgttttcctctagacccctcatcttaagccccccacccc

SEQ ID NO: 107030 - DNA, 419 bp, Glycine max
  unsure (1)..(419): unsure at all n locations
gtacctatgagtctaattgttcaatcctcataactcataataagtcttcatagatgttgtcattaactctacaccatgcctcatatatattaagaaatgaggcaaagagaattggtatgaaattctgtacttcaataataacaatgaatacattatgtataatctgtacaangggaacttaatgacctacaacctatgaggataaaatgaaataaaagcatattcttgtactatttatggacagctcatanacgtaataaatatgcaagaaaaataaggaaagggaaataatgctctaatgtcaataatgctctgttgcaaataatgctctgctatcacataatgttgttggtatgtagtatttaagctacgaatatatgctntctctgtaacccccgacaagctggaggtgcaaaaat

SEQ ID NO: 107031 - DNA, 167 bp, Glycine max
  unsure (1)..(167): unsure at all n locations
atcggactgagaaacattccatcatggcccctctatacttagttggctactactcatgctgtgtgctggtcatttgtgggggcctccgtgacaaatgagtgggggaggcgtgtattgtatggaaaaatcatgatgtcatcttcactctngactgggaagcatggcct

SEQ ID NO: 107032 - DNA, 364 bp, Glycine max
  unsure (1)..(364): unsure at all n locations
aatgcgaaaaggatgaccctatgctgctactcgtaatcccgtggtatgctttgaaagggaaagaatttttgatgtaaaaccccccctacgtattctataattgggcagggtggtcgccagacactacctgcactttttttgtattattaacatcgggaaggaaaaatacatgtcctccttcttaaatcaatttccaactgacttatagggataataagngcgatatatttttacttttaaacaacaaattaaaaaagtgaaaacaagatcgggtggttgccacattttgtttcccaaaaagaaaaaggcgctacccacccttgttgcttttctgaaataataaaggaggcattacgtaactact

SEQ ID NO: 107033 - DNA, 82 bp, Glycine max
cactcgatctttctctcaactcgatgggagaaatgcgcttcttctctgcctggatttctcacttcacttctcagctacttac

SEQ ID NO: 107034 - DNA, 482 bp, Glycine max
  unsure (1)..(482): unsure at all n locations
accacggattccatcaggggatgcaactaatcctctatacaagcaattgccatcctcattttgtagcatagcctgcaataggagtgcggcaagaccctttcaacttttcaaggaaggctctgtacaggaaatgctagcttgttcttcatgattcaggaacaggtattcgctgctaaatcaccaccacatatagagaaactaaactaataaatatgcaatngtatcaagctcggaattgtnttctccttgaaatatttaagatagaatagttcctcagtcctcactataaagtctcttatattgataaagtctcttatactatggattacacaatgtaatccatcattaactaattatcatctaaggaaacatctctgtacaggcccgagtggcagatgatgcnataatgcttatagtaattaatactcacatttatcatattactttacangctattcaatgaccttggcacagctgaacat

SEQ ID NO: 107035 - DNA, 231 bp, Glycine max
aaattaaaagcaatatgcatttaaggaggaggtatattatcataaaaggtatgcttagtcacaactgacatgctttgatataagaatgtcctcacacacacaaaacctatcacctcggatgacaatctaattgtctactcgtaaattcaagcatttctttatgtattgtacattgtcacgatgtttagtgactgcatactttatatgtatatgaagtgtgacacgtcgtat

SEQ ID NO: 107036 - DNA, 210 bp, Glycine max
  unsure (1)..(210): unsure at all n locations
acagataagagctcaaggtcaatggacactctctgaaaccatntctcacanatccctncttantggatgtagtgtggaggagaccgtcttacttcacccttcttctcttccgccatgacttagggagttatctttntctgtctccttctttactattattgcacttcgccaaatttattgattgttttgattgttctcgatcttatgatt

SEQ ID NO: 107037 - DNA, 207 bp, Glycine max
  unsure (1)..(207): unsure at all n locations
attcagcgctcattattacaactatcgcataaataaagtatgatcgattgtcaactttgttcattcacgctgttattcgcccccaactcaggaagtattcttgatggtangtggttaattacgctgtttttgactatgctcagaaagttatcgtgattgttacttttattagcgtcaattagacatcactcggtaatatgcattatt

SEQ ID NO: 107038 - DNA, 324 bp, Glycine max
aactttcagactcagtcttctactaacgaaacaagcgacaacctatgcgcgccagccgtccgggtgttgatcctatgtgttttcttcaccagaaatgcgcagagtcataaaggaacttagcggtatatttacccacttgctcgttatccaataatcgccacactaacttttgtgtgtagttgactgcatgattcacgtaatgtgatcaagtaacgtctaagtgaaattgaaaacaaagggtcactccttctttgtccttcgtttgtcaacacaaaccggtcatttgtcagctctacttcgcttactctctgcagttatctgcac

SEQ ID NO: 107039 - DNA, 416 bp, Glycine max
  unsure (1)..(416): unsure at all n locations
actaatgagaaaactgcggcaaatgaagagggtganaaaaagggaagatccatgctgtgactgatattcctatacggccaagtttcccaccaacccaaaaatgtcattactcagccaataacaaacctccttacccaccacccaggtattcacaaaggccattcctaaatcaaaccacaaaccctgtctaccgcactttcaatgacgaagaccaccctgagcacaaaccattagaaacacctaccaagatattgaatttgcagcgaaaagcctgtaggattcaccccacattccggggtcatatactaacattgctcccatatctacttgataacgcaatggtagccataaccactgctagggtccctcacacnctccattttctgaggatatgactcgaaacgcacatgtgcata

SEQ ID NO: 107040 - DNA, 294 bp, Glycine max
actacatgttcgttatgggcatcatctggcgctttccttattcgcgtatcatacgttcctagctttgtcttttacccgatccatgctgcaactcttgatacctccgtgtgtcatgaaccctgcataaggatatgcttttgagactcttatggagcagctgctatggagacgatatatatcaccctgtcctaggaacttactctgataatactatttctctttcaggcataaaccctctcacaagtgcatcctttttacaacggctgcgtaagcccttgaagggaaaccccaaac

SEQ ID NO: 107041 - DNA, 415 bp, Glycine max
  unsure (1)..(415): unsure at all n locations
gcactcttacattgaattgaatttttcgttanacacactggtaatcgattaccagaacattgtaatcgaatacaacattttgaaatcaattggaacgagttaattcacgtgaaagctttttgaanaccatnttgcttactagtaatcgattacaacaatctggtaatcgattaccagagagtaaaaactctttggtatacatgtgttgagaaaaatccatgtgctactcagtttttggaaaaccttctcatacttatcttggataaggtttctcttgagtcttgaatcttgagtcttgaatctcgatcttgttcttggaacttgaatcttgaaactngattcttgattntngaaatcaaatttcctcttgaaccttgaagtgttcttgtattaatcttgaacatcttgaactcat

SEQ ID NO: 107042 - DNA, 139 bp, Glycine max
ctttttctgtcactcactaacggccgatatatctttgttatcatctttatatggacatatgaccataattatagactctctagaactatcatggcttctccttctggaataacactgcatcacactctcatctactact

SEQ ID NO: 107043 - DNA, 224 bp, Glycine max
aaattaaatgttgaatgataataaaaaaaagttactctcctcaattaatactgcgcatgtaactcacgggaaacatcttttaggaccctataaatcgcgaatggagaccactgccgccactattcaccctacatcccaaagcgatatcacacccccgaaaagcctggaatagaataggggaaagtaaatttgctgaaacctttatgggattgtggcaaagtccc

SEQ ID NO: 107044 - DNA, 430 bp, Glycine max
  unsure (1)..(430): unsure at all n locations
ataaacaacttcatggagacatgaagaaaatatagataattcttcaaaaacttccactcaatcatgtgtgactctgaaagtctaaatntaaggacaacaaagcttcactctttaaaatgaggaaattcgtaaagaaagatctattctattggaagaccttcataangtgaaaaatcaactagaaggcttacaaaatgagtatatcacactcattaaccttatgatgcctaaatgagtaaaggtgtatccattgatgaatgttacaagtccataaaatataaaaactggaggcaagtaacataactatgggtgaatgcaaggatatagaaaacctaaattctaatgataacttgacaattgacgtctcaaaacaccccgatgtgtacaatataaagatgaatttgaaaacttatcagtgatgaacatggaa

SEQ ID NO: 107045 - DNA, 185 bp, Glycine max
  unsure (1)..(185): unsure at all n locations
actacttgcatgctcctgctattctgatgcttggctgttcttctgtttactaacaactatgaaactgatactatctaagattggacttggattgttatgatagagtgngggttttgttattgatacaagtttgtggcagctctaatatttacctactgtgtcatgatatggtaatgtgacatctg

SEQ ID NO: 107046 - DNA, 403 bp, Glycine max
  unsure (1)..(403): unsure at all n locations
tcacctgaggatgcagctatatgtgttgaattgaagatatgtgtatattgttattnttgtcacattgagttgtgagctatgaactgtacaatcaaatgacagtaagaccctttaagggtgaccggttaatgtgcgataagtattgtgatgagattcattgtgggaaccaatgagttgatcactttatgcgcaacgggttaagttatttgagaacaatgaagaggatcgngtttgatagtcatagataaagttggtgtaaaatgttttctggttgacctgatatgatgagaggcctgacgaacttcaatctcgccttggggtaatcaccaatttagtgctcttaaccctgcgatccacatggtggcatttacaaaaacggacctactggctcctatgtttacct

SEQ ID NO: 107047 - DNA, 335 bp, Glycine max
cactctttattaaccagcattttctctcgagaaagtcaaatggtcttatacctttcacacggatgtactattatggcatatcacattatcgagtacgctcgaaatttgaacatcggaagctcttgtgatatactaatggtcataactgtttacattggatgttccgattctcgcgcatcacatttataggcgctcgaaaaggaacaacggaagctctcgagaaattcatatggtcataactttccacactgaagtccgattaaggattataatatatcaagacgctcgaaattaaacatcgaaagctctcaagaaattcaattggtcatcacttt

SEQ ID NO: 107048 - DNA, 383 bp, Glycine max
  unsure (1)..(383): unsure at all n locations
gcttcaaagatgagggcaaacaaagttgttgcactttntatagaagcctagtcgatncgcttatctacttatccaactcaaggccagacatcgtacatgcaggtagcatcgtgtctagattcatgagttacccaagcaaagcacactttgcagcagtcaagagaatcctaagatattgtcaaagcacaaaggatcttggcattttgtatgatgcagatagagaacttacttgataggttatatagatagctactgggcttgatgcacagatgatatataaagcacaagtggatatgtgtttctttaggcacaaagcaaaccatgggcgtgaagaacatacgacagtgcttatctcacagaagagaatacatgttgcacagcat

SEQ ID NO: 107049 - DNA, 396 bp, Glycine max
  unsure (1)..(396): unsure at all n locations
tccacctgggatcctcaccggcgacatttgttccgcctagtcacagattccctctcgcaaggacattggatttctattcacaggatgtacgatcctcccttataattttgtgatgtattgattatgaactctgaaaagctttcgaataccaatctatgaatctggtttcagtctagtaatattacccaccacctattttaacttaaatttgtgttcagcctcatgaaaatgttacaattctttgttttagtttctaataaaattattcatttttaatctttatatttaagattntaatcattctctaggaactaaaagtatgagtagagactaaaatcgttttcttttgttaaatgtaggaaataacatgcattgctatattttaatcattctctg

SEQ ID NO: 107050 - DNA, 417 bp, Glycine max
ttctaggcaaaattgcgtgttgaggagtcaaatttcgattctgtggaattctaagcgcaaaactagctagagcgagtttaaatggatgttatatgacttgtgtgaggtgagagattgctccatatctactcccattctcaatttcacttctcaaccttgaaaatcactaaaatgaggggtttaaaacctatatttgagttgctttggtctgaacttgtttttggttatgcatgattgatacatatttggacttgtcgatcaatttggcaaatggatgacgcagagtatcttcaatctgacttatcacattttgtgtgaatggcacaaatttgatattctaaaagctttgttgctgtgtgaaggacaacatgggttgacttttttatccacgcaatgtactattctaactcataaatt

SEQ ID NO: 107051 - DNA, 389 bp, Glycine max
tctcgccctatcgagcatggttgcttcctccaaagacaacatccttctggaggaatcttgtggagggcccatgtgggcctggttgctatttgcccacatttttactatagacacccccctgcctttttttggtgattattgtttcatgaagttatggaaacttacgaatttcgtaacgatacttgatttctttccgtaatgctacaaaaccttgtggattacataatcatccactctttgacttacggaatgttacagaacctcactaattgtgcaacgatgcctccatttgatttccggtgtgtcacaaaaccttacagattgtgcatcaatattctcttttgtttttcggcatgtaccagaattccacaaattgcctattgatgggt

SEQ ID NO: 107052 - DNA, 383 bp, Glycine max
tctcatgttttcgcattatacatttttttttctgcactctctccgtgctttttcaatctaaagccattgtgtaattagaataaaacatttacttgattctagaacatggtgaaataaaaaaataattttttatgtgttcaagtgtgatcagctacctaccattgctttaatttttgaacttcaattgtatcaatttgcttcttaacaggaccttactcaacacccctcactctatgtgcaaaattaagtgagctcagtgtctcacctacgtcctggtctgatggacttatttgtacaaacatcaaagttcttgagtcacctcctgccatgtttttccaaaaattatcaaggaatgttaccaatatattcttgcataatcatga

SEQ ID NO: 107053 - DNA, 390 bp, Glycine max
cttgattccttctaatatctttaacaagctttgtacaatatacttgcccttcatttaactgtctctgggcttggcggccacgctcaacaaagtactttcgatactactgtacgttgatgtgaccaaagctgttatgggaatgttgtgacaatgcttttaaaccttattgatacattctgaaatgttggttgtcatgtggccatatcgacgtccttttgtatcatatgtcatcgtccatttttccttggatatgcgatcaatccatgttgctatggttggactcagttcacgaaatttttctaaattgtgatcaaaaatgtgcttgcaaggagtgtacgctgcataaaattaattatgaataacaattctaagtgtatatgaatgttaaat

SEQ ID NO: 107054 - DNA, 341 bp, Glycine max
  unsure (1)..(341): unsure at all n locations
aattatttcgttttaagtgaaacaggtctatgacaccacattggtggctcctaacacatgaaactaataatgtagtgtgatgctcacgcctccccctcttcgtttatgtttatataggaagcgcaaggatgagcaacagacaacaaatggatgcaatttgcagatcaaaaggtggtgaaccatatcatgataatgcatactcatgcaatgnangctggatatatacggacaatgcaggaatgtcatatatgtatgaaaatgctatgcatgcagatataatcatttcagacacagacccggaaatattttttactggctttgtgccatgccatgttcaatta

SEQ ID NO: 107055 - DNA, 335 bp, Glycine max; identical to SEQ ID NO: 107047

SEQ ID NO: 107056 - DNA, 356 bp, Glycine max
catgcaagctatgctgcacacatatacaatatatcttctcaatctctattgccaaatcaaccacaatagaacaattatgatctcttcagcaatagatacaaatcccggatggaagaatcaccctaatcacagatggtcttcccctcaacaacaacaatagcagactgctcctttcatccaaaatgttgctggcccaagcagaacaatcattcctccacctatacaacaacagcaacagccccagaaatagtaaacaattgacgctcctccgcaaccttctctctaagaacttgtgaggctaatgactattcataacatgcaattttaacaagagagcacagcctccattcagagct

SEQ ID NO: 107057 - DNA, 395 bp, Glycine max
gtgaatcttaaactccgcttgtacatgtgagctatgttataagtgctgagtttttatcttgataagttttaccatatagcttattaaataagttaaggagagcttatatgtgatcactaacctcacaccttcaattgtcaaattcagtctttatatgataagataacccaaataaacttcataggagcttttccatagcacacatagtcattttataagatctatatggtgccattttctatttattgattgatatgttacttttccatccctactcccattcttgatcttctttctctttatagtgttacattgtgtgcatgtaattgtagatttcatcctcattccacatatttggtctaaatggatagcatttttaatcatttgccatgtat

SEQ ID NO: 107058 - DNA, 387 bp, Glycine max
tatagccaattcaatcgacattatcttcttactcgtatgtctgattgagtcccgtcatatatcgagacgctcgaaatttaatgttgaagctatagccaattcaaccgacaataactttttactcgaatgtctgattgagtcctgtgatataacgagtcgctcgaaactgaatgttgaagctctgagccaattcaaacgacaatatctttgtacacggatgtctgattgagtaccgtcatatattgagacgctcaaaattgaatgttgaatctctgagccaatccaaacgacaataactttttactcggatgtctgaatgagtaccgtaatataactgaaagctcagaactgaatgctgaagctctgatccatttcaaaacaaaatta

SEQ ID NO: 107059 - DNA, 175 bp, Glycine max
gttcaatacttaaaatgtttggcttacgtgagggttcaccctacaggatgtttgtaactatatattcaggtgcggttcttccatcgtagactcatgacggcgctaatgctgtgcttgaaatttcaaccctgaaagtttccgatggattggcttctgacttagctcttgcgaagga

SEQ ID NO: 107060 - DNA, 423 bp, Glycine max
tgcagctgtaggagccataaggacttgtattcaccattctgaagggagaagaagaggcgatgaagatctagttgcaggatcatctattccatttcagatagcacttgtgttgtacctgtcccagtggtccctaagaagtcgagcaccaccgctgtgaagaccaggatatgagtgaccccatagagggccaatgttataagtttgattgatattggagattaactaggaaattgtaggacccttccctttccattcatgatcatgtctgagaggttgtatacctgagaattatagcttaataaaggtcaatgatttatgggtgttgcttttgaatactgaatagtgagatgcttgactatatgtggattctcgtccaagtgaaattggtgttgtgctaatgaagataatttaattccaactttc

SEQ ID NO: 107061 - DNA, 391 bp, Glycine max
tggaaggtagtcatacctcacaaagtatatatatgtttgaatgggtagcgaagatacctaagatatgcatgtatgtaaacaaaatatacttcacaaatatatatatatatgtatgtttagatatgcatgcatgtatgaaaaatacttcacaaaatatatatatgtatgtttaggtagcaagatacctcggatatgcatgtatatagcaaaaatatctcacaaaacatatatatgtatgtttaggtagcaagatacattggacacgcatgtatatatcataataactcacaaaaatatacgtatgtttaggtagcaaattacctcatgataaaaaagagcaaaatgagagtgagcaagaaaggaataataaggaagataaaaaaagttgtct

SEQ ID NO: 107062 - DNA, 352 bp, Glycine max
  unsure (1)..(352): unsure at all n locations
catcaaaagccaaagaactcgganaccaacacaggtataacaatggagtagaaagatataaatatcagagtataagacacaataagccaaaactcacaatgaagaaataatcaaaccagaatccaaataacttaagatgtcaacaaccacaaaacatccaagactgaaattntaaaaaccataagataaataagcaaagtacttagcataataatgtaaattctaagatactaaaagccagaatacacggcttataaagacatattatcagaaacttaaatctatgaagacggaggtggtggtggaagatcgaaactctgacgaatgtatctgacatcctcttcatactgtg

SEQ ID NO: 107063 - DNA, 375 bp, Glycine max
tgttttatcctcttactaattccttggccaaaacacttgtgattcaataaggaattatttgagtgctcaaattgttaatctatctctttcaagagagatttcttcttctcttcttctttattttgaaaaaggattaagagaccgaaggtctcttgttgtaaaaaaatttgaacacaaaggaagagttgtccttgtgtggttcagatcttgtaataggcttttacaagatagtggaactctcaagcgggttgcttgtggactggacgtatgcacaatggtgtgaccgaaccagtataaatctgagtttgcaatctctcttcccttaaactcctttatttaatattggtttatattcatattcaaattgctctattg

SEQ ID NO: 107064 - DNA, 388 bp, Glycine max
tacacaagcttgtatactgaatttcattagagcaatgaaccaatgtgatgttagaaatatgtacaatattcaataaaatcaaataggcaaagaaaataaaccttcaaaccaagagattatgacttagaagcggacagatgatgccagataatctccacactatgggaaacacctactaataaaaaaatcacattaaagcaagatagagagttatagttgctccccttgttgaatgatattacagaatatttttaaaagtaaattaaaatgaaagggcaactcacagttatgagaaggatcccataatgcagaagaaagtagcttcagcccgatgtatgtttgttatatgttcctgtagctcactgcaaaaaagaacatgagaggcact

SEQ ID NO: 107065 - DNA, 210 bp, Glycine max
  unsure (1)..(210): unsure at all n locations
agcaccgcggctgcagctggattcctttgatggatcttcttttagatgaccacctgtcctcattaaactactctttcttctctttgccttattaatcaccttttntggttctttatttgggtcttaaccctctcatgcaacttctttacaaactctgacctagattccccttctttatgtataaaagaagtgtcaagtgggaggggaatg

SEQ ID NO: 107066 - DNA, 374 bp, Glycine max
cccagcatattctaaaatttaatgactgcctacacgtactgtctcgtggggggtatgaactgcttgacaagaaacttatgaagagaagagcaagcgtggacatgatgaacatccgtgtactgaaaacccaacacttatcatcgacccaccatcctcagttgcaagacacttgaagtggaagatcgcccgcacaaagcggtatggccaaatgacgtctgaagtggcacaagaaattgcagacaaaattgtgagttcatatattttttggttactgtcattgccaaataatggttagctaacctagtcaactttattttattcaaattcaacaattgtatatccatgcaggattcattacaggaacaagcaacaca

SEQ ID NO: 107067 - DNA, 443 bp, Glycine max
  unsure (1)..(443): unsure at all n locations
gcttttattctaaccttaggattatataatgtctctngatttctgagttctatgggagtaagatggtcatttgccaatccctcttctatgatttgacccaattgtctatcaaagggtgtaccatctgaaggtacactggatgatgattggaaattgattcttctgtgcatgatgtccgccgggtggtttgcaccaaccaagcacatatgactggtcagctgcttgtcggttcattggctctcganagccgcatccttcattatctaattgttcgtatcctactctctagatcttcaaaccttgcacaggtttctgaagaagatctactattcatgtggtcctttcatatctgtcggaataataattgggcacatctattcctgtatcacatgcataacgcattactattaaatgcgtctctccctagccacactagttatttg

SEQ ID NO: 107068 - DNA, 402 bp, Glycine max
tggcacaatgttgataacatgacatacttcaattgcttcattttggtgacttctttattttcatccaaatgttttttgtgcatcataaggttttaaacgggaaaaaattaattttcatgagaaataacttttgaaaaaatatatgatgtacaactaacctcgttgaatattgtccaaaaattttcccaaattattataaagtgatatgataatatttagaaattttgatgttaaaatacggttgtaggacaacatagatacaataactatgaaaaatagattcttgtaatttgtttggcttgagaaaaatatgacatattattaaggttaaggaaattccctattaaagtttataatattcagaggtgttgtaattctttttttaatataaaaatagcggtt

SEQ ID NO: 107069 - DNA, 400 bp, Glycine max
aaccattttctctctttttctctcaactgttcttcattcttcttccttttttcacctctgttcttttttcttgcacaaatttcgtggcttttccactgggatgatcatggaaggctaaacacttaatcaatctaaggattcactccaagaaaggctgaatttgagttctggtttagtatttataatctgtgtgaatgttcatctttttcttcaatcctatttttgattctcatgattatgaatatgaataggattgaaaaagaattaagtttgagattcctttcctaatttgtgatctcaatgaatttaaggattaatttaattgaccttactctaatgacattgattgatccttcacaacttgattattctttgcaaaactgtgataatttgatttgca

SEQ ID NO: 107070 - DNA, 333 bp, Glycine max
  unsure (1)..(333): unsure at all n locations
ttataaccatttatcaaacaccaaacaatttgtaaatgagaaaagaaaatagaatagaatacctgtttggcaagaagttcccgttctatgttgccgggagcgaagaaaggagattcgggcccgaacctgtgacggatcggtttccagaagggaaaccctaattgatgaatctgattctgcttcactttcatcgtcatcttcacactcttcaaatatcattcacacgctgagttgtgtgccaaatttcatgttgaattgacnagggagtgaggacttcagaggtcacacaatcatttctgatgtcatttgttttgtcggattattgtttgggcc

SEQ ID NO: 107071 - DNA, 404 bp, Glycine max
  unsure (1)..(404): unsure at all n locations
gacactatattatactccagcttaagcatgagttgaaccatacttaaacgtgattatttttttcatgagttgagccatgcttaagcgcatggcttaaatatttctttttagaggggaggatgaaatgcttgagaggttagcttgtcaatccttctattactttctggatggatactcggggtataatcaaattgttgttaattcggaggatcaagagaaaaaaaccttcacttgcccacttggagtcttttcctatcagagaattccctttggactttgcaatgcaccatccacattccaaagatgtatgaatgctatattttctgacatggtagaaaaatggatagaggtatntatggatgatttctctgtattcagagattcgttcacgtcatgcctcacaa

SEQ ID NO: 107072 - DNA, 267 bp, Glycine max
taatatactagcattacgagagctaacgcacttataaacagtcatgacatctgctcattcttaacagcaccgctcgagaagcaacctctgctacaccatcttagttgacttacttggacattaaatactcagaaaagaaattgaaagcatatgctttgaatttgattgcccataccaaggattccatgtgatagttatccatacacgattatctgcaaattgaccagttcacacaacttataagtgatcccactactatatatctta

SEQ ID NO: 107073 - DNA, 305 bp, Glycine max
  unsure (1)..(305): unsure at all n locations
tgtagacgttggatcttcttatctatggaatcccttgcttcttatagtntgatagcaacggaatgaagaaggagaaggatgattggagacgcacttcaaggagaaaatgagtctagatgaaactcaccaccatatgaagccatgaataagagcttgaaggtaagagaagatgaatggaaggagagggagagaaggagcacaaaattttgtgcctcaaaagaagtctgaactttgatcatttgctaaaactcaataacaattgatgcctaaattgagattttaattattcattattcacctcccca

SEQ ID NO: 107074 - DNA, 374 bp, Glycine max
tcaaatagttctgattaaaaaaatgtgcataatcaagtacaatccttcaaacatagtaaatcaatagtatttatgcgaaaaagaacagagctaaagaggatagcactaagtagatttaatgtaaaacaaaccaaaccctgaattaaggtggtgggagactgaaccgagaatgtacctataagaacaataaatgaaatgcataaagatgtgattttttgactaaaaattatcttacagatggtttgccaacattctaatattcttgaccatgaaaaaagaccttgcaattctagacaagcaaattcggaaacacttgagtggtgggattgatgccagccacatcatacaggtgttttgagtgcaaacaacactgc

SEQ ID NO: 107075 - DNA, 390 bp, Glycine max
aatactcaagcttgcaccttgttgaaacccattttacatgttgaacttatgttcgcgcgacagattttcctgcgtagacgggattagccatgttggctatattaccatctgctatggaacattcaccatgtatccattactatatacgtccatgtgaggcaatgaattcatccttcctatgagaaaacgatgtgtcattcctgcgactacgaaataatagccgctcaagttcaattagttcatatgctttaaatcatccaaacaatggcttatatgtgcaccaaactgcgatttctaataggctgcctcatactagagaggattgccatcctgtgaagcagcgtaatacatatttgttatggtgagctgaaaacaacggaatagacttgt

SEQ ID NO: 107076 - DNA, 110 bp, Glycine max
tctcagagaggaagcttcaatggaggaggagaatgatagggagggagtggggtgcgttcctcttctccatctcttatgtcccccgttctatacattctccaaacttatgc

SEQ ID NO: 107077 - DNA, 398 bp, Glycine max
  unsure (1)..(398): unsure at all n locations
tcaagataaagatggcctcttcatattccttattttctataaggaattctatcaatagaccttcaatctttaatggagagggttaccactactgaaaacccgaatgcatatttttattgaggcaatagatctaaatatctgggaagccataaaaatatggccttatatacccaccacagtagaaagagtttcaatagatggtagttcatcaagtgaaagcataaccatagaaaaacctagagatagatggtctgaagaggatagaaaatgagtacaatacaacttattagccaaaaacataataacatctgccctgtgaatggatgaatatttcanggtttcaaattgtaagagtgctaaggaaatgtgggacaactctcgattaacacatgaatgaa

SEQ ID NO: 107078 - DNA, 294 bp, Glycine max
  unsure (1)..(294): unsure at all n locations
tcttaatcaaaacaggttcttttatcgtnacaaattctatngaggttgtattctatgaaacggatgccacaccctggtttctgctgcatatataaccaggaaattggttcaacaatatacttaaaattcatgtaacactagtataatatcatatctatgacttggttaaatctagcaagaaaagttaccatgtcgaactatttcccactagtttatgtcatttatcattgtgaggtangcaggtatagttttttaaaatggaagttaatcaagctcagtctccaaagatctctg

SEQ ID NO: 107079 - DNA, 433 bp, Glycine max
actcacagtatgctatgtgtattctgtccctctgaacaatatggaaccattttgtgggactaaggaccagcggatgacttcacccacctggtggaagttctaagctagtttacaagatgtctctacctgctcgtagatgtagttgtggaggaggtgctttatcatatgttcctacaccactcatgtgtgggagcgtggacggctgggcatattgttctgagtgcacaatagaaaggtggttgcttaacttcaagttacgccacctcataccaattgccacatctaatgttgagataggagttgagttgaataacatagtggacaatgacgacacggggaagtgttgttcttatggtgtcatgtcacagccgagaactattcaggactatttatattcagttgcttgtgggtgatattagggtacacttgtctt

SEQ ID NO: 107080 - DNA, 318 bp, Glycine max
tgagggataacttgatgtcttggtcaacctagtatctcaacttgccatgaatcaaaaatttgcatcatcacttgttcaagaatctgtggtctatgttcttctgcagatcactatacagatctttgtccttctttgcagcaatctatagtcaatgaacaacctgaatcttatgtttcaaacatttattatataccccctcatcagcataaccaacaacagcagaataattatgatctttcaagcaacagatataatccatgttggaagaatcatccaaatttgagatgggcaagtcctccacatcaacaacagccctgt

SEQ ID NO: 107081 - DNA, 396 bp, Glycine max
  unsure (1)..(396): unsure at all n locations
gttagaagtcaataaagtaacgaaaacttattcatcaactgagtttcaggtttgttaattaccttctgctttntgttaagcaatcccgtgttctatctctttgtatcctagttagctgctgatatatatgttggagaggatataataaggattctcggcaattactaaagacggcatattttcatagtttggatttgacatctacttataggatgctataattataaatcatgatgtaggtcttcaagcatattatcatgcataacatatctttcagagcgctgtgtctcatattcgtgtgttcaagttattccaaattgaacaagatccttggcttccctcacttcttttcttctgtacctggtaacggcttacactctattatttcaatctcat

SEQ ID NO: 107082 - DNA, 385 bp, Glycine max
atctgatcactgcctttcttatgcaatatttttacaattgcaatatttctcccgatcgcactcagttgcagaacatggttaaaaagaaggtgagacctttaaagagtacgcccaacggtggagggacctggcatcacaagtggcccctcccatggtcgaaagggagatgattaccatgatggtagacaccttaccggtgttttactatgagaagttggtaggctatatgccctctatcttctcggacttggtatttgccggggagagaatcgaagtatgtttgaagagagggaagttcgattacgtctcctccacaagtaccaatgctatgatgatcggagcaattggggcaaaaaggaaggaaggagatacccatgccgtcact

SEQ ID NO: 107083 - DNA, 408 bp, Glycine max
tcatgatgatgaatcaagttgattcaaatagttttgatgatgacaaagatgttgacaaaaaactctagagaatgatttcaagattgagtcaacacgttcatgatcaagataatttcaagtttcatgataagaaatcaagaagattcaagattcaagagaagtctgatttcaagattcaagaaaagatgaattcaagattcatgagaagaaatcaagaagacttcacaagggaagtattgaaaagatctttcaaaaacaaacatagcacagttttgtttttcaaaagagtttttctcaaaattttccaagttaccagagtttttactctctggtaatcgattaccagtttcctgtaatcgattaccaatgacaaagtgtgatttcaaaagcttttaactgaatatgcaa

SEQ ID NO: 107084 - DNA, 297 bp, Glycine max
tcaatatgaaatttggcgtgtagaagaatccgatattcaacctcacactgatgatgatgattgggaagaatgtgaggagggttatttgttgcgctctgatacaactagaacgcaacgtcatcccctcagaagtattgttattcagatttgatgacactctcttttgttgcatcagtgaggtttttaatgatgaacccaactattacatagctgtcattgagtgcaaagagaacggtaaatgacttatggccatggatgaaaagatgaagtctctccatgataaccataatatggact

SEQ ID NO: 107085 - DNA, 362 bp, Glycine max
  unsure (1)..(362): unsure at all n locations
ttgagtttgaatattgtgcaattaaagtnttgtgtagaggggtacaaatcccttcccttgaagttttgctcattcaatcgcgtggaggctagaatccttacctcttcattttctccctaaactagaggtcctgtttgtaatacaatgcgagatgctaaatctgtcgttgaacaatgaaagcccaattcaaagattgaggctaaaacttctgtatctggagcattttccaaggcaacaggcattgcctcattggattcaaggtgctgctgacactttgcaaacgttgtcaattttaaattgtcatagtcttaagatgcttcctgaatggctgacaacaatgactcgtcttaatacgctccata

SEQ ID NO: 107086 - DNA, 396 bp, Glycine max
tcctctataaatagggggagaagtgatgtgaataagggatcatccccttcggcacttctctctcttccgaattttgattggaaaaattgttttcgtgagaaaatccaagccgatgcgcttccgaatcgtttccgtaacgtttccgtgcggaatttcgtgaaggtttcaaccgttcttcgacgttcttcattcgttcttcatcgttcttcgatcttcaacgggtaagtacttcgaaccaagcttttcgattcattctatgtacccgtggttgtccacattgtgtttcgtgtattattattctcgtttcatttactttctatacccccttttgacgtgcttaagccattttatttaagtcatttctcgcttataataaaaataaaatatatttccacc

SEQ ID NO: 107087 - DNA, 389 bp, Glycine max
tcagcttatccgctatcacctttgtttactaagcttttttttacagcattatcatctcagcatattcagaatacctaaaccccacaatccatccctgtaatgtagttatttagtcctgcttctatcaaggtctaaggcatcaatacattttccaatgctaaagtcacctaatagtacacacaatggtggtgatcataccataaacatgcagtgattaagcattgaaagaagcattgaacacacaaaacacaattaattagatattaaagataattacatcaattgttccttataaatccccaactagggtggttagccagccatacacataaacccttacacaattgagatagagagcacagaataatcgttggttacacaagattggg

SEQ ID NO: 107088 - DNA, 395 bp, Glycine max
  unsure (1)..(395): unsure at all n locations
cttctccaggatgtgagcttagttnttagataggtgtgtgtagctaagctctagcttctcaaggaagttttctcaaagaagcttctcaaggaagtttctcaagaaagcttctcaaggaagctacctagtctataaatataagcatgtgtaacacttgttgtaactttcatgaatgagagtcttgtgagacacaactctaagttcaacttctctcccttttttcttccttcaatttcgtgctcccccctctctctttctctccctctttttttcctccattgaagcatcctctccaagcttcttatccaaggctcatcttaatggtgaaactccttcttccatggcttattcctttaatggatggcaccgcctctcacctcttctcttttgtcttt

SEQ ID NO: 107089 - DNA, 442 bp, Glycine max
  unsure (1)..(442): unsure at all n locations
ttccatggcttattccttaatggatggcgccctctctcacctacttttctttgtcttacgctgcatctccatgggggaaaataccattaaaggaccncattgaagctcaaagatccagcctccatataagccccacaagccatgcttccatcaagtggtgatcacagcacaagagcttcaagtaggtgctccttaaacctgcattaatgtttgtgctttaccttctcttccattgttgatgcttcatttatctccatgtatctactcacatgtcttgttctaaatggtgtaacatgattctttagagtatccaccgattaaacttgctatataagatagaattgattttctatggttcagatgtctcgttcttgttcttggaccatgaaatagattgaagttacgttctcttgagttttgtctttgttattttgtggctgaa

SEQ ID NO: 107090 - DNA, 378 bp, Glycine max
  unsure (1)..(378): unsure at all n locations
ctctattaatactcaagcttgaccaggaattacttgtatgggttggatgttgaattctggttgttcctggtgcgganatgatggttcagcgggtgaaccaaaatcggaagttcttttggtgaagtaaccatggataagcagagcgtttggaatgatttcgtaaatctcagaaaactattgggaaatgctggtgaaaacacgaatgccaagcagatataaatttgaatgaagaatgtagaggggcgtgtgatacaacggtcaaatttgctttgtggtgaacgtgctattaatgttaagtgattcgtttgggcacgttcaaattgctgtagttgctattattcctttaacaaacaaatgcccagcttgccccttcatttt

SEQ ID NO: 107091 - DNA, 338 bp, Glycine max
  unsure (1)..(338): unsure at all n locations
acttggaccccatttctaccaactacaaaacctaagaaaactatattatctactcaaaaagtacacttctctatatttgcatagagggtgattttcctaacgactgatagaacttgtctgagatgtcctaagagatcagctagccttctactatacactaaaatatcatcaaaataaacaactacaaatctacctatgaaatcccttaagacatgatgcataagcctcatatacgtgcttggtgcattagtgagcccataatgcattactagccatctatacaaaccaaacatggtcttgaaagcagatatacactcatcacnctctctcatcctgat

SEQ ID NO: 107092 - DNA, 383 bp, Glycine max
gcttgttgaacaccccaaaggaaaatctgttgtgatgttcttgggtgttaagaaacaagctggaagaaataggtaaagatgtgaggaacaagccatgcttgtggccaaaggttactcacaacaggaaggtatagattatactaaaacttttgctcttgttgctcatctaaaggcgatactcattttactatcctttgctactcatcatggtatgatgttgtatcaaatggatgtaaactgtgtgttcctcaatggacttatcaaggaagaagtctatgtgaaacaaccccctgggtttgagagttctatctatcctcatcatgttttcaaacttaataaaagacttgtggggttaaaagcaagcctcttgaacttgtattgaa

SEQ ID NO: 107093 - DNA, 391 bp, Glycine max
tgttcgcacatcgttcgcgtgtatgatatccactcttcaaggtttgaaatatatgagaccttcaatcctattacacaacgtggcggacaaaagtggaagttaacttgaatggccattattgtcaatgcggaatgtatttctgtgcttcactatccatgttcacacattattgcagcttgtggttacgtgagcatgaactactaccaatatatagatgttgtttacaccaatgagcacatcttaaaagcatactccgcacagtggtggcctcttgggaatgaagtggcaattcctccttctgatgaagcatggacactaatctctgacccaactacaattcgtgcgaaaggtcggccaaaatcacaaagataaggatgagatggattggctg

SEQ ID NO: 107094 - DNA, 346 bp, Glycine max
  unsure (1)..(346): unsure at all n locations
ctggatagatgccacaacgattaccttgatcagtctgagattgtgtcaacaaggaatccacagagaagctctcacaatcttatcaaatgccaaaagctcctctattgaaaacgaaaaccaatacatatagtgtatttgaataataagataaacatagacatgagcctgtcaaacagtttgggtcaaaattactacggaacaaagtttatataatagaagaacgtattgcgcatggaccttcatccttatccacttgggccgtcattcttcttcactggggtcatcatgcttctccacttgggccttcgttcttttacactatggccatcatctntcttcacttggg

SEQ ID NO: 107095 - DNA, 365 bp, Glycine max
  unsure (1)..(365): unsure at all n locations
gattgtgtgcaaccatagattttacattgtttatcctcattgatatgttctatagttgattttgcatgaattctaattatcataacatatgattcatggatatgatttatgcattctttctttctttacattttaagccactgaccaaaaagatatctcgatgtatattgttttatcatttgcaagccctatgagccaaacacttcatattttgttggaacactaacctangataaaagtttcctaccttaccttatgttaagagaacaaaggtgttttgttggggatttctatcatttggtggctaatgtgatttaaatactctatttttaaatgtgggtattaaggttaatttaaattttaat

SEQ ID NO: 107096 - DNA, 341 bp, Glycine max
  unsure (1)..(341): unsure at all n locations
tgtatgagaagagangttcttttatannacaagtgtgtcggagagggtttttcgagcaagcatgaccgatgttgtgttacggtcgacaattggcatgttgtcattgctctcggagcgaaaaacacattgccagatcgacaaagaaaaaaaacattattcaccggttttgatcgtaaaaaacgctggttgacgactgcctgtaaatgtgagcgatatatgtctaatgattaattactcaacgtgtgacgacggtcgaacttttcctaattgacatcattcatttattgttcaaggagtggcactaaaaaaaataactgataccagtcattatgttttgacag

SEQ ID NO: 107097 - DNA, 242 bp, Glycine max
  unsure (1)..(242): unsure at all n locations
ttagccataactcacctgtgctttntcttcaatgctatatgtagcaaagtcattgatcctgtcaagtntgatgagttggaaaatgaggccgcaattatactgtgccagntggagatgtatattccccctgctttctttgacatcatgattcactagaatgtgcatctagtcagagaaatcaaatggtgtggtcctatttatctacggtggatgtacccggttgagctatacatgaagatctt

SEQ ID NO: 107098 - DNA, 389 bp, Glycine max
gatttgttcttaacgctgtatgagcaccctggaagctcttgaggaaggatctgatgatgttggcccacacctggagtgtgctatcatatttaaccttgcccccacttctcatacctctgatctgaacatggatcgggcgaggttagtttatagacttgtgatgaagatggacatggacgtgggctttctcatttcacaccagatctcatagatggcccagtccaactcctctaagcttggtttttcggcattgatttcagcattgtgcatagccagaggagtcatctcagattctctgactttcgagtctctcaatccaaccattaatttggcatacattaagaagaactgctggaacctggacgatcccacgatcgaattttcatgga

SEQ ID NO: 107099 - DNA, 463 bp, Glycine max
  unsure (1)..(463): unsure at all n locations
atcatataagaaaagaatcatttcataataatattattttaacctgtcaattaacattaattacttttctaccatcatgtaaagagtatagtattaatgatagacaacacaattggataataaattaatgatcattaaagattaattggtcaagatattattgtcttttatctatttattactctntcttacaattattgtagaaaaggaagtattttataagttcttatcctacaagaattcatatcatagatgtaggcgtgaaacttattacaatattgctgagacacgtttgttgtgataatttatacaaccttagaaataacttatgaaacccatatatttctttataaatttaaataaataagntcctattaattcttttcagaacttatatatatcaatgcaccactacactctcaattattgtgtttgatgaaatactgtccctcactgactctta

SEQ ID NO: 107100 - DNA, 410 bp, Glycine max
tgtgatgggttatcttctatatgcaaatgttccctgtcctgagcaatgctttccttcaacttctccttctcaaaaggttcagaaacaagcaaatgagcctgctcaaaaggcccagtccatcattccagaaacctggtgctgtatacctggtcttcaacacagtatcaactcggcatataaccaaataaaactgccaccaccagcaacaacacagtcaatttcctaacttttagcttttcagcaaacaataactaacattttcttttacatcaaagttgagaaaaaggaaaggttgacctattcaaaggtcacacctgccacatgcctaccatgaaagcacagatacaatacatgacacaaatgcaataccacacatactagaaatgtttaatatcacgaagacactacac

SEQ ID NO: 107101 - DNA, 258 bp, Glycine max
atttacaatttccctaggtgaatgcgagaatacttctgttggtgtcattagactcatattagtaaatataaactacttggatgataccctcacttaatgtcttttgggttgagatttctcgtttctaatataggtttttcgttaatttgattacagaaaaactacttattgctaataaagtgtaagtgtaacttaaccgatgatttaagcctacctatatttgatgtgggttgtcataacaacgggtgtaaaaaaata

SEQ ID NO: 107102 - DNA, 408 bp, Glycine max
ttgtctcctggtgtatctttatccattagtacaatatcttttcttatgacatgattgatagtgaaaatattattgatatggaggagaacctaatctgttgctattgggactataattaaagtgtctttggcaatcttgtttgagtatgtttggaaataattccatgttgtatttgtactgaaaggactgttaagtgtggtattcaatgaaaatcactagctagctatacttggatataaactttaatccacttcatactcactgagagaatagtcgatttatgccaagagtttctgtggccttgctgaatttgtttactaaaaggataagccttttggtcatgaacatagacaatggatgaatcattttttaaatgataaatatgcaatccgcgatcctgactatttt

SEQ ID NO: 107103 - DNA, 322 bp, Glycine max
actcagctgcaactagaaactaaaaaatatttttccaaggcatacaaaatatggcctcttaatatgatcaagagcaaactaaatacaatggttttcataaatcaaccctgcctctatcctgcagttgaaagtcaaatgcttcatcaaaagcacacgcttgacagtgaacgtcaaaagcaatactgaaaaggtaaacataactcataattatgaatctcatcaaaaaacttaaaatggattcttcatttcattattacaagacaaaggcattaaatgacttatcagccaaatctgtaagatccaacattatgtccatcaataa

SEQ ID NO: 107104 - DNA, 398 bp, Glycine max
tagcttttgaggcacaagagaattctcaataattccatgttctaactggccatatttgctccacccatatgtgtataagccacccaaagatgaaacataattgtatgccgccatccacatgcaaccatgaccatcttgtcacactgcaacattaaacaagcaagaattatgcaaggggaggatgggctgtaaaaaacataagttctccatccattattatgcatgtacaccaatcgtgcatgaatcttaacagcattttttagacaaatcaacaagttaacacctggaaatgctgcttcttctattaaacagcgagatttgttttttcagaaatcaaagaatatcaaatcacatatgttccatatataatcagagtctaaacaaatatgaacatgata

SEQ ID NO: 107105 - DNA, 419 bp, Glycine max
  unsure (1)..(419): unsure at all n locations
ccacgtgcggtgcttttggcggttgacgcacacctcatctcatgaataantctactaggtagttcgatatgtcgcagtgttcaaagagatacggtattccttttagacaatgcaatattgaatattacgtgttagtagcactatgtnttattctttttagacaatgcaatgtgaagtgaaattgtgattgaatattagtgtttgtagcactacgtcttaacacgtttcattttcacgtgtgttctattaagtgatgttttcttaacactttagtgaagcaagagtctccgtcgctaacctttaacttatctacatgcataaacaaatgtgagctaacgtcactgagactccggactacatgtttgattgaactcccacaccctcaatattcgttcacataatgttctgacgccatgacg

SEQ ID NO: 107106 - DNA, 369 bp, Glycine max
cgaataacccttggacccttacagatgttccagctaataagaaagctattgggtgtcgttgggtttataagatgaagtatcatgctgtggctccgttgaacgatataaggctcgacttgtagccaaggggaatactcaaatggaaggattggatttccttgatactttttctccagttgcgaagctcacagcagtccgattattgttagcattggctgctattcatggttggcaccttcgtcagctcgatgttaacaatgcagtccttcatggagaattaaatgaagaagtctatatgcagctgcctccaggaatgcaactctcacaccttaatcaagtttgtcgattacaacgatcactttatggttt

SEQ ID NO: 107107 - DNA, 303 bp, Glycine max
cttcagactgatcaacacatgcacagtggccaaagatgccttggagatcctgcaaaccactcatgaaggaacctccaaagtgaagatgtccatattgcaactattggctcccaaatccgaaatttgaagatgaaggaagaagaatgttttcatgacttccacatgaacattcttgagattgccaatgcttgcactgccttgtgagagaggatgacagatgataatgctggtgagaaagatcctcatatcctcgcctaagagatatgacatgaaagtcactgcaatagaggaggctcaagacat

SEQ ID NO: 107108 - DNA, 308 bp, Glycine max
tgatccttgaatcttgattcttgaattcatccttcttcttgaatcttgaagtgttcttcaacttttcctcttgagtcttgaatttgttcttgatttcttctttaacatcttgaactcatcccttgattgacctttgagctttttgtcatcaccttttgttatcatcattgttatcatcaaaacatctttgaatcacttttgattcaccatgaagctttgcttctacaatgccgatgtatgaagaggcaccctataaagaagaaatatgggcatgggccatcaacaaatgccgtaattgaatgaatccc

SEQ ID NO: 107109 - DNA, 213 bp, Glycine max
  unsure (1)..(213): unsure at all n locations
gactgacaaaacactggcattggcgttggtccatgagatcaacgacgagagagtcgttcttatgttatcaggctcaatgcatctgttgcttgatcaacctgntggctgccataagtgatgctacccgagcactatgtctccatagaccagataatcgtgatgcacaaagcttctggagacgagcactagctgatgacatgcttggattaacga

SEQ ID NO: 107110 - DNA, 338 bp, Glycine max
ttctctatcattgctcaatcttttatggataacatcttgcacacgaaccaattgttcacccctcatattgtctttattcatgaatggaacaccttcttatccataacaagtgttgtgttctgttgtgtcccagcatgaattttcaatcgaccgttccatctacagtatgaaccttaattgtattccccacaattgcttcattttacgaaaccttgcaggtgtataaaatgtcggtgtcatcacctttaacgatgggatctgggataacctcaataactaccaagaatgtcccaagggaaccaccttttcttacatcattcccctcatttcggacccct

SEQ ID NO: 107111 - DNA, 364 bp, Glycine max
ctttaacttataaagaatgaagctcttatccacttgtggacaagggctcaattctaagaaggggggggggggaaactttcgacccataattctgcattgatttgaggatgacaccatgctatgtttcttgtgctagagagactctatgatgatcaatacaatgttattgcgcgagacaatggataaaaaattgtcattacattaaaacctcttctgacgcatggccaatactactatcataacaacttttgggagactttctattcgggatcataccgttcttctcttgcaaagctaagggaacattgcttgtagctcacggagatacggtgaaactatcttatagtgttagcttcacttggtt

SEQ ID NO: 107112 - DNA, 376 bp, Glycine max
taaaggaagtgaacgaattatcatgggcagaaatgtctccgcattgattggtaaatctgttcctcaaattcctgaaaaatgcaaagatccatgtcattcagcataccttgtattataggggatagtaagtttgacaatgccatgctagatttaggagcttctgttagtgttatgcctctgtctatttttaattctctatctctaggtcccttgcagtcaactgatgtggtaattcatttagctaatagaagtgttgcctatcctgttggtttcatagaagatgtcttagttagagttggtgaactgattttccctgttgatttttatattttgaatatggaagaatggatttctcaaggatcagttcccatcattc

SEQ ID NO: 107113 - DNA, 447 bp, Glycine max
  unsure (1)..(447): unsure at all n locations
gatccttaagtcacctgcggcatgcaagctngacccccatctgtgaaactgnctgagcttcatcaaaatggcctctggtagaaacctgaatacattgatgaataatataaacattatttcacatgacacagaactatcataaattataaggtgtaaataaataaattcgtagaagattaacactataatgtgtatgaaataaggtccaactccataagaatntatatgaattangttcatcataagcctttccacacaaacaccatgggcatactcctcctcctattgatttgttcaatatagtagaggacacaacgacaagatgtttaaccagaataacaagactacctttgtagcatttgtgctgcttaccattgagtgaagagaatctatgtccctgtcttaatatgcaattaaaacattaggtattttacgggcataaatttg

SEQ ID NO: 107114 - DNA, 352 bp, Glycine max
  unsure (1)..(352): unsure at all n locations
agcttcgtgcaactgaagcatgtgataaggattgtctacactaggcataagagatttctcatagaatatcaccctgtcatcaattgaaagaagctcttaatggaatatatgagtctagatntgccatgatacccttatctagaaacaaagattatgagtgggtggagaacatatgtactatctctggaaagacccaacagaaggatgcatatgagaaaaaaaacatatgaaagaagagtcaatattctgtaatcttccatttagttcgtcctagatttaaacattgtattgatgtgatgcatgtggagaagaatttctatgatattctaatcatcacgattataatattaaa

SEQ ID NO: 107115 - DNA, 355 bp, Glycine max
  unsure (1)..(355): unsure at all n locations
tgtataggctacaacaagaaagtggttctagagattttatacggntaatatagataaattggccatggtaaacaatacactatcataagtgtgttgctctattcctcattgcttttggttttcatgagtgcccaacaacatcatcatcgtattactttgcttttaacagatgccagacagctgcttctgcaaataagttgacatttgagaataaaatcatgtaatgtaattcatgcccctctattcatgtgaatacttaaatacacgcatgctttgttngcaaatctctgggtagaagggtgactgggtaagtgttcaaaagctcttgataatattattttgggacatccaaaat

SEQ ID NO: 107116 - DNA, 371 bp, Glycine max
  unsure (1)..(371): unsure at all n locations
tgagagatgaaatatgaagtgaataggaatttaatgggacgtgactcgcgagggaaagaaataaaatagaattctaattaaaaataaaggagtgtgggaacagagaaaaatggaggtgagaataacatgccccatgatcaatggtccttacgtattactgccttatgggcctgaatgaactgtccgtgtcaagtgacaagttcaaaatctcaacaaatgacaaaaagacaaaagtactggtcaagaacaaaaaaaatggtgcaggccatgaaaatatattactatttttaccggagaaaatcacgtttgacatgcgtcaattgatctatttctgngtggtatatttctttaaagaagctagataatattat

SEQ ID NO: 107117 - DNA, 274 bp, Glycine max
atcgtgggacctgtctttcatttaacatgctcagtgtaggtaacatagtaccgcagaccatccctgagaaagttcttaaagactctacgagcctaacaacgaatcccgagtttcgtaatgttctgcatgttgtcgcacaacaccacacttgtgccccttggctcctcctctgcattcctcccatgaccaccgtatcagccgctgtcacctccaccatcaccaccgaagccatctgcttcaccaccaccaccgacaatgcgggtttgcacttcat

SEQ ID NO: 107118 - DNA, 202 bp, Glycine max
aagattccagaatccagaaaagaccttatccatattagtgttaaaaaggttttccaaacattgaagaacaccagaaggttttaccaaaacctttaccaaaagagtttaccctctggtattcgataaccaaattatcgtaggcacgggttgttgtcaaacaactataaaaactcttgtgttgttgtctccttcttccctactc

SEQ ID NO: 107119 - DNA, 375 bp, Glycine max
tgctcataagcgtgaaagttctttttaaggattattaaagacatgggaacttttgtacttggtgctcacatgtgctcatactcatccatccacatcagtttgcttttcgtggaccaacatacctttattatggtgctaacatgcaccccatggctcacatgtaggtcatgtattggccacattttgtgcctggctctatctaccaatgtgtgcacaacacatccatctcatggcaacgatttggaatgaccaacccttggggtatatctgctgaaactccaccgaatgtgtatcatatggatgtggtatttggtgctgaacataatcaagcaccttcacttgatgtagctcatataaacacatatggctcggtct

SEQ ID NO: 107120 - DNA, 307 bp, Glycine max
  unsure (1)..(307): unsure at all n locations
ggtttttttatttaaaaacacccgcttatcaaggcgcttttttaaaacggaatcccaatttactgtgagtggtcacaggagacccttttcaagtgttctatgcgaagatgtggtatgagccaatcaacacaatcggtttgtttcaagtgatacgaaagcttatgatcgctctggacttgtgtatcatgctggaaaatagtttaatctaatgggcaatgattgaggtgcttgaatcacgccattcagtttgagaacggaccctctctgaatcttctaaagggcctagcanggatctttaccctttttt

SEQ ID NO: 107121 - DNA, 403 bp, Glycine max
  unsure (1)..(403): unsure at all n locations
ntaacatagtctcatgaaacaatggcaagtacatgccgacacttcattagtattagaatttgagtcttcactatagtaattgagcttctagattctataaaatttggttttatacatcaacagttcaagacaatattcattgttgttctccataaataggaaaaacagcacaaagtatatcacatatttagaatattataccatctgcttccgagtgataggtaggtatttcactgtctactgctttggtttgagcttaagggcagcactgcatgaattccacaagaaataacataaactcttaaaaaggtgaagatgtaaaattgaaaaggagacacacgtgaagccattactatttaggattaatgataaattttatgattgaactttcattattttgtga

SEQ ID NO: 107122 - DNA, 408 bp, Glycine max
tgtaagatgtcttaaggagttaacctcaatccaatctcttgcaacctcatttatagaattcttttaacatactatggactatttgttcatcgtttctcgtgaattatcgattcttgactctgatcaaacttgaatagctttcatctttggcatcatcaaaatttcatatttcatatacttctacacatgctacatatactatagaataacatcattcaatactagatccatctaggatacctaggtcattcctaataaagaagaatttatctctagcaagaggtttagtaaagatgttagctagttgatgttcactatcaataaacttaatgcaacaatcaccttttgatacatcatctctaagaaaatgatgcctaatctatgtatgattatgtctataatatatga

SEQ ID NO: 107123 - DNA, 393 bp, Glycine max
ttgatccaaaatcctgactcttcattaccttgacttatggtgagaatgtcaatccttaccctcggatgcataaaatgaagagaatgaaaattccgatcaaaggaaaaaagagatgaaaggaaattcccattcatagagtggtagaaagcgaattgaaaagaaagttgatatattaagaagaagaatgaaagaaagcttcctgatcaaggttcgtaagaaaacagaataaatttgcaaaaaagtctttggactggacaatatctgatcaatacaggattgtcacccattgatccaaataataaagaaaggcgaccacgacctaaaatgggcttcttcctttaattgacaaacaaaatattgtgcgctatagactttttgcccgcactaacaaaa

SEQ ID NO: 107124 - DNA, 212 bp, Glycine max
  unsure (1)..(212): unsure at all n locations
gagtgggtacctggagatatgtcgcgggggtcatgagacctttgggacgttatggtgtgtgctatttgccanaaccaatcatggtcaatcccgagcctaccccggcattgtcagtaagtgataacctgtgacgtacctaatcaggcgagctcctggcagttgacctattacataacaaaattccatgaagcaaggaggctcgtgtggcggct

SEQ ID NO: 107125 - DNA, 367 bp, Glycine max
ctcagctttaacttgagctgatgatttcattgaggcttcacaacagagcatttttattggagttctctttcaagaacggtttttctcctaaaactagtaatactttgagatggaccattggttgataccaaaaaaccttttcttcaccaccaagtgccaaacaaccttggactttaaattatggggtattgccaatattctaattcgtatccatgtgcttaagaaacctagggatgtgccttttagaattatatttaaaccaaaggtggagaataattaagtcaatatgaacaccctattgttgtttgtgggcaatcggagcacttatattataagtgggttttaaccttgaggtctactccggcct

SEQ ID NO: 107126 - DNA, 252 bp, Glycine max
tttatatgagtatcctgggtgaagacacgacatgactcaagcctccaagctaaattcttatcaaatgcgatagtcaggggcgacacgtactttctccaattatcattggtggcctcttgcatactatccctaacccacattaagctctcctcatttcatcattttaagttggcaccagtatgggcattattagcttgctatacatgtaatcctgctgtttctccatgaaccacttttttgaccatctgaaag

SEQ ID NO: 107127 - DNA, 359 bp, Glycine max
tttttgtgaggatcgaaattatataacgaagatgttatgatagatcatctatttcttctcatggagaagatgacgggtatgatgaagatgaaaaggaaggaggaatgagaggtataatgggagaagaaatcatataagatatggaggtagacaaagagatgaagggattgagggagtgaaggtgaacatctctacttttaaagggacttatgatctacaagtgtatcttgagtgggagatgcatgttgagcaagtctttgcttgctacaactacaatgataagaaaaagatcaaattggtctccctataatttgagggatatgccttagtgtggtggaatctaatgatgagtgatgttg

SEQ ID NO: 107128 - DNA, 316 bp, Glycine max
  unsure (1)..(316): unsure at all n locations
ttgcaacccaacacaagaacttatctttgactttgaatggagcacttcttgtcattgcttgatcacacttacttgctaagctagcatagattccataggatgactaattagcttctaccatctcaagttttccatctttcattccaatgagaagcttctgatgaaatgttgatggaactgctcctactccatgtatccattctcgttccagtaacatgtngaagttagcttgcaaggaaatcactatacaaagtgttatgtcttgatggaaggatgcttgtgctgttctatggaggctggatcttgagcttaatga

SEQ ID NO: 107129 - DNA, 372 bp, Glycine max
tctggaggaagcctcttaatgaagcttctagagaatgctacatgaagctgactcggtaaaaatgctgcgcagccttcgttaaccagtggatctttcgaaatttggtttgcaactttgcaagacacatgtccatgatctgaccgttgggatctttgagaagatatctggagtgtgctagaagcctcttaatgaagcttctggaggaagcctcttaatgaagcttctagagaaaactacatgaagctgcctcggtaaaaacgctgcccatccttcgttaaccattagatcttctcgaaatttggtttgcaacttcaaaagacacttgtccatgatctgaccgttgggatctgtgagaagatgtcaggagtatgc

SEQ ID NO: 107130 - DNA, 354 bp, Glycine max
tctgacataatccatcagcacatgcggactccacattgcggcttactaagtagttcctcaattgtgcatgaggtggctcactcctctgccaacttcattctcatcatccatcacatttttcacagcgttgcttacactctccttcgtgaaccatccatcttcttcacccttctccactataaccccaatctttaagtgttcacccatcatccttgcattaactatatgatcaccatctacctgtggcagtaacactatttggcacttattcactactgcctcagttaatgaaccatcaccacaatgtgttatgaagctacccactgaagggtgatccaaaatcagctgttgctg

SEQ ID NO: 107131 - DNA, 330 bp, Glycine max
tataagtctcatgaaatggtgcaacttgattcacgtcgttataatgaactacgtaagttcaagttggttggcgtggattttcactttcacatattcttaatacatattagaagagaatgatgggaatcaattgtactgttactaagcattatgtgtcatgaaaaaataaggaatttcctcccactgttattggcttacagcacttgcacaatctacatgccatattttgaaacacagttggcaactaaatttgactaacttaaaatccatgcaagtgacccggatgctattgccatgattcctagacaaatggacgtcaattatctggac

SEQ ID NO: 107132 - DNA, 314 bp, Glycine max
tatttttgttgttccctttcaccatgatggggtctcattgcaaaactaacaatgtttgtatataaagttcccatcgcctaattagtggaaagttccacaattatccttatcaagtgtagaaacattgacttaagcaggtattcaagctctacctaatcatgtcatggaaactacccttctcccctccatggttttgggagatagataataaattctgaaactttatttggggtcatacataaaactcaattattgatcattggatgaattgggattctttatgcacccatacgagtaacagagattttggactc

SEQ ID NO: 107133 - DNA, 309 bp, Glycine max
ttttcccctttgttcctatgttcctctattcttgattagattctcatctcaagccttaagtgataatccagatatcaccttaccattatggaattttggagctcgggaattgttctgggaataaatgaggggggatatgtttcattggaaaatatgatttttggccatgcttaatgttttattttgtgcatgcttattgtatatatatattgcctaagtcttgctttaatcttgaaattcatactgttcattataataaaagataacaataatagaagtgaaatgaataacgaagtcttgttttatgac

SEQ ID NO: 107134 - DNA, 425 bp, Glycine max
  unsure (1)..(425): unsure at all n locations
gtcacctgcggcttgcaagctctccctcacccctcaanggggtgcgtgcaatgtatatctatatcaccntatataataggtgtgtgtatgataaactcactcattaattctcgaggcttaatgcaggtctttggacttctacaagagctagtagagatgacccctaagtctttgttctatgttgcgatatgtgtacttttgggaagcatcatcaacaatacattgtgcaaagtgtgattatttgtcatgtcgtcaccatggcaaaaattaaatattttcaaaatggacgcatctaaatgttagtaagttcatcttatggcaatcttggaaaattagttccttcttgaaaccctaagtagcttcgtctatggaagttcaatcctggggactgacactttttcataatacttcaaactatcatctgc

SEQ ID NO: 107135 - DNA, 409 bp, Glycine max
tcttggcaacggcttggtttgaaacataggtcatcttctaagtgctctctgctgaaaatgcagggtttcaaccctataaatgttttccaatgccaaaagtggagggaaatcacgaaaaagtaaaataaaggattggaaaactcagaaaatggaggccaatatggattgtttttcctgtttcaatataataccttcaacggccataacacttccaacaggcgcaacataacaccatgggcaccctgaaacagactcagacctctcctctctacagcgcactattgtgcatgattgactgctctggtttagatatcactcatcctaagggttttttttaatatcactcatcctaagggttttttttaatataactcatcctaaagttttaagtgttcaagtattcttacac

SEQ ID NO: 107136 - DNA, 410 bp, Glycine max
cttttgttcaacccatgcttcattatcagccattttcttggcagcttctttttcaactttcttggccttaacctcaacatgattggctttctctaactatgctctatcaatttttgtacttcatgggtttgcatcacatgatctttgaaattcctttcatccatctttgtgagatcatacacaacatcattaaagatgaaagggagaaccttcaacttttctatgaatccatcttcctctgcatctttcacaaaacacacacagacattattaaaatggtacgtcttgactatacgtaacacttgaatggtgtatttgtggtatgcgttatcactgtaatcatatccaaatgaggctgcctttgttgtgccattccaagcaatttggtactagaagggtctggcatcgaa

SEQ ID NO: 107137 - DNA, 369 bp, Glycine max
  unsure (1)..(369): unsure at all n locations
tcctaagtnttaagttctttctcaaactgtcctttcaaagttcccaatgtcctattaacaacttctgtttgcccatctgttattgggtgacagaggttgaaaataacaatttaatgcccaacttgccccacaaagtcctccaaaaatggcttaagaacttatagtccctatcattaacaatgctccttggcaaaccatggagtctcacaatctccttgaaaaacaaatcatccacatgggaagcatcatcaacttttttacatggaataaaatgaaccatgttagaaaacctatcaacgaccacaaaaatggaatctctaccactacttgttttttgcatgcccaaaacaaaatccatgggataatcaa

SEQ ID NO: 107138 - DNA, 389 bp, Glycine max
ctaccaagtcatgtgagtagctagtgggtactcttcatgagctagttgaatgaacccttattggggagagaaaaacaaatttgtggtcatccgtcaggaaaataagattgtttgtgtctttaaagaaacacaaaaacatctaacaggttttatattaatctcaagttagctattcttgtccaattatgtgatcgcaataagtctaaaatgaatatatatctctcatgtgccttgtggatgtggaatagttcagttagtggcaacaatcattccaactataccgattttatgttcttagatcagtaaataaacctattattctctctgtgtttaggtgaaaatcatttacatccctaatctataataataatgtatcaatttaataattc

SEQ ID NO: 107139 - DNA, 379 bp, Glycine max
ttagaagggttttgaaatatgaatgtaaaagttgttatcaattaccattgatgtgtaatcgattaccagcgacggaactcttaaaattcaattgaaaagtcatgacccttcaaaacataactgtgtaatcgattaccataaacctgcaaatcgattaccagtgaagaatttcaaaaaaagctgtttgaaaagacacatctcttcaaaccattttgaaaaggcacaaagggcctatatatatgtgtgtctgacttcaaaaagcaagagagagatattctaagagaacttcattgccaaatgctctctcaacaactcttgagcaaacacttgcaaatctattgagagttcatccaagaactgtaatttgtatcatccactc

SEQ ID NO: 107140 - DNA, 368 bp, Glycine max
tcttattatcaacagatgatgatgaatccgtggcctcatcatatactcctctaatgacaatagcattatttcttgcactgaattgttatgagtggaagccatcttctcattcatattcctagcctctacaagagtcatatcaccaagagctccaccactggctgcatcaatcatgctcctctccatgttgctaagtccctcatagaaatattgcaaaatgagttgctcagaaatctggtggtgaggacagcttgcacacaatatcttgaatctttcccagtactcatacaaactctctccactaatttgcctgatgcctgaaatgtcttttctgatggcagtggtcccaaatgttaggaaaaaatttc

SEQ ID NO: 107141 - DNA, 382 bp, Glycine max
atactcaagcttattccatgacaggctattatcatgcacaacttgctagaattggctcaccaaaggccaattataactacggagcagttccttgatcaagtatatggcctggagctctacctttagtggtgagacccaacgaggctgctcctcttgagcccacacctgcacgagttgaaccatttccatctgatccacaatctccagtggcgaatccaccttctcctgagcttgaagtacttcccccatctccacctattattatcatctctgattcccccatctggagaaactgctgctccccctgattccccagttggagaaactggtgatctttctaattgcttatctggagaaagtgttgacctctctgattccatat

SEQ ID NO: 107142 - DNA, 374 bp, Glycine max
tctcggatcatgctgggaacgcctctagttcaacatccgtgcagcctaaggcacccaccaaatggaagctccccaagttccaactccgaacacactcgaccggccggtaattccaacacaacaaggaacttccctccgatgccattgccggaattcaccccgctcccaatgacgtacgaagatcttctaccatccctcatcgccaatcatttggccgtattaactcccggaagggtcctcgaaccccctttcccgaagtggtatgaccctaatgcaacttgcaagtaccatgggggggtcccggtgcattccgtcgaaaaatgcttggcccttaaatacaatgtccaacatttaatggatgccggatggctgac

SEQ ID NO: 107143 - DNA, 336 bp, Glycine max
ctattaggaaacttgcctattctatccataataatttatccattaataaatacaagagttgaagttaaattctccaaataataaaaaattatgaaataaattgtcaataaagttaagtacaaaaattgtcaaaaaattaaaaagttgaggattataatatataagtttaaagtataatgaaagatgatatagttcattatttttttaaaaaatggaaggtaaatacattcaattaatttattaagagttacattcgaagaagaaattaacacgttgagatatatttacaatttaacctatataatagaaaatgaactatactaagagtaataaaat

SEQ ID NO: 107144 - DNA, 383 bp, Glycine max
gcttcagtgaccttaaatctcagcttgttgccttggatcttcttcatcaatggagtactttgcttcttgaagatgaatggcagcagaatggagaacgaaggagatgattggagatgccacttcaaggagaagatgggttaagaagaaactcaccaccatatgaagccatgaataagagcttgaaggtaggagaagatgagtagagggaaagggagagaaggagcacaaaattttgtgcctcaaatgaggtatgaactttgaagtgtaattctcaaatgatcaaagttcaaaaaatgcacacaaatgacctctatttatagcctaagcgtcacacaaaattggagggaaatttgaatttctattcaaatttcacttgaatttat

SEQ ID NO: 107145 - DNA, 339 bp, Glycine max
tcctattgggcccatgggctgaaaatttcccatatttacccttttgcccctcttttgaatattttgcgcatttcctctgaaacgtcatggaaccttgtggattgtgtggcaattagtgttaagcatctcaactcggctagcaagaatccaaatggtgacaaacaatcatccccagacgaaaataaggtatgacaccacctatccttggttgattggttgccatcacattctattgtcgaccaatggctagctacctcgcaagggatgtcaactctataagtttattctctaacctctgattatcagcaaccatagaaacaaaaacttcacatgcaacaa

SEQ ID NO: 107146 - DNA, 335 bp, Glycine max
  unsure (1)..(335): unsure at all n locations
ctgcagctggaacattgttcaaatagaacttttctgctgattttatatagtggtaccttgcaggttgtaaaggcacatctgccttgtacccttcattacttgtaatgaacctcgtaatacctctaaagttccaccttctccttgaatgaaatccagattgattaacattcccaaagagagtaagttctctttaagctcaagaacatgccttacatcatggagcagctatacagatccatctngcatcttcattntaacagattccatgccaatgacattacatgccatattgttcccatgagaaccttctcttcatctatctcactataggagct

SEQ ID NO: 107147 - DNA, 421 bp, Glycine max
tgacacttataatactctagtctcttccaagttactactcatcagaaccattccatcaattcaatgggtcttttatttgataacagatgggagtggaagtttcaatggaggagaaatctctttgatcacaaattgatatggcagcagctttcatggcagacattgttgagtttcaaatccaaccttcatgcatggaccttctcctttgggggcctgattctggtggaccctactccacaaagtcagcatacaacttcctgaaggatgttgacactcaggttactgaagatagtgcttccaagattatctggaatctcaaaattccacctagagcaagtgctttctcttggagaattttcaagaacagaatacctaccaaggttaacttaaggaggagacatgtggagctgccttcttataa

SEQ ID NO: 107148 - DNA, 405 bp, Glycine max
tttatcttgtatatgcctaacttatcatatggactttatcaaacgagctctgacccatatgtgaacgcgtgatttttttgtttgaaataaaatggatgcacagggtagcttgcctgtgcaaggttagctcgcttgggcgatcaccccctgcatgagaaaggttaaaaggagagggaaggggtgagtttttcacccataacttcttcctctcatccaaaaaacgtaagctcactggatcccttggatttccagccttaggtcaccatttctcaacattttttgattccattttgcgctattattcatccccaacaagagatggctccgaagaagctctccacaaagaggtctatgagtgatgcccatggggaaagctctatcgcctctatggagttcgacagtcac

SEQ ID NO: 107149 - DNA, 396 bp, Glycine max
  unsure (1)..(396): unsure at all n locations
gcagcttatccaacgngaagtgggtacttgcatttatgttttggacgatattggatcaatattctagtacttggactgatgtcttattctgtaacgttatggggcttcacactataacaaagtcagacaaataggcacatatattacctcaatgaaaagatgttctttatcagcaatcacaattgacaatacaatcagaaattgggattgtttctgagaaaccctggctaatgtcaggatactataatttatgctaatgagacgcttaggggggaaatcgatagcagttggtgagggaatctgtaacttggaggatctccttggcgttgtttgaagcaggagactttcttattgttttttgaaagacacgccatcttttccaaacattccggtttg

SEQ ID NO: 107150 - DNA, 380 bp, Glycine max
ttaaccctaacctcactgttttgtgttcccaaactgccaaagacaataacttcataacctaaatctatttcaaccattcagatttgctaaaaactaaacacatgctcctgatttgaatttttggtttcccctaatattattttcaaattgaggaacttaaaccctggttgattggcgcaaacataaaactaaatgcacaaaagcctggtaccttcaacgtaacagtaaaacatgcaatgattgttaatatgtaagtgaggaagattgaagttaaaacatggataataagagttctaaattgaaattgagaatggtttgaatggaaagagtggaatatggtacctatatctgcggaactgctgtctggaaaaaatgttgtg

SEQ ID NO: 107151 - DNA, 402 bp, Glycine max
tattgtaatcttgaaataaggacaacactctgatttctgaaatatttgggataaaaatggtcattgaccagtcccttttccatgacttaaccaaattacccatgacggtgtaccatttgaatgtacactgaatgacgactggaaatttgatttctgtgcccatgatgcccgccagttggtttgcaccaacaatgctgatatgaccggacgtcttcttgccgggtcattggcttttgaaagtcgcatccttgactatttaattgtgcgtattctgcttccacggtcttccaaccttgcccaggtttctgaggaagatctttatcatgtgggcctttcatacaaggcgtcaacttgactgggcacacttattcagatatcgcatgcataaagcattgtgattaa

SEQ ID NO: 107152 - DNA, 387 bp, Glycine max
tttgtgagacaacttccttgagatgctagagcttatcttcacacacccctctgataactaagctcacctccttgagaagcttccttaagaagattcctaaggaagctaagcttagctacacacacctctctaataactaagctcacctgcttgagaagcttccttgagaagattcctaaagaagctagagcttagcttcacatacctttctaatagctaagctcacctccttgagatgagaagctagaacttagctacacaccccctataatagctaagctcacccccatgacaaaaaaaacatgaaaatacaaaaaaaaagtgcttactacatagactactcagaatgccccgaaatacaaggcgtaaaccctatactactagaat

SEQ ID NO: 107153 - DNA, 433 bp, Glycine max
catacctcttaatagctggttcacctgctggagatgagaagctagagcttagctacacctccctataatagctaagctcacccctatgaaaaaatacatgataattcaagaaagtccctactacaaagactactctaaatgcctcataatacaaggctgagaccctatactactagaatggccaagatacaaggcccaaacgaaggatatacctattcttatatttacaaagataagcgggctcatacttagcccatgtgctcaaaatctacccttaggctcatgagaacccttaggttaggaattgcatatgagggttattaactctataattttaaaggaagcatgttgtcattcgtggttaaattcggttaggagatgagataacatattctactagaaatataggtttttttgctcttgaacaagttgt

SEQ ID NO: 107154 - DNA, 382 bp, Glycine max
tcttcaagaattcatggcctcatctaactacttgttccccgaaggaaattcaattaataggcctcccttttttaatggagtgggttaccactattgaaaacccgtatgcatatcttcatagaggctatagatttaaacatttgggaagccatagaaatagggccttatattcccaccatggttgctggaaatacaactatagaaaagcctatagaagattggagtgaggaagaaagaagactagtgcaatataacttaaaagccaaaaacataatgacatctgccttaggaatagatgaatactttagggtatcaaattgtaaaagtgaaaaggatatgtgggataccctacaagtaacacatgaatacacaacaaatgtta

SEQ ID NO: 107155 - DNA, 346 bp, Glycine max
tctacttatgtggcagggctgtgcttcttcaccttcttgtctccaacgcgaactgtgaccattgttcttccttcccgcgatgcttcttttcatgacgcctgagtgggcttatagccttatccatatgtcccacgatttccttgggtatttatcaagctagttatgccgccattcttttttcctaaacccatcccgggttcataaccgttccccaacataactcgggccatcattaccgctgcatctgacagacaaggctgcccaaagatggagtccacggaggaaatgctgaccacctcaaaagactggaaagcagtttctaacaattcttctgcggctttcacat

SEQ ID NO: 107156 - DNA, 318 bp, Glycine max
accatcatggggggatcaaagcacacgagcctcatgttggccctccctatacctacatttatttgcacctgtaccttctgttccatcgctattatccaattttcttacgtgtatcatcctcacatgtcttgcgcttaatggtgttaacatgaattcttataattgccaccaatttgactggctattgaagccagatatgagtatctatgagtccaagatccttgttcttggacttgaacacatgaattgtggtgaacttatgttactttgacctatgcattgccatttacttggctgaatcccaaacaataacattct

SEQ ID NO: 107157 - DNA, 285 bp, Glycine max
  unsure (1)..(285): unsure at all n locations
tggacaagcgggcgcacatatcttgtgaggtggtggtgggcgagaaagtgttnggaccacaatcatcttcttgcttgtatattcatggaagtacaccctgctagtgtcttctcgtgcttagagatgactnttagtgtttgattcaaatgcaatgctaatagcacgagacatatggaataaagaattcaattcaaggacagttataaactttcttcttgtgcgctatggcacatattacttacttaaccatgaacattactgtttggtgataacttctcaatcttg

SEQ ID NO: 107158 - DNA, 380 bp, Glycine max
  unsure (1)..(380): unsure at all n locations
tgagatgaggaagtatataagggtgaaacatcctgcttntattcgttgaccacaaagtggtacctggagatatgtcggggggtcaagagaccttgtggacgtcaggtggggtgctattgcccaaaaccaatcttgaccaatcccgacccaacccgggcatagtcagtcagtgagaacctgtgatgtacctaaacaggcgagctcctggctgtcatcagataatattgaacaaagaccacaatgcaaggaggcttgtgtggtggctggccacctgtgaatcttgtgtggattatggcctctggtaatcgattaccaagggtgggtaatcgattacaatgcttaaaaatgaatacaggaggctaagatggtctctggtaatc

SEQ ID NO: 107159 - DNA, 331 bp, Glycine max
cctcactggtcataaataggggggaatataggtcatccccgtgcttgaccttccttcaatgaatttatctgctcactgaatgaatacaactttaggtcaaattgatgagctggatgaattgtcctccacctggcgaacaccctaagcctcactttgatcctcttgtcgccagttacattatatccatgggaaaccatggcctcaataatgtgcattggggcattattcatcttatgcataaggttaccccctgtagcatcatgcaaactggacctattatgttgggatagctctccacttaaaattggaccagctttttggctagtgccca

SEQ ID NO: 107160 - DNA, 328 bp, Glycine max
ctgcccaattcttacaaactggcaactcctatgctcttgatctcgactagatagaacctcttcttaagccaatgcgcctgactcgatcccatgttttactaaagtggaataaataccattgcgaatcaagactccgacatctatcacatgtgaaatggatgaatgcatgaacaaatgcttatggcacaaatgcatcttactgatacgagagcccgggagattatctctttcttaataacaacattcgggcaacatagcgctcgatgcacgcattataaaatgtggcacggaccttccgctctcttgtgacaaagtgaggggatcaata

SEQ ID NO: 107161 - DNA, 376 bp, Glycine max
tcaactacttttttagtgtttgttgccatttatttgttttattgcaagagaagggtgtcaaagtataatgagagtaagacattcagagttcataacacaaggaggatgaggaaatggctcagatagaggatttaatgatctttcatggtggagaggaccttacaatatgtcaatagcaaccacaaggagtccaattatgacatccatagtttcagaatatcattttttaagtttgttatatataaatttcactatcatagcttacccatacagtgacaaagtagagacaaacattgactctatcatagtttggtatttttttcagttctactatttctttattgatttcttctttttctattcttgttaatcaatt

SEQ ID NO: 107162 - DNA, 383 bp, Glycine max
aagtgtagaagggtgaaacttcctgcttttattcgttgaccacaaagtggtacctggagatatgtcgcgggggtcatgagaccttggggacgtcatgggggtgctattgcccataaccaatcttgaccaatcccgacccaacccgggcatagtcagttagtgagaacctgtgatgtacctaaacatgcgagctcctgtcagtcaacagataaaatgaacaaagaccacatatcaaggaggcttgtgtggtggctggccagctgtgaatcttgtgtgatatatgggttatggcctctggtaatcgattaccaagggtgggtaatcgattacaaggcttaaaaatgaagacaagaggctaagatggtctttggtaatcgattacc

SEQ ID NO: 107163 - DNA, 428 bp, Glycine max
  unsure (1)..(428): unsure at all n locations
gctctcacttaatgtagtacttcgcatccaagngtggatgcctacttcatgtgacaagaagcccaattttctttataaattgaattaatcaattattgtctcgaagattgaagattgcaatcaacttgggccatgccttcttagactcaaccttagtgtcaaattcatacatgcatgttttgaaatctcttaaaaatggctttctcctttcataaattggcgaaagtgtaattccgtttgcatcagtgcctagtcataaccatgatgctctcagcattacttcacaagtgccttaccatgtttgtcttgacagtgaaatggctgaggctttatactatgtctcttgaaatgcttaaaaccattgaagatatttgttatcttaataagcgcacacaatactaacttcttatggtaacttaaaaaacagt

SEQ ID NO: 107164 - DNA, 395 bp, Glycine max
atatacacaactcaactctttaaacaaaaagaagatatcttcccttctatctatgttaatgtagttcatgtcatctctagaccattattatcctcataatgtcctattcttgatcacttaaatttgttatttgtgtttatatctatcataggggaaatgaggcatcacttgttgtcctacctgatttgttgatggagcttgatagtatggatgatgtatgccttactattactataatcctctggatttaacatggtgggaggagtcaatatttgttccttttcgtgtattacatgagattctatatgcaactaatacattattcctttttcaagtcaatatatgtaaagtcagtagaagtgacaatgtaccagtgagtttcatcttgatgccat

SEQ ID NO: 107165 - DNA, 404 bp, Glycine max
acccgcgctcaactcaatatttacatatggctgtaatataatttctctaaaatagcaatgttaaaaaatttaatcaatagtgaatcaatcgaagacaaggtgaaaaaatttcattcaatcatatgattatgaaactgtctaaacctaacaattctgtactgtcttgcatcaaccatatgtgtgatataaatatagcttctgacagacatcacatcatctcaccatgtttctgtcataaccataaagcacaacccatctttatctcctttataaaaaaggcatactccacgaatctattttatttttataaaaaatactctttctattacaaggaacaatccttcatttatttaactaatcaaccagacatttatgttgggtttcctaccaaaaaggcataacaa

SEQ ID NO: 107166 - DNA, 412 bp, Glycine max
ttgcttcaatccttgaatactgattcttgatgcttgaaatctaatttcctcttgatccttgaaatgttcttgattcaatcttgaacatcttgaactcattctttgattcatggatcatcatctttgttatcatgaagtgatcttgacctttgagctttttgtcatcacctttgttatcatcaaaacttctttgaatcaatcttgattcatcatgaagcttgcttctacaacggtgagctattatggccctatacccatgtccttgggaacatatgaagtgggggttgatctgtggtcatactgagtcttcgactcgcttgatgttaaatgtcttcttgaatcaatgttaaaaatatattttctaataatgcatgcttgttaaaataatatggttccaatctatatcactcgc

SEQ ID NO: 107167 - DNA, 326 bp, Glycine max
agtcaccgcagctgcagcttggaagtgctatttatctcctccttaccatctgtgcttacagcgtcgctacgcgacactcttgcttatgcgagaagactctggaaaatgagtgtcatgttcgcttaacgcactgcttcatctcactaagtgcaccacttcagttcatccgcttagcgagaaaggcgcgctaagccaaaaatcactaatgtgcactaagcggtccatacgtgcgctaagcgcacgagcacgaacaaagccacctatttatgcctgaaatcagaatttatgaagggagtttggactgggattcaaagctctgcatgtct

SEQ ID NO: 107168 - DNA, 398 bp, Glycine max
  unsure (1)..(398): unsure at all n locations
ctgcatttctatggtttctagagagagaaaggtccaagttctagagagttttgagagattttgctgtgtgaagatctgcatagaccagagcttgattctcgatccggttgtaagtttgatatgagtttgtgagtgattgtcagatcctggatgtgaaagagacatcctcaccacttgttttttttttttgaaatccttcatcttgttcttctctttgttgtaaataaagcttcctggtgtggaaagcttaatcctgtgttggatcttccccttatgtacctgatgtgaatatatctttatctatttaatgatgaantggatgtaatttatgatatctgctttttctccaatatatctttacctttgtcacaccatgcatgcgtatttaaggccaatga

SEQ ID NO: 107169 - DNA, 361 bp, Glycine max
tcttgcggttcgtcttctctagagcttatacagtgctctatgtctttgaattatcaatcggttgatatcctgcttaatagaggtaagcgataaagatttaccttctcgatctcgaagaccatgacccctccaagaactatgtgtcgaaaaacttccctgccttattcattgattggcattgcttttatacacaacattggaagtgcatcgtgacatagtcctaacaatttattcacaatgatgatcgctcctaacaacctgcatattgttataactattatttgaactactatcgcgtattactgtgacggatcactgttttgttcatagaaatgcctcaaatgaattcgccttgtactga

SEQ ID NO: 107170 - DNA, 273 bp, Glycine max
ctatccttggtccctcaagaagacaggagggccttactctatccttggtttctcagaaatggagatacaatttccttcggggactctacagtagatgccactctattcaaaaattgtaaaagatctgttaccaagaagagcacgttcattcacagtgacaatattattatggaggagattgagtgcagtgattcaagaattcttctccgaacacaaagatcatggagtgcacaattccctgctctatctgtttgtgtctgttgaaaagctcta

SEQ ID NO: 107171 - DNA, 413 bp, Glycine max
gactctatattatactcatgctgtataaacctaatattttcttcttgcttgaaactcttgcccctttctctcatgttggtaagaagtgaaactctctggattttaaggatatcttattcatgaagctattgtgcattcaggggagatttgggttctctttgttgaacttcgtatttctttcaaccttatgatcagcatcattaagctattacattctttttctgataaagaacaatgtggcgtggtcttgctctacagtttatgcttctctcaatccaattgctagagctttattttgaggctacttatcttcctttagtgatcaaattaatgggccttgagttttgttaggggattttaatgaaacccccactccatttcgaagttgtggtggttctttcgattcatacatc

SEQ ID NO: 107172 - DNA, 198 bp, Glycine max
tgacttgcctgatggtggtgaatcatcctattgcattcatcataatctgagtttgctgcctcgtttacatatatttgggcctaacatgttcttgtgtctctccagacaatactatgttatctacagtgctatgtaatacagccagtctcgcattccttgattaatttcgccagcttggttgttgcacggatgatatac

SEQ ID NO: 107173 - DNA, 388 bp, Glycine max
tcatgagcatggtaatgaacacatggtacatgtgtctcatgtgcaagatgctagttggaaaaaagaagtgaccactgaatcatggcaccttgaaagcagaagaagatagaatctatttttgctgttgatgtaaaaatgttaagtatttctgctgggctaggagatggagttgatgctttggttcacgtgcagtcaattttctcagataatgctcgcatttgattgctccttgaaggtcttatgcttagttttaatggagctagaattttcaagagtgatccgatgcaaatttcactaattcctagtggttctgcaattgcatctgatacatatggacatgttgttacaacatgggattgggtattacaaaggcctgattttcaccttt

SEQ ID NO: 107174 - DNA, 320 bp, Glycine max
  unsure (1)..(320): unsure at all n locations
taccatatatgtgtgatcgattacattaggcgaatcttgaattctaattctaatagctgttgtatatacactgtggccactggatatcgatttccagagagttaatttctagtaaaacactttttacttaattttcttggacgaaccttttgctcatacaattggaattcccttcctatttaatataccctttctaagactctatatactggtctgatcatccattttgaatatatgtaattgctctgtcttgaataaagcttngagacgcatgtgatcttctggcttcatcaaaacatatgcttgatcctttgtctaca

SEQ ID NO: 107175 - DNA, 393 bp, Glycine max
ttgaatctctttgaacttcttcttcttctttgtaccataagctttctgaagttttctggttttctaaaccttgaaaacttgtgctattcatctttcattctcttctccctttgccaaaaagaattcgccaaggactatccgcctgaattctttttgtgtctctcttctcccttttccaaaagaacaaaggactaaccgcctgaattcttttgtgtctcccatctcccttgtcaaagaattcaaaacgacacagtctgagaattcttttgattcttccctttccctaatacaaaagtgttcataggactaaccgcctgagaattcttttgtatccccatttcacaagtatcaaagttgtaacagcctgagatccttgtctcaacacattggaag

SEQ ID NO: 107176 - DNA, 398 bp, Glycine max
tccaagaatcaagatcaatattcatgactcatgattcttgaatcatgagaagacttaatcaagattagtatgaaaaagatttttcaaaaaatgagagcacatggatttttctcaatatatgtttaccaaagagtttttactctctggtaatcgattaccagattgttgtaattgattaccagtaagcaaaatggttttcaaaaagctttctactgaatttacaacattccaattgatttcaaaaagctgtaatcgattacaatgttttggtaatcgattaccagtgtgcttgaacgttgaaattcaaatttaaatgtgaagagtcacattctttcacaaaaaagctttgtgtaatcgattacactgatttggtaatcgattaccaatgattgtttctg

SEQ ID NO: 107177 - DNA, 381 bp, Glycine max
gtgacacttaaaactcaacttatgttattctatatttataagattaaaccctatttgtaaaccatcttcaccatatattcattatataatactatttttcatcaatagcatataactttttgtgttttccttcgcatgacactatgttttaaagtatgttcgtgactaacttaatctattatacaccttaattgtaaagcaaaacttttgacaatggttttttcctttaagtgtgttcattcattgtctaatccaagtctacgtcaacgatttatgcctcaaccctcaatgactcttatgtaacttgattgaggtatgatttgttattactaaaaatgtctttcaggaataatgtatatcattccagaaatgtatctttga

SEQ ID NO: 107178 - DNA, 358 bp, Glycine max
taatctgaaatgtgaatactcattaatggttctgaatattacaactcttctgcacaatacacttgttatcaccgaaccaaattgtcataaaatgttcttccatctatgcacaagatttagcatcttgaatagaaaaggttcaatgaaaattaatctcagaaaacagagcatcaagtagcatcttacataatctaatgagaaataaaggcctgtccattcatactggtaaaaaataagccatctatttatactacaccgggcttatactgtttaacttaacacacgattgtatgacatcatgcatacttcaaaatatacatgtctttcttttatcaaaattaatcttacacacgaaatt

SEQ ID NO: 107179 - DNA, 380 bp, Glycine max
  unsure (1)..(380): unsure at all n locations
ttagacagccctcctaggttagactaacttaactaagcttatgctcaatccctcttggtggactagacttaggtttaatagcttacgaaattntagactaatttagcctaagctgtatcctcagatctctcttggtggactagacttagaccaaacaacattattgttatagcatactgtaaaccaaaactttatccgcagatccctcttgtaagactaagtttcaattgtgcttcattcaagttataaggaatcaatacattgtccaatgctgaagtcacctaactaggcacactaatggtggatcagaccaagagcatcaaaatttatgctttggatgaagcttgacacatgaacacagtcattaatatttaatattt

SEQ ID NO: 107180 - DNA, 342 bp, Glycine max
ttgatgatatggtcttcaccaacaaaatgatcaatgtgggactaaaaagaggcaaatatgatcatcatgctttgattatgccaaaaaaatagggcaaatgaagagggtgagaatgagggagaagcccatgctgtgactgccattcctatacatccaagtttcccaccaacccaacaatgtcattactcatccaataacaaaccttctccttacccaccgctcatttatccacaaaatgcaatccctatatcaaccacaaagtctatctaccacacttccaatgacgaacaccacctttagcacataccattaacaccaaccaagaaatgaattttgcagcga

SEQ ID NO: 107181 - DNA, 326 bp, Glycine max
ttaaaatttgaattaaaatattcaatatttgctggtaatcgattaccatatatgtgtaatcgattacacagtgcaaattttgaattcaaattttaatagctgttgtaaatcatttttggccactggtaatcgattacatcctctggtaatcgattaccatagagtaaatctcttgaaaaagactttttatcttaaatttcttggccaaaccttttgctacttcagttaggaattcccttcctatttaatatacccttcctaagactctagagactgtcttgatcatccatcttgaatatctttaatttctttgtcttgaataaagc

SEQ ID NO: 107182 - DNA, 332 bp, Glycine max
gctactatttaagctgaaccattttatcaatttatacaagttgagttttattcagaaaattagagatcatctcttttatcttactgagagtgattttcctaggattcttgaatgattcaagaacaccctggctgtttcaaaggacattcacaacctttgtgtgttgccctcgctggaaagagtgattttttccttcctttcatcttcacccttgttttttcaaaccacaattccataaaatccacctctgcccacaattatctcgaggccataactcccattttacgcactcaaattaagtgattcttgagcctaaattgaatttcaaaacg

SEQ ID NO: 107183 - DNA, 329 bp, Glycine max
gcttttgaatcgagaaagacttgatacatcttcttttacatgaatagattctttgctcttgtttcgattcactgtgatggagaagatttctcttttttcagaatataatattaatgatatatattatataatatgtgtaatatattaatatattatttataatatataataattatataaattattaaatttagttaagaaatttaatgttaaaaatggtattgtgataaattttatattctttatcttcttgtccattattcatcaaacaatacacatgataaaaattgtgatgtacttgttgttttctcgagaatatcaatgtgtag

SEQ ID NO: 107184 - DNA, 339 bp, Glycine max
aaaccctcaagcttacatagccctaatcttaaactagttcttttttaacataaaaactctttaaatctaaagctacagttaaagtcttctaccctagagttaagacatgaaaaagagaaaaagaatcaaggaacttacttggatggtgtatgattgatgcttcaaagtcgaaaatgcacaaagagagtacagatgcaaaatgtgcaaatttttggagagagagaatgcagagctgaggtttctataatctggaaaatgtgagtgtaactgttgttacacttacttaagcagtttttcgataccttcgcttagcgaactattgtgctaagcaagcaagaa

SEQ ID NO: 107185 - DNA, 295 bp, Glycine max
cgtggaaggggagtcttcctacttttattcgttgaccatttagtggtacctggagatatgtcacgggggtcacgagacctttgggacaacacgcggggtgctattgcccacatccaagcttgaccaatcccgacccaacccgggcatagtcagtctatgagaacctgtgatgtacctaaacaggcgagctcctggcagtcaaccgataaaagaacaaagaccacatagcaagaaggcttgtgtggtggctggccagctgtgaatcttgagtgatatatgggatatggcctctggt

SEQ ID NO: 107186 - DNA, 322 bp, Glycine max
  unsure (1)..(322): unsure at all n locations
gctcagcttgcgaacttacaaacctcccacttattcaaattttcataaacanatgacctccacatgatcatcccgaggagatccctaaccagaggttaccctaacaaacatacagctgccctctccaatgtgcggccaacagacatacattctcactatcacaacagacagcgcaaatagaaacaatgagctctccaccttcctctaaactttatgcaatgatatcaaaatgcattcacaaagactagctcctcaagctactatcaaggacattgctccgtaatcacacatccaatttgcagtgcttcattgcaaaccaaag

SEQ ID NO: 107187 - DNA, 313 bp, Glycine max
tgtcacatgtgagctatgttataagtgttgagttcaatagcttgatgagtggtaccataaagcttattaaataagttaagtagagcttatatgatgatcactaacctcacaccttcgattttcaaatgcagtctttatatgataagataacccaaataaacttcataggagcttttccaaaagcacacatagtcattttataagatctatatggtgccgttttctatttattgattgatatgttacttttgcatccctactcccattcttgatcttctttctctttatagtgatacattgagtgcatgtaatt

SEQ ID NO: 107188 - DNA, 292 bp, Glycine max
  unsure (1)..(292): unsure at all n locations
actcaatcagacatccgagtataaagttgttgtcgtttgaatttgctcagaggttcaacattcaatntcgagcgtctcgtatatacagactcatcnacatccatataagtattgcgtgatagctcaactcacatcattcagcgctgttatacggactataactcagaatgtatgcgttgatgtcaatccattattacgctatttacgctatcactcggaagttgcgtgatgtaactactcatcacgtcattatgctatactcagaaattgccgatgtaactactattacgta

SEQ ID NO: 107189 - DNA, 311 bp, Glycine max
tagagccaattcaaacgacaataactttttactcggatgtctgattgagtcccgtcatatatcgagacgctcgaaatttaatgttgaagctcttagccaattcaaccgacaataactttttactcgaatgtctgattgagtcctgtaatataacgagttgctcgaaattgaatgttgaagctctgagccaattcaaacgacaataactttttacacggatgtctgattgagtcccgtcatatattgagacgctcgaaattgaatgttgaatctctgagccaatccaaacgacaataactttttactcggat

SEQ ID NO: 107190 - DNA, 111 bp, Glycine max
gctacgtcttcttaaaccaaatgtaggcacgctactttttcttaaacaattgtatggcccctacgttttcttaaataaaacttagcctgctacatttgcgtaattattgaa

SEQ ID NO: 107191 - DNA, 312 bp, Glycine max
tcctttcttacgaagagaagagaaagtttattgattgcagaaatacaagtagtggggatgtctcctccacctctaggacctcacaatcacttacaaactcatctcaagctctcaggacggcttcctcttcaagctctggtctctgcagatcttcacacaacaaaatctttcaaactctctagaactttgacctttctctctctagaatctctcacatgcagaagctccttgagaaaatggccaaactccctctctaaatctgatttcaggcttaaataggtggctttgttcgtgctcgtgcgcttagcacaa

SEQ ID NO: 107192 - DNA, 313 bp, Glycine max
tctatgttgtttatattggtctcaatattttatgaggagggatgaattaagtcttacaaaatgtcccactaacaaacttttaacccccttttaaatgataggctcaaaatgaagaagaagaagcaacaatcaatttaattgatgttctttaaatgtgcaagacaaaattgattgcaataaaataaatgagataagggaagagagaaatgcaaacttaatttatactagttcggtcacttcccgtgcctacgtccagtcctcaagcaacccacttgagattttccactatctttataaatactttacagacttt

SEQ ID NO: 107193 - DNA, 127 bp, Glycine max
taataaaatcaatcttggccttatcgacctcaatacctctactcaagaccaaatccgccaagactataccctcatgtaccataaaatgacaattctcaaagttaagaacaagggtagtctcaatgca

SEQ ID NO: 107194 - DNA, 300 bp, Glycine max
tctttgagaaaacttccttgagaagcttcagcttagctacacacagccatctaaaaactaagctcacctccttgagaagcttccttgagaagctagagcttagctacacacacccctcaaataactaagctcacctccttgagaagagaagctagagcttagctacactcccctataatagctaagctcacccccatgacaaaaatacatgaaaatacaaaaaattccctaatacaaagactactcaaaatgcctcgaaatacaaggctaaaaccctatactactagaatggccaaaaat

SEQ ID NO: 107195 - DNA, 299 bp, Glycine max
ttgagccaatttaaacaacaataacgttttactcggatgtctgattgagtcccgtaacatatcgagacgctcgaaattgaatgttgaagctctgagccaattcaaacgacaataacttttttctccgatgtctgattgagtcccgtaatatatcgagacgctcgaaattatatgttgaacttctgagctaattcaaacgacaataactcttttctcggatgtctgattgagtcccgtaacatatcgagacgctcgaaattgaatgttgaatctctgagcaaattcaaacgacaataact

SEQ ID NO: 107196 - DNA, 322 bp, Glycine max
acctagttcagcaaagaccaattatgagtatagagcagttcgttgagaaggtgtttctggccaagagcccgaccttcttttgtggaggataatgaaagttttacaacccaggcacctcaacagcatgagccaaaactaggaaatgatcactcatctgaagccaccatctctggagctgttgcttgtaaaaaaagaagattagaggcaagatccaatgaggctgctcatcatggaccaatgccagcatcagctgatgcaccatttccaggagtggatccatcttcagctcagcacgcaacagactcttccattcctgttttag

SEQ ID NO: 107197 - DNA, 326 bp, Glycine max
tttgaaaatgcccatctaatgcccttacagaggcaatttaattctatccatcaattatcaattaccatttatttttctttcccagattctttaaatattatttataacgtttggccacttcacccatataaaatgacttaacctctctgagaactccaccaatgctaaaaataacccatctcaaattgactcaagtaaaatcaacaatgtgtaaactgctctactctctattatgcagacaatactgagtaactcttgaactagaaaaatcagaaaaactcttttctacttacgtgctatagcagaagtctttgttcctctgattg

SEQ ID NO: 107198 - DNA, 278 bp, Glycine max
  unsure (1)..(278): unsure at all n locations
gggcaatgntccttggcacccttaatcatgttcaatatgttggtaagtttaagtcttttaatccaaaaaaggaaacttggttaccatgtgagagtaatttggataaatgaaaatagttttggttgttatatgcatgagtatttcgatgcttgtttgcaacaatgtattataaaaagtacctaccacatagagagtggctatgcaatttggaatgcatcaagaagtttcagattgtgtgattgcattctctggcaccaaagctattgcattgaaaaatt

SEQ ID NO: 107199 - DNA, 329 bp, Glycine max
gctttggaaagtgttgttttcaccttctctttttgccaatctgctggtttatcgagcgtccgttaagcgcaacactcctgggctaagcgcgaggaagaatccacaagaagatgagttgtacaggttcgctaagcacaccgcttcatctcactaagcgcaccgctttagttcattcgctaagcgagaaaggcgcgctaagccaaaaatcactaacgtgcgctaagcacacgagcacgaacaaggccacatatttaagcatgaaatcagattttgtgaggggagtttagactaggattcagagctttgcatgtctagggtttctagagaga

SEQ ID NO: 107200 - DNA, 363 bp, Glycine max
gcactcttacctggtattaattgttttagctagaagcactattatacttaagctgtttgtcgatgctgtctggaagtgaaataaataggtagaatattttcatacagatgtgtctgtagattgtgctattgaaacagctctatatgactgcatttgacagccaaacagtgtgatcaactcagacagctcggattaccagatcgatagaagaatagagcatagcaactctttgaagttaagatttcaacaaaccagtgttcaaatttaatttagtccaggtctttgatatacgttaaatatacggaaccttttcggcttgtaatgactttgcttaggtgcctttgcttgatcgctcgaacaaat

SEQ ID NO: 107201 - DNA, 331 bp, Glycine max
agcttgcttctacaattaggccatcaaatcctatccagaacaacatacattgtatgaaaatataattcctaacactattttaactatcaactatcctagcatcatgcaatcagaacaaaaatcaaagctttaaagtaataaactaagttgactaacctaaggcttaaaaaaaaaaaataaaaaataaaaacaaggttaaaggaagcttacttggtgttgaccctcttccacatttcctttttccaaaatttgtaattactctttttatgcggaagcggtttaccggaaagtgcctcggatcgccaagtaaataattaaaacggaatgatcc

SEQ ID NO: 107202 - DNA, 329 bp, Glycine max
accttggtatgccaaaaataagttcattccttttgaaaaatggctttgttttaggaaaggttgtcacaattctttttcacagaatctatgattctcagtttttatcagtacaagtgtatgtggacaatataatttttggtgctactaataaaatgctctatgaagatttttctaagttaatgcagactgatttcaaaatgagcataatgggagagttggaattctttcttggattgcatttaaagcaaacaccctaaggcatttacattcgtcagaccaagcatgttaaagaattcttaaagaaattcaacatgagtgatgcaaaatag

SEQ ID NO: 107203 - DNA, 313 bp, Glycine max
ttccacattgttttcagcacctaatgttatattagatgggaattgggtatcttaacataagagatttcagatggactttaatcctaatcccacagccgaccttttcacgagatctctacttaaccctttggttaaatgatcggccaaattatgctgagttctcacagccctacatccccaaattttgagataactcaaatttggtgtctttttgtgccaaagttcatatggggtaaccttattccttttgttaggaattcggttcaacaagtaacaggctatcaacatagcctcaccccaaaatccttcactt

SEQ ID NO: 107204 - DNA, 59 bp, Glycine max
  unsure (1)..(59): unsure at all n locations
tgtatttaagattatattanttctttgtgataaacaatactttcccaactctttattta

SEQ ID NO: 107205 - DNA, 312 bp, Glycine max
tgaatcttctgatactccatacccatttgacacaatatctttttcgcctcaaagtaacttttaggcaatgtgttgtcctctggaagcagactatgcactacctcaagcagtgaggtgaaacttttgtcactccacccatacctggacttcacatttaccagacctaacacagcagacaacagggttaaggaattattgttccctgcttacaaaggcttcttagaatcactctgcaatccttcatgcacaggggtgtgtgcttgctggaaagactattgtccaaggtcacgaatcatgtcctctaaccgatct

SEQ ID NO: 107206 - DNA, 297 bp, Glycine max
tacaaaaaagcccattcaccagtgctcatactaattttctgacttcaggtttgtattacaccaaccctctgctaattactcatcatactcaagctttcgggtccaaaatgccatcactcatttggttatctatacctatcatatacaacttatgatgaacttgctaccacgcataggtgcacattatctcttttttttttattttagggaaataacagtcctccctcatgattactctgctactgaatactaggtaattagcggattcttttttcttttaacaacagagaaaaaact

SEQ ID NO: 107207 - DNA, 308 bp, Glycine max
tcaaccttttttgctcatttctgccctttatcgtgaaaggagagcattttcggggtcgtgaagtgcgtggctacgagtgggacttcgaaaattcaggtttgggcggacttctttctctcttaaatttcgtgggtatggggttttggggagatatgatgggtaatcttgctagggttctgctgtgtgacgattatttgtgaagacatttgttgaaagcttgttgaaattgccatgtttggatgagttaaacatacccattctgttttagggtttttgtgatgatgtttgtgatgtttatatgctgaaat

SEQ ID NO: 107208 - DNA, 419 bp, Glycine max
  unsure (1)..(419): unsure at all n locations
gcacaagagcctcatgtgtgtgctccttanacnnctcactaattccagctntaccttctcctccatagttgntgcttcatatttctccatgtatctcctcacatgtcttgtgctagatggttttaacatgatattagaatttcaccgattaacttgctataaagctaatttgatttctatggtcanaattgtggtctattcttgaccatgaattngttgaagttaagtcctttgatcttgtctgaaatttttgtggtgaacctaaccataaattctacaaacattaagtaaagatacctaaaatctgagtgcttgtctctattgagtttgcataaagtatgttagcacgaacttgccatagattctatgtgtgcaattattttctggtctttctactatggtagagatataatctttac

SEQ ID NO: 107209 - DNA, 313 bp, Glycine max
tacctacatgttctaattgacattctttactagaatcaactcactttagactccaatttacactaacctcaaatttagcttctctaacactcaaaatctcacacttttctacctacaacattgtcattctcacatttaaccctaaattaactttccccatcatctctaccagttttctatcaacaatttcagcacataaacatcacaaagcatcatcataaaaccctaaaacagaatgggtagctttactcacatcaaacatgtcaagtttagcatgctttcaacaaattccttcacaaataactaccataag

SEQ ID NO: 107210 - DNA, 223 bp, Glycine max
ttggctttaatgatgtcctacttacttccttacaagattgatatttccctttcccatctggtattggaacgtgggataatatgatatatggtgttggtggagtaagggttgactacactaagtgatgtgtaatactttgaatataaatgttttattgatagacagtgaatacccaaacacttttttgtgcataatgatggttgtgtttgaattaccatttata

SEQ ID NO: 107211 - DNA, 300 bp, Glycine max
ttgacgcaacatttggagaggttaatgtttcaacgagatgatgcgctccatgagaagttggatcaaatggagaatagagatcataatgaagaagaaaggaggagaagagggaataatggtgttcctagacaaaaccgaattgatggtattaaactcaacattcctccctttaaaggaaagaatgatccagaggcctacttggagtgagagatgaaaatagagcatgttttctcatgcaacaactatgaggaggaccaaaaggtgaagcttgccgccatgaagttttccaactatgctcta

SEQ ID NO: 107212 - DNA, 299 bp, Glycine max
tggccacctaaataagttagtccacaatccataatcatacaggcctaaaagaaagattggaccggagtttaaccgaggaaagaactaagaacatactagctggtaaaaaaagcagaggaactgaagtttcttgaaggagagagaggaaagacccctaaaccaattgaggcagatcataaacaccatcgttggaggtttcatgggggaaaggttacaacctttgcacgaataaggcacctatgacaagtccaatttgtcaatatagtctctcgacactaagtactcaacatgtcgaccat

SEQ ID NO: 107213 - DNA, 327 bp, Glycine max
ttgagcacattcaaatgacaataactttttactcggatgtctgattgaaccccgtagtatagcgagatgctcggacttgaatgccgatgctcggacttgaatgccgatgctctgagcaaattcaaacgagaataactttttactcgtatgttcgattgagtcccgtaatataccgaaacgctcgaaattaaatgttgaagctctgagcaaattcaaatgacaataactttttcactaggatgtcttattgagtctcacaatatatcgagacgctcgaattccataccgaagctctgagcaaactcaaacgacaataactttttactt

SEQ ID NO: 107214 - DNA, 326 bp, Glycine max
tctacttgtagacatagacttgcttgatagcaagctacacttctttttaagaaaccttccaaaggcaaaagctgctctcacagctgcaagaacagctgcaaatgctatttatgttcctccagctcaacaaggtgccatagatctacagagtgggattcttcacgcagaggagaaggattacaaaactgcatatagttatttctttgaagcttttgagtctttcaatgctcttgatgaccccaaggctgtatttagcctgaaatacatgttgttatgcaagattatggtgagtcaagctgatgatgtggctggaatcatatcttcta

SEQ ID NO: 107215 - DNA, 327 bp, Glycine max
tggttcaaccaatgcttaaacttggtttcttccacacttaagcttgaaaaccaacatcctatttttccttgcaggtcatttcacttaagcgcaagtaactcttcactaagtgccatgacttcccagaatttcgaaaaaggagtttttcacttttgatggcttccaaatcaacccaaatggaaacccaatcataccaaacacattcccaaaacattaaacacccaaaatgagaatttttttttgaattaaaacaagtttgtatgaatcaaagatagaatagatctaaagtgttgatttatggagaactaacttcctatgctcctacaa

SEQ ID NO: 107216 - DNA, 354 bp, Glycine max
gcttgctacctctttgctaaacagaactagcaaagacaaagagtagtggtaaacctaacactcaaagagacaatatgtgttaacacttttgacaatcactggtacaactccagtttagtatctaactgctacaagtccaagcataacactcgtgcctcgttggggaagggtgaatacatatgcactgtccaagctcaaccaatatacctagtgagcttattagggagataggttcataacaacccttctctttggacaaatggcgcagcttcttttacccctgtaagcacctgctgatttgtttgaaccatgcgctggaaaatcgataaatgtgtatcctaggtcctgcttgga

SEQ ID NO: 107217 - DNA, 324 bp, Glycine max
tcggctgtcaatgtcgagcatctcgatatattacgggactcaatttaacatccgagtaaaaatttattgttgtcagaatttgcactgagcttctgttttcaatttcgagtgtctcgatatattacgagactcaatcggacatctgagttaaaagctattgctctttgtatttgctacgagcttccgatttcaattacgagcgtctcgatacattatgggtctcaatcggacatccgactaaaaagttattgtcgttagaatttactcatagcctttattttaaattttcaacgtgtcgatatattacgggactcaatcggacat

SEQ ID NO: 107218 - DNA, 292 bp, Glycine max
tgactgatcttatggattagatctcacataaaggatctgctgagttgattgtgcataacacaaaaaatacttaatcttgcgtaaaaagaatatagggcactaaataagtacctgttgataatcgtgctgagtacatatcttttaaagctgcgggacatatacggcaggcacgcttgtagactgctccttctgactggcagatagctgtactgcttggtgtgaaactcaacaaccattgccctattttgtttataaataagatgtctgctctttttttaccggcacctgaaaa

SEQ ID NO: 107219 - DNA, 335 bp, Glycine max
ctcaagcttgtaagcaacctcacccaacctctcaattatctgaaacggcccatataaccttgcagccagtttaggattgattctctttgctacagattgctgcctatgaggccttaacttaagaaaaacccattcccctactgcaaactgaacttcccttctcttcttatctgcatattttttcatttgttgttgtgctctcagcaaatgagccttcaactgattcaaagcctcgtctctttcacacagctccatagctacagcaacaactttggtctcattactcaagaaacggatgatgtttggtggctgcctcccatagactacctcaaaag

SEQ ID NO: 107220 - DNA, 310 bp, Glycine max
tgactgtgttttttgctacatgaagtttttcagtggggatgttgatcagaagaaattaggcggggatactccttacaggtgatttatatatccccttttgatatgctgctctttcctgatgggtgcctttgatgttgtaaaacacctgatcttttgacatttgttgttctgttgcagtattatgtttggcccagatatctgcggttacagtaccaagaaagttcacgctattcttacctacaataacacaaaccacttgataaagaaggatgttccttgtgagactgaccaacttactcatggttacaca

SEQ ID NO: 107221 - DNA, 312 bp, Glycine max
ttcaacattttctataacgttattttctttaatgaattttttagcatggcttcaaaaaaagtttcggtatcataagggcatcaacatcgctgaaactaaaacgggtgcttcctattaagcaccttatcctcgtaagatccaactgttggagcgagacaaagtggggttttattaagaacatgatacttatataagttgccttgtgatcatttatgggaccagaaagtaccaaaaagagttttgtagtagtataataaaaatttagaaatgtgaggttaactacggaaccatttaatttttgaagttgttgaa

SEQ ID NO: 107222 - DNA, 328 bp, Glycine max
  unsure (1)..(328): unsure at all n locations
tataccctactcatgctngaagaactttttgaatncggccatttttcatcgccaactgttatttagtttcttcactcttggatttatacacgtttagtcatcgaccaaatataatgtgtgttcttgacttgcccaatgatggggattagtattgtcaacctatgttgcaaatttaaagtaaaatagttaaatcttataaaaatgtaaaaacggtaagtgtcgagtatgcccgttgtgtctattactgttatattatttctctgtgtgcaataataaaaggctagagttggtttactgtaatgcattcatccatttttttaaaatacat

SEQ ID NO: 107223 - DNA, 306 bp, Glycine max
  unsure (1)..(306): unsure at all n locations
tgagatgttttttgttgaagggngattctttctgcttttattgttgaccacagagtggtacctggagatatgtctcgggggtcaggaaaccttggggacgtcaggtggggtgctattgcccaaaaccaagcttgaccaatcccgacccaacccgggcatagtcggtcagtgagaacctgtgatgtacctaaacaggcgagctcctggcagtcaacagataaaaggaacaaagaccacaaagcaaggaggcttgtggtggctggccagctgtgaattttgtgtgatatgtggattatggcctctggt

SEQ ID NO: 107224 - DNA, 454 bp, Glycine max
  unsure (1)..(454): unsure at all n locations
tgtatttctattgtgatcttatacatatgatattgtcttgttcattcatcatcattgttagtatgaagaaacgtctctaaggtagaaaagtttcttgaagaaggtanaactctttatttttaattgattataagtctatcgtaattgattacaacaagttgtctgaagcttaaagaggtgagtcttgtatggtttaatcgatactgatatctcataattgataccatgtgntggagacatgactgattattcngagttctactctatcgttacaagtgtttaatcgatactttctctcgttagtattcagagtgacaagaacacttatcgatacttgagatctattgatcattgtctaaatattccgatgtggtcaacacctactggtaaaaatatgaacgatactcatgattatcgatcttgtgattatcatacatggatatgttctttaata

SEQ ID NO: 107225 - DNA, 300 bp, Glycine max
ttgcctttagggcttgtacctcgtcactttcttccgaagctttaacctcatcatctctcatagtctttagatttgggagccaatccaatccttgtgtccggtctcttagccacttatgatagccgccgatgatcccattactgcttcccctaagctctctatcctttcttcacgccgcatcccatgccttgcgaactccttggagtaccctcgcattgtggtcactgaaaccccgtgcgatgaaaggagtgatgctttcgtctgatggcactcctctcatggggtagccaagctgtctta

SEQ ID NO: 107226 - DNA, 297 bp, Glycine max
  unsure (1)..(297): unsure at all n locations
tccatcactttctacatcggntgtgtttttcaatcgatgtaaaatgtgagctttctacatcagttctaaggttgaaaccgatgttgaatggtagggtttctacatcggttatcagtcaaccgatgtagaattggtaataatggcaaggtttctacatcggttataagtcaaccgatgtagaatttgaaggatttctacatcgtttattacttaaccgatgcacaatgggtaggaatggcaaggtttttacatcggttataagtcaaccgatgtagaatttgaaaggtttctacattg

SEQ ID NO: 107227 - DNA, 253 bp, Glycine max
  unsure (1)..(253): unsure at all n locations
ttcctttatatncacatgggtatatataaaactatattcctgtcaaatattttntntctttttaacatatgctcgtgggttatacaacaattctttacatacactcattgctcacacacaagaatttcttttcacatattatttatacacacacaaaatcttttcatacactttnntacatacaaaaactcttttcttntctttatatatagatacaacatntgntcacaacacctctntcttttctattcat

SEQ ID NO: 107228 - DNA, 326 bp, Glycine max
tgtagagctgagtcttgtattagtttaatcgattactgatatcttatataatcaattactgtgttgtttgagacaatgaccaatttagtcaagagtctctactttgatcgattaccaagtggatgaatcgattacttctttctcatttattgttcaaaagtgatcaagaacactttaattgattaccaagagcatctaatcgattacattgttcttgagttgttttttagatgttggatgaacactttaatctattacttagataatctaatcgattactttgttaaaataattgattaccttatagatttaatcaatttcggaca

SEQ ID NO: 107229 - DNA, 332 bp, Glycine max
tttttaaatagaggtgtttagaaggctaaatgaaatctatgagtcatggagactcaacacaccttaatgcccagctaggcgctgcacgtagattacagtgatgcttctcgattcactacccgctacttaccttgcttacgttcaggcatcatgtcacgatgcctgactcttatatagcctgtggaccatgttttcaaaatgggcagatttgtggatcaccctgcttggtatagagcatactcacccgatggggattcagtttttgaatctccgtagttattggaggggtgataatggagagctggtatagggcttgaatagctgtaagggga

SEQ ID NO: 107230 - DNA, 335 bp, Glycine max
ctcaagcttgtccttggtttaaacatgactgatacatgatttgggacttgtttgattcgatttggccaaaattggatgaaggcaagagaggttttcgaaatctgcactttatgcagaattttgttgttgaaatgtgcagcagaattttgtataagtgcagaaaaatgcttgtgtatggctggttgtgaaaagggtagtacatatggggttctcgatatttcctagcagatcccaacggtcaaaatgtagacttatgtactagggacttccagtaaaattttcaagtcgatccaacggtgaacaaattggaacgaaggaaatgttactggggtctt

SEQ ID NO: 107231 - DNA, 326 bp, Glycine max
ttaaaaaaaacatttaccacgttgtattattctaggtaaccaattttaagagtgtattattatatgcatttttttatatacttttcaaattaagagagtttattataaaagagtcaggaatttagattgacccaccacaggtcaggttgcatcaaactaataaattgagttgggccaaaatagtattgggcctaaactttattattctattaaatttgactcattttgacattccatattaacatttgaatattaataaaataatttcaaatctttgtaaaatatatatttttttgctgttatttaatatgtagtgcaagttgctt

SEQ ID NO: 107232 - DNA, 420 bp, Glycine max
  unsure (1)..(420): unsure at all n locations
cagcttcggtaagtatacaaagctattctncgaacttattaaagtacgtgnnntattttattatatgaaaataagttacttatcttataaagaatttctatgtatagtgtctgactcgacttctccttgtaaagtttaaaaatatatatttggaccaagccctctcaagggatatctccactaagtatcatatttttcaaactaagtgacagaaaataaatgtatttgataaacggaatgaacaatgtctattatgttgcattttcatcacaatcaacataatatcttgttatggatatttcattctctcgacatcattaaaagtgtctctctctaaatcctgattatatgaataataaatatataattgtgttgctatatatatggcaaactctaaatggcaattctcaatataaatac

SEQ ID NO: 107233 - DNA, 337 bp, Glycine max
  unsure (1)..(337): unsure at all n locations
accctcaagcttgtcccaagctgttgatctcatttccgtttttacctgnnctttatttgcaaatattttgattgcagaatgtcaagtctttttaacagaattaactcgtctaggttataggtcgtaaacaatgatttagcctaataaagataatggtttgagacgcaaaaacataattttgtcaaacaaaactataatttagtcaaatattattgttaagcgtcacttttattcgtatgaaatatagctaggtttgattttgatgtgtatcaaatgaagaaaatttcattactcttttttaaaaataatttatttacgtaaaatattgtggaagtca

SEQ ID NO: 107234 - DNA, 311 bp, Glycine max
tccttgatatgttagagcttagctactttctcccctctaataactatgctcacctccttgagaagagaagatagagcttacctacacacccctatgatagctaagcgcacccccgtgacaaaatacatgagaatacaaaacaaaagtccctactacaaagactactcaaaatgccttaaaatacaaggctaaaaccctatactactagaatggcctaaatacaaggcccgaaagaaggaaaaaacctattctaatatttacaaagaagagtggatccaaccttgacccatgggatccaaaatctaccctaa

SEQ ID NO: 107235 - DNA, 334 bp, Glycine max
  unsure (1)..(334): unsure at all n locations
actgtaccactatataaaatgaattcccattgaagagagacaacccacactgccaccacatgttaaaacacatacaccttgctttgcagtccgcaaanacacctaatgaagttgcaccgcactgaatccaagttaaaataagaattggaccaacaggaaaaaaataagaatgactcaatgtaaagaacatggaaatataaaacatctccactttgactctgataaacacaagaggcatggcggtacaactgccataagctactatgcttaatgtgtctcaacatgtatatacattgaaataaagagatggttgtttatacaccacagacatttc

SEQ ID NO: 107236 - DNA, 313 bp, Glycine max
tgatttttatgtttcaaaagataagtctatactttcctagaccaatcatcaatgaaagttatgaaatattttgctcctcctaatgaaggtaccctggctggcccccaaacatcagagtgcacataatctaggataccctaagttgtgtgagttgcattatggaaactaactctattttgttttccatatacacaatgttcacaaaaacttagcttttgataattcccattaccgatcaatccttgtttatgtagttcttctagccctttctcactcacatgacctaatctataatgccaaagcttggaagcat

SEQ ID NO: 107237 - DNA, 408 bp, Glycine max
  unsure (1)..(408): unsure at all n locations
atcttaagcaccgagctgcacttacaagattttcttctgtatcgatcagtactgatcataccatgcagtntgttcaaaacttcactgaattcaatgtccaatcaattcaaatggtgtatcgatacaatatattggtattcgataccagcgtgtttgaacgtgaaaatcaaattcatatgtgaagatcacatcctttacaaaatgcttgagtattgatacatgattggaatcataccatgaaagtttaacacaatcaaaatgtactctccatggttaagtttctaaagttacctctatggttctgacaactgagagctataagcagcctactgcttttaactgaacatcttcatcttgatcttgacatctctgattctttctttattgcaaacttctagttctgttcca

SEQ ID NO: 107238 - DNA, 312 bp, Glycine max
  unsure (1)..(312): unsure at all n locations
tctcagattctttcatggaaagactttgcaattgctttcattaggcagnaccaatacaacacggatatggctcctgatcggaaccaacttctgagcatgaccaagcgggaacatgagtccattaaagaatatgctcaaaggtggagagacctagcagcccaagtcgttccgcctatgactgaaagggaaatgatcacgattatggtagtacgttgcccacgttctactatgagaagctaataggatatatgccagctaactttgcagacctcatcttcgccggagaaagaatcgagtccggacagagaaaag

SEQ ID NO: 107239 - DNA, 317 bp, Glycine max
tcaagctttgaaaagttttgttttcaccctctctttattccaatctgctggtttagtgagcgtctactaagcgtaacactcataagctaagcgcgaggaagactctggaagaagattgaaattctgataccaggggacagatgtcgtaccggatgtcacgacatcacgcttcagaacatgcagattatatgtgtccgtatgaacagattaaacaagtaaataacacaagagaattgtttacccagttcggtgcaacctcacctacatctgggggcttccaagccagggaggaaatccactctcaatagtgttagttc

SEQ ID NO: 107240 - DNA, 322 bp, Glycine max
acactactcaagctttgaagcctttattttgattgaagatgtgtttgttaaggcgtttttaaaaaacttgagcgaattaagtgttgtcatgctatcagtttagttgatgaaagaaacttgagcaaattaagtgaatcttaactctgctaagctagcaagtttcattgtattcaagcttattgtgtaaacactctttgagtgattatgatacattttctatcaaacatctattgcttgtgaaagtcagaagtgtcttagtgacaaagaatactttggtcttaatcttagggggatattaaagatagtgccaagagtggcctaa

SEQ ID NO: 107241 - DNA, 297 bp, Glycine max
tattgaaaagctagtaaatacttggattatatccatttgcaacatgttggtataaaaaagtaacaacgataataaaattaattaaggcgtacccaacaagctttctcttgctttgaaaagtcattaatcgtaatgaaaaataacaattaaacaacaattaataaaagagaagtcaagcttattgaaaagctagtaaatacttggaaaatatccatttgcaacatgttggtataaaaaagtaacaacgataataaaattaattaaggcgtacccaacaagctttctcttgctttgaaa

SEQ ID NO: 107242 - DNA, 299 bp, Glycine max
tgtcgaggctattacaacaaaggggctttaaagaatgaaaacggacaagatcgatgaactggccatggtaaaccaccacactatcataagtgtggcgctctaggcctcaacgcttctggttctcatgaatgcccaacaacatcgtcatcggatcactacgcgtttaacagaggccagacaactgctaacgcaaataaatagacattagaaaaacaactcatggaatgtaactcacgccccactatccatgtgaatactcaaatacacacaggcattgatagccaatatctgggcagagg

SEQ ID NO: 107243 - DNA, 330 bp, Glycine max
aacttaaagcctgacgttttacatatatgtttttgtataataggtggattatgtgggggaattagattctctctcaggagtagtattattttatcgtatcgatgtttgtggatttctcttttgttccatccctaactgcctttttataatggagaataattatttcatacagaaacaggaaagggggagggataaattttaattaataggtaacgtgatagaaaaaaaagagacagaaataaaacaagatgaggagggtgtgaagaggatgcaaaaaatttaagtgagcaaaagccagaactcttctacaatgtgtcatgtccttaatgg

SEQ ID NO: 107244 - DNA, 335 bp, Glycine max
acctcaagcttgaaagaaaacttgatgccttggtcattctagtaactcagcttgttttgaatcagaaatctacacctgttgcaagagtctgtggtctatgttcttttgcagatcaccattcagatctttgtccttctttgtagcaatctggagtcaatgagcaacctgaagcttatgctgcaaacatttataatagacctccacagcagcaaaaccaacaacaaaatacttatgacctttcaagcaacagatacaatccaggttggaggaatcatccaaatctgagatggacaagccctccagaacaacaacagtctatccctcattttcagaat

SEQ ID NO: 107245 - DNA, 326 bp, Glycine max
ttgggggcacaccaaaatgctcataattttgaaagagttctatctatgataaataaagatttgggaacttttggacttggtgctcacatgtgctcatactcatccattccacatcagtatccttttcgtggaccaacatccctttattatggggctaacatgcaccccatggctcacatgtcggtcatgtcttggccacattttgtgcctggctctagcaaccaagggttgcacaacacatccatctcagggcaacgatttggaatgaccaacccttggggtatatctgctgaaactccaccgaatgtgtatcatagggatgtggg

SEQ ID NO: 107246 - DNA, 336 bp, Glycine max
  unsure (1)..(336): unsure at all n locations
accctcaagctttgatggngccgacaagaaatcacatgtttttcatcatcaaaaagtgttagaatgtgaatgtatgtatacatgattttgatgatgtcaaagaagaatctaacaaggctacttcaaatgataagcatttgcttcaagaataattcaagattgcttcaacaaacaaagccttgtttcaagattcactaaagaccaagccttgccttaaaacaaagtgctttcaagacatgcaaggctctggtaatcgattaccaggaagtgtaatcgattacccgaagcagggttgagaaatagctgttgaaaaaggttttgaatttgaattttcaa

SEQ ID NO: 107247 - DNA, 328 bp, Glycine max
  unsure (1)..(328): unsure at all n locations
cagcttgtanaatggctagacatgatacatgttatggtttggttnggtttattgataaaagggatgccccacattatttccatgacacaaatgcaaaaatgatgatttggaaattttatgcaaaactggtcatgcatgcacctatgtggacgctcaagtgtcaaatttttatggtcatgtgatgctagggctcaggattcatttcctctattttaaatcaacccaatgtttccaaaatatgttcttttatcaatttgggcattcatccgagtccattttgggcgtctgggaaaatcttcacaacattcacccttcgggtgtatacaca

SEQ ID NO: 107248 - DNA, 312 bp, Glycine max
tctccattgttttctatgacttgagttttttcttaacaagatagtactctgaccctttacacatgaactggatctcaacctctgaaagatattcatcgcggtaaaatatgtgggatgtaattgatgcgttgagctcaatgagtcttacgcccacttctgcgtttgtactggatgaactagcaaattaatgaaaaccaatgggatgttatcgctcctcccaaaaaacaaataagaacagaaacttgaccattcatcattaccaccgaaaactgagagtagaatcattcaaattaatttgaaaagttggcgatc

SEQ ID NO: 107249 - DNA, 312 bp, Glycine max
tgagatgatgaagtgttgaagggtgattcttcctgcttttattcgttgaccacagagtggtacctggagatatgtcgcgggggtcaggagaccttggggacgtcaggtggggtgctattgcccaaaaccaagcttgaccaatcccgacccaacccgggcatagtcagtcagtgagaacctgtgatgtacctaaataggcgagctcctggcagtcaacagataaaaggaacaaagaccacaaagcaaggaggcttgtggtggctggccagctgtgaattttgtgtgatatatgggttgtggcctctggtaatc

SEQ ID NO: 107250 - DNA, 343 bp, Glycine max
  unsure (1)..(343): unsure at all n locations
atgggcacacatctcaccgacacatgtagagcctttgtgtgtcctctcacctcaacaagaaatatctgctttcgcaaacgcgatataattagttggtggttatttgattaacgatgccttcaagaccctcactgagatatcgtgtgctacatgggcatcgttgatgaccttcatcaacagcgcacgacgaagctcggagttatgaacagtcaagcaaagaatccttgctgagntatataattgctcactacctttactcacttagtggataggcaaagaactatgacctcttcaagcaccgcttcctgagacctattctttagcactttaccacgagatcact

SEQ ID NO: 107251 - DNA, 312 bp, Glycine max
ttcagaaatcttttgtgtctggtgtatattgtcttctttccatgcttaagttggatgaagcttgtatttttctcacagataggacatgcatgatgccctttcacactgtatccacttaaatttccatatgctggaaaatcattaactgtaccaaacaccattgcgcgtaacctgaatgtctgctgcagagttgcatcccacacatctaccccttcttcccataattttttcaagtcttcaattaacggcgcaagatacacatcaatatcattcgctggcttccttggacccacgatcatcatacacaggata

SEQ ID NO: 107252 - DNA, 258 bp, Glycine max
gccttcttggcacttctctctctctcgaaattgctgaggaaaattatttccgtgaagaaaatcaaagccgaggcgcttccgtaacgtttccgtgagtaattacgcgaagattttcgaccgttcttcaacattcatcattcgttcttcattttcttcagtcttcaacgggtaagtacttcaaaccgagcttttcaattcattctatgtacccgtggtggtccacattttgtttcatgtatttttattctcgttttcatt

SEQ ID NO: 107253 - DNA, 307 bp, Glycine max
  unsure (1)..(307): unsure at all n locations
ggggaggttttggggtgaatgaactatttcctngcccctttttacgaggcnnncgagcagaggatgctcgcccacgcaagctaactctgctttttttttgcaagaattctttgcaaaatttgactaacctctaggtttgcgcttgtttattgattacgaaaaaactaggcatattcaactatgccttaataaaaataaatgaataaaataacaagcagaaatttaaaagggactaggctgcctcccagaaacgcttctttaatgtcttgagatggatatgggatgatgatcagctgattacgggcct

SEQ ID NO: 107254 - DNA, 299 bp, Glycine max
tgtgactcttggcaatttctttaaaactagtcacttaaaaagttgtgactttttgaaaaaaaatcttcagaaataagtcacttgaagaattgtgacttttggaaatgtattttttgaaatcaatcactggtaatcgattaccattaaggtgtaatcgattacacaacaacagatgtgattcttcattttgaattttgaaaattaaaacgtttagaagctctggtaatcgattacaagtgttgtgtaatcgattacactagtttataatgatttgaaactgttaaacacaagttgtaact

SEQ ID NO: 107255 - DNA, 293 bp, Glycine max
  unsure (1)..(293): unsure at all n locations
acctataaaactcaagcttggacgaatcatcctgcaaagttctatcgnatgacgggagggaagaccctaacaatgcctgtatgaaacaaaaatacttccaaagaacaaactatacgcatgtttaaatatgcctgcgtgtaagaaaaagacttcacaaaatatatatatgtctgtaaaaggaggcagaaacctacgatctgcctgtatacagcaaaaacatctcacataacatatatatgtatgtttaggtagcaaaatgcattggacacgcgtggatatcccaaaagaactca

SEQ ID NO: 107256 - DNA, 138 bp, Glycine max
  unsure (1)..(138): unsure at all n locations
gctcaaattattatgctcaagatcangatgttcaaaatcacccattacagaatgcacagattcaccagttattggatgctcagaatgatcaaagggataaaatgatgcctaactaatctatgaaatgtcctatctatc

SEQ ID NO: 107257 - DNA, 326 bp, Glycine max
tccatggaatccaaactagatgccttacttctaaaattgcctatcccgataaccaaccaccactacccatctttttcctccgtgcagtcaccatcgccgcctccgctttctaggttggttgcgcctccttgccccgtgccggtgcaacaacaccaattatccatgccgacttctttgcccatgcctactttgccgcccatgccaactccgtttccacaccccgcacccttgcaaccaagtcccgcatcattaccggctccacttcccatgccagctctgcatcttcccgctctcgatcacgtttgtgctgctattcccattttcga

SEQ ID NO: 107258 - DNA, 317 bp, Glycine max
  unsure (1)..(317): unsure at all n locations
taaaacctattttcaaganaacagattttttcgcagatattntctcattgnctntngnntgcacattggtcaaggtttccgtcaaattccatgttttcctctgtgccttccaccaccctccgccaggtaaccttgtttagttgcatttttagttgtattgtgaaaattaaacagctttaaaaattgttttctaaaataatttttcactattcagcaatcaatttcaaatccaaaatctattaaaatttgaaaattattttcaaaacaagtattttaaaaaccagaaaacagaaacaatctagagtgtctaatcatct

SEQ ID NO: 107259 - DNA, 325 bp, Glycine max
tgtgacattttcaattctacatataattttgtaagttagctatctattgattttattttgtttataggtttctaatttctatcatacgttggttacatatatttatattttattgatgttgcaggtgcacatttgggacttttcaggacagacaacccagttcttcttgaatgacaaatctagattgccaaacgattctcctggtcaacttggaaaagaggtagttggtgattgttaatagattggcaagtgtatcaattttatcacaagtagtaaagattaaaatggaagttcaagtatcgaatccacgaggactttggttgta

SEQ ID NO: 107260 - DNA, 333 bp, Glycine max
tcaagctttaccttcactgaacagcatagaatggtatcttggtgatgccacagttgtttcagcatcatgtcaccaacaagagaatctgatctcagtaagtcggaccctaaatagtaactgattttgcaaaaatgtcgggaaaaaaaccatattagacatttccttttgacaataaatatgaactagaatacttgactaaatagcatgttaaaacagagagctaggtcgactcgcctataactttggcagatccagtgagctagtgtaacagcctctggagaaccaggagaaagtttagctccaattgatgggtttataccagatggagatata

SEQ ID NO: 107261 - DNA, 244 bp, Glycine max
tataaattcccttggtctatactctgtagcccggagcattatattatgataccatggcgggttggaccaaaactacttccccttatttaattagtaagggaacgcatatcagcaaccaatgttgtcaagttgcggttgattgtcatcagatatgtctaacaacaacgtcatctgttctctaaattttatctaaccaccaccctataactgacctggcgtagagaagattattatgtacacaaaa

SEQ ID NO: 107262 - DNA, 325 bp, Glycine max
ttggagcaccagtaagactccttctattctcttttgctcttgcattttatctgcatacctaatttaacacttttatggttaatggttgttattttgtctattgaaatgctgacaggattccacacttttcccatgttttattttcttgatatgtgatacttatgaaggtttactaaaggatgtttttttttttggaaggcgaaatatatattatattattgatttagataaaacagtacaagtggtactgaacaaagaaaatacaaagcacctttggtgctgcctcccaaaataacccaaactaacccatcaagagaacatcacc

SEQ ID NO: 107263 - DNA, 304 bp, Glycine max
ttgaggattttcaaacgacaataactttttactcggatgtgtgattgagtcccgcaatatatcgagacgctctaaattgaatgttgaagctctgaccaaattcaaacgacgatgactttttagtcggatgtctgattgagtcctggaatatatcgagacgctcgaaattgaatgttgaagctctcagaaaattcaaatgacaataacttttttactcagatgtctgattgagtcacgtagtacatcaagacgagcgaaattgaattctgaagctctgaccaatttcgaacgacgataactcttt

SEQ ID NO: 107264 - DNA, 312 bp, Glycine max
tgagatgaggaagtgtagaagggtgattcttcctgcttttattgttgaccacagagtggtacctggagatatgtcgcgggggtcaggagaccttagggacgtcaggtggggtgctattgcccaaaaccaagcttgaccaatcccaacccaacccgggcatagtcggtcaatgagaacctgtgaggtacctaaacaggcgagctcctggcagtcaacagataaaaggaacaaagaccacaaagcaaggaggcttgtggtggctggccagctgtgaactttgattgatatgtgggttatggcctctggtaatcg

SEQ ID NO: 107265 - DNA, 303 bp, Glycine max
  unsure (1)..(303): unsure at all n locations
ttttttgccgaaagaggattttttgaacaaggcncggnggagggacattacatcatcgcccaaacggcatcaaagcgacnaggacagcctcagaatccaacttgttgtttattcggttacatcattgccacttatcaaaagttaaatcctatcctcggatattttgaaccaaatttaattttgtaatgacccttttaattaggacggaggtttgtcactagttagcaccatcagattatcaatcaaatttaaaagcatactaatccttttgaattgaccttctccctttcaagatatattgat

SEQ ID NO: 107266 - DNA, 336 bp, Glycine max
aagcaccgagctgcactatggaagtgactttacttaatttttcacttatgccggaagatccaacatgtataatatactttgatactgacgtgaatcatttaactttctacatttgacgggacattcacatctgttacgtccaaaataaacgtggtacatttgaaaatagtctctcatttaaaaacttctctattagtacccttttgattacttaatctctggctgatcttgtctactgacttatgcttatcctggggcttatgtttgatctagtggtggtttgaactacatttgtctaaccctattcttacctacttcttcaaaaagatgccattt

SEQ ID NO: 107267 - DNA, 317 bp, Glycine max
ctcaagctttagtgactgtgtgcaaccacatattttttattgagaatccttattgatacgcactacagcagactctgcataaatttctaattgtcataacatatgatccatggatatgacttaggcattctttctttctttacattttaagccactagccaaaaagctatcccgatatatattgcctttatcattcacacgtcctttgagccaaacacttcatattttgttggaacactaaacctaggataaaaatttcctaccttaacttagcttaggagagcaaaggtgttttgttaaggatttctatcatttgg

SEQ ID NO: 107268 - DNA, 304 bp, Glycine max
tttgctgggaacgcctcttttttaacatccgtgctatctaaggcacccaccagagggaagctccccaagttccaactccgaacacgactcgaccggccggtaattccaacacaacaaggaacttccctccgaggccattgccggaattcaccccgctcccaatgacgtacgaagatcttctaccatccctcatcgccaatcatttggccgtagtaactcccggaagggtcctcgaaccccctttcccgaagtggtatgaccctaatgcaacttgcaagtaccatgggggggtcccggggcattc

SEQ ID NO: 107269 - DNA, 300 bp, Glycine max
gcgatgtgtgtttttttataattgaattatagaaactacaaacggagcttttgtgcttgttaccttatcataaaaaaacactttctaatcaaaagccctacgattatgtaacagaagtaaagaaaaagtgtgactatgtacctcatgagcggggcttctgggtgatctgcgatcagcgagtttgggacttctattatcctttgatgatctgctaggtggtcttaatgaagatgtagtagtgtctaatgtggcaggcctgattcggcgttcaccacaaggggacactttctaatgcacttt

SEQ ID NO: 107270 - DNA, 311 bp, Glycine max
  unsure (1)..(311): unsure at all n locations
atagactcacagatcacccagtttgtgcacatcatgggcaaccaccatgaatataggatgtcaatctcctagtactctccttcaattgacttcatactatctacatgtgagagaatcaagattcagcacaaatgcagaacttatttcaaacaatacccatgtctgaacatatctatgattatagataacatgcnagtctacatcacacaaattgcccatatatatactaaatctgcgaactacacattacaagtacacactacaattacaaaccacaactactaacaagacctccgcccctactaacacca

SEQ ID NO: 107271 - DNA, 299 bp, Glycine max
tttgtggaaaaggacgtgactgttaattttctggacagtatagtaggaaacattactgcatgcaataatttaagtttcagcgatgaagagcttcctgaggagggaagaaaccacaatctggcgttacacatatcagtgaactacaagtctgatgctttgtcaaatatacttgtggacacttgttccgcattgaatgtaatggccaaaacaacattagatcaactctcctaccaggggccttccatgagaagaagcggggtagtcgtcaaagcttttgatggatcaaggaagtcagtcat

SEQ ID NO: 107272 - DNA, 303 bp, Glycine max
acttgactttttctgatgttgcatattgttctgtgacgtttgagtgtcctaaggcacatgatattttcagatatgtatacatatcatgtgatattttatcttgatatcttgctttttagctctaggacctttaaaacgcgaaaaatttaccaatactcccataattaaattaatagaagagggttaattgaattaaaataaagttttctgcttgagttagcacctgattccatgtaaggtggtggatcattacgagaagcatattctcattcccaagcctttaatccatgaatggttgctaat

SEQ ID NO: 107273 - DNA, 188 bp, Glycine max
tgtcttatgtgtaccctgatgctccttcaaaaaaaaatagctcacataaagtggaaggtgagcctatcccctaatctgatcccttattcactttaaacaaaagccttgcaagatagaaaggaagggcactgtagcctctggattgctcaaccttattatagatgcttcaccagctcacacttgtgacc

SEQ ID NO: 107274 - DNA, 335 bp, Glycine max
ctcaagcttctatgataagtcaagattataaaatgtgtgccttaaaagatactgtctccattttttaacaacagtggtgatcgtggcgagttcacgaacgtgagtagaagaagagagtagcttggggcaccattgcttgctacaaaaggctatagggtgtcctccttgggagagcactgcatccatacccgagcctgaggcatccatttctaccacgaaggatttcgtgaagtcaggcaatgcgaggactggcgaatgtgtcattgcatgcttcaatttgttgaatgcaacctcatcttcgacagtccagtggaattcttccttagttaacagac

SEQ ID NO: 107275 - DNA, 326 bp, Glycine max
tctctctaccaaatccttcaaccctaatcttactgttttggtttttcaaactgccaaagtcaaaaacaacagaacctaaaactatttcaaccattcagatttgcaaaaaaactaaacacaagctcctgatttgaatttttggtttcccctaatattattttcaaattgaggaacttaaaccctggttgattggcgcaaacataaaactaaatgcacaaaagcctggtacctccaacgtaacagtaaaacatgcaatgattgttaatatgtaagtgaggaagattgaagttaaaaattggataataagagttctaaattgaaattga

SEQ ID NO: 107276 - DNA, 201 bp, Glycine max
  unsure (1)..(201): unsure at all n locations
ctaaccanatacaaactctcactaagtcattgcttcctctctcctctttgtccacataatgcatccaaggacattcctagtacaagaggcaacgcttgcatgaaagaattcaccaattttagtttgcttcacgaactttcaacttacaatctgtctctattgtcgaaaaatcatcaagctntctcatcatgtaagtcatat

SEQ ID NO: 107277 - DNA, 325 bp, Glycine max
ttttattgtaatcttgaaattaaggacaacactctgatttctgatttttttgggataaaaatggtcattgaccagtcccttttccatgacttaaccaaattacccagtgacggtgtaccatttgaaggtacactgaatgacgactggaaatttgatttctgtgcccatgatgcccgccagttggtttgcaccaacaatgcggatatgaccggacgtcttcttgccgggtcattggcttttgaaagtcgcatccttgactatttaattgtgcgtattctgcttccacggtcttccaaccttgcccaggtttctgaggaagatcttt

SEQ ID NO: 107278 - DNA, 333 bp, Glycine max
tcaagcttgcacaacacgtaactaaatttgtttttttataaaatgaactaatttattaactaacttccactaatatatacaattactactcagaaggaagggatgggccttgattaggcccatataatcaacctaattaaactaattacacaaagaaaaaccctaattcgcagtccaattattcaagtgtagaggttctgactttcaagctcaacttaaccctcgaaattgctgaattggcccaagcttatttgtgacaaattgaagatgtctttcttagctttccagggactactcacatgctccattgggagttctgtattgtcctataag

SEQ ID NO: 107279 - DNA, 396 bp, Glycine max
tgcagctatcttcataatttaacttctatcacttttcactgaccccattttttacagtcattaaagggacagcgaaaaagtttataatctcttaaactgctaacctgaaactctcctcatacatctaagatagccttcctaatgcttaccttcttatcctattatcctttggctatgcaaaccagacacagagatcaggcaagaaatcatttagatggctcattattctctcaacatagacaacagaaatacacagccttatgttgataacaatatttaaactacacattccatgataccaactggtatacctatatgatgggcttgtacaatgctctacatctaactgttgttaagtgtctctactcttggatgagaccctcacatataacccac

SEQ ID NO: 107280 - DNA, 312 bp, Glycine max
taggcaatttctaatatttatcccttttctagggcaaaaggtacttgattgagacttgggttcctaggaaaaaaagctataatatttcaacttggtcttagcctttatgcaatgggaataggttgaagttctaggcataaacaaattcagtttgatcaccatggacttgtttagtctagacaataagaacttcttcaaatagtggaggttgagttgcttaattttgttttataggtagcactcattttgttagtttagatatgacatgtttagtcttaaaggttgtagaacttcttctcctattaaaggaaa

SEQ ID NO: 107281 - DNA, 312 bp, Glycine max
ttgccgatttagttttcgccagtgaattgttcgaagtgaacctgaaaagaggcaaatttgattatcctactttgatgaataggaagtctaaggcaaatggagagagtaagaatgagggaggaacccgtgctgtgactgccattcatacatggccaaattccccaccagctcaacaatatcaatacttggccaatatcggtccttctcattacccaccaccctatcaaccaagaacactcaatcatcgacaaaggccacccctaggtcatccacaaagcccgccttctacacatccaataccaaacaccaccc

SEQ ID NO: 107282 - DNA, 309 bp, Glycine max
tgagatgttgttttgtagaagggtgattcttcctgcttttattgttgaccacagagtggtacctggagatatgtcgcgggggtcaggagaccttatggacgtcaggtggggtgctattgcccaaaaccaagcttgaccaatcccaacccaacccgggcatagtcggtcaatgagaacctgtgaggtacctaaacaggcgagctcctggcagtcaacagataaaaggaacaaagaccacaaagcaaggaggcttgtggtggctggccagctgtgaactttgattgatatgtgggttatggcctctggtaa

SEQ ID NO: 107283 - DNA, 330 bp, Glycine max
  unsure (1)..(330): unsure at all n locations
tttttatacactactctagctntgaggagttatctatggtgggagagtttttttccaaatcctattgggagaggttcaaacttgctgttgtgaggagatttcaaccttccatgattcaaaatccgtttgaacaattgttatctctcaagctttgtggaagattttgagaagtatggggagcattgaggactattgatcaagaattcgttagagaaatttttctgaatgaccttaaggaagagttgcaagcagaggtaaaattgtatgatttacattccttatcagaaatcattcaaaaagctttattgatagaacaaaagaatgtgttgc

SEQ ID NO: 107284 - DNA, 261 bp, Glycine max
acgcaagcttgagatgaggaattatcgaagggggtttctccccgcgctacgccaagacacaccaagggcgcccgcagaaataggaaggggggcaaaagaccggggggaccacagggggggagccagagcccaaaaccaaccaagaccacgccccacccgaccggggcgaagacagtcagcgagaacccgcgaggaaccaaaacaggcgagcacctggcagtcaaccgataaaaggaacaaaaaccccaacccacggggccc

SEQ ID NO: 107285 - DNA, 300 bp, Glycine max
gctgtgggcatcattgaacctgagaaagagctatgtgtgggcatctcaataccggtcctttcaagaaatcacccttgagatcagagtagctaactcaaaaaaaacgtgtctcaaatagaggactgggaagttaacacagttctgatttgcttgagcttctatagcttgagctaccccacatggtttgaagaacagatgagagtgaggctctctcaaactcttatttggtgactaccgtgtctccacaccatgaaagatcccccgtaattgagggacccgcacctcctttgagcatgtctt

SEQ ID NO: 107286 - DNA, 300 bp, Glycine max
tgtgtgacttattcacaggctcaattttctgtttccagcgaaggtggtttgaatcatcaagcttttcagctatggagtttggaaaggatcaaggtacggaagggaattggaattggatggagaaacctagggctcatcataccataatagagtttctgagagtgagagaaattgagagagaatttaaagagataaaaatggagtctaatgtttattcattgcttatataggctctcagtacagctgtaactaactgttaacagttaacagttagtacctacactaaccaacctaacagat

SEQ ID NO: 107287 - DNA, 299 bp, Glycine max
tcaactacttttttagtgtttgttgctatttatttgttttattgcaagagaagggtgtcaaagtataatgagagtaaagacattcagagttcagaacacaaggaggatgaggaaatggctcacaaggaggatttaatgatctttcagggtggagaggaccttacaataggtcaatagcaaccacaaggagtccaattaggacatccatagtttcagaatatcattttttaagtttgttatatataaatttcactatcatagcttacccaaacagtgacaaagtagagacaaacattgac

SEQ ID NO: 107288 - DNA, 256 bp, Glycine max
tgacgctcttagcacttagctgctctaaatttggcgcagtctcttactctttctaatgagttctaatacttgtttaacaaacgaatctggcttctacattttaagcttacacatgtccttctgtgtgtattattcatatggtggatttcctttttgtggactaacgacccgaaaaatatttcttgactcagctattgatgggatctggattgaaattcattgaaacaaacaccaaggtgtgcttgaagaaaacatc

SEQ ID NO: 107289 - DNA, 323 bp, Glycine max
  unsure (1)..(323): unsure at all n locations
ttagatgcggaagtgtctaacggngattcttgctgccttcatattttgaccacaaagtgtgttcctggagatatgtcgcgggggtcatgacaccttggggacgtcaggtggggtgctattgcccaaaaccaagcttgaccaatcccgacccaacccgggcatactcagttagtgagaacctgtgatgtacctaaacaggcgagctcctggcatgcaacagataaaaggatccaataccacacttcaaggaggcttgtgtggtggcttgcctgctgtgaatcttgtgcgatatatgggttatggcctctggtaatctattacca

SEQ ID NO: 107290 - DNA, 149 bp, Glycine max
tacctactatagctcctcagggatgctcttgacgaccctttttttatgatatcattttctgaatgattgcacatggtctgcctctaactactaggcaatctactgcttttgaacttaaaaggctctcttctcaatgcgaggttattcgt

SEQ ID NO: 107291 - DNA, 333 bp, Glycine max
tcaagctttagatacacaactcaactcttaaaacaaaaagaagagaacttcttttctatcaatgttaatgtagttcatgtcatctctagaccattattatcctcagaatgtccttattcttgatcacttaaatttgttatttgtgtttatatctatcataggggaaatgaggcatcacttgttgtcctacctgatttgttgatggagcttgatagtatggatgatgtatgccttactattactataatcctctggatttaacatggtgggaggagtcaatatttgttccttttcgtgtagtacatgagattctatatgcaactaatacattat

SEQ ID NO: 107292 - DNA, 324 bp, Glycine max
tgctgagataaacagaaaaaatgcagatctggatatgaaattgcgacaggtggatgttcaggaaagtttgcttcaaaaggagcgtttgtctttagctactgagtatgctctatgcactacattttatggatgtttctatgcgtcatgttattttggctcttttgcattgcgacttaattcattaagttggtattgtacgttgcagtcgagaatcatttgaggcaacattctacaaacaaagggaagatttgaaggactgggaaaggaagctaaagcaaagagaagacatgctatgtgatggtaggcaaaatcttggtgagaaaa

SEQ ID NO: 107293 - DNA, 325 bp, Glycine max
ttgcatttctatggtttctatagagagtttggtccaagatctacttagttctgagagactttgctgtgtgaacatctgcatagtcctcaacttcggccttgagccatcaattgaaacggagaaaattcatttgaaaactttttgaaatccattgtgctactggcaatcgattacaccgatctggttattgattaccagagagtaagaactctttggtgaacatgttatgggaaaaaccatgtgctactcaatttttgagaaaaccttttcatacttatcctgattgagccttctcttgattcttgaatcttgagtcttgaatctt

SEQ ID NO: 107294 - DNA, 301 bp, Glycine max
tgtttcctaaattttaagagttgtacattttcatttcatgcaaattttatatcaaatactatgttttaaaacataaggaacttaatttcatggtcaaaatctatagaaatcaagcctatatgtacaattcattcaaaacagtgcatgatttaccgaaaaagcacaaaacttgaaattatggttccataggctatactaactcaaatggttgtatttatgtctaaccctaggttattggacccaataatttcaattttaaggtccatatcaacagattccaattccaatttcaaaagttctg

SEQ ID NO: 107295 - DNA, 312 bp, Glycine max
ttataaacctaatattttcttcttgcttttaactcacgcccctttctctcatgttggtaagaagtgaaactctttggattttaaggctatctttattcatgaagctattgtgcattcaggggagatttgggttctctttgttgaacttcgtatttctttcaaccttatgatcagcatcatcaagctattacattttttttctgaaaaagaacaatgtggcgtggtcttgctctacagtttatgcttctctcaatccaattgctagagctttattttgaggctacttatcttcctttagtgatcagattaatg

SEQ ID NO: 107296 - DNA, 309 bp, Glycine max
tgctctaaatttacattgatgtttgtttttatgggaggaggttatatgccatttttgctttaagagtaatgtcccactggtaaaactaactttccaaatgtttgccttcgcaggaatggccccgaggaagcttgcctcaaagaggtccaggaaggacaaggcggccgaaggaactagttccgccccggagtacgacagtcaccgctttaggagcgttgtacaccagcagcgcttcgaagccatcaagggatggtcgtttctccgggagcgacgcgtccagctcagggacgacgagtatactgatttcca

SEQ ID NO: 107297 - DNA, 307 bp, Glycine max
tcgccttttttctcatgaaatgccgctttttttttcacaacatgtgcgctttctctgtcttcattacgaagctcaatttctttggataattgcttgggcgttcctgaaccttctcctactttggttcacatactaccccggacaacactatggctttgggtcttatttcagaagagacaatgatttttatcacaacgagggcgaggtctttgcagttctttcaaaccttaatgtttttggtcaattgtttgcgtgaccctgatccctctcctacttggctttgcatagaagctcaaagatcactgaa

SEQ ID NO: 107298 - DNA, 334 bp, Glycine max
cgatactatacactactcaagcttgtaggattatggggtacccgtcatatttggtactaggtggttatcgggcgaaggtgcaaatcaactctcccacatccacaaatcaaacatgaacccaccatccccagttgcccaccttcaactaagctcacgtacccccatgtagcccttattctcattcctctcggcatcgggtccccatcaacccctctaagcttccacaatatccaaacatcatgaactaccctaaaccaagaaaaaagggcagaggcagaaaactctgcccaaaacacattccaataccacagctttccctactcaaataccccag

SEQ ID NO: 107299 - DNA, 279 bp, Glycine max
tgacccaaggatttatacagaaggacttgggcccgcgcgcgaaaccatgcgaagcaaatactcgcacacgcacacccaagatgggacagcaacccaaagattatagagcaaaagtgaacaagaaaacatgtaggggggaaagaccctgacgagaccggaaagatagccaccagagaggggacagaaaaccgaagacaatgggatagtcagcctaacgcgaacacaaaactaccaaaacgattcgcgaccagcatgcacgcttaaggggagaaaagaaaa

SEQ ID NO: 107300 - DNA, 298 bp, Glycine max
tgaaggtgtgtaacccaccatttttcttttaagggttgtggttgggggcgaaattgaggcccttccaaagtgttttgcagggatataccaccaactacttgccctttagtggcatatccgaggtaaggctcaaagtcggctagattgtggtgggaaatttcatgtgtctcccccatggattaagagacatgtgcatgatcagattgaggttgttggctctcaatgagtatgggagtgaagttattgacattctcactaggagtgtatgccagattgggtggtgtatagttgggaggct

SEQ ID NO: 107301 - DNA, 298 bp, Glycine max
taggctaaattattctaaactttcgttagctatttaagctaagtctagtccaacaagaaggatctgaggatgaagcttaatttaagttagtctaaacctaggagggatgtctaaattgagcctactccaacaagaggaatctgaggatgaagcttgaattgattcagtctaaatagggatggaggtttggtaattttggcaacaacatagaacacaaaaacatgattaattagagaaacatccttatatgcagaagctggtctgttagaaagacccaacacttctacctattgctgtc

SEQ ID NO: 107302 - DNA, 196 bp, Glycine max
agcttgactaggcgagttgattttagccttagtttcaccttagttattagtcaattcaattaagaatgagaaatcccaaagagaaaaatgtccgatggattttccgctttattttactaaaaggatgtgttttttttattatattattttttacctctttttgatttccaatgtgattacggcacgaccgaacggt

SEQ ID NO: 107303 - DNA, 197 bp, Glycine max
tatgtcttgaaggactacgttacacggatgaaggagggtcagaaggacatttactacatcacaggagagagcaagaaggcagtggaaaactctcccttcttggagagactcaagaaaaagggctatgaagttcttttcatggtggatgcaattgatgagtatgctggtggacaactcaaggagtacgatggcaagaa

SEQ ID NO: 107304 - DNA, 200 bp, Glycine max
tcatgcttgccaaggaacatcaaagatcttattcatttgcggaagatccccgtactagggtgcaaaacgctccaggctctaccagagctcccaccaagcctgaaatcattctgagaaactgactgcataccacttgatattgttcaaagttcatagactgtcttaatccaaatatatatgcatactattactattgcata

SEQ ID NO: 107305 - DNA, 99 bp, Glycine max
ctatatctgaaaatggagttaaatgtgttcactcactaaacaatttttataccttccttatcaactttttctaacaagcaaagaacttcggttcttacc

SEQ ID NO: 107306 - DNA, 189 bp, Glycine max
gggagggaacacagagaacgacccgcaggcaagcaagccaccagaacaacagggacaaaaaaaagaaacggcccacgaccaaggaaagcaatcggaaaacaaacccgggaagcaaaaaccaccgggcaaagaacccaaaaaaaaaccaaacagggaaagatccactgggaacccaaagcaagcaaaaaa

SEQ ID NO: 107307 - DNA, 355 bp, Glycine max
  unsure (1)..(355): unsure at all n locations
catcagtcacttggatgatatttctagtgcaatcaaatanggtcaaaagtcacaacaaccataatctctctaccaaaacatcaagataaaacaataggataatgcgtaataattttaagataaaagcttctcataaactatatacttaagtcaagagtggatcccgtcatgcagtatgtagtaaattccaattaacactaagtggatntattaaacatcatcatacattctgtttataagccacctaagtactttcttccacaagttgagtcttcaagttggcaatcctactgggacaagaaagaacaaacgatgcctcaaaggacatatctttaatttcacctcctctacatat

SEQ ID NO: 107308 - DNA, 193 bp, Glycine max
tctgcttcggtattcaatttcgagcgtctcaatatattacgggactcaatcagacattcgactaaaaagttattgccgcttgaattagctcggaggttcagatctcaatttcgaacgtctcaatagattacgggactcaatcagacatccgagcaaaaagttattgtcgtttgaattagcccaaagcttcaaa

SEQ ID NO: 107309 - DNA, 191 bp, Glycine max
  unsure (1)..(191): unsure at all n locations
ttgcttgnaactcttggcaatttatttaaaaactaatcacttataaagttatgacttttgaaaaaatcttcagaaacaagtcacttgaagaattgtgacttttggaaatgtattttttgaaaatagtcagtggtaatcgattacaattaaggtgcaatcaattacacatcaccagatgtgactcttcattt

SEQ ID NO: 107310 - DNA, 332 bp, Glycine max
tgaggaatactcagagaagcttaatgagactgatagattctctttatttatactgggtcactccacctgaagtacgtgcaattctgctttacaaaataataaaaggatccactaattatagtttgattacagactactatactgatttgtcactcctaactttataagtattctctaggacgatatctgcaagaacccttacacttcctctgaaactaagaataattaaatattgttttacactaagccacttctggatttcacaacattagtttataaatcacaattctacactttaaaatgcgttacaataagtttaatcattcaggact

SEQ ID NO: 107311 - DNA, 202 bp, Glycine max
tgcttgtctttcttccaaaatgttttccaatttcgtgacttattgagaggaaaatatcatgaggattttccaagagtgatgatgattatcaacatagaaaagatcttgcaatctgcatcatggtttgataattgataaagcttgaaaaagttgtaatctgcatactaaaggtgtattctatccaattctgatttctttgtag

SEQ ID NO: 107312 - DNA, 115 bp, Glycine max
  unsure (1)..(115): unsure at all n locations
tcaattaactattactaacaattatttgtaaacatgtcgttgctgcctgaaaatcaaaatctcaatnggatggtggagccatgcattattgatgagggtaccttaaggtaccatg

SEQ ID NO: 107313 - DNA, 200 bp, Glycine max
ttttatcttggacaatggcggagcaatcttactgaaatactggatgaatatcctatagaaacctgcctgtccaaaaaaagaacacacttcctgcacagaaacagggtaagggagaaaagtaataaaatcaatcttggccttatggacctcaatacctctactcacgaccaaataccccaagactataccctgatgtacca

SEQ ID NO: 107314 - DNA, 455 bp, Glycine max
  unsure (1)..(455): unsure at all n locations
ctcagctcttgaaaacttcttggagctcagctttcttcctctgtcatctaaaactaagctcacctccttgagaagcttccttgagaagctagagcttagctacacacacccctcanataactaagctcacctcctcgagaagagaagctagagcttagctacactcccctataatagctaagctcacccccatgacaaanatacatgaaaatacaaaaattccctaatacaaagactactcaaaatgcctcgaaatacaaggctaaaaccctatactactagaatggccaaaaatacaaggtccacacgaaggagaaacctattctaatatttacaaagataagcgggctcatacttagcccatgggctcgaaatctaccctaatgctcatgagaacactanggccttccctctgatctctgacccaatctacttggagtcttctatccaatgcc

SEQ ID NO: 107315 - DNA, 163 bp, Glycine max
ggcgccgtacaccaaaaggacaaggacggcaagccacaaacgggacacaaccaacaccggacaaagaagcccaagcgccgaatgggcgcacaggcgaacacgaaagcgcgaccggcaggaaacaacacgagacccaacccgaaaaccgcagaaaaaggcacag

SEQ ID NO: 107316 - DNA, 200 bp, Glycine max
tgcttggttcgaggtacttacccgttgaagatcgaagaacggtgaagaacgaatgacgagcgtccaagaacgggtcaaacctttgcgagattgcttactgaaaacgttacggaaacgttgcggaagcgcctcggtttagattttcttcacggaaacaatttttccgagcaaattccaaagagagagaagtgcctaaaggg

SEQ ID NO: 107317 - DNA, 197 bp, Glycine max
tttagctttacatcagattttagtaatgatccactaacctagaattaaaagaagttaatgccactaacctagggaattaaaaaaaaaaaacttaatggctgagtgtaactgaaattgtggcaagcaaaagtcacccccaacagccaacaagtcacccccgacatcggccaagaaaaattaccagtcgaggcatccca

SEQ ID NO: 107318 - DNA, 167 bp, Glycine max
  unsure (1)..(167): unsure at all n locations
actctcagccacttatgaatagccgcgatgatcccattactgcttccnctaaagcttcctgtcctttctttacgcccgcatccatgccttgcgaacttcctttgagtacccctccgttgttgtcacccaaaccccgtgcgatgaagggcgtgatgctttcgtctgat

SEQ ID NO: 107319 - DNA, 197 bp, Glycine max
tcatgtcttatatgtttgacacttattttagtcaacatttgaaatatttttaaatggtaaacaaatgtatcattttgatacatcataaaatttttaatataataataatactaaataaattattataatttatactaattaattaaatagtttgacatgttaggcctaaaaggcttttcaaatggcttaaagtctat

SEQ ID NO: 107320 - DNA, 68 bp, Glycine max
agatgggctaagagatcgaccacccacgtgacctcgatacacacattttactccccttcatacgacta

SEQ ID NO: 107321 - DNA, 203 bp, Glycine max
tctttcttgagatgaggaagtgtagaagggtgaaacttcctgcttttattcgttgaccacagagtggtacctggagatatgtcgtgggggtcaggagaccttggggacgtcaggtggggtgctattgcccaaaaccaagcttgaccaatcccgacccaacccgggcatagtcggtcagtgagaacctgtgatgtacctaaaca

SEQ ID NO: 107322 - DNA, 408 bp, Glycine max
tacatttgaaatcttagtcctgatgacaccttaaatgggccgttcccttttgttttgcaaaaaaaatcatatcaagaaacatggtgagtcctatgatgcatgtcatgtgtattcttaagatatagtatttatattccatcttacatacattgactggtgattacattgtataaacttcttataacatggttgccccatatcacaacttaaaagcacaactaccaatctttcggaatcctttaagtaaattgtcttttctccttctgtggaggagttgtgtttaataatattatactttcgccttccacaaaagacttatgactgatcctcgtttcattaatcctattttgtatgtcatcgtataaaagatcatgggttcttcacctggcttcactccttcttcttcct

SEQ ID NO: 107323 - DNA, 200 bp, Glycine max
tcttgcttaacagctctacaacagctatctttgaatgactgcttctcaatatcaagcttgcctcctcagatagggaagttgacttccctaaggaatctaagcatgtgcattgttggcaaggaaagaggattccttttagaagagctgggaccactaaaacttaaaggagatcttcacatcaagcatctagaaagagtaaa

SEQ ID NO: 107324 - DNA, 320 bp, Glycine max
  unsure (1)..(320): unsure at all n locations
gcacttctcattctctcgaaatagctgaggannaatatttccgtgaagaaaatccaagccgaggcgcgttcgtaacggtttcatgagtaattactccgaaaattctcgaccgctcttcaacattcatcattcgttcttcgttgtcttcagtcttcaacgggtgagtacctcaaaccaagcttttcaattcattctatgtacccgcggtgggcctcattttggtcatgtattttaatctcgtttcattcgcttttatacccctttgacgtgcttaagcattatttaagcatttctccctatctgaaaaaagaataaattcc

SEQ ID NO: 107325 - DNA, 202 bp, Glycine max
caggcatgttatcttcgaaccaaaaggaactaccttgaaacaattccctgacagcccgccagagccaagaaccccattaccggggtagaagcccactacaagccttaagtgaaaaaccatgatataagcacatcccaaaggaaatatggagctctggaaaagtaccgggaaaaaatgggggggggcccaggtccaaaggaaa

SEQ ID NO: 107326 - DNA, 335 bp, Glycine max
tactgacatggctcccgacagaaccacgctgaaaaatattagcaagggagagcatgagttccttaaggaggatgccccacggtggagggacttgacagcacaagtggtgctccccatggtggaaatggagattattacaatgatagtggacatgcggccggggtctactatgaaagatggtggggacaagccctatatctgttcaatttagatttacaggcgagaggatcgacattgcctcaaagaaggatgccaatatgtctctccactgcacgagcagtaaaattcggggaagggggaaaaagatgaagtgatcctaccccgacttactctac

SEQ ID NO: 107327 - DNA, 191 bp, Glycine max
tttcttattctactcgggactttagacaccatgcatttcatatttttcttttcagaatcatacagattgttcacattcatgggagcaacacgcctagagggtaccttcacatcaggatgcaaatattgtaataactctttaaaccttctatgttcaacaaaagagaatggaagatcatgctcaataatcgt

SEQ ID NO: 107328 - DNA, 207 bp, Glycine max
caatgactaacactatcatcttacgcatggagtaacaaattccacacttagtcttttcttatcggaggaacaaaatgttttgagaggtgtttcaaactctacaagaagttacagaaagagctctttacataaagaatatggattatgagagcttctaatacatacttcatgtgctcatagcttacggacttataggccttctcaatc

SEQ ID NO: 107329 - DNA, 206 bp, Glycine max
tgttttctagcttcttatccaaggcaattcttggtggtgaagctccttcttccttggcttattccctagtggatggtgcctcccctctcctcttgtcctttgccttccgctgcatctccatggtgaaaaatcaccattgaaggacctcattggagctcaaagatccagcctccatagaatcttcacaagcaagcttccatcactgg

SEQ ID NO: 107330 - DNA, 367 bp, Glycine max
  unsure (1)..(367): unsure at all n locations
taccacccactgtctatttgcttggttgttgttcacttctcaacaacaattatggttatgctgaaatgactttatctganaagagtntctaacttcattctttgcacagttgatatcccaatcacaagatgccttcttgcatatttctttagccctctgtttatcattcttcttccacttgaactccctgcccaagaatatgctatactttctcaaggcagatgttaaatcatccagagtaccaaacctcatccctaattccaacttctgttaccaactccactactttgactatatngaagatagacttcaacatcctcatcttcatcatcactactaatggggagtttcagctcctctgaatgat

SEQ ID NO: 107331 - DNA, 126 bp, Glycine max
gaggagagccggacgcatgcaagccaaaaaaagcgaaggtacaaaaaaccgaggccctcaccccctggcaacatcacaaaaacccgaagacgggggaagcaacacaaggcccaagaagaataaaca

SEQ ID NO: 107332 - DNA, 192 bp, Glycine max
ttaagcttaacccttctatagatcatgataaaacacaccaaaatgtttgtgcaattaaggaaatactgcaattatttgaagtggtgtcaatcttgaaggtgaactttcataaaatttgtttggcaattatttcaagtgatgtctattatcatcattctactttataaacatattttcatatatggtgtatag

SEQ ID NO: 107333 - DNA, 169 bp, Glycine max
  unsure (1)..(169): unsure at all n locations
acttgaagaatagtgaatcttggaaatgtgttgttacgaaatcagaaatcagtcactggtaattggngtccatcaatgtgtaatcgagtgcacatcaacatatgtgactcttcatttaaatgtttaaaattagaatattctgaagccctaggtatcgactacacatatt

SEQ ID NO: 107334 - DNA, 202 bp, Glycine max
tttttctttgaaatattatataacaatttcaccataccaatgcataaaacaacaaaatatttacctatcttgtgcatagtatgtgagcaccttcccatttacatcatcgaactctacaaaacctggccactttaatgactcggattcaaaaagagcaaatccagcatccggtttaaccctccttatatatctggaaagggga

SEQ ID NO: 107335 - DNA, 419 bp, Glycine max
  unsure (1)..(419): unsure at all n locations
ccgcanaacaaactagacatgatacataattaaatgagcaaatattatgacacttaattaatggtggaaaatcatataaaaaatggggtatatttaataatgattagcatgcatgcctaaaaggctgctgaaagcactcgggaggtgaataaatatgcactaattctatacttgtacaaatggtagaatgagatgaagaaaaacattcaagaaaatcactacaaagaaactcgtggggaacgatatcttcanaatttcggttttaactaactaacgagattgagggatacatgacgtgaatttgacacctaataaaaaaaagcaactgatttatcgctaaatataagagagcaaattctttatacacaagctgttgaatatctttaatgagacaaacttcaattcgtgatagatctcac

SEQ ID NO: 107336 - DNA, 203 bp, Glycine max
  unsure (1)..(203): unsure at all n locations
tcatncttgctaacccatggaagctcctaatatctcccacattttttggggtgggccattcttggatgcccttgattttctaagggtccactaggaccccatttctaccaactacaaaccctaagaaaactatattatctacacaaaaggtacacttctctatatttgcatagagggtgtttttcctaaggactgaaagaact

SEQ ID NO: 107337 - DNA, 335 bp, Glycine max
  unsure (1)..(335): unsure at all n locations
tgctctcacagctgcaagaacagctgcatatgctatttatgtgtctccagctcaacaacgtgccatagatctacagagtgggattcttcacgcacaggagaaggattacaaaactgcatataggtatttctttgaagcttttgagtctttcaatgctcttgatgaccccaacgctgtatttagcctgaaatacatgttgttatgcaagattatggtgagtcaagctgatgatgtggctggaatcatatcttcttaagctggcgtgcaatatcttgtgcctgatttggatgctatgaaagccattgcagatgctcattctnagcgatctctgaagt

SEQ ID NO: 107338 - DNA, 197 bp, Glycine max
tctattcttaactataaatcaattttcaaaggataattcattctccctcacattcactgagtaggcattgaaaaaagtttgtggttataacccaactttgttctttaatcagttaaaaacccaatgggccttttaaatgagtttgatatttcttgcttttattgctgagggggcagcttacttttttagctttcatt

SEQ ID NO: 107339 - DNA, 195 bp, Glycine max
tcatttttgaactcaactcatccataaacctattaataatgtttgaaattaaaaacgataatcatgtaaatcataacgaatattaatttgtagtgaacaaataaggaatttacttacatcatccacaattatagtatagatatgttcaaacatttgttacctgatattatttcatttacatcagaatatgttagg

SEQ ID NO: 107340 - DNA, 361 bp, Glycine max
tcggtgttctctcttctttttttctgccatgaaacatctctttgcacttgttggatgagccccacttataaagttcgaattttgaggcgaatcatctctctgggtgttcttcaagagagcaagttcttgaagttcttggggttatgtggaatcctctgtctagggttattgacgccgctgctatatggcaattgcacttgccaatggaggggtgagtttagcaacatcacgtttgggaagttttaatcacctatggtgctgctcaatagatcttatattaattctctttcttatgcacgggaagcccccctgattggcaagattctgtcgggatcatcaccttgctcctcatctattcaac

SEQ ID NO: 107341 - DNA, 202 bp, Glycine max
agctttcctacaagtcctaattgacattctaaactagaatcaactcaccttaggctccaatttccaccaaccccaaatttggcttttctaaccttcaaaatctcacacttttccacctacaacactaccattctcacatttaaccctaagttaactctccccatcatctctaccagttttctatcaacattttaagcataca

SEQ ID NO: 107342 - DNA, 213 bp, Glycine max
  unsure (1)..(213): unsure at all n locations
tgtgccttggataaaaagcttatagaggatgcttcaatggaggattagacagagagaaggtgggagcacgaaattgaaggaataaaatagggagagaagtggaactttgaagtgtgtctcataagactttcattcatcaaagttacaacaagtgttacacatgcttctatttatagactangtagcattcttgagaagctttcttgagaaaac

SEQ ID NO: 107343 - DNA, 207 bp, Glycine max
tgtcatgctagctttgcttaaataggttaagtcgacctacattctccactccctcttgatttcttcaccatcaccacattcgccagctaggtcggatactgaatttctctgaaatgtaatatcaacttttttgttttgtcagcatttgttttcattatttcctcccttaactttctccttttctagatgattggctttaccgagggg

SEQ ID NO: 107344 - DNA, 345 bp, Glycine max
tggatttagataataacccgctgcatgcatagggtggtgaagatggcaatcccatcttttatcaatgattgcaaggatatccttatacttcccttcattgttattgaaagctctttgaaatgcttctttggccctatccattgcttcataaatgaaacccattgcaggttgttttttttcattatccaccaaccttaacacccttacaagaggccccatagcctttaaagcataatcaacatcattccaaaatgatggcataagaacaacatcttgtgcttgcttcccctcgggctctttaactgccttagactacaaccattcatctgaagaaacatccttcta

SEQ ID NO: 107345 - DNA, 196 bp, Glycine max
ttttttgcttctatggaggctggatctttgagcttcactaaggtccttcaatggtgatttttgaccatggaggttccgcggaagataaaggagaagaggggagaggaggcgttatccactaaggaataagccttggaagaagaagcttcaccaccaagaaagtgtcttggataataagcttagagagaaagcttca

SEQ ID NO: 107346 - DNA, 320 bp, Glycine max
  unsure (1)..(320): unsure at all n locations
cgaccttaaatctcagctgtgctttacgaaaggttcatcgagtcaattgaagcatgttatttccatcttgcaaaanattggggcaaaagatggattgngttacatctgtgcttcgtctactgccaaacacatttaggactgttaatgtccttgttactttcagtttcaccttgacgaagatgtcatggaccatgttgaaaatctaaattgattcaaccccatatccagtgtacaaattcacaatacttcaactgtgcatcattcgcatacattcatgttgttcattggttgcattgctcattgcattctttccttgaaaa

SEQ ID NO: 107347 - DNA, 204 bp, Glycine max
tcttgctttgagccaaaatcctgactcaccataaaccttgacccagggtgagaatgccaatccttaccctcgaaagctaaaaaaaagaagagaaggaaaatttccaatcaaaggaaaaaggagaaggagaatttccaatcaaagaggaagcaaaaaaaggagagaaggaaaatttccaatcaaaggaaaaaagagaggaaagga

SEQ ID NO: 107348 - DNA, 170 bp, Glycine max
gagaggtacctggagatatgtcgcgtgggtcaagagaccttcgggacgtcaggtggggtgctattgcccaaaaccaagcttgaccaatcccgacccaacccgggcatagtcggtcagtgagaacctgtgatgtacctaaacaggcgagctcctggctgtccacagattaa

SEQ ID NO: 107349 - DNA, 213 bp, Glycine max
tcgacctgcttgcatttcaagctcgaaagtcaaggaaaagcttgaaggtgttttgacttttttatgcctaactcccttgagtggcatttgaattggttgctattttctatgttgcatcttagtacatatgatattggtcttgtatcattcatcatcatgtttagtatgaaaaaacgcttctaacttagaaaagtttcttgaaaaggcaaaact

SEQ ID NO: 107350 - DNA, 382 bp, Glycine max
cttcataatctttagatatgggagccaatccaattcttgtgtccggtctcttagccacttatgatagccgccgatgatcccattactgcctgccctaagctctctattctttcttacgccgcataccatgccttgcgaacatcttggagtactctcgcattgtggtcactgaaaccccgcgcgatgaaaggagagatgctttcgtctgatggcactcctctcatggggtagccaagctgtcttatggcgatgacaggattataatttatacaaccccttgttcccatttaagggaacatttggaaatccttctcatgaagatagaatactgattcttcctttcttctagcgagggaaccaattaacagacgcctatctatgc

SEQ ID NO: 107351 - DNA, 207 bp, Glycine max
tcgacctgcttgctttttagcttatgccaggtctaatgtttattggccttaacaaaaggatgtaaaagcatgtttggaaatgagtattactttgcatttctttgacaatattatcaatagaacataatttgaaaatggatatgatttccagcagatttggtaggcatgttcaaataggtagcaacggtattaatatgtgacataaag

SEQ ID NO: 107352 - DNA, 340 bp, Glycine max
  unsure (1)..(340): unsure at all n locations
ctgagagggttntngtgtcttaccgagtacaatatatttatttattaatttcaactatggacatatagctcgaccccttactgatttattgtaagaaggaagaatttctactgggacctagtaaagttctaaggcctttacccagttgcaacaagcctgtaccacagcttctattctatcaatgccagaattctcagaaaaactctccatataatgtgatgcattgggaaagggagtacaggctgtgttaactcaagaaaaaaggccctcttgttttttttatgcaggctttggaaaattctacactcactaaattctctatgaaaagaattgacggcct

SEQ ID NO: 107353 - DNA, 203 bp, Glycine max
tcttgctttgacgcaacatttggagaggttaatgaagcaacgagatgatgcgctccatgagaggttggatcaaatggagaatagagatcataatgaagaagaaaggaggagaagagggaataatggtgttcctagacaaaaccgaattgatggtattaaactcaacattcctccctttaaaggaaagaatgatccagaggcct

SEQ ID NO: 107354 - DNA, 354 bp, Glycine max
  unsure (1)..(354): unsure at all n locations
ttttaagaatattttgtaattgagcattatagactctaattgagggttcttaattattgatgcattgaccgcatatagcaagagcataggaatccttcttcttctctctntattccagcttgatgttctttctttattgttttagattccatggctatgtgccataagtcatctttgttatggaattaaggcattgcactctacatntgtctaattaatctacataatcgacgttttcttcaattttttcttttaattcttctctattgctttttatatatgcttgagactcgatcactgtttgcatgatgttagacacttatgaatgaattgagaagaaacttactttgttga

SEQ ID NO: 107355 - DNA, 199 bp, Glycine max
tcattcttgacaactccaagaccctgttggacttcttcgggtccactgggtgttttgcaggcgcgatccctacaaacaatagatgaaatcagaaatcagttgagcgaggtgcatacttacctatgatgatgtgaccttgccggggggaacgggcaccctgtaggactacagaggcccgtaaccagagctagaaactcca

SEQ ID NO: 107356 - DNA, 347 bp, Glycine max
acttcttcagcttttttttgttctatagacttagaaggggagccattcaatccttgtggtcggactctcaaccacttatgatagcccgcgatgatcccattactgcgttccctaaacttcttgtgctttcttcacgccggcatccatgccttgcgaacttcttggagtacccttgcgttgtggtcactgaaaccccatgcgatgaaaagcgtgatgctttcgtctgatggcactcctctcatgggacatccttcgcatgaagatagaatcctgaatcttccttccttctagcgagggaaccaattaacaaacgcccttccatgctagccaagagttggtcccaattc

SEQ ID NO: 107357 - DNA, 198 bp, Glycine max
tcttttcttgtaggattatggggtatccatcacatgtggtactacgtggcggtcgggcgatggtgcacaacaagtttttccacatccacaaatcgcgcataaacccaccatcccctgttgcccacctccaactgagctcacgtactcccacatagcccatatcctcgtttactctcaacaccgggtccccatcaatcc

SEQ ID NO: 107358 - DNA, 203 bp, Glycine max
agcttttccttggtttacacatgattgatacatgatttaggacttgtaggatgcaatttgggaaaaattggatgaaggcaagagtggtttttgaaatctgcactttgtgcaaaattttgctgtgaaaatgtgcagcaaaattttgcataagtgcagaaaaatgctaggtatttgctggttgtggaaagagtagttcaaaatta

SEQ ID NO: 107359 - DNA, 344 bp, Glycine max
  unsure (1)..(344): unsure at all n locations
tctaaactntatacaagaatgaagctctgatacccacttgttatacaagtggcctcaaatatcttaagaaggggggggggggttgaattaatatattcctcactccttccccctattaagaatctatttcacttctattttaagatatgaatccctcaatgacaacgctctaaatctcgtattcaatacagcatctagatatgaattaaagcaattgtctataatgagattaccggatgataaatgcactctcacgttatacggtgcgcctccccctgtgcgatttcataccctcacatctttttaatgccctttcttatcatccctctcatttacaacctaca

SEQ ID NO: 107360 - DNA, 197 bp, Glycine max
gcccaagaaaagcagaaaaaaggaaagctgaaaaaaaaaagaacggtcaaccaggaggcacccccaaaagccaaaaagaaacctaaagaaaaacaaaaagaggagcaaaagggaactatgaggaatcaaccatgccaaggggaaacggtaccaaaaaaaactcaacacaataggctggaaagaacgaaaaacccaag

SEQ ID NO: 107361 - DNA, 351 bp, Glycine max
  unsure (1)..(351): unsure at all n locations
acagactccacatactacatatgttaaacatttaaaagccatcctgattcctgaacacacctgatatgcatcttcatattacatagccactgactgaggttgcatatctacaccaggcttcttaaggtcctcaacagaagcatcangatttgtcttctccaactcttccaccttaattatttgctgtgcacttatttggcgagcccttaactgctcctgttcatatgggatctgtagcacaaaacaatatgttntgaagacagatggacgacacatattatattaaattaattaatacagaggaaacatggtgaccttgactagccactgcatgatacacctattatcaat

SEQ ID NO: 107362 - DNA, 198 bp, Glycine max
ttttttgtcttggagtgaaccaatataaaaaaataaattatgcactactatcttccctctctttgcattggttttgttataaatatgttaactattttcattgatctttaagacaagaaaatctttcacaaatatacttaaaactgaactcttttgtcaagattttttcaaacaaacaaatccttttttttttaaata

SEQ ID NO: 107363 - DNA, 298 bp, Glycine max
caacttcttatataggctgccaacactctctctcttataagacacccctaccttgcaagtagtttgttaaataatgtgattgaagtaaattctttattagatttaattaaataaatggttagtattttgttctttcctattagtatgttgatagcttacctggaataaaaagaaaagctaagtgtcggaccaagttgatatccttactggaataatagaaaagctaaattgcacggaataattctgatatctctttatttcatcattaccccttcttatagccatttcatactagata

SEQ ID NO: 107364 - DNA, 195 bp, Glycine max
tctagcttattccacacgttgtttggatggattggacaagtacttcatgcttctagtagatgggttatccagtaatagataggtctctcctggtgtttcttctagtcattaatcttgttgacttacatgcaacaaagtggttaaaataatttatatcttttttttcattgaaatcttaagagaacaatattctgc

SEQ ID NO: 107365 - DNA, 310 bp, Glycine max
ctggaagtaggagtggaccaaagagagggagtgatgttgaagttctggtttatctttgttgggttcatcttcaaggcttaagtgaaaatcattatttcatgcctttcatttgaactgcttgatgatcaacaaagttaaagaaggtcttctgtttgagaggataacgtgttagctttagtttaatcacattactattgaagataaagttggtgttcttgtacttactaatccctttcaggggaagcgacattcactaatggctggcatgattctgttaagaataattcaaagttttaaaatgctgtaaact

SEQ ID NO: 107366 - DNA, 198 bp, Glycine max
tttttcttgctgcacatcaaggaggtgacagtgaagtatgtatataaattgctaaggttgacagtacttattcataagttttttttttaatattttcaagattgtagttataaaatgaccatcatgtttgatttttgtatatataggaaaaagatggaagtaaagatttggcagtgcctgaagctggggtatgatctc

SEQ ID NO: 107367 - DNA, 223 bp, Glycine max
cattcttacctaaaagtgcttgtggaataaaaatactggttcttattattgaagagctgtggtggtattccaatcacatcattgttaatgttatattcattatgtagtattacaaatttcaccctggctattaatatggcgccatatatatatatatattaaactccatattatacattcgatatgaggatgttataataaatcatatgatgtcactacagca

SEQ ID NO: 107368 - DNA, 206 bp, Glycine max
cgcttgcttttaagacgtaccaaacccgacaaataaagaattttcggtttgccctcctatcaataggaattaaccacaacgaaccaacaagcattccaactgatgaagaaaaacagcttctgctcgggctataatgccaaaaaaccacgccttcacgacacaagcctcgaatattccaagccatgtccaatagaaaaaccaattct

SEQ ID NO: 107369 - DNA, 352 bp, Glycine max
  unsure (1)..(352): unsure at all n locations
ccctactttngangggcaactcccgccttatgatgactatctccggcgagacgatgaggaatgagatacccatcttggccccctgctccacctcatagatccgttcccacatgaactacctcaaccgaacatagtccgccatattccggcctcacccacacccgtaaaagaatctgttcccttctcggaagataatggaaaaattgatgcgctcgaagagaggntaagagcagtcgagggccttggcaattacccattctctgagttggcggatatgtgtcttgtgcccnacaatcgtatccctcccaagttcaagtaccagactttgatagtatatagggacgatatgtcc

SEQ ID NO: 107370 - DNA, 193 bp, Glycine max
tcaagcttcttaaactagttttacaccattgggtgttttcttgataacgggccggttgactatctttgatacgaatctattattatctacacataagataataattaagataatgtatttgcttacgacagtatgctaatgccaattttataatctgattttatattaatttcaccgacaagctccaattaaa

SEQ ID NO: 107371 - DNA, 269 bp, Glycine max
tactcagctatcgacgattgttaatgcgtagcttgcaacactatatattctatcttgaacaactactaatataactatgtgttatgtaaccactggctgatgtgggtaggaagtaagatgatactacattaagtgtgatttcacttggagatgtgttttcctcactatgatgagcacattagttagaagatgataacttcctgacggggtgcagtagtttcttagggaagatacatataatgatcttcattttctgcagtgtaatatgt

SEQ ID NO: 107372 - DNA, 202 bp, Glycine max
tctagcttcagaggtcccaattcttccatacgaaaccctttttctttttcaacaaagaacttggtcaagatccttagggaagtcaacattcctatctgaggaggcaagcttgatagttcttggcaatcattgaaagataactgtcgtagagcttttaagcataccaagctttcaggcaacattttgagacgattgcaacgat

SEQ ID NO: 107373 - DNA, 223 bp, Glycine max
atgacttattgataattccaaatatagaatgatcgatttaataaataacccgaaactttaactcactaaactctaataccaatttttttggtcaatggctaattaaagcaaaaatgatacattatctatattttttgactttttatgaacccacacaaacttttttctttttccatatgtgccttattctttatacctttctctcccaatggtggaccctgat

SEQ ID NO: 107374 - DNA, 198 bp, Glycine max
atctttgagccaattcaaacgacaataactttttactcggatgtctgattgagtcccgtcatatatcaagacgctcgaaattgaatgttgaagctctgagccaattcaggcgacaatatatttttactcggatgtctgattgagtcctttaatataacgacacgctcgaaattgaatgttgaacctctgagcaaattc

SEQ ID NO: 107375 - DNA, 243 bp, Glycine max
ccttaatgcaatccttgggataagtaggtgccatgtttcaagcccgactaagcatcaacttttatatagttgatagtaaggtggacccttaactttcactaaaataagcaattggatgaccttcttgcatcaacacaaccccaatcccaacatttgaagcatcacactcaatttcaaaagatttttgaaagtttggccacgcaagtatggcggcattagttagcttttgcttaagaacataga

SEQ ID NO: 107376 - DNA, 197 bp, Glycine max
taagcttgaaccataaccggtgagagtgcaatcttaaactgtgagtgaacgactagctttgagtaatagtctttgcatcaatctttgaaatctagaataaaatgtatgaatgaggacatgatgaaggccatgattgtatatacaagccaattgactaaaaagcttaccttgaatgataattgtatcctttgcaccct

SEQ ID NO: 107377 - DNA, 328 bp, Glycine max
ataccggttatgtgtctactaatattggcatcatttttattccgacattgaagtgtcacttgaactggcaagtgcttacaactttaggcgtatttctttgaaagaatagtgccccctttctttgcacatattttgaagttgcatcctatccgaagccattataccgacactgcctaaacgaaagcgaacattatggtcctccagaaatgtactccggaaaggtccaagatagtgtaccacggtacaactacccccaaaaagactttctttgaaggaatgtagtaacacattcttatcttttgcgatgcccccatcttccgacaataca

SEQ ID NO: 107378 - DNA, 195 bp, Glycine max
atcttcatataggtgtcttcttttatgaaagagagttgcttgggacatccagcattattgttaggacacctagcatttttgctgggcatccagcaacacagtaaaagggtaaaaatgtccttcactttttcacgaatcggcaatttgtgatccgtatgagcatatagattgtcgatccgtatgaatttgtttttt

SEQ ID NO: 107379 - DNA, 352 bp, Glycine max
  unsure (1)..(352): unsure at all n locations
tctgatcatcatgctcttgataatgccaaaaaaaaaactatggcaaatgaagaaggtgagaatgagggagaaacccatgctgtgactgccattcctatacagccaagttttccaccaacccaacaatgtcattactcaggcaataaccaaccttcttcttacccaccgcccagttatccacaaaggccttccctaaaacaaccacaaagtctgtctaccgcacttccaatgacgaacatcaccttttgcaccatccaaaaacaccaaccaagatatgaattttgcagcgagaaagcctgtagaatcaccccaattncggngtctatgctgacttgctccatatctacttgat

SEQ ID NO: 107380 - DNA, 198 bp, Glycine max
ttctttaaatagtcatccagaaatttcaacaaagttttgctttagagatattctcattttctcgtaatgattttctttatcttctttttgggaagatactgccttttatagactttagtgaaatatcaattatgggatcaatgttgattccttgaaaagaccattgtctcacattgggagataagctgcttggcatgc

SEQ ID NO: 107381 - DNA, 317 bp, Glycine max
agcttataaatctgttttatatccaagcccatacataaattacattcaaatctagataagataagataagatctagattaaataatatctagatgagatcaaatctaaataatatctagatgagattacgatgagattagatctaattttgtagaataaatagtctgccctcttcatgttcaagcccaattctggattcaagcccaatgcttcattaattccttagatttgattataaacatcaaattagttgaatgggcccacataataaaactgcctaattaattttgacattaagactaataaatactaaaaat

SEQ ID NO: 107382 - DNA, 216 bp, Glycine max
caacctgcctgcatgtttttttttcttgaagtgaggaagtgtggaagggtgagactttctacttttattccttgaccacatagtgtgtcacgctcatatttcactggggtcacgataccttggggacgtcaagtggggtgcttttgtccaatacctaatttgaccaattcctacccaacccgggcttagtcagtcagtgagaacctgtgatgtacc

SEQ ID NO: 107383 - DNA, 187 bp, Glycine max
ttttctggaaggtgagaagcccacaacctggtaaagggactactagcagagacatgatatatttctcgacagcgagggaccaatagaactgccagggactcaaaacctttgggcgtattaatacgaaagaactgtgcccggtaaagaacatgatctggcgaagcatcctatacggaaccagaaaaaa

SEQ ID NO: 107384 - DNA, 254 bp, Glycine max
gggaaaaagggaggggatttttcaacgaccacggaaggttttaaaggcactaatagaaagagaacgagatagggggcaaaagagaaatcggcaacttggtacaaaaaaggaatgaagcagcgagggaaatggaaatatacggagaagaacaaacggaggagggttaaagggaaaggagataaatgggaaaagagagatatcacagaacaggacgatcaggagctgcgtaacggagcaaaaagacgaatagttaa

SEQ ID NO: 107385 - DNA, 215 bp, Glycine max
atctacctgcaggcattctttctaaaacgaaggggtttaaaaaggggtcgagggtttaggcatcaagggtgaatggtgagtctaaaaactgcgctggccatgaatggcggcccaacatcttatctttctggaggtcccgcgagattctatccactgaggaatagaaagagggcgcagagcttgaacttgctggtgaagttccataatcaaccctt

SEQ ID NO: 107386 - DNA, 284 bp, Glycine max
  unsure (1)..(284): unsure at all n locations
ctcgctacccatggaagctcctaatatctcccacactntttgttgtgtgccattcttggatgcctcgatttttcaaggttcacttggaccccatttctaccaactacaaaccctatgaaaaatatattatctacaccagacgtacacttctctatatttgcattaanggggcttttcctaacgattgaaagaacttgccttagatgtcctaaatgatcatctatgctcctactgtacatttaaaatcatttaaaataaacaactacaaatctacctatgaaatc

SEQ ID NO: 107387 - DNA, 207 bp, Glycine max
ttatgttttcttcaaactaaaatgctgaaacaaaaaagagatttctccaaagaaatgaaggtgctagagattagacttttgtcttttacaggcagaggtaaaaactgattctgtgcagatttatgtatcccaataattaacaaagtgtatccttgaggaaatttatatccctatcactttgccttttccaaatggagaatgaacggg

SEQ ID NO: 107388 - DNA, 112 bp, Glycine max
  unsure (1)..(112): unsure at all n locations
agacgaaagtcaagtgttctcgatatgtgaagatgatgctccaagnactctggatttggttcgaccatgccctcctgatttccagctgggataaaggcgagtggaggaacgc

SEQ ID NO: 107389 - DNA, 204 bp, Glycine max
ttgcttttttagcttcttcacatagtccgcctttgcttgaacttttttatgcttaaaaacagaaacattacgcataggcaaaagatcaagaggagttagtgggttaaaaccataaacaacttcaaaatcatcaaaagtgttagtggtcaaaatctgatttttgcaaaacaagatatatagtgactgtttagcacgaaacaacct

SEQ ID NO: 107390 - DNA, 399 bp, Glycine max
  unsure (1)..(399): unsure at all n locations
ttctttgatgaccctttgattgaagataaaaccttcggatgggttttgcttcacactcatatctactcaacttcttccttcaccttcttcttcacccttcccagcttttgagtcaaacaatgattttttaaccttataaaaaccccaaccctgtgtgacctaattaaaaagcatacgagtgcaccactcgcccgagtcaactcaattcttatttccccaatatatcttcttaatcaatatatccccaatatataaatggtccctataattattatcaaatgactaaaatccaaacttctcattttcttggttttatgtgtgtgtcaaaactaattatgacataatacttatttgaatanaaactgtttgaactttaagtacaaaatttaaaagttatta

SEQ ID NO: 107391 - DNA, 193 bp, Glycine max
tctagcttttttggagtagaaacatgggaccaactcattttatttaaaaaaaagtcgtatctagtcaaggtctgagagaccatacaagtttcctagcgatttctaattatgtgggtcattaagtctatcatatgctgaaaatagccgagaagcccatgaatttcttcgggggcggagtaggtgtccgccatcg

SEQ ID NO: 107392 - DNA, 381 bp, Glycine max
agctccttcaactgcacaaggctcttaatatttgaagagtattcttgtggaaccttcacccgacgaagacactgacaaaaacttatcttctccttcttggacaaagtatggcaggctggtggcaagtaaattttcatcccatcagaccttggatgcaactgtgatcgtatgcccatatcaactagatcttaacgggtattcaagccatccttcgtcttgccttgaatgttaaagagcgtcccaatcacactgtcacaaacatttttctccacatgcataacatctatacaatgtctaacgtcaagatcagaccagttctgaagatcaaagaaaatggaccgtcttcttcatatgcaactcttacctttatccttcttttgg

SEQ ID NO: 107393 - DNA, 201 bp, Glycine max
tctagcttgttacaaaagcatcaattatacattgtaggcactctcagaaaacagtttattgttagacaacaattgtgatatgaagaaacatgggcaattacaatgtaacagtttacccaaccctggaaatccgaatcctaacatcatatgccagatggatgattgtgccaatagaaaacaacaacatttgtatacgcctat

SEQ ID NO: 107394 - DNA, 444 bp, Glycine max
  unsure (1)..(444): unsure at all n locations
cattatactagctgcttgcatgagattgtggattatgataacgagtatatatatctcattgttnaaacaagtcattggnggttcatgccactatttgtaaaaattattctcaactttatttgtggcaaatcaattatcaaagccataatatgtgtggattaatacgtgggagtatctcaatgatgacatcttgcacaggcaaagaacaaattctttagactnctcctaaatttattcaaatactcgaactaaattgttctgataataatgtttactattgtgaaaatctgattctggagaacctaagttcttataaaatatctactggtctataatctaaattttaaagtgccaaatgtattacgcatgttaatgtctttctgggcatgtccattttcaatctgttatagtgacattctctaaataaatataaaatacgcttaa

SEQ ID NO: 107395 - DNA, 201 bp, Glycine max
tctttcttaaagtatgcccgagtcattcatccctatgagatgttgttgaagtattggcgatcagaattgccattccttggattatagggttgaaccaagctcatgcttttacaaaaaggttcatcaagtcaagttgaaatatggaagtaatcgtcttgcaaaattggggcaaaagatgagtcgagtcacatcactgcttcg

SEQ ID NO: 107396 - DNA, 199 bp, Glycine max
ttttttttgtgaataagatctcgaatgacaagaagcccttaattttattgcatatctaaacacattataagaatctatggaaggctctaaagctatctatctgactgaacctaagcacatttggttcaactgaatcatcccaccattgaaaaccaggtacccgcgtcatttaaggaaaacatcatgtcctaaccatgaa

SEQ ID NO: 107397 - DNA, 147 bp, Glycine max
ggccgagaaggcaaagaaaagagcaaggaggaaaaaggggaaagccgaggcccgagagaaaagggtacaccagaacaaacccaaacgacacaggaaccggaagcaaaaaaggggaaacccggggagccaagggagcaaaccaaccaa

SEQ ID NO: 107398 - DNA, 204 bp, Glycine max
tttttctttgacagttatatatttaattaatagtagaatgtcagattagttattttaagttttaagggcatagatgttcttcataacattaagggcctgttggggtaagcttctctagaagtacttaaaaaaaacttcgtaccccattgcccagaggctcttcgctatgcgaaggtatgggggagggatattgtacgcagcctt

SEQ ID NO: 107399 - DNA, 278 bp, Glycine max
tattttattgcaaccttctcttgatcttgtcaatgatcatcacatcatatacatttttctttaaattgggtttgcaatttcagcgtctttaattagtcagcaccgccataagactcatcaagaagtaccctctcctcctttatagtattagcatacattactgtatcaaagttatctacatctacacttcgatgtttgatgaaacatgcgctaacactcttcttatctgcatcatgataaggtaccgcttacacctcactacgaatttgtcccaaaat

SEQ ID NO: 107400 - DNA, 196 bp, Glycine max
tctatctttagttattgttataattgttgttgttattattgtcacccatgtccctttctttgtctttagaagcgtacttatgcatcacagggttcttgaaggtgcaaattgtaaggctgacatcattaccggcaatgactctaccgccaatggcaccgccaaagacttgcccttgagaggtggaaaagcttatccc

SEQ ID NO: 107401 - DNA, 285 bp, Glycine max
ctaataatatgtactggtgttgtagttttgtctacacggggttcacatttataacgggtctttagttttgatgtacatagggctatccaattatttttctcttgcccaacacacaaaaaacattcatttcttaaattaaataaaaatttcttacaaatgttttaaataaagtctatatattttggaaaacgcactcctacgacattgactgaggatggcttgcaaactaacatttctatacaataccttaaaagatcacttctttggttttaaaattttcacatt

SEQ ID NO: 107402 - DNA, 73 bp, Glycine max
acactaaaaaccgctgcagccgcagtcgatcttgagatcccggtattttctctatttccctatatgatcagaa

SEQ ID NO: 107403 - DNA, 204 bp, Glycine max
gcagtctgctttcttccttgagaagggaggaaggttgcttccttgggaaggaaggaagaaagcttccttgagaagctagaggggggctacttgcacctctccaatagctaagctcaccccatgccaaactacatgaaaatacaaaagttaaagaccctactacaaagactactcaaaatgccctgaaaaacaagggtaaaacct

SEQ ID NO: 107404 - DNA, 303 bp, Glycine max
actacacattctcttaaagaattatgcattaatatggcttttgtatctatgattgaacctaaaaatataaagaagccatagtacatgataactggatcattgccatgcgagaagaactaaacctatttgaatgaaataatgtgtggaaagttgtagaaaaacctgaataatattctatcataagaacaaaatgggttcttataatataaatacatgaacatcgtataattattataaataaagccacgttattagcctgaggatcttatccataagaaggaatacactattaataacatattc

SEQ ID NO: 107405 - DNA, 319 bp, Glycine max
  unsure (1)..(319): unsure at all n locations
cttatacaagaatgaagctctgatccacttgttttactttggcctcanatatcttaagaagggcgggttgaattaagatattccacattggttgcgctaattaacaatctatttcacttcttactcaagttatgaattcccttaatgacaatcttctttaatattaattcaaatgacacaattngaatatgaatataaagccactattaataaaggagatgtatggaagagaaaatgcanactcatgtttatactggttcgtgcacacccttgtgcctacgtgccagtcccccagcaacccgcttgagagttccctatc

SEQ ID NO: 107406 - DNA, 199 bp, Glycine max
cgcggcggctttaagactgaagaaaccacagagttaaaaagaagccccccatagatatgcccgagaccttaaaaagcggaagttgcctcaagaaagacccgtaggggaaaggagaccagctacgccaaccagccttctttacataaaaaaccctggaccccacaaaaagccgaacgtccataatgaaaccagcagtaag

SEQ ID NO: 107407 - DNA, 434 bp, Glycine max
  unsure (1)..(434): unsure at all n locations
catgctctatnttcatctaccactccaagtaggcctccggatcattctctccttctaaaggaggaatgttgaggttaataccatccattcggttgtgtctatgaacaccatcattccctcttctcctcctttcttcttcattatgatctctggtctgcatttgatccaacctctcatggagcgcatcatcttgttgttttcattaacctctccacatggtgcatcaaagcttgcatttggaattgcgaaagccccacttccatcatttagattagttcctgacatctcaatacaacaaatcatacgtaacacgacaattatagatgttggttgaatacctcactcactcaagtgtctcacacacatatggcttgtctctaatgaaaacactctctgccttttacactctaattaccttgagttcttagcaattc

SEQ ID NO: 107408 - DNA, 208 bp, Glycine max
cccgcacgcattttttgcttctcacccttctccaagaatatattgtgtgagttgtcaactgaattacacgtattggttctccatatgacatgcttgttgctccaaatttagaaaaaccatacccttttgtgcatgttagacaaactatcctcaactatccacttatgatgtgaaaacccagttgtacatgaatgtattgtttagtaat

SEQ ID NO: 107409 - DNA, 352 bp, Glycine max
acagcagaagcagatgatccactctctattacttcttctgaaggtctggaacactgatcaatactcccagatttgatactatgagtattacttaaacttgatgctctagaaggaatttcctggcaaggagtttcagattgaacctctccatccatgactggaaatttatcagctgaacactggctgtctatatttacatgagaatgagcaggtgatccacatgatatgcgttgtttctcctctttgacttctgcaaatctgttgaatgtattacaagaaattgtagaggtagaaacaatatacttataataccaggatattcacacatgctagcataactccccaaactatg

SEQ ID NO: 107410 - DNA, 197 bp, Glycine max
agctttaatgactgtgtgcaaccacaaattttacattgagtatcctcattgatatgttctacaatagattttgcataaatttctaattgtcataacatattattcatggatacgatctaggcattccttctttctttacattttaagccattgaccaaacaactatcccaacgtatattattttataatttgtaagc

SEQ ID NO: 107411 - DNA, 421 bp, Glycine max
  unsure (1)..(421): unsure at all n locations
cagaataagccagggctttgtgttagcaatcaatggtgccaaacacaccaaatgattatgatgatggatgactcaaattctcacacaggtaaactcatcactttctaattgagctttcaaaactattatgacatgtatgaggagaatcaacgatttcaagtcacaaaatgtcaagaacttttattntcaaaacaattacccatttcttgaacatatcctataattcaaagaaaaacatgcagagtcgtacatgcacacaaaattgacccaaaatattaaactaataaatccgacgaaactaacaacattatcatatttacacaactaacagattaacaaaacccaccaaactagcaataccaaagaacactccccctccccccctcatacttaaacacacattgtgctcatgtagcacaat

SEQ ID NO: 107412 - DNA, 200 bp, Glycine max
tttttctttacgttgattgacaataaccttaaacaacgttccaccagggatgcaaagaagtgaaaacccattactaaagtgactaatatttacagttttaaattaaaatagatttactcgttattatttgtagtaatatatggtttacttatatcttatttggataaatttctctataaatacttatatgagcaaaaaaa

SEQ ID NO: 107413 - DNA, 304 bp, Glycine max
  unsure (1)..(304): unsure at all n locations
ttccactctcttacaggtggcatgctggataggacaaataaaatcataatagttctaaatagacatgtgttctgcacatgaaatataccattttctctttgaaatcagcactagtaataggtgcttaactccgatcatcacatttatgcaatacttatccacattaattgacagaatgagatctctgctaagatgaatgaagatgtgcagactagcataaatattctctgtaagctgtnttctttaaattttattaattaaccatatctcaccaaaaaatgaataattgatcacgcctaacatg

SEQ ID NO: 107414 - DNA, 197 bp, Glycine max
agcttgcctcaaagaggtccaggaaggacaaggcggccgaaggaactagttccaccccggagtacgacagtcaccgctttaggagcgttgtacaccagcagcgcttcgaagccatcaagggatggtcgtttctccgggagcgacgcgtccagctcagggacgacgagtatactgattttcaggaggaaatagggcgc

SEQ ID NO: 107415 - DNA, 334 bp, Glycine max
  unsure (1)..(334): unsure at all n locations
attaataaaaccaggttgagcgcacttagactaatgttatctacttgtgtgagatgagaagtttctccanaagtaccccattctcattttcacttctgaaacgcttgaaattcactacattgagggagtttagatacctagattttgaaatgctttggtctgaagctcgcctttcgtttatatgtggtttatacatgatttacgacctgtttgatccaatttgcgcacaaatggatgaaggcaagagtgatttctaaatctgccaatgtgtgtgcaaaaacttgccactatgtgcggcaaaaatatgcctgtcggaaatgttggtttgctgttg

SEQ ID NO: 107416 - DNA, 202 bp, Glycine max
ttattttttcaagccaagagtacatttactgtctactttaatacatattctaacagcctctacctactatgaaacacattagtgcgatacaaaggaccttcaataatacaagggctcggcgctggctttgacagataacgtccatattttacttatacttaagagaggtcctactcctgcaagctatgcattgtgacaaaaa

SEQ ID NO: 107417 - DNA, 200 bp, Glycine max
atcttgtgcaaatcaaatcactcctacatctcatctctagcatgcattttctttctttacccactcctcacgtttggttttttagggaaaaacaccataactaaacgcgccgcaagggatccctatcgcaccagatccaaatctagaacgatgggtgatcaagaggagacgcaggaacagatgaaagccgacatgtcggc

SEQ ID NO: 107418 - DNA, 375 bp, Glycine max
  unsure (1)..(375): unsure at all n locations
cacatgtttgcatcatcaatatgttgttaatgtgaatgtatgtatacatgattntgatgatgtcaaagaagaatctaacaaggctgcttcaaatgataagcatttgcttcatgaataattgaagatggcttcaacaaacaaagccttgtntcaagattcactaaagaccaagccttgccttaaaacaaagtgctttcaagacatgcaaggctctggtaatcgattaccaggaagtgttatcgattaccacaagacagggtcgagagatatctgttgaacaaagttgtgaatntgaatttcaacttgtgatcgattaccatttgtctgtatcgataccagcaccaaactttgaaattcaattcaaggcataccctc

SEQ ID NO: 107419 - DNA, 198 bp, Glycine max
tttatcttcaaaataactaaccttgacaccctttacaaaaatacgacttccaatgtaataatttcttgcacattgtcattttacaatttttgaccgttaaggaacacaacacttgattgattaagttgttctttacagataagccccctccggatgatttacaatgcttcttggagtttcaaattccaaggcaatggg

SEQ ID NO: 107420 - DNA, 403 bp, Glycine max
  unsure (1)..(403): unsure at all n locations
tggagaacaatcaatctcgccctatcaaatttgggtggctctcgcggcatgagaatgatattaattatgaatctttccttatagagtcattaacttacattttgaatttggttgtcaatcctttaaattccttgtcaagttcagcatcaataccttcagctctatccttaatttgattcaccacaacctcatctagcacaccacctaccagattcaagaaatcatccatttgatgctcaaagtatgcatgcacatctttggcaaggtgagcaatacatatgcggcacatgttcaagatatcttcgtcattctccaactgaagcaatgcatcatcgcattaatgctaggatccccaaaaanacaccacaacagatcttgataacctccactacatgtacaaagt

SEQ ID NO: 107421 - DNA, 196 bp, Glycine max
taagcttacccccactattacccacaaccacccaccaaacctatcaatgttaagaaaatgacatcggcagaaatgcagttgagaagagaaaggggcctatgctttacttgtgatgacaagttttcccctagccatcgttgtcctaataagcaatattttgttccacagtgggaagaagaggatgaacctgcattac

SEQ ID NO: 107422 - DNA, 470 bp, Glycine max
  unsure (1)..(470): unsure at all n locations
ctcagctatactatattgtagaatcttgagcgctctgctctcaatgatttattctggcttatcatagaaggggtcgttatgcttgtcttcaatatctagaatccattttgttagtacaatgtttttcctaatgatatgatcgaggcttcacacccattatgtggacttatcatttactaaaagaattatgattccagaccaggagaaattaccaccatatacatcttgtataacacccaattttggcgtaatataaaataaaaaagattctattttaaaataaatagagttttacganaataatgagattttctaattcaataaataagaagaaataactttattaattaaaataatgaatttaagggtaataaaattattatatgttcttattaaatgaaatgaatatttatttattctttgattgggagaaaatatagttattttattaattattcataagacgatag

SEQ ID NO: 107423 - DNA, 193 bp, Glycine max
gcttgctacaacaccatgaacgacagcgctgagcggagggctcgctaagccagagaataggattagcaagcggttcaaaattagcacataccacaaactggcttaaattacctaaaatagaaatggaaaagttattaaaaacacaaaagtgggagactaaatacttatcagctatatcaaacaaaaagtactc

SEQ ID NO: 107424 - DNA, 198 bp, Glycine max
ttttgcttagcgtgattagtttgattagtaagtggacaactattataagtagtgtgtaatagcattctattaaatagttaataagaataattcattttttcatcatctgtgttagcattccatttttccctctcagctctctctctttagtttccctaacaaagtggtatcaaagccaaatcaagatccatttgtgat

SEQ ID NO: 107425 - DNA, 219 bp, Glycine max
ctctgctttctaagatctctcatcttcacatactccgatcggatggcatcacctacgtctgtatggccaacgacaccttccgaagtgagatctttctattcttcttctcctcctccgtgcgaaacgcaatcctaatttcatatttatacaatccgatttactcttaattaagacgtaaatgctagtattaacctctactgagtgacatgccttacttgg

SEQ ID NO: 107426 - DNA, 213 bp, Glycine max
tcgacctgcgctgcttttctaagcttattgggtaaacactctttgagttattagaatacatattctatcaaacatctattgtttgtgaaagctatgcatgttttcgtgacataaaatacttggttcttaatcttagggggagattaaggatagtgctagaagaggcctatagagtacttgttgtagccaaaaatggcatatagaatacttggt

SEQ ID NO: 107427 - DNA, 382 bp, Glycine max
  unsure (1)..(382): unsure at all n locations
gctaagctccttcaactgcacaaaggctctaatatntgaaaggtattcttgtggaaccttcactcgacgaagacactggacaaaacttatcttcttcttcttggacaaaatatggcaagctgtgggcaaagtaattttcttcccattaaaccttggatgccactatgatcgtatacacatatcaactagatcttgacgagtattcaagccatcctacgtcttgccttgaatgttaaagagcgttccaatcacactgtcacaaacatatttctccacatgcataacatcaatacattgtctaacgtcaagaatacaccagtatggaagatcaaagaaaatggacctcttttccatatgcaactctgactttatccttttttgg

SEQ ID NO: 107428 - DNA, 185 bp, Glycine max
ctatggcctgcctccggacttcaccccccgtgccaccccggaagatttaagccaagcccctactttcgaggggcaactcccaccttatgaagactatcccgggcaagacaatgaggaaggaggtacccatcttagccccctgctccacctcaaagatccgtccccccatgaactaccccaaccaa

SEQ ID NO: 107429 - DNA, 196 bp, Glycine max
agcttctacttatgtggcagggcgggcttccttcactttcttgtctcaaccgcgagctttgaccaccgctcttccttcccgcgatgcttctctttatatctgcctgagtgggcttatagcctaaaccatacttcccacgatttcctttggcatttatcaggctagttatgtcgccgttgtctttgcctaaacccat

SEQ ID NO: 107430 - DNA, 435 bp, Glycine max
ggatactattcttaaaacaaaaatgacgtacaaactccttccataaatacaaacatcaatgtaaaattataacaagcttatgcgcatattttcttatcaatagttttcttgcacaagacattctatctaaccgaaaaaaatgcacccatatacaatcaaggcgagcttcgtaactagattattatcacgtacttctccaggtggatgtggttacttacatcacacaccctcctttgcttaatttacatacatgcatactcaaagcatttttggggtacaagaattgccatgtgcacatcttggatttctatacctatacatacacaacttatgataatctggctatctcacaataagtgctcatttatgctctttcaagtttgctactaagccgatgccattaagatattttctttgtgactacatgattcaata

SEQ ID NO: 107431 - DNA, 196 bp, Glycine max
ttctttgaatgcactattcaatggagttgacaagaacatcttcagactgatcaacacttgcacagtggccaaagatgcatgggagatcctgaaaatcactcatgaaggaacctccaaagtgaagatttccagattgcaactcttggctacaaaattcgaaaatctgaagatgaaggaggaagagtgtattcatgac

SEQ ID NO: 107432 - DNA, 198 bp, Glycine max
agcttgcttagcctaaaagttgttgtgatgaaatgcgcttagctcaggtaaactcggcttagcgcgacgtttacaacacaaagttttctaagttactttggcttagcgattcagcctcgcttagccacaggtagttcagcaagaggacaagtgttcatcctcaaaggatgaactcgcttaacgcggtaagcgcgctta

SEQ ID NO: 107433 - DNA, 339 bp, Glycine max
aacatctagtgtagccaatttcatgagagttcgattgttatcaaccattataccaacactatatttttcagaatcacaagcaataagaatatgtttagaaatagaataagcaatgaatttagtatgcactatactactatccaaaactacactatcatgcacaactacacttctactcttattacttatacttaacctatgaaatgtctcatctatctcaagatcatatggatgcaagtcacatgatttggacctagtcatgcatatgatagctcattagtgacagcgcagacagaaatagcagacaactactctatcagaacactattcactatattt

SEQ ID NO: 107434 - DNA, 199 bp, Glycine max
tgcttagaatgaaatgataaacttcaactttattttatagaaaatttaatctatacaaatatctaaaaaacataaaacatagaacataaatgggactcccactaaactaagatattataaggaaccacacccatataagcaatatgctcatgaaaaacattaggtaccaaaccttttgtaagtggattagctagcatat

SEQ ID NO: 107435 - DNA, 311 bp, Glycine max
  unsure (1)..(311): unsure at all n locations
tcgtgctcatgcccttaacgcatggtagtgatttttggcttatcgcgcctctctctcttaacgtatgagctgaaacggtgcgcttgatgacccggagtggtgcgctcaacgaacactgaaagctcatcttcttctggaatcttcctcgcgcctaaccactgagtgtcgcgcctagcgaatgctcgttaagccggcatattggcttagcgagaaagagaanataacactttttccaattttcctaattaacctcgaaatgagagaaantgattattaaacacatcatacacaagggttaattatatattacc

SEQ ID NO: 107436 - DNA, 194 bp, Glycine max
ttgcattctatcttaggagattccaagatgcgattggcccttttcttgactgcaaacatgtgacggccttgattccttacgggacgtaccttctgcgtgcaccgaccatcgaggatccctatctttgacgaaagagttacctaatcagatatacagtgattagatggaggacgccattcttgctaaccaatgat

SEQ ID NO: 107437 - DNA, 194 bp, Glycine max
tcttcttgaaaaactttcattctaccctctgagcccttaacatacttaatgctttctctaactttggttatagcaggactggatactttcaacccgtcttgaacaaaaagattcaaaatgtgaacacaacattggatatgaaaaaattcaccaccacttactataccattattatgcaaaatattttttccttc

SEQ ID NO: 107438 - DNA, 196 bp, Glycine max
tatgcttgccccaacctttggaatgagctatagaaataaccaaaaaaactccctctagttcagctgaaaagaaagaaagatacccacatataaaatatatcctcctaagaaagcaccagagtaatcatgaaataacctaccatagagaagggaaccatgaaatgattttactagccttaggtgcatgaatattgat

SEQ ID NO: 107439 - DNA, 215 bp, Glycine max
tctgcctgcatgttttcttgcttccaccttcaagcatttctcaaaatcgaaagactgttgagggaagtcaaaacatgttggtcctacacaattccagtgaatatgcttcattaaaagttcatgcaaaaactcgtctgacagctaattccaagcattcctcacaaggaactctatctcaaaccaggtgatgggttattaaatggtcacaagcaact

SEQ ID NO: 107440 - DNA, 112 bp, Glycine max
agattgtcgacaaatctacctgtatgctcgccagcataggatgaagttctacacaacatatggcatccaaacgaaccagttacgacatcatggtcataactatacacagcat

SEQ ID NO: 107441 - DNA, 200 bp, Glycine max
tcttgcttataagaacaaaatttcctcaatcatttccaaatatgcatgtgaattaggaagcatcaacaagaatcaagccaaggctattgtgcaagcaatcaatggggcaaaacacaccaaatgattatgatgatggatggttcaaattctcacaaaggtaaactcatcactttcaaattgagctttcaaaactatcatga

SEQ ID NO: 107442 - DNA, 214 bp, Glycine max
cgacctgttgcttttttgctttgatggtgtcaagaagaaatcacatgtttgtcatcatcaaaaagggggagaatgtgaatgtatgtatacatgattttgatgatgtcaaagaagaatctaacaaggctgcttcaaatgataagcatttgcttcaagaataattcaagattgcttcaacaaacaaagccttgtttcaagattcactaaagaccaa

SEQ ID NO: 107443 - DNA, 209 bp, Glycine max
cggggacacgagggggagcaggagctttttagcgcacccagcgcaaggaggtgcagcccaaatacgtacactggcatataaacatgaaggcggcacgggtttttcaccaagtcagagaataaagagtcattttgggaggttcgggacttgagtggaatgggagccaccttgagaggaccctaacaaaaagaggtggacctgagagggca

SEQ ID NO: 107444 - DNA, 466 bp, Glycine max
cttaaaactcagctcttatagctgaccatctatcaataacacaagttgtgttttttcagaacaattagagcttatctcttttatcttaatgagagtgattctcctaagttcttgagtgattcaagaacatcctggctatttcaaaggctttcacatccttgtgtggtgctcttcctcgaaaaggggaatctatcctttcaccatttcagtctttaaccttgttcttttcaactccaatttccctataatccacatcttcctagaaatatctcgcgaccataactctcttttactcgttcaaataagtgattcttgagctaaatgagatcaaaacagagcttcaccttgtttggatcacctatttggacctgaagctgagtataccattttaattttgccaggcccattaactcattttacctatctctccctttatggagattacctattagtcccgaataacccg

SEQ ID NO: 107445 - DNA, 181 bp, Glycine max
ggggagttagagcataagagcttcaagtcggtgctccttaaacctccattaattttttgcttaaccttctcttccattgatggttcttcatttttgcctccatgtatctcctcacatgtcttgtgctaaatgttgataacatgattctttaaagtttccaccgattaaacttgctatagaa

SEQ ID NO: 107446 - DNA, 98 bp, Glycine max
caccatggatctatcacagaggggtttgttttatgacacgctacaagggggactgcaataactgcatatatcagcgtccgaaccccgattgctctcat

SEQ ID NO: 107447 - DNA, 124 bp, Glycine max
  unsure (1)..(124): unsure at all n locations
aactctatgtggctagcttaagttcatttgtaggctgtggctctgttttgattatatacnggacttctcattgtctgctctaccattcatattgatgtactctttctaaacgaattcatacagt

SEQ ID NO: 107448 - DNA, 400 bp, Glycine max
  unsure (1)..(400): unsure at all n locations
tgagttatgccattataagtatggtgtcctctatagactgcttgacctcaacacttcatgtgatttaatcaaaccaaggcttcttttcaagatatatctttctttatgctggnggacatcattgactgatctgccatctatcactacaccttatctcaaattatttatattgtacaaccaacctctaatgtaagcaatttttgacgtgaatcatttgtcacaaacacctctgtttatttacattgtgacagacaacattccaaacacaccatcccaatctagatccttttagatacagcaatgtttgatatattgacaaagacctcgaactgtctgcatcactaatacctatcctattgcctatgttggacaatgtctacctttctagcaaccatctgta

SEQ ID NO: 107449 - DNA, 286 bp, Glycine max
cctcactaggacacattctgttcagagaatacttcgagttaaaatgctaattgtaacatacctaacagagaactggtctgcctatgcacttgaggataatcgctgcatccagcaataatgaagagatgagtgcgaccatgcgtcatgctctctgcgaactgatgctgcactagtaataagcagacttactggacaagcgacagccgctttgcaactgcctatttatttcattgcttccaaaatattttgacataaatagcatcctaagctcgtaataataaaacta

SEQ ID NO: 107450 - DNA, 98 bp, Glycine max
tttttttatactgaagcgtcaaccccccgttacctttgccccggagatatcgacttatctccagtgccgcggagggtgaaccgccaactagaaatcag

SEQ ID NO: 107451 - DNA, 106 bp, Glycine max
tgaaatactatgaaaggctatttattactttcataatcttattagttagcaatgggcctattgtatatttatttttaaaagaaatgttgatattgatatgtgactg

SEQ ID NO: 107452 - DNA, 98 bp, Glycine max
  unsure (1)..(98): unsure at all n locations
attgtatattaagttttttttcttcaatgtgatctaaggggcgaagatgagtaatcgcttattngaaaccttccctgggattgatatacaccaattta

SEQ ID NO: 107453 - DNA, 224 bp, Glycine max
gatacggcatgcactctctatctcattgtcccctattctcccatttcaattctctgatgtaactttgtcaacagcaccttgtatgtgctgtgtgaactcattctgacgaaaatctgatgtcatggtgaaagacacctctacaaacagcgctctttctctcttacaatgatccgcctatatgaatcttcagtacggcctcacaagtggatattatcctgtgtgtt

SEQ ID NO: 107454 - DNA, 293 bp, Glycine max
  unsure (1)..(293): unsure at all n locations
gctgcactaatattgtgttgctaactctatgcttatcacactgacaatgtctgatatatcttagaacaaacagcctattctatgatattcatgtcattaattattctaatcccatttgtcttgatggaagtttagttcttaccgtccacacatgttttcaatgatagtctctgctacattatcatataatttatggttttattnntggtcacataaacaagcatatatgctattttacaatgcagtgtcccttgaaatacatatgcgcaagatatttgagctcattttgagta

SEQ ID NO: 107455 - DNA, 79 bp, Glycine max
ctctcttaacagctctctgcttattatagtggcttcttctggtcagcatctggatgtccagctttatgacagcttcagt

SEQ ID NO: 107456 - DNA, 256 bp, Glycine max
gggactatgtctttttacccgtatcggacatgattctctattgaagcatcctttgttgttctctaaagccgttgtggcaagaatgaagtttttatttgaataaccaccaccctttttgtgaagctagtgaaatattttttttgtttttgatgtgaaaaaataaagtaacataaagtgtttatcttggttacttaaataaaaaaatatataaggacttttataaatgaaccattatatttccataacattgatcata

SEQ ID NO: 107457 - DNA, 402 bp, Glycine max
  unsure (1)..(402): unsure at all n locations
gcacggctgcacttcagtgtttcgttcgaaattaaatgtcctatacatctcttcttcttgaagaccaangaatggacttccaccttatcatactttactctacctcttgcatctatatttttatttcattctttctttccggcctcatcatatttgacatattgtcctcttttgatactcactctacttatttctgcacatactttttgcacagttctctatccnaatatctatctcactcacaactttactctgataagttgttctctggattgtatattgccaaatatgatgatgactcctgctgcgtgcactgactaagtttatgtatcatgttatatgaatgcctctactagatgctccactaatttctatttagcttgtgatgcgtaagcactgttt

SEQ ID NO: 107458 - DNA, 247 bp, Glycine max
cttctgctaaaaacataatggtgtttatgagcacattgttgaaggcacacaaaaccatgaactaatgatctgtaagttcacatcagaaggcatacttgcatctactgctcaatcaaacacctctctcttctctctcttatcacgttcatcctgcccgtgctcaataaattatttataagagctcatactctaatgcaaacactctttgcctatacacctacacagtgtgtttaacatttacctaata

SEQ ID NO: 107459 - DNA, 203 bp, Glycine max
tcagcattaaccctgtgctcaactagatgaatgaaatggtgcaaaaatattacccccctccggatctagcaagagttgctaagatactctgtaaatattgttcgcaaacagagaactattttacaagctattcattgcaagtctcataagttattttaatagttgaatatacttaaactttctagcggcctccatacacataa

SEQ ID NO: 107460 - DNA, 350 bp, Glycine max
cacggctcctttacgactttataccgtgggatcaataatttttttctagaggttcaatttgatataaaccctgctgtcagattccacttgggtgctcgaaatatttctcatattccctgtttaacaatcaaatcactgcaatttggactatcattccacaataggactgtcaatattaacaacttctgttgacccattgacgactcgatgctttttttgcaccctactagtactctttctttcgacacttaactgaaccctttctctctacatccattatagtacacacaaacctgcaagtttatgtaaccgccgcacctggaatgaccttttctgttttcttttttttg

SEQ ID NO: 107461 - DNA, 250 bp, Glycine max
acacggctcacttatataatactgtcctgaaatgctttttataggggaaaattcattcccttaacttttttttagaaatcctaaactctattgactcaactcttataacattaccgggtcggaaagcacctatttggtggcccttctctccccacgcctaaacaatttgaacttatataaccagctttcttttaatttacaaactgttatctaaaaaaaacaattttaaatttattcccaaccttaattt

SEQ ID NO: 107462 - DNA, 195 bp, Glycine max
atgagtgagtgtatatgtagagtactcttatttctcttctcaccgtacgtgaaaggtgacatgtgtctacattaatgaaggtccatattggtgattccaaaaatcccatctttttttttccaacttatgacaactttttatcttaaggccccacttataccccattaaatgtggatgtggttgaaactcacccta

SEQ ID NO: 107463 - DNA, 279 bp, Glycine max
  unsure (1)..(279): unsure at all n locations
atgttcacctgagactttatctgctgcttctatgcccaaataatacttacacctcctctgccatcagttccaaaaaaaatgtgtgggagtctgttccatgtgtatattgcctttatgcctactaaacaagaatgcttggttatttctataagctgtggcattctgaggatcacggccaccaaaatcattcatcctantggctatacatctgacccaagtgtattcgctactaaggcacgttggtcatcaacagtaagaattttttggtaaatgacttaa

SEQ ID NO: 107464 - DNA, 263 bp, Glycine max
tgcaatttcattgcgatgactactataccggttgcacacatggaaccacaattagtgtgtaatctcaagtacatcttcatgcttaacattgcgtagaacagttaaccaagcaaactttttcacatcctttgcttcatataaaaaatgcaggctcacgatgctattactaacccactcattaccacactacactgcagcaacaaacctccctctacaccttctatggcataaataacttacctcatacgcatgtaattaaggat

SEQ ID NO: 107465 - DNA, 130 bp, Glycine max
tcgactagcacggcgcacgtactatggctctgtggacagtatggatctttaatgaagacaagcctgaagcctctcattaagactcgcacccagctatagcttatgaaaataccaagctcttttaactgct

SEQ ID NO: 107466 - DNA, 308 bp, Glycine max
ttcaattgctgaaatgttcggaaaatcagccaggcttcagcgttcgacgttcggatgattcggacggtcaccgactcacgtctatcgtctcacgtctcatgtaacggtagacccaaccactttcatcatcttgtctccgtggtccatggttcgcgattatttcgttattactttataccccttgacgctaagcgttattagtattctcgaactaaaaaataatccccgtcgtgatgatacctacttgtgataatcccgcgttgctccctgataaagagtatttttataaaagctcttataacgaacat

SEQ ID NO: 107467 - DNA, 112 bp, Glycine max
gtatctaacctaaggcgctaatggctagctaacagaggacgagacaactgatgatcgctataggaccgtttattagctcactacaaactgatataaattttttctcctgtgt

SEQ ID NO: 107468 - DNA, 269 bp, Glycine max
  unsure (1)..(269): unsure at all n locations
aagcaccgagctgcactgatcatctatgcaagaacttggagctttttttttatngagcgggcagatttatttatttattcatgagtgcagttgtcactctctgagagctaagatgtaatacatgtctacattttataagagaagcagttgtatgaagtatgttataaaaccatctatcaatatgaccagtatgtacttaacttggaaaattttaagttaattggctatgagaccaatagaacatcttacattctatacgctggaaataa

SEQ ID NO: 107469 - DNA, 128 bp, Glycine max
tcgtcggacctagcactgcgctgcactatgtgaagggtcaaggctccgtacctagatcttttgcaaccaaactttaaaatagtgaaagtcaatccataaccatatctatctaaggtagtctgatacat

SEQ ID NO: 107470 - DNA, 270 bp, Glycine max
aatgattgtatcatgtcttctaaaatatcagcaatgcttcctttagctgaacggactataggcattatatcttctttagaatattaacaggtctgaaggtttccctttgcttgtaattcttctcctaggggggaattgatcactggcagccaatgcttccagttgaccatgtctaatgtgctaaagagactcattggtctctcattaacattatttttctttaacagattccatgaatgcgtgcaattggggcttggattattgattacg

SEQ ID NO: 107471 - DNA, 93 bp, Glycine max
aatcaatagataatacatctctcacaattactaaagtttttagtttagctacatcccatcttttttatttcatcaatcctctttttttaaaaa

SEQ ID NO: 107472 - DNA, 115 bp, Glycine max
ataataattgttacttatgtttcttaagttgttgcttagaattaagcaaaaaatttgcccgggtatgctctggtagttaaaccagaagttcaagtctttgtctcccctgtgccta

SEQ ID NO: 107473 - DNA, 328 bp, Glycine max
actagacggctcgtggggctgtgcggtagaaatgtttttttttttaccgctctacacccgttgataaagggcctcaccgtatggactagaggaggatttatcttagctcactgtgtaaggaactcttaactttttttatggtgcgtgatctccgccataatatttatgagactttaacaccttagttgatgtggaatatataaacctattgctagtccaaaggaaacaacctcggctctttactgttgtatgttgagatgagtctaagattaccttatgtcgtaggcgtccaactgataatgattcactcttattgtcttagaacact

SEQ ID NO: 107474 - DNA, 250 bp, Glycine max
agcaccgcgctgcactgatatccctcgacatcaaagttaaatttacaccacttctgatctgaggcgaagcctttgggatggacacattgcacattttcaaacaaagctatctctaaacaatcctatcttacaatctggcatactggataatatgaaattagtgtcaatgttatctattcttcagaaattctttttttctcatctaaaagataaaaccaggctctgtgaaaaattaaacaagaggtgtctt

SEQ ID NO: 107475 - DNA, 232 bp, Glycine max
ttcttaaaatctacctgcatgcattcatttttctaccatcaagacttccaagaacgctgcgtcccatctttggaaggactcactaacacatacgtgtactccttctggggaacacatgtagtttcggccacaaaaaccatccaaataccggtaaagatctatttctcatattttgctagaatctaatattttctcttctctatattcgatcttattatttgaagacttaaat

SEQ ID NO: 107476 - DNA, 230 bp, Glycine max
ttgaatctaagcttaacaatgtttttgtgttttgcccaccttcaccatatcttccgtaatactcatcacctctatcatatctaataattttcacacctatgtccatttgccctttgatttaattggagtaaatttctaaagcatccttcggctaataaatctcgggcagtaagtagacataaccgtaacgtgaataatcatcaataatggtgataaagtatctttccttt

SEQ ID NO: 107477 - DNA, 230 bp, Glycine max
ctagtcaatctgcatgcatgcaagctttgttaagtcctttggaaactatgggaggttcggtctgggttacgagccaacacatgccgataggagaagggtcgccttagaaaggaaagaaagaagcctagcccatttacaagggtggagaccacaaatggaaagggtccctatctgtgacattaacaagagctttgttagcgcgaggtggatgcatgagaatcaggttgttg

SEQ ID NO: 107478 - DNA, 220 bp, Glycine max
tagaggtacaattgtgattttatttattttaaattacaacatataagtattagaacaatgtcaaattcaagatgtagatacatgctttaataatatttaaattttaataaacttatttatgttaatttgctaagactttttaaaaaaaataaaaggctattaatattattaaaatcaagaatgagaatgacaacatttttctaactcgtgagaataaaga

SEQ ID NO: 107479 - DNA, 203 bp, Glycine max
tgcttaatcaaacttggcttagattttttaatctcctaacatacaagtcagtttggttcatgcagtttggttttggagcagctcaattttttaaaactgagttacatttagtaatgtcataagataattaaatgttgtttctacttttctaggaagttcatattgtcacttgtaaatctggttcacatcacaaacattttaaa

SEQ ID NO: 107480 - DNA, 219 bp, Glycine max
ttgaaaagtgttcatggaggaaaacaaaaatggaggatgagaggggaaagaggaggtctcttacctctaaattagtccaaatttgaaaaagatgctcaacaaaaaggtcctttgtgctagggtttcaaggtctcacactctctaatggtaggctgtcttggagaggatgaaaagagtgaaatgagagtatttgtgttgtggttcaattttgaagggttt

SEQ ID NO: 107481 - DNA, 204 bp, Glycine max
agctttcttgagaagctagagcttagctacacacacccatctaaaaactaagctcacctccttgagaagctttcttgagaagctttcttgagaagctagagcttagctacacacccctataatagctaagctcacccccatgacaaaaaaaacatgaaaatacaaaaaaaatcctactacaaagactactcaaaatgccctgaa

SEQ ID NO: 107482 - DNA, 219 bp, Glycine max
tcggtattcattttcgagcgtctcaatatattacgggactcaatcagacatccgactaaaaagttattgtcgtttgaattagctcggaggttcagaattcaatttcgaacgtctcaatagattacgggactcaatcagacatccgactaaaaagttattgtcgtttgaattagctcaaagcttcaaaattcaatttcgatcgtctcgatatattacggg

SEQ ID NO: 107483 - DNA, 201 bp, Glycine max
tgctttgtctgcaaaaaatcactaaaaaaactgttttaaggtccaatgccttaaacggtcctcttttcttttatcggttaacatggaccgttcaaaagcataaaatcaacatgtaactttaccgcttttgaaagaactacgtaggtctaatttccttatcacaattgaggaatacgtaggatcaagggaaatacccttgtc

SEQ ID NO: 107484 - DNA, 222 bp, Glycine max
ttgcggatttggtcttcgccagttaaaggatcgaagtagatctgaaaagaggcaaatttaatcatcctgcttagacgaatgagaaaactggggcaaataaagagggtgaggatgagggagaaacccatgctgtgacggccattcctatacggccaattttcccaccaaacccaacaatgtcattactcagtcaataacaaaccacctccttacccaccaccg

SEQ ID NO: 107485 - DNA, 206 bp, Glycine max
tttcttttcccataaggccttcgatgttctctccttcaacacgttgtgtttttatctcgggagcaagggctaactgaatcatgctcacaaccctcatttggatcttagtccacttggtttcatttatagaagccggcctttcatcttctaatgcctaatcaagaccttgttgcaccaaaaggtcttgaatactactttgccaaatc

SEQ ID NO: 107486 - DNA, 214 bp, Glycine max
ccttatggtttttgtcacatcattgctcaatattattcttagttacaatcaagcttcatatgggtctgccatcagcacctaggcacttatagcctttgtgagaaagggaataaccccaagaagacacattcctgagatttgaattggaacttgtgcttgttgtatggtctaagaaaagggaaacatgagcaactaaacaccctaagaaatgaat

SEQ ID NO: 107487 - DNA, 206 bp, Glycine max
agctttgagccaaaatcccaatttaccataaaccttaccctcagaagaaaacaaaaaaagaaaggaacttcccaatcaaaagagcgggagaaaacaaaaagagaaaatttccaatcgaagagcaggagaaaacaaaaagagaaaattcccaatcgaagagtaggagaaagcaaaaaaaggaaagaaaattcctgatcaaagatcgg

SEQ ID NO: 107488 - DNA, 214 bp, Glycine max
tcccagttatgtaaagctaaatcctctgttcgatcttccttgtaggtacttgatgtaaatttctttttatctatctaatgatgttttgtgtgttctatgtgctatcagtatttcattctagtatgtttttaccttgatcacgtagatgcatgctttgttagggtcattcaacagtggaaattgtctgattcttagaacttgataggacagggct

SEQ ID NO: 107489 - DNA, 203 bp, Glycine max
tcttcttgcatgaattagaagcaacaaattcagagtaatttgtaaagaggaaaaactgaacagaatttaacagttataatagaacctcgaagagaattgggcttgatcctcaagagaaaacaacgctgcggacttagcctttcattaatcaaatagagaatgaaattttattgataaactaaaagtctaaactggaattgtaa

SEQ ID NO: 107490 - DNA, 213 bp, Glycine max
  unsure (1)..(213): unsure at all n locations
ttttattcacttctttcaagatagcttgaccggagccgcggtagtttggtacactaatttggaancttcccgtatccgtacttggaaggatctgattactgccttcctaaggcaatatcaatataactccgatatggctcccgatcgcactcagctgcagaatatgttcaagaaagagggcgaaacctttaaagaatacgcccagcgatggag

SEQ ID NO: 107491 - DNA, 200 bp, Glycine max
ttgcttgtacggagttgccttctactgacatatggggttggccactacctcacccgaggatgacaatgggtagaccataacagggctggcgggggtaaaggacaatggtcttttatataaatctgtggacgtttacggaatcttaaattaatgatacatacttgattgcgtacatgttaaaaagaatctttatatctaca

SEQ ID NO: 107492 - DNA, 211 bp, Glycine max
tattttttgatgaccgcttcctggaaatacaatatcggtggtgtgaacaccttgctccggcccctctcctttgagtgtgctcaccccatgaataagctcgaacgtgacctttcaccaaagctctataaataacacccttgaaagttgcattcagtgcaatgaataattcatgcctcttatgcaaacaaccctgaggaaactacatagttca

SEQ ID NO: 107493 - DNA, 202 bp, Glycine max
ttcttgttgtatgacctgatgacgacttgtgtcctctcgcacaactctgaggtctaacaagctttgcatagctcttgactccatatggaatcgatcttgaaataataacaattataattaataactatttttctagtgataatttacgggaaaaaaatcaacaaaatttaatttgcattacttggcaagagtagtctccact

SEQ ID NO: 107494 - DNA, 216 bp, Glycine max
tgtgtgaagagataaacagaaaaagacttagaaatatttttgcaattgtctatccgctaagcgcagaccttacgctaagcgctcagtcttcatgcgctaagtcgagcttgctcgcgctaagcgcattgacccctaattggttggctgaatagttcagctaagcgcatatcactgcgctaagccccacatctttgcggtaattgaactttaactagt

SEQ ID NO: 107495 - DNA, 230 bp, Glycine max
gtgatgctgtacaggcgagcatgcagtcttcattcttatcaaatttggtcttctccagagaacgggatcctgtcggtccagaaggcggcaagcccgatcattcttctcgggcgactgtcaacactggggcatctgaagaaggcgagaatgaggggaaaacccatgctgagactgccgttcctatgcggtcaagtttcccgccaacccatcaatgacatctctcagcgaat

SEQ ID NO: 107496 - DNA, 213 bp, Glycine max
tcttttaggttgatgcggggaacgcctctagttcaacacccgtgcagcctagggcacccacccagagggaagctccccaagttccaactccgaacacgactcgaccggccggtaattccaacacgacaaggaacttccctccgaggccattgccggaattcaccccgctcccaatgacgtacgaagatcttctaccatccctcatcgccaatc

SEQ ID NO: 107497 - DNA, 199 bp, Glycine max
cttctttattggttagtttttttaatattgggttcttgttgcggtttggtatttgaccgtgttttatttctttttttatagaaacaaaactaatatgatataattgaaagaactctattttgttggcctaaactttagcatctttttcaaaaagtaaatgttttattttccaagaaagtaccaattctttttaaaccaa

SEQ ID NO: 107498 - DNA, 209 bp, Glycine max
ttgatgacattttaatatataatcactacaaaaataataccctcaatgtataagcacaattaatgtgcccccttacaattactattgatacgtgtaactgcaaattaaaactaatacaaatatggtgagaagacattctttttttcatgtgagaagagaatttgcaatgcaaataagggaaagacaaatatggtgagaagagaagagga

SEQ ID NO: 107499 - DNA, 209 bp, Glycine max
tgtcttatgatgatgaatcaagttgattcaagtagttttgataatgacaaagatgatgacaaaaagcccaaagaatgatttcaagattaagtcaacaagaagaaatcaagaagattcaagaatcaagagaagtttgatttcaagattcaagaaaagatgaattcaaaattcaagagaagaaatcaagaagacttcacaaggtaagtatt

SEQ ID NO: 107500 - DNA, 220 bp, Glycine max
tgagaagctctttgtgaaatgagatagttgattaccatgtttctgaaaatgcagaacaaagaggtatttaacaaattaatcaattattgtatttgataatcaattaaatttgttttgactgttaaaatataaaatatcttcacttgttctttctcatgagtgactcttgatacgatcctatcttttagaaaaggcttaattgcaaaatttgtctccctat

SEQ ID NO: 107501 - DNA, 207 bp, Glycine max
agcttgtgtcacaattcattgtgacagtcaaagtgccattcacttagcaaatcaccaaatgtaccatgagaggacaaagcacataaatgtgaaactacacttcatcagagatgtgattgaatctaagaaggtgaaggtggagaaggtttcaatagaagaaaacccagctgatatgttcacaaagtccatctctagtgtcaagttcaa

SEQ ID NO: 107502 - DNA, 220 bp, Glycine max
tcggaagaaagtgatgaggtacaagccctaaaggcagagcttgaaagagcccgggtagtcgaagaggggtagtcgaagagaagttcaagtccatagccatcaaagtctgaaaagagtatgaggaactaagggacgtcaatatggccaccgatgaagccttggaatgagaaaccaagaaggcccgaaaggaagaacacgaccaaaacaagttttgagggcc

SEQ ID NO: 107503 - DNA, 201 bp, Glycine max
atcttgcttctacagatatctcatgtgtggagagatatctgttaaggcagctcacatgttatcacttcctaaggtatttcaaactaaagaaagattctttaattttattattatttcctactgctactttattatgtattgttacctgttttattcaagatagactatttcttccttaattggaaactttaaataatttat

SEQ ID NO: 107504 - DNA, 219 bp, Glycine max
tcacacaattttttttctaaaacttgagttttggaagaccaattactaagtcattcctaactagatgatttaaatgatgcatgttaatgtgtgcagtcctacgatgccaaaatcaagaatcatctattttaatcaccaagcaacttagctcatgaaaagatgcatgctcaatattcaacatatagatattacctattatcttaccgatgtggacacctt

SEQ ID NO: 107505 - DNA, 203 bp, Glycine max
tttttttttggctggcattctgccagataagatggtgcatcttatatgcttcaaaactgtaggtcatagccctaatttataggtcccgagactgtgtgaagaggacggacaatccgcttttgagattaaaaacagatatccactttattctgatgaaacagttggttcaaaagagaaatttgccaagtgtcaaggttcttgag

SEQ ID NO: 107506 - DNA, 219 bp, Glycine max
tcctcggggctttttctttttggtgatgaacaaaagcgcgaaacggaatcaaaaaatgcgaaaaatgatgaccctagggctgcaaactcataaatctcgtgggtatggcttttgaaaggggggaaaagaagtttttgaatgcaaaaacgtcccccctttcgtcatccttatattttggtgcaggggtggctcgtccaggcgagctaacctgcatttttt

SEQ ID NO: 107507 - DNA, 204 bp, Glycine max
atcttctatccaaatggacttaccttgaattaattcctttgatagcccctttgagcctattttcccctttctttgttttgaagctcattacaagccttaagtgaaaaaccatgatatcaccttacccttaaggaattttggagctttggaattgttttaggaataagttgggaataagtgtggaggggtatgtttcattggaag

SEQ ID NO: 107508 - DNA, 222 bp, Glycine max
tatagttcagatcaaaagacatttttttgtaatgctgacaatctgcctagagatatgagtttttatttctcagcttattaagttcattattaacaaggatgcattctttttaaagcaagaatttttgtttaagcatttccttgtgtccttattctgaatcatcaagagttgtgattaacgattttccctttcttccaagtcttgaaaaaccttaagaagagt

SEQ ID NO: 107509 - DNA, 208 bp, Glycine max
tcaatcttgcttccacaatctccccctttttgatgatgacaaccctgaaatcaagaaacatatacacattcttttttctagtcgatcactcacttaattctccatattctccccctttgcttttgagtttaagctatacttgaaattaagttatttaattatgtgagttctggatttaatccctattttctctccccctgtggcatca

SEQ ID NO: 107510 - DNA, 213 bp, Glycine max
tctttatgaatcctctaaatgaagcttctagagaaaactacatggagctgcctcggtagaaacgcttcccagccttcgttaaccgttggatcttctcgaaatttggtttgcaacttcacaagatactttaccatgatttaaccgttgggatcgttgagaaaatatctggagtgtgctagaagcttccgttcccgagagcatctcttatttaag

SEQ ID NO: 107511 - DNA, 205 bp, Glycine max
ttcttcttatccaaggctcatcttggtggtgaagctccttcttccatggcttattccctagtggatggcgcctcctctcacctcttctcctttgtcttccgctgcatctccatggtggaaaatcaccattaaaggacctcattgaagctcaaagatccagcctccatagaagccacacaagcaagcttccatcaagtggtaatca

SEQ ID NO: 107512 - DNA, 225 bp, Glycine max
gaatactaagctttttaaatatggccttatcaaactacttggttcccgagggaaattctataaatagacctcctatctttaatggagtgggttaccactactggaaaacccgcatgcaaatctttatagaggcaatagatttaaatatttgggaagccatagaacaaggaccttatgttccctctataatggccggaagtgcaacaatagaaaaacctagagcat

SEQ ID NO: 107513 - DNA, 200 bp, Glycine max
tgcttgcgtagtgtacatgtttaatttcttgttttttatatgtccaaatccggtggaacatgcgaacaaaacaataacgaatcttgaaccgtgcattatctaatattagatggccttatactgcatgtgacaatcacgtgcacggattcgtggtcatcacatatgtgacaattttgacaagaccagcatggttcggatgt

SEQ ID NO: 107514 - DNA, 213 bp, Glycine max
tgaaggtgcgttccctaccattttttcatagtaaagcattcgtaatgtgtctactactattgtgatcatctctttctccatagttggaggtgccacttgagctgccatgtctctccacctttgggcgtattttttgaaagattcgtgcccctttttacccatgttctatagttgcatcctatccggagccatattagaattgtactgatacta

SEQ ID NO: 107515 - DNA, 121 bp, Glycine max
  unsure (1)..(121): unsure at all n locations
cctttattcctcacgcntctggctaccctatggttaggtcccaacacggggggcacgacgcccgagccttaaggagatgtgtgaagactaccagcaatgcgacccacttcattacaaaaac

SEQ ID NO: 107516 - DNA, 204 bp, Glycine max
ttcttgtaatcgatggaaccgatatgagagacttcgctgcaagctacaaactcttgggttatcaattacgatcaacgggtaatcggttaaaattgagagctttaactttagaagaaactttccagctttagaacttttcttcttactactacatgatgatgcatgatgcatatatgaagtattagagactattgatgcaacaca

SEQ ID NO: 107517 - DNA, 219 bp, Glycine max
tgcatataaatttaatatttactacaaaggaatgcatgaaactatattttaatagaaacattcgagtaagataatcattccctactcatatcaaacttattataccataaactcaaaccacacttgaatctcaaatgcatatgtaattgaggaataaaatgtcaacacgactccatggaaatttctacaactattgggcggtcgccataagccccatct

SEQ ID NO: 107518 - DNA, 207 bp, Glycine max
tttttattctttattagagagtcaaagatcaaattgagaggaaaaataaaagctatgctaaacaagccaacaaagggagaaagaaggttgtcttcgaacccggagattgggtttgggtgcacatgaaaaaagaaaggtttccggaacaaaggaaatcaaagcttcaaccaaggggagatggaccatttcaagtgcttgaaagaatca

SEQ ID NO: 107519 - DNA, 211 bp, Glycine max
ttacagcagattttagtaatgacccactaacctagaattaaaataacttaatgccattaacctagggaattaaaacaaacttaatggctgagtgtaactgaaattgttggcaaccaaaagtcacccccaacagccaacaagtcagccaccatttggtctcccaaaaggctgatgcctaagttgccaattgggcccttattacaacttgaac

SEQ ID NO: 107520 - DNA, 199 bp, Glycine max
ttcttcatgatgatgaatcaagttgattcaagtagttttgatgataacaaagatgatgacaaaaagcccaagagaatgatttcaagattgagtcaacaagattcaagaatcaagagaagtttgatttcaagattcaagagaagatgaattcaagattcaagaaaagaaatcaagaagacttcacaagggaagtattgaa

SEQ ID NO: 107521 - DNA, 206 bp, Glycine max
atctttttttctacatgattttttatttgggctgtgatttggcatttgggattgttgatttgttttggattttgttcttgttttgggttatgaattatgttcttcatcaaggttatgggagtttttcttgcgtttataaaatggagatgttcaaagagaaaaaaattacattttataaggatttttagccgttaaaaattgttctt

SEQ ID NO: 107522 - DNA, 218 bp, Glycine max
tgcaaaatggaagcaaagatgtttttctatgggtggcagaataaccctcatcaattctgtcttaacagctcttcctatttacttgctgtctttttttagaatccctaaaaaagtggtgcagaagatagtctctattcagagaaactttctttgtggaggtggttctgaggcaatcaagatcgcttgggtcaattgggatactgtttgtcttcctaaga

SEQ ID NO: 107523 - DNA, 219 bp, Glycine max
ttttctttttaattttcttctcctattagtgcttatagaaaagcttatccaaacaaggtccactatatattctgcaatctggtattgtgccatatatatggatggaggttttggacatttggatttttgtagttgttgttaataacaatgatgcttatgcctttgggcatgggtttggactagttgtatcaaactatgtttgtgtattggtattttggg

SEQ ID NO: 107524 - DNA, 202 bp, Glycine max
agcttctggtgggacatcttgacttgctttccaatctgacattcaccacagattctgccttcttctattttcagattgggaatgcctctaacagcacctttgtcaatgattttcttcatgcctcttaagtgcagatgtccaaatctttgatgccatattttgacttcatcttctttggagaatagacatgtggaggagtaac

SEQ ID NO: 107525 - DNA, 219 bp, Glycine max
ttagtctctgtttatctttacacagcaaaatctctcaaaactctctggaatttggacctttctctctctagaatctctagacatgcaaagctctgaatcccagtccaaactccccctctaaaatttgatttcaggcttaaataggtggccttgttcgtgctcgtgcgcttagcgcaattatcgaccgcttagcgcacattagtgaatcttggcttagcg

SEQ ID NO: 107526 - DNA, 168 bp, Glycine max
gacaagaagaaactgatcttcacaaccaagcgtacatcaagacagcactcattaccggaataataacaaaccacacgtaaaagtttaaaacaccaacgtatgtgaacgggtgatttttatacatataatcaaatcagcatatgctaatatatacgtgtgcgggttgcc

SEQ ID NO: 107527 - DNA, 173 bp, Glycine max
accaaaacccaaccaaaaagttagatttctaaaaacagagacaaggggaggaccaaccaaaaagcgagcgaggaaagagcgagggcgccgaaagcacgcaggaagcagcaagagaatgcacgaaggacgagggtaaagaagaaaaaaagataatgaggcgcggtaacaaaaaa

SEQ ID NO: 107528 - DNA, 205 bp, Glycine max
agcttatctgaattcagatcgaattgaagttagcttagctcaacctcgaccagcttagcggaccaaatcagcctcaaatgcaagggttgggcgctaagcgcttgagactcgcgacttagcgcatgaatagagatgcgcttagcgaaagggctatttttcagaaaaaaagatttctaagttatttttcagtcctttttccaagaaa

SEQ ID NO: 107529 - DNA, 223 bp, Glycine max
tgtctcagcatctatgcgagacagaaaccaacatgttagctatcatcgccaagtaccaagaagagttgggtctagccacggcccacgagcatagaatcgcggatgagtatgcccaagtatatgcggaaaaagaggctagaggaagggtgatcgactctttacaccaagaggcaaccatgtggatggatcggtttgctcttaccttgaacgggagtcaagaact

SEQ ID NO: 107530 - DNA, 207 bp, Glycine max
tcaatcttgctcaacattgatttcaaattctggagctagtttccatgtaattggtgaatctcagcatatcaaacagttgtcacattttgatggacttgaccaaatctttataggaaatggtgaaggtttaagcatttccaacattgtttcttcatcatttttgtctcctaatgactctcatattactttcaaacttaataagctatt

SEQ ID NO: 107531 - DNA, 213 bp, Glycine max
tacttttacttattgtgaatccatatgtttattagcagggatacttttggaatttacaataatttgttgggcacacaagagaaatgttaggtgcacaaagtaattaccttcaatgtataacttatgcattcaccactttccgatatgacattagtgtaacacatacagtaatgattgattgaaacccaataagacacaaaaggcctaatatca

SEQ ID NO: 107532 - DNA, 206 bp, Glycine max
tcattcttgtgcgaatctttcctttttgttcgagtgatctccatggttaagatagaattcattagtcaaggcaaggttgtttggttttgtctttatcgggtacccaaattgtcgtcgagcgagaagtgggttgtagctaattccgccacgcatacccaaaagaggtacgttgggatattcaccacaactcacaataatctctccaa

SEQ ID NO: 107533 - DNA, 218 bp, Glycine max
gcttcacataatcttctttctaaatccaagcaaaaacatagcatgattcagtatcactccaactattactatgatattcaccagaaaaattgaaaatctcttatatacagatgattttacttaaaggatgatatgtgtgcagtaaggtgttggttcaagcttcccagcaagagtataactggccacaaaagctgtaaccaggatgataaaagtaccac

SEQ ID NO: 107534 - DNA, 199 bp, Glycine max
ttctttttgagataaaaatggtagctttagaagaaacaatgaacatgctatgaaaaaaatcgaaaaaaagcacatggagagggaaaccgaagcacattcatggagtttggagataaaaatcgaagcttttgagataaaaatgatagttttagaagaaacaatgaacatactgtgaaaaaaattgaaaaaaaagtacata

SEQ ID NO: 107535 - DNA, 214 bp, Glycine max
tattcaccagttctatctccttcagggaatcaagaattgcagcagaactcagcaatggtatgaaacatgaacctagttcccagacttttatgttttgtgtcttctagattgtttttaaatgttaataacacctcctttttttgtttcctagtttttataattttagtttctgttcttgtcatatatataatttatatatggttgcttgattcct

SEQ ID NO: 107536 - DNA, 202 bp, Glycine max
tcatctttgtacaaaatcaaacgataataactttttactcgtacgtccgattgtgtcccgtagtatatcgagacgctcgaaattcagaacagaagctcttagaaaaatcaatcgacaataactttttactcggttgtccgattgtgtcccgtagtatatcgagatgcttgaaattcagaatagaagatctgagcaaaatcag

SEQ ID NO: 107537 - DNA, 213 bp, Glycine max
tgaagaggatgcttttatggaggaaaagaaagagagaaggggggagcacgaaattgaaggaataaaagagggagagaagtggaactttgaagtatgtctcacaagactctcattcatcaaagttacaacaagtgttacacatgcttctatttatagactaggtagcttccttgagaagctttcttgagaaaacttccttgagaagcttctttg

SEQ ID NO: 107538 - DNA, 198 bp, Glycine max
ttgtagcgcagggctgggagaccaaagtctcctgtccgcgatctgtgaaaatgatgtttccagaacttcggatttggtccgaccatgccctcctgatattcaactggcaaattggcgagtggatgaacgcctctgcgttatcgcatacagcttaatgacaacctttacggttttaaaagcttttttgttgggcctagg

SEQ ID NO: 107539 - DNA, 218 bp, Glycine max
tgttactcatttttcccaggcgagctaggttgctttctccacaaacaaccgacttttggaggaatattctagaaggctcaagaggacctagttgcaatttgcacccccatttttactaagtacaacccctgcctttatatggggattcttttttcgtaacgggactaaactttacgaatttaacaacgatgcttgctttccctctggaatgttaccaa

SEQ ID NO: 107540 - DNA, 204 bp, Glycine max
ttttcttatataacaatatatgcatatataatttcgatctcaagaaacaattctgcaaccattgcagtgcaatttaataaaacatattttttattattcacaatgaagtcaataaaagattttgtaataaaaaaagagcacacacacggtgttttatttttggaacagactttcttcccaaaaacaagagatatcatatatcta

SEQ ID NO: 107541 - DNA, 211 bp, Glycine max
tcacatttcatatgcaaatcctaaatcttacattttaatatataattgcttaccatgtcatttatttttttatttatttttgggtaaagaaatgggagcaaatatccaaggattgtagggaaaatgcaatagatacctgaattgggcaaattgaaggtagtgatatggagtttcgagcttccacctcgggataaactgggaagctgcacac

SEQ ID NO: 107542 - DNA, 198 bp, Glycine max
ttcttgttggcattagaagagaatgcacatatgattagaagtatgactgaaaatgttagttagttgtaagattgattgtgaaggaatgcattaactgtatcccggtgagagtgtgatccttaaattatgagagaaacgactatcatttagtactgatttttgcgtgaatctttgaagtatgaaggccatgtttgattg

SEQ ID NO: 107543 - DNA, 210 bp, Glycine max
tgaaagagctttggtagtcgaagagaagttcaagtccatagccatcaaagtctgaaaagagtatgatgaactaagggatgtcaatatggccaccgctgaagccttggaacgagaaaccaagaaggcccaaaaggaagaacacgaccaaagcaaagttttgaggggctttatagggcaccaatagtgagctcaagctccgaagaggtgaaa

SEQ ID NO: 107544 - DNA, 205 bp, Glycine max
agcttgatattcttcagacataatccttcaagcaaattggagcagtggtccctttcttgggtcttcctcgagtgtcttccccattttcagtcttgggcctatcattccccagcccatctagcaacaccttgtcctcaaggtggtgagtagctttcaaactggcccaattctcccatgtggtttcgtttggaagtagcacttctca

SEQ ID NO: 107545 - DNA, 219 bp, Glycine max
tcttagtctcacctgatgaattcgtggctacttcatgcactcctctaatgacaataacatcacttctggcactaaattgttgggagtttgaagccatcttctcaattaaatttctggcttcaacaagggtcatgtctccaagggctccaccactggcaacatctatcatacttctctccatgttgctgagtccttcataaaaatattggaggagaagct

SEQ ID NO: 107546 - DNA, 205 bp, Glycine max
agctttcttctacatcagtggtagttgaagtttggcaattgttagtcggtgaaaacgactaacttttgtgtataaaacttgtgtattttgtatcaaaattctccaagctatagttgttttataatattataagtactttatgttaaatataggtaatagataatttatactttgttttgtgtgtttaataatcaatttctctcaa

SEQ ID NO: 107547 - DNA, 219 bp, Glycine max
ttttgaaatcaaatttctttattggtaatcgattacaggaaactggtaatcgattaccagagagtaaatactctggtaacttagagaaatttgagaaaactcttttgtaaaacaaaactgtgctatgtttggtttttgaaaaatccttttcaatacttcccttgtgaagtcttgacttgttgcttcttgatttcttctcttgaatcttgaattcatctt

SEQ ID NO: 107548 - DNA, 161 bp, Glycine max
  unsure (1)..(161): unsure at all n locations
gagtngatctgtgggcatgcattctttttcttttagctttgcattcatccatggcacccaccacttctatgagaacatgcttaggaatctttcttctttatcccctcttcctttgggtgcgactagtgacttcaaagacttgccctcatttcatggcacgt

SEQ ID NO: 107549 - DNA, 203 bp, Glycine max
ttcttgcatttggaattgcgaaagccccactccatcattaggattagtacctgacatctcaaacaaacaaatcaaacgtaacaagacaattatagttgctgtttgaatacctcacccactcaagtgtatcacacaattatggcttttctctaatgaaacactcttgccttttaccactctaattccccttgagttcttaggca

SEQ ID NO: 107550 - DNA, 220 bp, Glycine max
tcggttttcattttcgagtgtctcgatatattacgagacttaatcagacatccgagtaaaaagttattgtcgtttgaatttgctcagagcttccgtattaaatttcgagcgtctcgatatattacgggactcaatcagacatccgagtaaaaagttattgtcgtttgaatttgctcagagcatcaagattctatttcgagcgtctcgatatattacggga

SEQ ID NO: 107551 - DNA, 224 bp, Glycine max
gaaccctagaagcgagcctgcatttttttttttaaccttatgggtggcctttttacataataaatcaaccgcttccaacaatttgagccaagcccctaccttagaggggcagctccctcctcatgccgactatcctctgcaagaagatgatgaaagaaatgcccattcaagccctttaataacctaaaagagaacaacttctaaaatataaatataactataaa

SEQ ID NO: 107552 - DNA, 205 bp, Glycine max
tctttcttcttgcacgactgaacaatagtattcggctaataggcaggtaaagtcttatgatttttatttttttttgcatttattatttatttagtgtttgatgtttgttactctaattttgcttttctcgtggttgatttacagacctcatggacagcattcagtggttctggcagaagatgctcccacacaaatgcaaaaggga

SEQ ID NO: 107553 - DNA, 215 bp, Glycine max
  unsure (1)..(215): unsure at all n locations
ttgtatggtctttactcgntatattctctaacaaaaacatttaacactcatctcatgccaactagatgactcataacagctcatctcccgcagaaacactgtcagactcgggttgcgaagaagttgctgtggtgtcagaggtggcatcatcaacactcaagttggagaattcgccgccaatagaggaactttcatcttcaccacataccgaaggg

SEQ ID NO: 107554 - DNA, 203 bp, Glycine max
ttcttcctcgtggcttctttgagaagctagatccttatctacccacacccctctattaactaaattaacctccttgaaaataattacggataaaaataacgcaacaaatataatcaaacatcaaacataattactaataatatgtagatatatatatcagggtgttacacactgagcgcgagaagagacaacgtccttgctgg

SEQ ID NO: 107555 - DNA, 214 bp, Glycine max
taacaatccttttgatctattatggaatatttctatctctatcacatagcttacctcacccatatctttcacttcaaagtttctagagagaaatttcttagtctcatgaagaagaccaagatcgttagttgcaagcaagatatcatcaatatacagaattagaaaaataaccttactcccactgaccttcagatacatacatcgataaacagta

SEQ ID NO: 107556 - DNA, 201 bp, Glycine max
tcattcttctagccaaatggacttaccttgaattaattcctttgatagcccttttgagccttgtttccctttccttgttttgaagctcactacaagccttaagtgaaaaaccatgatattaccatatccttaaggaattttggagctttggaattgttttgggaataagtgtggggggtttttgtttcattggacaacttg

SEQ ID NO: 107557 - DNA, 213 bp, Glycine max
tttttttgatggttgatgggttctgtcgcgcaaaatggcatgatcactggctgacatattctcaattagctcaattgcttcttccggggtcttcagctttattttttcccctgcaaaagcatctagtagttgcttggtttgtggtctcagcccatctatgaacatattcaattgcattggcttggaaaacccatgggtaggagttcttcttaa

SEQ ID NO: 107558 - DNA, 201 bp, Glycine max
tattcttatccctagaggggatggaccttttcaggttttggagaggagcctataggttggacctcccggaagagtatggagtcagcaccacttttaacatttctgatttaattccttttgcaggtggagttaatattgaggaggaggaactaacagatttgaggtcaaatcctcttcaaggggaaggggatgatgcaatcc

SEQ ID NO: 107559 - DNA, 213 bp, Glycine max
ttattagcgctggtctgggggacgaaggtcaagtggtcgcgatatacgaagatgatgttccgagtacattggatttggtacgaccatgccctcctgatttctagctgggaaattggcgagtggagtgtcataccctaatttcgtccggggacctttgcttgatgacatgcgacctttctttggtccttgtgaggtgcttggcacccatcatta

SEQ ID NO: 107560 - DNA, 205 bp, Glycine max
ttctattttttatgaattcaaaggaaaaatatattgagtcacgtcccactaagtgtctcgcaatgatgtgttgtaagaagtgtggatcacccaaacagtaactatgaaaataaataaaacgtctttatttaattttatttttttattaagtaaaacaacatcttgttttaaccgaccaaggattcgaacatgtggatgaaaaaaa

SEQ ID NO: 107561 - DNA, 233 bp, Glycine max
gacacttaaaactaagcttcttattgtttggttttatatataaaaacaaggggcattactcataagtcttaaaagggtaagtccatctcaaattggccataccaaataggcaatagctcttagtattaccaactcaaagatagccccctagactattatattcatccactgaagcacacagctattgctttcaaaaggcaaatgtggggcaagagaaaaaggagaattacctg

SEQ ID NO: 107562 - DNA, 202 bp, Glycine max
tttcttgaagaaatgtcttcaaccttcatcaataagttattgtcttttacaacttgaaccatggacaaaattgagcctaaagttgcagatgacggtctgcctaaacaacttgatatgtgcagtaatttgaagactgcatgagctacaagggttcatttgagattatattattgtctatggaaagacaagagaaatatatatg

SEQ ID NO: 107563 - DNA, 211 bp, Glycine max
tgagtttcttgttgctgccccacaaagctccatggaatttgtctcggccatgcttttccttgcgagccctcttggtttcttgttcaagggctcttgcggtagctgcattttcttctcgtaactcggcactcgcttttcggacgtctgtagcgactaacttgaatttttctttagcgagtcttgcctttcctagctctatttttagagctcg

SEQ ID NO: 107564 - DNA, 206 bp, Glycine max
attctttccacttgatcccgacaacaatggcggcaacgaagatgaggaagaagcagaaacacgaagaagaagacttcacttgggaagaagaggcagcgcgaagaagaagaagaacgttgaagatgcagaataaagcagtagaatgaagaacaagaatgaagcagaagaagcagaaatgtccgaggaaggaagaagaagaagcaggc

SEQ ID NO: 107565 - DNA, 219 bp, Glycine max
tcacatttttttctctcttaagtcgaccactggccgattcttctacgcaccgcatgatatgcgtcggtcatgtgtttgacagtcattttgttcagatccattgaaaattcatttactcaaataatttcaattattgaatgagttggtttgttcgtctaagttattattgtaatttcacttaacacaagtttatctgaaagatcattgtcccttatcgcc

SEQ ID NO: 107566 - DNA, 216 bp, Glycine max
tgcaggcacgcatttttatttccaatacacagtccactctggagatggatctactttctatacacatctagctcactccacaaaatattgcgaaaaaagaacatgtttctctgcctaatcaaatccaccgtaagaccattcctattatgccatcgagaattcggcaacgaagactcacttataataaatgatttttattagagataggtacgatta

SEQ ID NO: 107567 - DNA, 203 bp, Glycine max
  unsure (1)..(203): unsure at all n locations
tattgttgtatcagggaggcgggggaacttttaaaanngctaattttgaattttgatggttggtttgaagtnnnggaagaggattaatatggttattgttggtctaacacttccacgaantntggannaggaaganagctatgttttgatttggttttatatttttattttggattgtttttttggtttatttagctataatc

SEQ ID NO: 107568 - DNA, 203 bp, Glycine max
atcttcctttaacaactcaagacatcatcattcaatataattatctcatcatcaatataattcatttcatcaacaataagagcatagatcaatcaaatcatataattatgcaccactataccattataacaactttctacttcatgtttaagattatcaaaacatctcataagttttgaattactatcttctcccttttctat

SEQ ID NO: 107569 - DNA, 220 bp, Glycine max
taataaatctatatatgttttattaccagcctcccatcagtggtaccataagttttatgggataatttcttcatttggttttgatgaaaatcccatggatcaatgcatataccacaaggtcagtgggagtaaaatatgttttctttttgtatatgtagatgatattttacttacagccaatgatcgggatttgctacatgaggcgaaacaatttctctct

SEQ ID NO: 107570 - DNA, 203 bp, Glycine max
attcttatcttataaaattgaggccaaaaaggttattgaatgaagaacatgaactaattagacagcaaaagctacagtacctaaactgggagcagcaggacaaacaattagtgtctttggcttgtagcatcaatggcatcgagtcttcacacaaaagcatgggtatcaaacaaatgaagttaatatgatgtgctctgtaaaag

SEQ ID NO: 107571 - DNA, 199 bp, Glycine max
tcacacgggggccacggcgggggacaggcgaatgagcaccaatagacttccacattcacaatgcgcgcctaaaattacgatctgctgttgctctcctcacatatgtcagcacggcctcgcaaatacaccatatgatgattgatctaaaagagggatccgcatctctcctccctagactccacaacatccaagaaaaaca

SEQ ID NO: 107572 - DNA, 203 bp, Glycine max
ttcttttattgccaagtacaagaaacgtgtttcagaatctgcactctatcaacttgatcccgctgctgaaaatgcataatatgaaaccatgtgtatatttgtttatgtatctagattgtaatttatgcattaatattgcttctaccttgtaataatggaaattatgttaataaataacgatgatatatgattactttattgta

SEQ ID NO: 107573 - DNA, 222 bp, Glycine max
tgttcgcacatttttcgtttgttttacatccactccacaaggtttgaagtagaggagaccttcaatcctattacgcaacgtggcggacaaaagtgggcagttaacttgaatgttcattattgtcaatgcggaaggtattctgcgcttcactatccatgttcacatattattgcagcttgtggttacgtgagcctgaactactaccaatacatagatattgtt

SEQ ID NO: 107574 - DNA, 205 bp, Glycine max
tcattcttcttatccaaggctcatcttggtggtgaagctccttcttccatggcttattccctagtggatggcgcctcctctcacctcttctcctttgtcttctgctgcatcttcatggtggaaaatcaccattaaaggacctcattgaagcttaaagatccagcctccatagaagccccacaagcaagcttccatcaatagcttc

SEQ ID NO: 107575 - DNA, 214 bp, Glycine max
  unsure (1)..(214): unsure at all n locations
tctttggctttttgaggatggagaggtgcgagtgaggaagcaagtggagttggatatttccattggaaagtacaatgataaggtgctttgtgatgttgntcctatggaggccagccacttactcttggggagaccatggcaatttgataagagggctaatcatgatggtttcaccaacaagatctctttcacgtatcaaggcaaaaagatagtg

SEQ ID NO: 107576 - DNA, 202 bp, Glycine max
tcattcttgaaggcaaactggatgcgttggtcaacttgctaacccagctggccttgaatcaaaaatctgtacctgtcgcaagggtttgtggtttgtgctcctctgctgaccaccatacagacctttgcccttccatgcagcaacctggagcaattgagcagcctgaagcttatgctgcaaatatttacaatagacctcctca

SEQ ID NO: 107577 - DNA, 216 bp, Glycine max
tgatgattcatcttttctcctgtggcgacaacaagtcaaaccagttatcaagtcccattgacttcagcaattcgtcacaaatccacagattccgctctgcttcctctctaaagatgattgtgagctggcattgagaatccagcttatgaaagttggagcaacaggatctagtgctcctcacatcgcttcaatcgactctctctacgtcgattttat

SEQ ID NO: 107578 - DNA, 203 bp, Glycine max
ttcttactttgaggacaaggaaaaatttccaatgatcatcttcgcctcccttgctactgagcaagatgagaagttgttgctagttctcaagaagcacaagaaagccattggatggactttagcagacattcctggtattagctcctcaccatccatattggtaagcaccagggctcctccggaaaaagcccttttcacaacga

SEQ ID NO: 107579 - DNA, 216 bp, Glycine max
tcttcaatagttttttgtttagaaatttttgccttaagagtttctcctatgacttgtaagacccacaatattcatgggaaaagaggtgttgcccctaaaaagtgcattgatttttactaatcaaagaaaagaggtgttgacccacaatatatatatatatatatatctatgaaaagaaaaagtgcaacgtgcatcaccaaaccaaatgtgcaagtt

SEQ ID NO: 107580 - DNA, 201 bp, Glycine max
ttcttcaagctcatgagttggttcacttcggaaccaaattcatcaggaagctcattaaacacatcacggcaaaatccagagatcatagcagccattgccttttcatagtctattcccctttgttgaaaataaaacaattgatcttctccaattttggatgtactagcttcatgttcaattcttgcggttggatttttcacc

SEQ ID NO: 107581 - DNA, 212 bp, Glycine max
tattatttatttatgctatatatatcaacactcctatcacaccatatataaatagttaaactgtcttatctttgtgatcattaatcttatgaggaaaaaaatgcattttgttaattaagtttcaatatgcatatatccatcaccataattggaagaagaaattagtggcaacttgtcttttaaatctttattcttgttgaatgaaatatatt

SEQ ID NO: 107582 - DNA, 197 bp, Glycine max
ttcttgtgactcttggcactgtctttcaaaaactatcctctcattaactgtgactttcgaaaaaatcatcacaaacccttctactgaacaagcgggatttttggaaaggtttttggtgaaacccgtcactactaatctattaccattgaggggacaccaatgacgcatcagtccatgtgactcttcgttaaaaatcg

SEQ ID NO: 107583 - DNA, 204 bp, Glycine max
ttctgtatgttttgggtccgacacctggttcttacggccttaactgcgcactacaagtttgaatatctctttgtttactttaattctaacttgaacgcaacacatgtgggctatccgctccgggacaaaaataactgatatggagttgatgattgtttatattattgtagaggtggtgactttatgcgatatctttatgcggga

SEQ ID NO: 107584 - DNA, 203 bp, Glycine max
atctttgatgaattaaccaattattaatttcagtaatcaattctagaagacaattttagaaggaaggaggctttatagcttgagataattgattaacatgtactgtaatccattagattacttttggaaacttaaggtgctccttgtgtgatgaataatcaataccacaattgctaatcaattattccaaaaagcatgagaaa

SEQ ID NO: 107585 - DNA, 220 bp, Glycine max
tcttatccaatgctcattcttggtggtgaagctccttcttctatggcttattccctagtggatggtgactcccctctcctcttctcctttgccttccgctgcatctccatggtggaaaatcacccttgaaggacctcattgaagatcaaagatccaacctccatagaagctccacaagcaagcttccatcaagtggtatcagagcacaaaagcttcaagt

SEQ ID NO: 107586 - DNA, 204 bp, Glycine max
agtctttgccaccactaatggtgtcattctgtcgcatagcaacttcaagttgtttgcctatggtttcaagtacaactccgcattatcgcaaccttagatgagccaaagtgtaagtataagaatgatctcacggtgttttcttaacttgtttatgttttcttatttcacaattgactaaatgtttgtttgttgttgtggatgttg

SEQ ID NO: 107587 - DNA, 238 bp, Glycine max
  unsure (1)..(238): unsure at all n locations
acctatnactactaagctttatcaatttatccttttatggttatccccaatggaaaagccataaatttttttgcaagaaaatggaagaacagaagtgaaaagaggaagaagaatgaagaacaattgagagaaaaaaaaaagagtttaatcctaaagcttgcacaacaagtaactaagtctattttttacaaaataaactaactaactaactaacactaatatatagagtgactacttg

SEQ ID NO: 107588 - DNA, 202 bp, Glycine max
ttcttctctggaatttaatttttggaattgggctaagcgcatagactcactaagagcacaaacctctatggaatttaattctttcgatttgcgctaagcgtggccatcactgcaattaaggagcattctattcactaagcgcccctcggcccgctaagcgagagttgcaagaccaatcagagctatagaatgcactaagcgc

SEQ ID NO: 107589 - DNA, 202 bp, Glycine max
tgctttgaagttaggtaggtattgggcatacatatgttattgaagctctggcaagaggtttttcactagataagggactgcccacctcagaatttggccacgagtttacgactttggatcataagggactcccatcttttattaaagcaatggtctacgactccgctgcttgcttatgataggataagagagctcctttgtt

SEQ ID NO: 107590 - DNA, 220 bp, Glycine max
tgatttgtgagttgatttttttcttagattcattttggttattagtcaattcattcaaggaaattttcaaagaaaaacgtccgattgattttttggattattttattcaaagatattatgattatttttttcaacatattttgattattttattattattttgccttttttgatttaaccgaggttacaatgtgaacaatcagttagattttgctttaac

SEQ ID NO: 107591 - DNA, 213 bp, Glycine max
ctgcatgcatgcttctttttataagctgaaccattttatgaataaagacaagttgagttttattcagaaaattagagtttatctcttttatcttaatgagagtgattcttctaaattctcgagtgattaaagaacaccctggctgtatcaaaggactttcacaacctttgtgtgttgccctcgccggaaagagtgattctttccttcctttca

SEQ ID NO: 107592 - DNA, 255 bp, Glycine max
gagctctccgttgttcaatttcgagtgcctgtatattgatgcgcctgaatcggacatccgagtgaaaagttatgaccatttgaatttctcgagagcttcctatgtttaattttgagcgtctcgatatattatacgcctgaatcgaacctcagtgtgaaaagttatgaccatttgaatttctttagagcatccgttgttcattttcgagcgtctctatatgtgatgcaccttaatcggacctccgtgtgaaaagtt

SEQ ID NO: 107593 - DNA, 202 bp, Glycine max
ttctttatatgatgaagtgtcgaagggcgaaacttcctgcttttattgctgaccacatagaggcacctggaaatatgtcgcgggggtcaagagacctgggggacgtcatgtggggtgctattgcccaaaaccaagcttgaccaattccgacccaccccgggcataatcggtcagtgagaacctgtgatagtacctaaacagg

SEQ ID NO: 107594 - DNA, 213 bp, Glycine max
tctttagagttttatactaccctagagttctccaagacgttctagaaaatgttacacttttccaaaaagctccagaattttctagaacctctccaattaaggaaggatcccaacaaaagatggatgatggcttctaatggaaactattccgtattaacacagtgatcaagaaaaaagaaaacagagggatagaaataaacaaagagtgtgaat

SEQ ID NO: 107595 - DNA, 202 bp, Glycine max
tcattcttgaactgaatgaccaagacaaaatgttgtgtatttcaatccatgaacctgtggccgctgaaaagcctattctaacaaactctggcaacacgtccctcaagtcaatgacataccaaagactagaattgccattaaaagttggattattagcataagtaaggaacacagagatttttggttgtagagttgtaccata

SEQ ID NO: 107596 - DNA, 215 bp, Glycine max
ttgttgattttgtcttcgccagtgaaaggatcgatgtgggtccgaaaagaggcaaatttgatcatcctactaggacgactgagaaaactggggcaaatgaagagggtgagaaagagggagaaacccatgctgtgactgccattcctatacggccaagtttcccaccaaacccaacaatgtcattactcagtcaataacaaacctcctccttaccc

SEQ ID NO: 107597 - DNA, 199 bp, Glycine max
ttcttgtatggtcgctcagatcttgactagatataactttctaaataaaatgagttgatcccatatttctactccaaagttagtgcgaatcaaatcacttttgcattttatctctagcatacattcattattctttacctactcctcacgtttgggttttttttaggaaaaacaccataactaaacgcgccacaaggca

SEQ ID NO: 107598 - DNA, 215 bp, Glycine max
tagcctcaaattttcgaaaaatgggctcccacatcattaaccttctcgggttagctccaatgggcatcccaagataggtaaaaggaagctgcagaggtccacaattaaggagctcagctgcagatcgactccattgctgagattggccaatagccccaaattggctcttggcaaagttaattctaaggccagataccatctcgtagcttctgagc

SEQ ID NO: 107599 - DNA, 203 bp, Glycine max
tttctttgcctcatctatatatttgttcaacatattccatttacacgcacttgcttagatggaatatatacactagttgataaaatattgtgaaaacatattagtaatatttattcatatttgacaatattttttaaatgttgccaaaaaattttaacaacaattttactaagtgttagacaaaaaaatgttgctaaagatca

SEQ ID NO: 107600 - DNA, 218 bp, Glycine max
taaggaaatatttcataagaaagataactaagagtcagtcgggggatcgaagaaacgcctgatgaagctcatatcatctcaaagcctaatgatatgagtatccatcccatcaaagcgagtatccatcacatcaaaatgttcacccacaaatgctcgaagatcgtggagctctgtgaggacttcaatcagcagagaagaagaagtatccctttgtggtg

SEQ ID NO: 107601 - DNA, 202 bp, Glycine max
tttctttcttaaattttagttgctctgttctaggattgatcctacaactttttttgttttagtttttttaaaatgtgattattttattttttgtcctaaaagtgttttagatagtacttttttcattgtttaacacactttttctttttcttattggtcaaaaaacactttaacaatgaaaaataaacacaatcatattttg

SEQ ID NO: 107602 - DNA, 211 bp, Glycine max
tttcactttacctgtcatatataataactgtgtcagctgttgttaggtttattcccaatcccccagctctagtagaaagaatgaaacaaaatcttgaagaatttttagcattaaaccgatctattcgtacttgtctttcagctcctccaaccttgccatctatcctctcatactgccaatgctaatgtttaaaaaaaaatgaaagcaaatt

SEQ ID NO: 107603 - DNA, 204 bp, Glycine max
atcttttctaaagaagaagaagaaagcatagcgtatcaataaccccattaaaggctcgcactctgagcaggaggaggctctggcaccacataatcaaccacgaccacactctcgatttgatccctaaccttatccttctggtaattcaccaactcctcgtgcgaatccactgcctataactccctcggccccgggaaaaccgcg

SEQ ID NO: 107604 - DNA, 220 bp, Glycine max
  unsure (1)..(220): unsure at all n locations
ngaacgnttttttttacttttttttagagacaacggatgttaacaattaaaaaataaataaaagcgttctgcatgacatattttgggatttaaaatattgcttgtgaacaaattttgttgcattttccttatattttgttctcaagcaataattatttgtgtaaccaagttgttgatatgatttaggtttaattactcatttagtttttatagtttccaa

SEQ ID NO: 107605 - DNA, 204 bp, Glycine max
agcttaccatttgattcagcacataagcctgttgatttgctgatgacagacacacatcaagagtgacatcatattggtctatatagttgctaaccttagtaaacaccagtccatttatttttgcacaaacgtcactaagattaccttgtattgtttgtctcctaattgtgaaatagttgcagactctggtgaaaagattataag

SEQ ID NO: 107606 - DNA, 220 bp, Glycine max
tcaatggagcttatcatcatgtggtatcaagagcatcttcatctaggagatgttcttttgcttcctctatctttttgttcggtgaattctctttaattccttgttcttcatcttattctccttgtatatcctccattgtcttgtggtttggttctgtttagagtatattcaaaaaaataaaccgattaaatcttagatctacacttgttcttgcatttct

SEQ ID NO: 107607 - DNA, 187 bp, Glycine max
caacgcgcagccggcggagaaaccgcagacggacgggaacaagaaagagggggggacgaaggacgcggagaagcaaagagaaggggagaaagaagaggcccagagccggacgagggagaagagggcgccgaaacatcaccctggggaaacaaaggaggaggagaagcggactaaacatacttatcag

SEQ ID NO: 107608 - DNA, 209 bp, Glycine max
tttttatttttagccaacggggaagcgcgcttacatacccaccccccttctatttcgatcttcaaatctagattctcctttgcggatataactcccaagtccgagggaagctcgtgctatgtaaagacctcagactcatattacattttatcccaaagaaaagaaactgccaaggtgcagttttgagggtgaaaccactcttaattttg

SEQ ID NO: 107609 - DNA, 204 bp, Glycine max
ttcttctctcaaagtaaaatcaatccatgcacttaattcttatagaagcttctataaaagttaaggtgcataagttgattttagcttacgggagaagctcaatttatttcacattcttattttttttctcctataaatggttatgaaaaagtttatccaaacagggccaatagaaaaagaaaaatacattattcagaagagaca

SEQ ID NO: 107610 - DNA, 245 bp, Glycine max
gattctagagacacctcaagcttgctaacccatggaagctttttttatctcccacactttatggggtgggccatacttggatggccttgattttctcagggtccacttggaccccatttctaccaactacaaaccctaaaaaaactatattatctacaaaaaattatgcttctctattttggcatagagagtgtttttcctaaggactgaaagaacttgccttagatgtcctaagtgatcatcta

SEQ ID NO: 107611 - DNA, 205 bp, Glycine max
tttttcttattacaactcaatattctttgtcctatcaagctactgctgactctatacaaatcaaacaaaattgttgttttttttttttgcacaatgactaacttttaattgtcatatagacgaatatacaatatcaacacttagtactttctctcaaggggttcaaggtgttttgagagtttttttttagaactatacataatat

SEQ ID NO: 107612 - DNA, 215 bp, Glycine max
tgcattttgatttgcgaaagccccactccatcattaggattagtacctgacatctcaaacaaacaaatcaaacgtaacaagacaattatagttgctgtttgaatacctcacccactcaagtgtatcacacaattatggcttttctctaatgaaacactcttgccttttaccactctaattccccttgagttcttaggcaattcaagagattatgg

SEQ ID NO: 107613 - DNA, 202 bp, Glycine max
tttcttattgtggtataatattaacattgatgatgttgttcatatttctgataatgaagccgattgtggtgaagttatctgtgaccatgagggacaatatgtgttggggttcaaggtggatcgtggaaagatttcagtggttaatgttgaactgtggggtgtttttcatggcgccaggctcgctttagacaaaggaatgaac

SEQ ID NO: 107614 - DNA, 214 bp, Glycine max
ttgtttatacttccaaaagaaagtaaagatgaaaatgcaagataaaataaagaagaaaatagaacagaaaaacctgaaaagggatcctcttgcattgataaatctgaagtacaccatacatcctttggctttttaggcctgctaggccctaactaggggattagccactcatggtcatgaggggctttacaatgagagggggtgaaagaaagaa

SEQ ID NO: 107615 - DNA, 203 bp, Glycine max
tcttgctttgcataatgagaatctgtccctcaaacaaactctgcaacttagcatctgaagtctgggagctttgagcagatggggttgttgatactggcgaagagggaacaccagctgctctggacctggttttccttgcccttggaaaattaactatttggtcattcacattccaacatttccttttaatataggccaagata

SEQ ID NO: 107616 - DNA, 216 bp, Glycine max
tcgttctaagtttgagatcagtgcactaagcgcagcaggtgccttcagccaggctaagctcgagactggcgctaagcccaatttcacatagtcgcgctaagcgcgagggtcgtgctaagcgcagtgtcacgatttcagagcttatttaaagcctgtattgtgtaaggaactatcattctctgcttttaatctcatttattgttagggtttcttagt

SEQ ID NO: 107617 - DNA, 201 bp, Glycine max
atctttgtgtcttttgtctttgaatttataatacaaggatctttcttcatctgttcctggtctctacccattctcattcatttgcatgtttatttcttttctgaaacggcagattcgatgacgagtcccccgaaggtactaatacctgggacccgtctatcaacttcgagcaagaaatgaaccaaacggaagatgaaggag

SEQ ID NO: 107618 - DNA, 215 bp, Glycine max
tgttggagtgtttatttccattttttgagagcagtgtcaggtagtccacccttctttttcatggagaaatgtcttttcaaggtcttgagtttggttctccacttgagctcttttcaatgtgctctgcttgagcatttaaatgtagtcctctctcagcttctccctaatagttgagctatggtcaaggccttcgaggtcttgtgcctcttctttaa

SEQ ID NO: 107619 - DNA, 202 bp, Glycine max
tttttttttgagggtgcgtagcccaccatcttttcatagtagagtatcgataatgtgtttaccatcacgattatcgtctccctttccatcattgggggtaccacctgggccaccagatccctccaccttttgggcgtgttctttgaaagatccgtccccctttttgcacatgttctatagttgcatcctatccgaaaccata

SEQ ID NO: 107620 - DNA, 214 bp, Glycine max
ttattaatgagtagtggaaacttaggagctcatatacaaatcttgaaaatttagaaaactaaggagctcatatacaccattctaactggaaatccaatcccagtgtcagtctaattgggacccagaatttgcaacaaagactaaattccaatgtatacaaacaattcttctcaaccaactaactaacacgcaatggagagcaacaccattcaac

SEQ ID NO: 107621 - DNA, 200 bp, Glycine max
ttcttaacaaaaagcttaacaaacttagaaatcaagtgatcatgaattccgaaatatagggcgagtaaacgaatgcacattttatctatatacaattgtttgttgcttgcttgaatcttgatttcaggtattgtattgtcatcatcaaaaagggggagattgtagatgcaattgcctttgatgttttgatgatgaacatg

SEQ ID NO: 107622 - DNA, 211 bp, Glycine max
tcaacatcagtccacttccagggtgctggaactacttcacatggacttgatggggcctatgcaagttgaaagccttggaggaaagaggtatgcctatgttgttgtggatgatttttctagatttacctgggtcaactttatcagagagaaaacagacacctttgaagtattcaaagagttgagtctaagacttcaaagagaaaaagactgt

SEQ ID NO: 107623 - DNA, 204 bp, Glycine max
ttgtattcttgtgctaatcaaatcactcctgcattatatctctagcatgcattctttctttctttaccccctactcacgtttggtttttttagggaaaaacaccataactaaacgcgccacaaggaatccctattgtaccagatccaaatctaaaacgatgggtgatcaagaggagacacaggaacagatgaaagccgacatgt

SEQ ID NO: 107624 - DNA, 213 bp, Glycine max
tataatttcatatttgccttaatcatttccaaatatgcatgtgaattatgacgcatcaacaagaatcaagccaaggctattgtgcaagcaatcaatggggcaaaacacaccaaaagattataatgatggatggctcaaattctcacaaaggtaaaatcatcactttcaaattgagctttcaaaactatcatgacatgtagagaagaatcaagg

SEQ ID NO: 107625 - DNA, 204 bp, Glycine max
atcttttcgattcattctatgtacccgtagtggtccacattgtgttccgagcatttttattctcgttttgtttactttttataccccctcttgacgtgcttaagccgttttacttgagtcatttctcgcttaacttaaaaataaaataaatttccaccgaacgtttgaattatattatccgttaacttcggttaaaatcaattc

SEQ ID NO: 107626 - DNA, 220 bp, Glycine max
tttaaaatcattctttgctcctgttaatcgattacaggaaactggtaatcgattaccagagagtaaaaactctggtaacttagaaaattttgagaaaaactttttttgtaaaacaaaactgtgctatgtttggtttttgaaaaattattttcaatacttcccttgtgaaatcatcttctcttgaatcttgattcttcttgatgttattacttgaatcttg

SEQ ID NO: 107627 - DNA, 203 bp, Glycine max
ttcttaacatacgtgatgtattgggacactttgttggcttgaaagtcccaaaggatttaatgatgccctatccaggggtgttggtcaactttgtaggagcggagatagaggttcgagattgtgttgatctggaaacaaatttcagtgataaaggagccaaaactctgtatatggtcgttaacgccccttccacctacaacatc

SEQ ID NO: 107628 - DNA, 219 bp, Glycine max
tgataggattttttatatttgtatgacttatgataaatctttggatttgattgcataggctgtgatatctggtattagacaagaaaaatttgttcctgtggtaattcttttctttgctggcctggactctatgatacttgcaacgttattggattaatgtctgaatcttagttgtgagtgatttcaaattaacttaatttacctactcctatgctcagt

SEQ ID NO: 107629 - DNA, 201 bp, Glycine max
ttcttgttatgaggaagtgtcgaagggtgaaacttcctgcttttattgttgaccacagagtggtacctggagatatgtcgcgggggtcaggagaccttggggacgtcaggtggggtgctattgcccaaaaccaaacttgaccaatcccgacccaacccgggcatattcggtcagtgagaacctgtgatgtacctaagcagg

SEQ ID NO: 107630 - DNA, 184 bp, Glycine max
ggtggaacaagcttcaaatggatagaacaagaaatgaagagccaatggttgatacatggacggcaatgaaaaagatcatgaggaagcgggatgtgccggctagttactcatgggacttgaaatatcaagctcccaaaactaacccaaggcaacaatggggtagaggagtctttcaaagaaatgg

SEQ ID NO: 107631 - DNA, 203 bp, Glycine max
ttctttctttaacattaatatataacgtgggccataaagaccattacatggttgcagggcatgttaccatatgtaaggggaccacacattaacacctgttggactctgacatgatcatacggactagctttcaatccaataaaagatacaccgaacccatcttccatcatagtgaggcctcccacacacaactgagagcaaca

SEQ ID NO: 107632 - DNA, 223 bp, Glycine max
tgcgaacactttttttgtgtctctttgcaaggatacgtatttctggctcatgtcctgaaagggggtttttcacgtcgatctacatgcaaaatccgactttgctttgatacatgtaactttatccttccctctcctttattgatactttgagcctaagcagctatggcttaagcttttctataaaaatatgatatacattgtgaatatacgttctactgaaaat

SEQ ID NO: 107633 - DNA, 201 bp, Glycine max
ttcttacccttatggtttgcctccggacttcactcctcgtaccgctccagacgatttgagccaagcccctaccttcgaggggcagctccctcctcatgccgactatcctctgcaagaagatgatgaaggagatgcccatttaggccctctacttcccctcaaggatccgaccccccatgagttaccccaaccaaacatagt

SEQ ID NO: 107634 - DNA, 215 bp, Glycine max
tgtttctatataagtttaggctttatgaaatgaaataatcatatatcacatattgtaatcgattatagtgtttctaaaattattagcttgctctttgtgtatcaaattaaacaattaccaatcattgtaattgattactttaggtcacagagccaagaggagctctttatcaaccgtgataatcgattaccacatagtgtaattgattaccaaaa

SEQ ID NO: 107635 - DNA, 204 bp, Glycine max
ttttcttggtgcatatgatctatatgctctagcttgagggggagtgttgaatattcttgtagtttacccatttgtagtaacttagtaggtagctttttcagagggcaacagtgcattgtcactgtcatagcctatctctctctcttctctccctatcttttgtactctatatatatgtactattttgaattcaataaagtaagg

SEQ ID NO: 107636 - DNA, 213 bp, Glycine max
tcttattcctttgtcaaaggtctcccattgggttgctacagagacagctttaccaatgggggtaaaaggattggagttctttgccttcagagaatctagtgtatctacaaagttctgcactcgacgcacctgttgacgggtgaaaaagctgatgttcaggccttcaaagataatttgaaaagataatacaactatgaatgattatcaaaatgg

SEQ ID NO: 107637 - DNA, 201 bp, Glycine max
tttcttgttaaccaaatgttcaccactattagaggagaaaccttcacgttgtttcatataaacctcctcgtctaaatcaccattaagaaaagttgttttcacatccatttgttgcaactcaaggtcaaaatgagcaactaatgccaatattatacgaagagaatctttcttagatgcgggaaaaaagtctctttgtaatct

SEQ ID NO: 107638 - DNA, 214 bp, Glycine max
ttttctatagttggttcatgacaaagatatcagaaagtattaagaacgattcattttgcccctgttcggaaccagttcacctaaatttaaggtgtagggcgcaggcttcgaaatgggttattatttgtaacagacacataacatattgtcaaaacatgattcaggttcaagtattgtgttgcatttcaaacacatgtagagaacaaagagagaa

SEQ ID NO: 107639 - DNA, 204 bp, Glycine max
tctttcttgtgcaaacataaattttttgtctgttgcctgattttatattgcaaaagctaatcttatacatgttcttttggctttagcctgcaaagtggttttcatgtgacatacttattcacatgcaatgaaaggctaattttttattgaatggaatcatatgtcatattaagttatctgtccttcctactgtggcttatattg

SEQ ID NO: 107640 - DNA, 215 bp, Glycine max
tcttctaaactaaaactagttcataaactaaaactagtttatgcataggttaaaaattagcttttggagaagtaatatgagaaagcttctactcattagcttatggagaagctttttctttttaattttcttctcctattagtgcttatagaaaagcttatccaaacaaggtccactatatattctgcaatctggtactgtgccatatatatgga

SEQ ID NO: 107641 - DNA, 202 bp, Glycine max
ttcttttagccaaaattctgactcaccataaaccttgacccagggtgagaatgtcaattcttaccctcggaagcaaaaaaagaggggagagggaaaatttccaatcaaagaggaagcaaaaaaggagagaaggaaaatttccaatcaaaggaaaaaaagagaggaaagggaattcccaatcaaagagtgggagaaagcaaaa

SEQ ID NO: 107642 - DNA, 216 bp, Glycine max
tcttttctttatacaagaatgaagctctgataccacttgtcagacaagtggcctcagatatcttaagaagggggttgaattaagatattgcaaactatttccccaattaaaattctatttcactttcaatgcaagttataaattcccttaaaaatgaactcttaaataatgattcaaatagaacaatctgaatataaatataacgcaataataaat

SEQ ID NO: 107643 - DNA, 200 bp, Glycine max
ttcttgacgaggaagccatcttgcggagctttggatgagattttgagtgattgtgaggtttctagaggtggaggagacatccccactacttgtacttcttcagtctttcattttctcttttcggagttgtaaaagaagcttccctgctatggagagctaaatcctcagttggttcttcctatggggtacttgatgtaaat

SEQ ID NO: 107644 - DNA, 213 bp, Glycine max
tcctttacattttagagaagagaaagatgaaggattgaagaaatacaagtagtggggatgtttcctccacctctaggacctcacactcactcacaaacacatctcaagctctcaggacaacttcctcttcaagctccggtctctgcaggtccttgcacaacaaaatctctcaaactctctggaacttggacctttctggctctagaaatctct

SEQ ID NO: 107645 - DNA, 199 bp, Glycine max
ttcttgcattgtaacaccaaaatctatattagttaaataatagcgagaccaaccttgtaacaccaaaatcgatattagttaaataatagtgagtggggtgtaataagaatgtgtttgattgagacatggaaatataaaaagagaatatgtcaatagatgagaaataatttgaattaaatccaatcttttctctatttct

SEQ ID NO: 107646 - DNA, 211 bp, Glycine max
tggctttactttccaaaatttcttgaaaggtaaaagcacaacccaaaattaaaacttaaatacaagtacctaatatttaatttaacatatacaattggatctacttatttgttaggaaagttgtttatcaacatatgaagttcatactagtttgttgtcatccaagtttggcaaaccttcatttttgcgggttgtcgttgtatgttgtttg

SEQ ID NO: 107647 - DNA, 201 bp, Glycine max
tattcttttgtcactccacccaaatcgtgccttcaagttgaccaaagctaacaccgatgacaaccttgtgaaagttgtgcaccctgaatacaaaggctttttagaatcattttctattttctcatacaaaggtgcatgtgtttgctgaaaactatcttgcccaaggtcacaaatcatgtcttctatacaatgtctgatgtc

SEQ ID NO: 107648 - DNA, 213 bp, Glycine max
tgaagagaaatttgttcaaagtttcactttgtttttttctctctttttcttcttctgtccatgaaacttctctttgtcacttgttgaatgagccccacttaaaaagtttgaattttgaggtgaattatctttctgggtgtttttcaggagagcaagttcttgaagttcttggggtttatgtggaatcctctgtcttgggttatggaggctgct

SEQ ID NO: 107649 - DNA, 384 bp, Glycine max
agcttataagaacaaaattgttttattcttattcaaatcgcacgcgaattagcaagcatcaacaagaatcaagccaaggctattgtgcaagaaataaatggggcaaaacacaccaaacgattatgatgatggatggctcaaattcttacaaagggaaactcatcactttcaaattgagctttcaaaactatcatgacatgtagaggaggatcaaagattttaagtcacaaaatgtcaaaaacttttatttctaaaacaaatacccattatctgaacatattctatgaatccaaaaaaaacaagccaaggcgttcctgcgcccataattgagccaaaatattaaactaaaaattcgacgaaacttaccacatttacaaattaaca

SEQ ID NO: 107650 - DNA, 235 bp, Glycine max
ttagtgatgctttcctaccccacaagggcaatggatggaaaactccaagtagattcggtcagagatccaagggaaggccctaaggttctcatgagccttagggtagatttcgagcccatgggctaagtatgagcccgcttatctttgtaaatattataataggtttttccttcatttgggccttgtattttggtcattctagtagtatagggttttagccttgtatttcgaggca

SEQ ID NO: 107651 - DNA, 364 bp, Glycine max
agcttatacccatcctttatcataactcgagctaccataaagaggtatcaggcaaacgtggttgtattgaaggagactcctctttagcactattcacaatttccaacgcttgaaacgatttttctaatgactcctccattgcttcaacataaggcattgaagatggacaacttactagtatgtcatcctcacctgatactataacaagctgacccccaccacaaatttcaatttcttatgcaaagatgatgggaccactccactataatggatccagggtcaacctaacaaacaactataagcgggaagtatgttcatgacttggaaggtgatttgaaatgtgcatgggccaatctggatcggg

SEQ ID NO: 107652 - DNA, 237 bp, Glycine max
tggagaggatgcttcaatggaggaaaagaaaaagggagagaaagagagaggggggagcatgaaattgaaggaagaaaaaaggagagaagttgaactttgagttgtgtctcacaagactctcattcatcaaagttacaacaagtgttacacatgcttctatttatagacaaggtagcttccttgagaagctttcttgagaaaacttccttgagaagcttctttgagaaaacttccttg

SEQ ID NO: 107653 - DNA, 375 bp, Glycine max
agcttgatgaatggactgtttgctcaagttataaaaaaggcagttgtgttatgacttggtttctgattatcaatttaagatgaatgatgactccttccataactctccaatacctgaaggtggtaatgttaaaggtgatgaattatgtgaatttgataagtatatttcaagggaaaaaaggccataagttctcatactaaaatagagttgggtcattatttagaagatgatgttttacaaagatccactgattttaatattttgtggtggtggaggtcgaatggtctcaagtatccaacatttgacgcaactgcaaaggatatcttagctattcatgtatgaatagtagcttttgaatatgcttttagtactgat

SEQ ID NO: 107654 - DNA, 237 bp, Glycine max
tgtactctgtcagaagatcaatttctataagggtaaaaaagtaatccttaaatatgacgaagatgaagcctttgtgcactttgttaaagcttgtctagggcgtctggttaaacacgaagatgaatcacttgataggaaaatgtcaaaatctgaagaaagcagaatctgagggggagctaagcctatatgttcgaaggaagcacaatctaaggggtagcttctatggtgacttatgtc

SEQ ID NO: 107655 - DNA, 377 bp, Glycine max
  unsure (1)..(377): unsure at all n locations
agctntcttgagaagctagagcttatctacacacacccactaaaaactaagctcacctccttgacaaaatacaaaaaaaaagtccctactacaaagactactcaaaaagccctgaaatacaaagctaaaaacctatactaccagaatggccaaaatacaacgcccaaaagaaggaaaaacctattctaatatttacaaagaagagtggatccaaccttgacccatgggctcaaaaatctacccttaggttcatgagaaccctagggccttctttagtagctctagtccaagcctcttggagtcttctatccaatacccttggggggtaggattgcatcaatccatgtccgctccgaagccatcgctcgtgtgtcgat

SEQ ID NO: 107656 - DNA, 237 bp, Glycine max
tgaacaagtttagggatgtgaggagttatctgctttgcttatcaagttagcacccaattagtatcaggtaggaaaccttagagtgaaactgttagaatcccttgaacttaagtgagagttatgagtcaagtataccgaagtgaggaagatcgtgttgagggaagagacctagatccgaaggtaggtaaatcatgtattctcgatagtcacatgtggactaggattggtaaagtgtta

SEQ ID NO: 107657 - DNA, 386 bp, Glycine max
agcttagcagtctcaagaagtcacctttgtcctacaagaggcattgcatactccaccagctaaagcaatccagttgatgttcctctaatcaactacactacccctactgcactcattgaggaacgcatccaagacatgttgaatcaagccgtacaaaagcaaaaagaagaaactcagccaaaacttgaaatctttgttgaacaatagtctttggagaatgagcaatatcgacttccatacaaaatttcatctcatctcatttcaccaatttgtcacagatgttgctaaccaaccttcaacaaactcaatcctatgtccttggagatgttgaatatccacccgcttagcctttaccatctgtgccaacaccaagtctacctctacta

SEQ ID NO: 107658 - DNA, 238 bp, Glycine max
ttaggatagttggtctttaactataactaccaataaaatattaaatgtaataacccataatgcttgtaagcaacatgtaattctgtcaagtgaccccattttggttcacgcagcagacctataaaaacaaggtccattgagtataatacattcatcctaaatagttctaaaatatataaagaaaagtggcaattataagatatcacctcaatggcttttaagaccattgttattttgt

SEQ ID NO: 107659 - DNA, 151 bp, Glycine max
accggaaccaacgcggctgcagctgaaacagaacgatttattttccacaccacccgcaccgaccacaggccgttacagacacacacaaagcctactacaatttccaccaggcaacagacctacaagacgaccgcgctgcaccacacacggc

SEQ ID NO: 107660 - DNA, 292 bp, Glycine max
cggaagagacacagtgagaaaaagagagaatgctctccggaagaaaaaaaatactttctatttttttaactgaagggcaaaattgacctttcattgaattgctgggtgcaccaacaatattgctgggtgcacctagcatatccctacaaacatctatataaaagattattgggaatggaaataccatttctgtgggaaggggaatttcagaaaaaaaaatatatttaaaccccacgagggtagtgccaatagctatccccttataagcatcctatgtgtgatgcaaagtgga

SEQ ID NO: 107661 - DNA, 232 bp, Glycine max
taacaaaattgttttgcaccatagtcccatgtcgaaaataacacaaatatttactggtctaaatttaaacttgttaaatgtgtaaattgtttaaagtgcaaagtaaatatgtaaactcattgtaatctatagaaatattaacatatacaattcttttagtttaatatttatgcaccggtaagataaaaaattttatacaatcatttaatcataattcaccatatataataaa

SEQ ID NO: 107662 - DNA, 381 bp, Glycine max
agctatataaagtttttttttttttcaaattaacacagcaaaccatgtgctatgcatctatatcattccctactgaaggaagcttgcttgaggggcttttatggaggctggatctttgagcctcaatgaggtccttcaaaggtgattcttcaccatggagatgtagcggaagacaaaggaaaagaggtgagaggaggcgtcatccactagggaataagccatggaagaaggagcttcaccaccaagatgagccttggataagaagcttggaaggatgcttcaatggaggaaaagaaagagggagagaaagagagaggggagagcacgaaattgaatgaattaaagagggagagaagtagaacttcgaagcatgtctcacaa

SEQ ID NO: 107663 - DNA, 232 bp, Glycine max
tgtttattctttttatgcacccttggcggtccatattgtgtttagtgcatttttattctcgattcgtttactttttataccccctcttgacgtgcttaaaccattttacttaagtcatttctcgcttaacttaaaaataaaataagtttccaccgaacgtttgaattgtattatccgttaacttcggttaaaatgaattccgaccgttcggtcgtgccgtaaccacgttgga

SEQ ID NO: 107664 - DNA, 233 bp, Glycine max
tgaatccaaattatcattattactaattatgaccgaatattgcaaaaataaaattaagcggccattaaatatattatttggatcttatgaaaggtgatctaatggcatgtcttgattgatttaatgtcttggcttggtttctatatctaatgtattcttataatttttgaatagaaatatcacagattaatgtcattgcggaatttaatccagttaaacatgcaaattttcat

SEQ ID NO: 107665 - DNA, 378 bp, Glycine max
agctttaagtctattaatctctttcttgatctctctctcccattcacttacacctcactcctcctgatgccgaaagggtttacttcttttcccttttcctcactctttctcacacaccaaccaacattgattgatgcttctaattttctctcacttgccacaagattagatactgaatctcaaattcctaatctatataaagcttgtgagttttgtttagttttgaattaatagtactcatgttgccattggatttttctcctattcggcatccctgatgatttatgcgacaaggtttctaaataccctaatttttcaatattgtggttgaaaacaaccagaggagggtgctggagttggttaactgggatccacttc

SEQ ID NO: 107666 - DNA, 234 bp, Glycine max
tgtcttttaagtagagcctacctcaacggtcttcttggaagctttatgaggtattttcaaagggcatgatgaacaagttaaagcattccaaaatagaaacacctagagcaagatccttaagtgagaaatctgcatttttgtttcaaccctctttgtgaaagtgactcacttctgccttgtgcttaaaaatttgtaatattttttaggtagaagtgaaagatttaattcttgagc

SEQ ID NO: 107667 - DNA, 374 bp, Glycine max
  unsure (1)..(374): unsure at all n locations
agctnggtattgcattngggcacctatttgaatctcctatgctgtacctacatataagaaacagtcccactctccccattttacaaaatcatattcatacatcattggggcatttcaccgagcacttggtgggcgcacgtttcgacataaatttcaagagaatggggacaatgtggcatgccccattgctttagaatacagcataggcctaaggccatctcattcaaatcctcaactcaagaaaacaagcataaaaacaaaccaaaactgccccacaaatataagtacattctcacaatttggagcaccataagatgaagaaaatataccaatgggaagctaaaaacatcaaggattgaatacttacttgttgg

SEQ ID NO: 107668 - DNA, 227 bp, Glycine max
ttgatttttttgtttttcaccttctcgctaagccaatttgttggcttagcgagcgtccgctaagcacaacactcatgggctaagcgcgaggaagactctggaagaatatgagttgtacaggttcgctaagtgcactgcttcagttcatccgctaagcgagaaaggcacgtgctaagccgaaattcactaatgtgcgctaagcgcacgagcacgaacaaggccaccta

SEQ ID NO: 107669 - DNA, 369 bp, Glycine max
agctcgtgactgttaatggatttgtaaccctcccaacatggtgatggcattcaacggacccatattgtgataaaaaggcactgaaattggttctcgaaatctgatcacatctgatctttgcatcgagattctgaatggtctctccaactctatttcctttctcacttcatcttccaattctcggcgttgggcaaatgccatctcgtgagcaatgagttctctcctgattccttccttctctagctctcgccatattttctctttctccaactctcgttggaacacttcattgacattgatcggcatggccattaagaaaacactacgcacttgaacatttcggggaaagccacctgatacaaagtctca

SEQ ID NO: 107670 - DNA, 230 bp, Glycine max
ttagctaatttttaatctggggtgttatcactccgatcctccaccaggcttcgctgtacctgaaacaacgtttgtgcattgccatgaatcccgaaccaaaaaaactttccttaaactcaacatgaaggaaaagaaaacaaagcatgctattgctaagttactaacccggcatcgacgaaccccaatccaaacagtccaatggcaccaccagcgatagttgacttggaaac

SEQ ID NO: 107671 - DNA, 384 bp, Glycine max
agcttctcccccaattttctattttatggggagaagtgagtagaaaagggttcaaccccttaggcacttctctctctctcgaaatagctgaggaaaattagtttcgtgaagaaaatccaagtcgaggcgcttccgtaacgtttccgtgagtaattacgcgaagattctagaccatttttcaagattcatcgttcgttcttcattttcttcagtcttcaacgggtaagtacctcaaaccaagcttttcaattcattctatgtacccgtggtggtccacattttgtttcatgtattttttattctcgttttcatttactttttatacccccttttgacgtgcttaagccatttatttaaggcattgatgtgccatcattgtcttct

SEQ ID NO: 107672 - DNA, 246 bp, Glycine max
  unsure (1)..(246): unsure at all n locations
acccaagcnngatttgaaaattggaattatttgttaacngggnaacccagcaggcccagaancacaaaaccgaaccngccgcaagggcaagaggaangagcaccncngcngaccaccanacagacccnngccnnccacgcagcaaccaggagcaaaggagcagcccgaagccaaagcagcaaagancgataagagaccnccncaaccgcagcaacaaaaacaaccacagcagaacaaggatgaccc

SEQ ID NO: 107673 - DNA, 375 bp, Glycine max
agcttgtagaagggcaaatatatttttgtaattgcgacgaacaaccctctatggtggttgaacgtgaaggctttatgttcctttgtagacaattacaaccttagtttaatgcccctttaagatatacaatggcttaagattgttttaagatatatgttgatgagaaattagcgtgaagcctttatttagatctgagtgcagtccgattacatttgttcaaaacctgaattatttggccataacaacacattttattaataatgattgaaaataccaaaaaaggattattaccttttgagttatccccaatcacaaaggagagaccataactaaaaaagttgattaggctttgagagaatgggggctcaggaactt

SEQ ID NO: 107674 - DNA, 382 bp, Glycine max
  unsure (1)..(382): unsure at all n locations
agcttggacggtaatcattgctaaaggtttagcctanagtttccaatttggagactaaattaaaatgcaagatggttccgagtaaattcagaattctactcccttaaataaaaactcgttttttggacaaaaaactttgtcaaattgaaaggttgagaaaatcattatggtttgttttgttcggtttggtcccttgtctatgaattagtaatttttttaaaacattttctaatttagtaagggctacctagttacatagggttcgggtcatcagaaatattattttggtcatagaaatattaaataaattttctttatttaattgtttaaatgttttttattcaattggttaaggacatttatcataaatgtcaatattctt

SEQ ID NO: 107675 - DNA, 232 bp, Glycine max
  unsure (1)..(232): unsure at all n locations
taattttttgtatttatagaaaanagagaaaaattatttttactgctttcatatataagcttatgaaaataggacagaaatgaaaacaaggttataattttatagttaaaattaaccacatatacaaacacaccctaatgaatcctggtcacataagtgaatattatatattctttaattttaccaaaaattaacatattttctatcttgtatcaattttaggaaacatcta

SEQ ID NO: 107676 - DNA, 385 bp, Glycine max
agcttcacctttaggtccttcttatagctgttgcatgaaaacacatgctctattgtcatctcccactccaagaacgcctccggatcattctttcctttaaatggaggaatgctgagtttaataccatcaattcggtattgtctaggaacaccatcattccctcttctactcctttcttcttcattatgatctctattctccatttgatccaacctctcatggagcgcatcatctcgttgtgtcattaacctctccaaatgttgcatcaaagcttgcatttggaattgcgaaagccccactccatcattaggattagtacctgacatctcatacaaacaaatcaaacgtaacaagacaattatagttgttgtttgaatacctcacc

SEQ ID NO: 107677 - DNA, 265 bp, Glycine max
gttaccctatacactactcaagcttctcccccaattttctataaatagggggacgaagtgaagtgtaaaaagggttcactcccctttaggcacttttctctctttctaatttgcttataaaaattgtttccgtgaagaaaatccaagccgaggcacttccgtaacgttttcgtgagtgatttcgcgaaggttttcgaccgttcttcgacgttcttcattcgttcttcatcgttctttcgtcttcaacgggtaagtaccttgaacc

SEQ ID NO: 107678 - DNA, 382 bp, Glycine max
agctatggaaaatgttgttttcaccttctcgcaagccaatctgctggctttgcgagcatccactaagcacaacactcttgggctaagcgcgaggaagaatccataagaagatgaactgttcaggttcactaagcacaccacttcatttctctaagcgcaccgcttcagttcacctgctaagtgaaaaaggcgcgctaagccaaaaatcactaacatgcgctaagcggtccatacgtgcgctaagcgcacgagcacgaacaaggccacctatttaagcctgaaatcagattttgtgaagagagtttggactgggattcagagctttgcaagtctagggtttctagagagagaaaggtccaagttctaaagagttttgagagat

SEQ ID NO: 107679 - DNA, 227 bp, Glycine max
  unsure (1)..(227): unsure at all n locations
accncattttttttcacagccnnagagggtgagccaanccaatcctgggggccggactctcagccacttatgatagccgccgatgatcccattactgcttcccctaagctctctgtcctttcttcacgccgcatcccatgccttgcgaactccttggagtaccctcgcattgtggtcactgaaaccccatgcgatgaaaggcgcgatgctttcgtctgatggcactc

SEQ ID NO: 107680 - DNA, 322 bp, Glycine max
actggccatgtatcaaatatctatacctgtcgcaagactatgtgggtatgcttatcagccgaccaccatacagaccattgcccttctgagcagcaatctggagcaactgaacagcttgaaacttatgctgccaacatctacaatagacctccttaacctcaccagcaaaatcaaccacaacagaataattatgacctctctagcaacagatacaactcccggatcgcaggaatcaccctaaattcagatggtgtagccctcaacaacaacaacaacagcctgctccttccttccaaaatgttgctagtccaaatagaccata

SEQ ID NO: 107681 - DNA, 254 bp, Glycine max
  unsure (1)..(254): unsure at all n locations
tgacactctccaanactcattcttgctttaatttctttttttggatgagctagacatacccattctgttttagggtcttgcgatgatgtctatatgctgaaattgcctatggaaactgttagacacgaagggtagagttaacctacggttagaaagtgagaatgtggtgttgtgagtggaaaaagaatgaggctttgacaattggaaggctaagcctgaatttctgcggtaaatggacgctaaaatgagttaac

SEQ ID NO: 107682 - DNA, 379 bp, Glycine max
  unsure (1)..(379): unsure at all n locations
agcttgcgtagtgtacatgtttaatttnttggttttatatgtccaaatccggtggaacatgcgaacaaaacaataacgaatcttgaaccgtgcattatctaatattagatggccttatactgcatgtgacaatcacgtgcacggattcgtggtcatcacatatgtgacaattttgacaagaccagcatggttcggatgtgcgaaggttggattttttgtgagacagtgatgacgctcgcacagttttatatttacgaagtcatgtgtagatgtcgtggagtggacacaactgatctagtgattggcgtaaaaatttgaaacttgtaagggatttgagcagagtgcttgtttcatgatcttggcacaatttctacaataa

SEQ ID NO: 107683 - DNA, 233 bp, Glycine max
tgattgtgcgtaccctaccatttggtcatagtaaagcattcgtaatgtgtctactactattgtgatcatctctttctccatagttggaggtgccacttgagctgccatgtctctccacctttgggcgtattttttgaaagattcgtgcccctttttacccatgttctatagttgcatcctatccggagccatattagaattgtactgatactacaaaggcaaccattaggtcc

SEQ ID NO: 107684 - DNA, 385 bp, Glycine max
  unsure (1)..(385): unsure at all n locations
actgcagcatgcgagcgcanagaatcattttatttgtttttttaacacagagcaaagcccgttggctataaataaaaaagcttaagggtggaataaaaaggcccaatattctggctcaacttggtgggacaaagtattttctacttgcgatagcctcgttataatagaacataatccaccaacaatcggatgtaaatgaaatgtaaaaatagtatgcagttgccttgagcttaaactaattgcgagctaaaagatcatctgccagcttcggaatcagttgagagttctggaaaaaaataacgtacaaagcccttcggctatagagaattaagcgttatggtggaaccaaatggctcaatattctttctaagctctgagggacaaa

SEQ ID NO: 107685 - DNA, 240 bp, Glycine max
tacgctattgaatgttaaaacgttcaaatgaaaacatttactatggtacaagagccaagagcttattatatgcacaaacatgtgaaacagaaacgggtaaatgataataactgagaaaaatatgttgaacaattggtagatttgtaaaaagcttcggtaattacaatataaataagcacagataattacagcatgtggattttactcttaacagcatttcttgtccttctaagggcttca

SEQ ID NO: 107686 - DNA, 230 bp, Glycine max
tgtatacaatttgtaaggaaaactctaccttatggtctattgcttaatctgattggaagggttgtttatgcttcaaagcatgtttgatttttgtgggttggtggaatttggtgttgggtttcctttaaagtccttgccccttgtatgcttttgatttgggaattcttgatgaaatcttgtatatgtttaattgatggttgatttatgtttttttggacttgtgttgaata

SEQ ID NO: 107687 - DNA, 321 bp, Glycine max
tatgagtcaagcttatgccttacgtatttaactcaagccgagctcaaccctaatatagattggcctgacttaacttatctccacccctagttacgagctatctatatgtagctgtactcattacctatagtgttcacttaacaatttattaaattgctaaaattatctaaaaatctgaaaaataaatatacaatttttttatttgattaaattcgggtgctgtaaagaaaatgattgaatttggttctctggtttaaaaatctgtaaacaaaactaattttaaaaatgttgtatttactagaagatggaacaggttttgca

SEQ ID NO: 107688 - DNA, 226 bp, Glycine max
tgtacttaacttgtgaaaataatccgagttcagtttcatatttgagtttgtttatttaattaaatatataaatttgatcgaatattttatatttaacccgattcatttacatcgctattcaattatatgtaaatctatctattagatttttatcacgttaatattaaaagaattattattactagaaaattttaaaaaatattaaaagggagtacaattatataaa

SEQ ID NO: 107689 - DNA, 342 bp, Glycine max
  unsure (1)..(342): unsure at all n locations
agcttattttatattgaggttctttanacgaacaacgcgaggtcttgaaaaattcaaatggtcataacttttaactcggatgtccaaatcatgcgcatcacatatagagacgctaaaaaatgaacaacggaagctctccagaagttaaaatggtcataagttttcacaaagatgtccgattcaggcttgtattatatcgagacgctcaaaattaaacatcgaaagctctcgagaaattcaaatggtcataacttttcactcggatgtccgattcatgcgcatcacatatacagacgctcgagtatgaacacaggaagctctcgaaaaatcaaatgggcataa

SEQ ID NO: 107690 - DNA, 229 bp, Glycine max
tctacttatgtggcagggcgggcttccttcaccttcttgtctccaacgcgaactttgaccattgttcttccttcccgcgatgcttcttttcgtgtccgcctgagtgggcttatagcctaaaccatacttcccacgatttccttgggtatttatcaggctagttatgccgccgttgttttttcctaaacccatcccgggttcataaccgttccccaacataactcgggcc

SEQ ID NO: 107691 - DNA, 385 bp, Glycine max
  unsure (1)..(385): unsure at all n locations
agcttgccactgccattgtgttgaatttattaatcctntgccaggtgcttcttagacttgaatgaattgtgtacctttgctctctcaagattataagaatgattcctaacgtatttttctcatggtgtaaatttgaaccaatttatggctttctgtccattcagcttattgacatcattccgataatgcaaataaacatggtgtggtgctactttatgatgcaagacatcagttcgttatcagaggcaggaaaacttcttgcaaaggctagggaaggacttgaagatgcttatgggaagcatgctctactcgccagacttttaaaaagtgggtgctttctagaacttgcatggtgagttcttactcctttcttgcactgcactat

SEQ ID NO: 107692 - DNA, 236 bp, Glycine max
tatggatgtttttttttccaacaaggttgaggttcttatgagacgcagacgccagtcataaattgaaaattgtcgaagggtaacagtcacatcgaatctcaatgtatctctgggattgggtttcaccacttgttcatttatcacacgaatgctgtagggacccatcctttcttcaacaattttggggttgatattgaaggatgacgaagaactaatgtttgcaggttcgatcatca

SEQ ID NO: 107693 - DNA, 378 bp, Glycine max
  unsure (1)..(378): unsure at all n locations
agcttctaaactgtgtacaatattgattctctgatacccttgttagacaagtggcctcaaatatcttaagaatggggggttgaattaagatatcccaaactgtttcccctaattaaaaatctatttcactttttacttaagttatgaattcccttaatgacaatcttcttaaatattaattcaaatgaagcaacttgaatatgaatataaaacaacaataaataaaggagattaagggaagagaaaatgcaaactcagttttatactggttcggccacacccttgtgcctacgtncagtccccaagcaacccgcttgagagatcccctattttgtaaattccttttacaagtcctaaacacacaccgacaatccttcc

SEQ ID NO: 107694 - DNA, 187 bp, Glycine max
tttatggcctctttatttatactcgagcatgaaaatggctttcactggagggggatacctccatgtgacttacaacctcacttcagaggcaaaaccttgagaaccctttgcctgatgagaactctcatggggcttataacgggcagaacgatcactcctataagacgaaactagcatatggtattaa

SEQ ID NO: 107695 - DNA, 394 bp, Glycine max
  unsure (1)..(394): unsure at all n locations
cctgaggcatgcaagcttgatgaaaagaaatanggtttttttacattcttcnacgccgccggccattaagtttaatgagtctatgagcaacttatgattcaacagatgtgacatggaccattgctgctactttaaaaaatatactaatagctatgttatccttatcgtgtatgttgataccatgtcgattacaggatctagtatgggagaaattaacacgttgaagcatcagttggtagaaaactttaaaatgaaggatcttggtccagctaaacaaatccttggtatgagaattcttagaaacaaatcaaaacgaattttgaagttgtctcaagagaaatatatacacaagttgcttgacagattttaccttgaagattctaagactaagaat

SEQ ID NO: 107696 - DNA, 260 bp, Glycine max
ggagcctatacagacccggctgagcacttatttttttttcccttggggaggaggattctttaataatttgacattaaatcaaaacttgctattgatgatattaaggctacaacaaaaattttaaaaaaatagttatttaatacagccaaatttaatgtataatatacgttttagcgtataagtaaatatcggttttaagataatgtaattacaaatgtatgatttatctaaaatttggtattcatgattatcgagataat

SEQ ID NO: 107697 - DNA, 386 bp, Glycine max
  unsure (1)..(386): unsure at all n locations
agcttaagtaagttaaaagaattaccaatatctaacaatttgcatctagagcagcgagttctggctggagcagagcacctagaacacacatgatgttcattntttgaagcaaacactggaggaattacatcagccacaaccatttcttcaactctcagagcttcttcagcagccaaatgggcaagcaaatttatcatatctctcttcttagtggtttcactccattttccaagtaagatgtaagccaccaagggaaatcatataaactgaagttgagaattgatttttgatttgagaatccaatgatgactagaattattttttctggatctaaatatatgtaaaaaaatatttntaaactaaaatataagtacattttaacgtga

SEQ ID NO: 107698 - DNA, 238 bp, Glycine max
tgttcgcacattgttctcgtgtaagatatccaatcgacaaggcttgaagtagaggagaccttcaatcctataacgcaacatgacggacaaaagtgggcagttaacttgaatggccattattgtcaatgcggaaggtattatgcgcttcactatccatgttcacacattattgcagcttgtggttacgtgagcatgaactactaccaatatatagatgttgtttacacaaatgagcaca

SEQ ID NO: 107699 - DNA, 387 bp, Glycine max
agcttagtgtgagtcaattatgtgacaaatgctatctgatacacccgattctcaaaagtgtgtcattgaacatatacatgatacgaatataaagcatattgggtttagagtcaacaatgtttacatgatagacttaagtcaaaaactagataataatcaatgttttcttagtaaagatgatgatccatggttatggcataaacggattgcacatataaacatggaacacttaaatagattaatataaaaagatttagttgttggtttgccaaaactaagatttgaaaaagataggctatgtgatgcttgtcaaaagggaaaacaaactagagtttctttcaaatctaaaaacattggttcaactactcaacccttacaattactaca

SEQ ID NO: 107700 - DNA, 238 bp, Glycine max
ttttcttaaatttttttttaatcttcagtaaattgatcaagaccaacatgagaaggaaagatatgatcaagagaagatgtttaccaatttttatactggttcactctctatttctagagaacctaatccagttatctaatctaatctgaattagattttcactatgcatatagaatttttacaagcaatctagttcctaccccaaaaaaagagaccaagatacccaaccctaaggtcc

SEQ ID NO: 107701 - DNA, 389 bp, Glycine max
  unsure (1)..(389): unsure at all n locations
cctgaggcatgcgagctgggattacataaacatagtttgaatcnaccatcaatgtatctattcacttgaaaagagagtttatactatgatattgacatatttttattttattttatagcttatgattacgtaaatgtcaatttcaaggcttgatcataactcagttattagacttttacattgtgctaatttcttatttcttgagtttaaaataactttaaaagatatttaaaataaattaaaaatataaaaattgccaaattgattcaaactaagctacaaattaaatatcagttcaatttgattcatatttaatattgcattcaataacatttagttcatgatgataagtgtataaaaaatatactaaaaaatgtgttgttaatctc

SEQ ID NO: 107702 - DNA, 230 bp, Glycine max
gtgttttatttaggagcgggagaagtgggttcttcctatgtttcgattacatttatttacgaatgagcattgatagaatgaaatttgttacctatatatagctatttttttactatgaaaacaatgattttagacaatttaaattaaatattttttaaaataacttctcacttaacgcatttaaacataaattataacttgtgaatgatatttatttacgaaggagcatt

SEQ ID NO: 107703 - DNA, 402 bp, Glycine max
ccggaccttaatcaccgcggctgcagcttggaaatgctcatatttatctaacgtccatcactcctatcattaaataaatcgaggttataaatataacaaccacgaactcgtatataagcttccatacttaagaacttacatcactgcctccatttcctttgtgtcaaaagcctcattaatcctaatcaaagaaccaaaaaaataagttcagaacactttccacaacatatattggggaaaattttccaaaataggtcacataaataatcagcagaaaagcaagcacaggcactcgcaatttgatatctagtttaatctgaaatagcatttaatatttcaccaaataccatcttcgacatttgattcgtcctgttccatcatccacaacaaaactgacatcag

SEQ ID NO: 107704 - DNA, 233 bp, Glycine max
tgcttctcattgacatcatctggtgctccatatgcaatcacaaaagatatccgacttatcagaagactgaggtttgaagatatcacatattccatataaagccacatatactgagggctcatcagaagattgacgttgaagcatttccaaatgcaaccaagttgaaaactaaaattgtccatgaaaagatttgatgtgcaacatcaaaatggaagattgaagtcattatgtac

SEQ ID NO: 107705 - DNA, 173 bp, Glycine max
tgccttatcgggaagaatgggagggtgaaggtgaatctatagcacccttctttttgaattccttaaatcgctggagggtctgccgcctgttgttgtgctcaaacctacgagcgtactgctatcgaccttgatggtcgaaaggtcgtgattttcggaattaccgccatgaaaaa

SEQ ID NO: 107706 - DNA, 287 bp, Glycine max
tcattcacacaatcattatgtccccacaaacatagagctgctagatcatctcaggacctaaacacgtataacatagggagtgagttatctcatccccaattaatggagagaaacaaaataaactggtttgtgatagatatcatattagcgaaacacgacttacttaagcatcactcactgtatatcaccactttatcgcacaacattatattgtcccaccacacatttcattcattattacaacttgtacgttctcgatgatgaaaatacaatatgatcaggcaacc

SEQ ID NO: 107707 - DNA, 234 bp, Glycine max
tttaaatagagttggtcgtaccactcttgtaaaatttgtgttatcatctatacctacttatgttatgcaagattattggatgcctactgatatttgtgaaatggataaaatggtgaggggatttatttgggtaatatctacttcgcattgaataagttgtcattaaaaacaaaagaggaattaggtatccattctaagttgtcattaaaaacaaaagaggaattaggtatccat

SEQ ID NO: 107708 - DNA, 376 bp, Glycine max
agcttggttatgggtaatatttactcaccgacgtccccacagtctactgacccacgcgacatatctgcaagtaccactcctgtggtcaacaataaaagcaggaagactcacccttcaacacttcctcatctcaagcttgaatgataaaggggtacccatcacatgtggtactaggaggcggtcgggcgatggtgcacaacaagaccttcgcattcacaacgcgcgcataaacccaccattctcttgtgcccacctacaactgagcttacgtactcccacgtaacccatatccttgttattctcaacaccgggtccccatcaatcctaccaagctttcacaacatccaagcaacacaacattcaaacagcacaagct

SEQ ID NO: 107709 - DNA, 229 bp, Glycine max
tgctatacattggtaccaaactttttttgtctgcaagtgggaagtcagcaaaaaacaaaagggcgctatcttttcatgcattcttcctcttaccaaaagattcaacaggcactaactgatgcaatcctatcccgcaagggcattgggcagaagactccatggacattgggctagagatccaagggaagggcctaaggttctcatgaaccttatgggagattcctagccc

SEQ ID NO: 107710 - DNA, 368 bp, Glycine max
  unsure (1)..(368): unsure at all n locations
agctntgtgttgcggcatagttagattctgtgaaagagtctacccctttcttttcttccttgtagatcgtgatggcggcgcagctaatccgtgatcgagtagagatggagtgcctagagggagcttgggagaccctcgaaggtaacacgaggtgccgatttcggggcaccattcgattcacggctacttctttggtgcatccagatgaacctgcacggacgcttcagcgcacggtggagtggacaactccttagattagctttgtgtatttttttagggtgggtgtatctaagactgactgttaagtttactcttttgctttgtatgggtagacctgatgtataagaatttgataattgtatacatgt

SEQ ID NO: 107711 - DNA, 245 bp, Glycine max
  unsure (1)..(245): unsure at all n locations
gacactatacaatacctcagctttttgtgttttctggcttccaaactttgttcttttacaaaaaacaaaagtgtggtattcatctttttcattttcttctccctttgccaaaaagaatttgccaaggactaaccgcctnaaaactttttggatattctattctccctttttccttcttaactatagactaaccgcctgaatttttttgtgtttcccttcccccttttcaaaaaaaacaaaatgac

SEQ ID NO: 107712 - DNA, 341 bp, Glycine max
caaacccaggggcagaaagctccgaaaaaggccaagagaatgcttgaacaaaaacatgaatatccagcaacacatcaatatctaaaggaaacagcacagagtaatagaccaaaagaaaatcgaagggcgaagaagcaaactaccctacaagcaatggtcatagaagtaggaaaagcaaaaataatcatttaggtaacattcggagaggctgcacaaaaggcccatagacccaaaaaacatgaacatacgaatgcataagatgaaagtaaagccgtagtggccactcgcccccatagatcacaaaagacggggtatgagaagaggagagggcaacaaaagca

SEQ ID NO: 107713 - DNA, 236 bp, Glycine max
  unsure (1)..(236): unsure at all n locations
taaccatggattaaaatttttatcgaaccattaatggtagaagaatgacctaagcaactcaggggaaccacaaaactctcttcccttagcctcaagtgagggaatattgttctgattcacaaaagaaaaatgttaaccatatatcttctaacatatttttaaaatattttttactaaacgaaaatcatagaaaaatacatttttgatggattttncgatttatttaatttaatttt

SEQ ID NO: 107714 - DNA, 217 bp, Glycine max
acaacacaaagctgcaggggcaccttcaacgcgagcaacaaatatttcccaataattaatggcattataggcaaatgaacaatacaaaagggcaggacatatacatacccaaactctctgttgaggccctgagcagctgatgttgctgcttcacctccaacatatttcttggtaaaaaccccgccgattcgttgaaggaaagcaattggaaactgcc

SEQ ID NO: 107715 - DNA, 355 bp, Glycine max
ttgtaaacacgacgcatgaatgccaaataactttatatgaattaataagtattggatttggaaacttacccgtagaagaaagaatatcggacgaagaacgggaaagaacagaggataacctacacggatttgcttacagaaacctctcggaagctttacggaagcacctctgcgtggattttcttcacagaaacaattctttaatcaccaaaaacagctgacattgcataaccaggggaatcaggcacccttagaacaacacccttttgtctttgtataagaaaaagggggaagaggtagccttccaactctctaaagcaagctgggtggcttcacaccttaaacgaaaaaaagc

SEQ ID NO: 107716 - DNA, 238 bp, Glycine max
tccatcaagtgttttcttagcacaagagcttcaagtaggtgctccttaaacctccattaattttttttgctttaccttctcttccattgttgtttcttcattttttctccatgtatctcctcacatgtcttgtgctaaaagttgttaacatgagtctttagagtttccaccaattaaacttgctatagaagctagatttgattttctatggttcaaatttcttgttcttgttcttgaa

SEQ ID NO: 107717 - DNA, 244 bp, Glycine max
taatcttgtgaaggtgatattattatataaatggcgagattattggtatcatattgatttaattgatgaaaccaaagccagaagtattaatatctttttttggataagaagaataaacttttattataagaaaggaaggaataatatgacagggaggataggaatcattataaggcataagttaataggtaagttagacattttacaaaaaacaaagcaactaataatgcgaaataactcttta

SEQ ID NO: 107718 - DNA, 357 bp, Glycine max
ttttcattccaaaatcatgccaattagaagcatcacaagaatcaaccaggctattgtgcaagcaatcaatgggggcaaaacacaccaaaagattatgatgatggatggctcatattctcacaaaggtacacttatcactttcaaattgagctttcaaaactatcatgacatgtagaggaaaaacaaggatttcaaatcacaaaatgtcaagagacttatattttcagaacaattacccattacttgaacatatcctataattcaaagaaaaacatgcaaatttaacacaacaaaactaacaaaattaaactaatttaacacaactatgaaaaccaaaaccaaagaatactcccctca

SEQ ID NO: 107719 - DNA, 237 bp, Glycine max
ttttgaactttttaattggaccctcaaatgtattgttcatgacactaaagcttgtcaaagttggcaattcaaacaaggtgtctacgtcaatgttcccccctagactcatattctctagtctcaaaccataaaatgtttggtcagtgtggttgcataacaaacctctccaactacataaactagactcgttcacccagttgtttaaggcattgttattggacaaggaagctttgaacc

SEQ ID NO: 107720 - DNA, 279 bp, Glycine max
  unsure (1)..(279): unsure at all n locations
aggaatgaaagncttatgagacacacttcaaagggccacttttctcctgtttaggngcggggatggcgtgctcctccctctatctttcttttcctccattaaagcatcatcttcnancnncatattcaaggcacatttcttggaggtaaagctccttcttccatggcttattccctagtggatggtgcccccctctcctctactcttatgccttccgctgcatctccatggaggaaattctccattgaatgaccacattgaagcttcataatccattct

SEQ ID NO: 107721 - DNA, 218 bp, Glycine max
  unsure (1)..(218): unsure at all n locations
cgccctatttctggcaatgtaaactttgaagtcctgaaacttgnctccagaaatcttttnnntcattttnttcttanttaaaattattcccagagaagccagttacactaagatcntttctccttcagatctattcaaattaaaaattacttttttccgacatatagaacatacttaccgagaatcccttttttgtatttaacataagaaaaacaaat

SEQ ID NO: 107722 - DNA, 381 bp, Glycine max
agcttggaaggatgcttcattggatgtaaagaagagggagagaaagagagaggggggagcacgaaattgaaggaataaaagagggagagaagtggaactttgaagtatgtctcataagactctcattcatcaaagttacaacaagtgttacacatgcttctatttatagactaggtagcttccttgagaagctttcttgagaaaacttccttgagaagattctttgagaaaacttccttgagaagctagagtttagctacacacacccctctcataactaagctcacctccttgagaagcttccttaagaagattcctaaagaagctagagcttagctacacatacctctctaatagctaagctcacctccttgagatgag

SEQ ID NO: 107723 - DNA, 230 bp, Glycine max
tcatttttggttgacatggacaaagcaagtggtagattatcataggtaaaagaataagaaaacacggattaaggtaaatttgatgtttctacaacaatgaagataggctatttaaggtgtaagactcgtgcaacttgacaatgatgctaaatcactgtcaaaagcactaattcatccctgcattgtgtagtatagggagtaacctaggtcaaatctcaaacaaatcaaaa

SEQ ID NO: 107724 - DNA, 373 bp, Glycine max
  unsure (1)..(373): unsure at all n locations
tgcagcttgccgaaaatcttttaaaccgnttaaggtccaacgccttaaaacggtcctctttgcttttatcggttaacatggaccgttcaaaagcataaaatcaacacataactttatcgcttttgcaagaactacgtaagtctgagttcctcattgcaattgaggatacgtaggagcaaaagccccacttttgtcgaccaccccaagagatcgttaatggtccaacgccttaacgtttctctcctttcaaaaaccaagaagatcgttaatgggccaacactttaatgtttctctccttttcaaaaatcaaaagatagtttaaaggtccaatgccttaaacgacttttggtcggttaaaataatatcttgcgaa

SEQ ID NO: 107725 - DNA, 234 bp, Glycine max
tgtgttttgttttttacaaggtcatcacgaaggttctggtatccctgcttcacacttatctaaatgacctaattaggtctttccagggtagctttatgcttggacgaggcactacagaaaatgccatcctagctcaagaagctatccagttaatctccaaatctataactaagaagggttatattgatcttaaaattgacctacaaaaggcatatgatagggtcaattggaatt

SEQ ID NO: 107726 - DNA, 333 bp, Glycine max
gcggcatgcaactcaacacctgtttcctttcactttttctacaacctgacgatgctgggtagagggtatgcttctttggggctcaccttgtttaaatgattgtagtcggtgctcattctccatttaccatttgcctttgtttccatgacaactgttggtgagccaggttgaaaacctgacctctctgtataagatggcaagaaggagctagtcaacttcttctttgacgactttacgccactcttctccctatcttctttttcttctgcgatataagattggtctgatggcatataactattttgtggtagattatgccgagattcatccccg

SEQ ID NO: 107727 - DNA, 232 bp, Glycine max
tggctttataccttgtcataggccctttcaactcatgaagagtttcttggtccttatgctctttggataaccctctatcaccagcttaagatgaaattccttccatgcttgatgcaaggtcagaaaagatagaaaaccaggtatgttggccatgctaatggctaggctcccaccaactaatgcttcttttcttagttttccaaagaaatgcatggatattgctgactttcca

SEQ ID NO: 107728 - DNA, 234 bp, Glycine max
tgattctcgaggaaaagtttgaaggatctttagaagatgttttggcttttacatgcccaactcccttgagtagcatttgtattggttgttaacttgattgttgcatctcagtacatttgatatttgttttgcattgtgcatcatcatagtgtgtgtgaaggaaattttctaagttagaaaaatttcttcaaaggcaaaaactctatgttttaatcgattacagagttgtcataa

SEQ ID NO: 107729 - DNA, 360 bp, Glycine max
gcatatttctatttattttgtactaacccaatgcttaaatgtgccgttttctatacattgaatggcacccttgaacatgcaggtaatcttcatagatgtaatgataagaatttttacgggtcagatattgggtttttataaacttatgatacataattaaattattaatttttttaaaattataaaattcaaatgagaatttttagcatagacgtatttatcttttattaaaaaatgttaagaagttataaaaaaactgtcttaatatatatatatatattaatttattaatatactactgcaactacaaaataagtgagcacatattaataaatgtctatacaaacttgtaatttatac

SEQ ID NO: 107730 - DNA, 229 bp, Glycine max
tctatataatttgaaccattttatcaataaacacaagttgagttttattcagaaaattagagtttatctcttttatcttagtgagagtgattctcctaaattcttgagtgattcaagaacaccctggctgtatcaaaggactttcacaacctttgtgtgttgccctcgctggaaagagtgattctttccttcctttcatcttcacccttgttctttcaaaccacaattg

SEQ ID NO: 107731 - DNA, 374 bp, Glycine max
agctccttactaagcatactgttttctgacgcagatgatgatatctatacagatggatcttatatatctatatatctatagatagatatatagatatagatatatagatatagatcatacaatgaagtaccgcacgagtgggtatataggaatccaaatctgccgaatcactcatgttatgatcttctacatcctaagacttcccgttccttcatctggcttatgttcttcatgtagcattcagactgaatgactctatgaaattacgtcgctacttccacatggtacgggtaacgtaagagacatctttatttttcccggggggaatccttagaattaccacagcttagctttcaattcgcctctgaccatca

SEQ ID NO: 107732 - DNA, 231 bp, Glycine max
ttttgtgcaatttaattcctaattaagttcaattctcatcagtaaaaaagtggtacacccaaaaatacagataattcgccagctttatgtgcaatttgtgtcccattcaaattatcttcaatacgagtcaagggaataaacccctgttctatggtttccagataaacgatactctcaaaagtactggtacgagtaaaaataccctcttctttaacttctgttattattctg

SEQ ID NO: 107733 - DNA, 252 bp, Glycine max
gcattatctccacttagtgtcccccttaagcaatgactattcctctccttccttcttttcattcgcaaaatcaagttatttgaatcggcaatcattattagatacctttacatcacgaataattacaataacgaggcaatgcccattctgaacttgaaagcaccacggaatacgaggacatgaaaatgcggatttcaacaaatgtgtggagaggattcttctatttttttagcactgaagagaacgagaaat

SEQ ID NO: 107734 - DNA, 207 bp, Glycine max
cagttgaaatcctgggcaaaggtgaaacacacatgagaataccactattacaatgcgagtaccttttcagaacaaatgatcttgttaaactgtcaaaggatctaaataacttcacaatatctaccctcaatattttttgatatcttcgttaaaagaaaaatcatactcttgtttactaactttccagacttcatctgcttggtagct

SEQ ID NO: 107735 - DNA, 383 bp, Glycine max
  unsure (1)..(383): unsure at all n locations
agctntaagtatatttactactctaatttttacttattttccgaatcccttcttcaccaagtttgctttttaaccaagtttggaagaaaaaggaaaaaaataatatatatatatatatatatatatatatatatatatatatatatatatataagaagaaaaataagaattaaaagaacataataatgttatatataagttaaagtagaattttggtctttttatttatatttttttatcaatttggtcccttaattaagttttaaaaattttcactttaatctcatacagtgtctttggcaaactaaattggtcatttcatcagcttttttattctaacacgtccattttgacttacttgatatctcgtaatttgttactta

SEQ ID NO: 107736 - DNA, 237 bp, Glycine max
tgaagggacactcacatttcctacttccagtatctcttctaacaaattctttcttcctacacctatactgaccactcctttcacaaccaattaacacaaatgaactccttcctctactatcagtctgtgtcagacctcataatgattacaacaaatccatttttatgagcaactgatcaagcccactgcaaaacatcatctcaggtatcaaacacctacaacgcaatccaggcaatt

SEQ ID NO: 107737 - DNA, 384 bp, Glycine max
  unsure (1)..(384): unsure at all n locations
agcttgtatacccaactgaatgttgtcttcaattnttatcagccacgacgtaaaaaatcttgcagcaacgaagaataattctatccataggagccaaaggtacatacaacatcattatcttttgaagaaactatttcttggcattcacttttatccttggtttataaggctgaactatatttaaccctatttttcctttttcctgctctctcttctcaataattctgatgttgttccgtgtcctgtagttcatcgagcttcaagaagacgggaagcatttctggaattggttcaacttccaaagatcccgaacctacaaaaagggtattttgggggtagactgtgaaagatagcaatgccatgtatcatgaatttcttttaaat

SEQ ID NO: 107738 - DNA, 238 bp, Glycine max
tgtgaaatgtttctcaatcaagttcctgtgaaaagaaagaaagcagaatggttatgcatttttgtttttattttgcttcatctctgtatatcatcacaacttcagaggcttggttctaggattcaacttccaaaggcttacttactctaatatatctcttattcaagttgttctgtgagttttcctgttttagtctgaggctttgagctttgtttgatagatatgccaaaggcaaatt

SEQ ID NO: 107739 - DNA, 384 bp, Glycine max
agcttctttgtttgaataaatgtttcatgcatctcatattacaacaaattgaaggattaggaaccctaatcaatatgtctccatgtgcacttattagatgcacctctaatattccaaaacaccaaggacacatctttgtaacaattcatggcaagaacaaagatgtttaggacccccctcgcctattggccattcataatctgcacatcattctcaccattaacctggatatccattggagtattagggaccacctccatatcaaccttagtggtggagacatcatcttcatctatgaatatctcaaacctgttgctcgtcacttgcttcatatttacaattgacttagcaccattacccaagtcataactatttgtatccata

SEQ ID NO: 107740 - DNA, 236 bp, Glycine max
ttaacaccttgctagttctccatattttcaatgcattaatagttgctgaaccttgtcttgatcctcttctaactacaggcaaaattttcctgaaatccctacccaaaatcacaacctttccaccgaatggtttatggatgctatcttcaaattgaaatcccattaagtctaaggtgcgatcaaacacttcaaagcaaaacttgttcatcatgggcgcttcatcccaaatgattagt

SEQ ID NO: 107741 - DNA, 377 bp, Glycine max
  unsure (1)..(377): unsure at all n locations
agcttagcaccataattttgtttctttttcanagaaaccacctatttctgaatagttgatattcatatctcaaatttgttgccttatttaacttttctgcaatatttgtccaaccaagcttattgaagtggttgtgagggttattttcagcattcacctcttctatgcacactttcaacataatctcaatatttttatcacaccattatgctttctttcttttcacaggaacttgattgagagacatttcacaagcttaatgaaacaaacaaaagcataaccctaatccataacaattcaaaatttaatgagaagaaaaagaaattaatgaagacttggctatcctgtgatgctcacaaaggaagaagaagagatga

SEQ ID NO: 107742 - DNA, 239 bp, Glycine max
tatgctgcaatcatttataatagacctccacaacaacaaaataattatgacctttcaagcaacaaatacaatccaggttggaggaatcatccaaatctgagatggacgagccctccacaacaacaatagtctatccctcctttttagaatgttgttggtccaagcaagccatatgttcctcctccaatacagcaacagcagcaccagtcacaacaaagacaaccaacaactgaggctcc

SEQ ID NO: 107743 - DNA, 381 bp, Glycine max
agcttttttgagggtgccttattgtgtattgatcaccttcctgagataattttttttttttttttaccttaaccctcccccaaattaggggcatatcatgactaaaattcttatgctctcttaaaccctaaaacaaggtaggagataattaaagtacgcttaagggttttacaaaaaaaaaacatgattatcatatttggcacaaatagtgtgcaagggataaattatcatcaaaggttggctttttggctaagtggctgaaaataagaagaaacttggccttgatcatttccacgtcatgtaattcatctaacagtctaagaatgatacaaaatcgggaaataaaaaatagacgttctctcacaaataagtttcacacaa

SEQ ID NO: 107744 - DNA, 231 bp, Glycine max
  unsure (1)..(231): unsure at all n locations
ttctttctattatttngatccaaggcactttcttagtggtgaagcttcttcttccatggcttattctctaatggatggcgtctcctctcgccttttcttctttatctttcgctgcaactccatggctgaaaatcaccattgaaagaccttagtgaagctcaaagatccaacctccacagaagcttctcaagcaagcttacatcactaggcctacccagatcagatacatat

SEQ ID NO: 107745 - DNA, 372 bp, Glycine max
  unsure (1)..(372): unsure at all n locations
agctaggatttatttatttatattattaaacaacgaatgtgatcgagcatgtaacgagttaaggatgaatagttcatttacactctttttgggaatagtgatgaaacgatgataacaaatgtgactagttttaagatttttttttaatatttgtcgtatttttttaaatggtgatccaatgacaattcttattcataagatattnttcatttgaaatgcacacatatatatatattagaaaatcacacataattttgttaagtggttttgtgattaaataattttaattttaatttgtatatatatatatatatatatatatatatatatatatatatatattaaaaatatgtccagcttgctaccacatat

SEQ ID NO: 107746 - DNA, 252 bp, Glycine max
gtgaccttagaatactcagctgtacacttattgttgtctatgacgctttggcagttggaagttccattttcacctttgccagagcatttcttgctgcgatagctggatacaaaacagccactgtgctcttcaataaaatgcatttgagtgtttttcgagcaccaatatcattttttgatgccacccccagtggtcgaatccttaatagagtatgtcataataaattgataattcttcatttgtttaatttga

SEQ ID NO: 107747 - DNA, 380 bp, Glycine max
agcttgttgcgtttttttgtatggaagagagaacgggacaaattgtacaattgtttttcgttgcaatgcatcctctgctccactacttgtatgattgcgggctcttgtaagaatgttcttcctttctatctataagagcacacaaacttgaaattcaaatattagtgaatttgaaatcaatcaccggatgaaaattcaaatgataagagtttctagaacatgaatcatcctcaaaatgcttccatgtgtattgtgaaatcatatggacattaactaacttagtataaagcatttatgtgagttagttatgtcattttggacacataaagcttctcagactttggtacttgtcacaatgtatttggacgtttgtctctaca

SEQ ID NO: 107748 - DNA, 235 bp, Glycine max
tgttgtacatgtggagatttacgtcgtcttccgtgcagacaacctatttcagtactaactcgtgaagttagggggcaggcggaaatacccaagtggttatccggataaacattcttttaatatctctaagactcaacgcatgatagcatgcagagactaacgtcgtcttctgcaccttttgtcaatcgcggccaacaagcccattgccacgtggagatttacgtcatcttctgtg

SEQ ID NO: 107749 - DNA, 233 bp, Glycine max
tataagaacataattgcctcaatcatttccaaatatgcatgtgaattaggacgcatcaacaagaatcaagccaaggctattgtgcaagcagtaaatggggcaaaacacaccaaatgattatgatgatggatggctcaaattgtcacaaaggtaaactcatcactttcaaattgagctttcaaaactatcatgacatgtagagaagaatcaaggatttcaagtcacaaaatgtc

SEQ ID NO: 107750 - DNA, 381 bp, Glycine max
  unsure (1)..(381): unsure at all n locations
agctntatgaacatatcagttggattctcccttgctcaaccttctagactttgaccctcttttcagaaggaatgaagtggtatttgatgtcaatgtgcttagtccttccatgatggacttgatcctttgctaaacagattgtactcagactgtcatagaaaatgatagtcttttcttatggaaacccaagattgctaatcaggtccttcaaccaaattccttcctttgttgcttctaccagagccatgtactctgccaccgtagtggacaaagtcattatgggctaaagtattctcttccaactgaaaagaaagtttccaattatgaatccgtgcccagtcatagatctccttgcatccaaatctataacattggtagaat

SEQ ID NO: 107751 - DNA, 234 bp, Glycine max
tcggtcttgtgtgtattcggatctgttatctaatcagaattggttccagtatgtaatagaggtttgcattgaagatcaacgcaggttgtcagagtgaaacttcaattttgattggagaatgacattgaaagcatgtgaggaactgtgtgtaggtttttgtggtggttgtttttgcatatataggatgtgcacaagtttaggtgtggttatgtgatttgaaggtgtttggatggg

SEQ ID NO: 107752 - DNA, 370 bp, Glycine max
agcttctatataagctgatctattttatcacaaacacaagttgagttttattcagaaaattagagtttatctcttttatcttagtgagagtgattctcctaaattcttgagtgattcaagaacaccctggctgtatcaaaggactttcacaacctttgtgtgttgccctcgctggaaagagtgattctttccttcctatcatcttcacccttgttctttcaaaccacaattccagaaaatccacctctgcccaaaattatctcgtgaccataactcccattttacacactcaaattaagtgattcttgagcctaaattgaatttcaaaacgagacctttcacctcgtattggaatcacctcatttggagc

SEQ ID NO: 107753 - DNA, 225 bp, Glycine max
ttgatttactttttcaatagggttatcaagatgcggtgacgatgaatggcaatcccatatttaatttattccctttatgtaacctacttttgggacacaatactcagcacttgtaatgctatatagttttataggtgctagtaatcttgtggttagattatatactatttttgctatgacaggttaaagagagaataactactttcattgttattgatttgtctt

SEQ ID NO: 107754 - DNA, 368 bp, Glycine max
  unsure (1)..(368): unsure at all n locations
agcttctgtttgaatnnttatctttncaccacgacgggaaacaatcggacatcccagtaaaaaggttttgttgtttgaattttctaagaggttatgatttcaattttgagcgtctcgatatattacgagactcaatcaggcatccgagtaaaaagttattgtcgttagatttttcttagagcttctatttccgattatgagcgtctcgatatattacgagattcattcggacatccgagtaaaaagttattgtcgtttgattttgctcaaagcttctgttatgaatttcgagtgtctcgatatactacgggacacaatcggacatccgagtaaaaagttattgacatttggaattgctcatagcattc

SEQ ID NO: 107755 - DNA, 228 bp, Glycine max
ttagagcaattcaaatgctcataacttttcactcggaggtccgattaagtcgcataatatatcaagacgctcgaaatcgaacaatggaagctctttagcaattcaaatggtcataactaatcactcggaggtccgattcaggtgcataatatatcgagacgctcgaaattgaacaatggaagctcttgagcaattctaatggtcataacttttaattcggaggtccga

SEQ ID NO: 107756 - DNA, 383 bp, Glycine max
  unsure (1)..(383): unsure at all n locations
agcttaacaaaaggcatgcgaagtgggtggatattctagacaattcccttatgttatcaaacataaaaagggaaaaggtaatattgtagccgatgctctttctcggcgtcatgcattactttctatgcttgaaacaaaattgattggtcttgaatgtttgaaaagcatgtatgaaaatgatgaaacttttggagaaanttttaaaaattgtgaaaatttttcagaaaatggtttctttagacatgaaggctttcttttcaaagaaaacaaattgtgtgtgcctaaatgttctactagaaatttgcttgtttgtgaagcacatgaaggaggtttaatggggcattttggggtccaaaagactctagaaacattacaagaacatt

SEQ ID NO: 107757 - DNA, 234 bp, Glycine max
tctccaaggtggtctttggtatcacatttaaacttgaaccattgtcgatgagtaccttagcgacgacatggtccatacatctgacagacacatgtagagccttgttgtgccctctctcctcaacgggaatctcttcttccgcaaacgcgatatagttattggtggttatatgattaacaatgccttcaaaaccctcaactgagatgtcgtgtgctacgtgggcttcgttgagga

SEQ ID NO: 107758 - DNA, 384 bp, Glycine max
  unsure (1)..(384): unsure at all n locations
agcttgccttgccccatgatttattttatggactnatgacactatgaatgacaaattccttgggaataaggtagtgttgccatgttttcaaagcccgtactaaggcatacaactcctaatcataagttgaatagttaagggtaggaccacttagcttttcactaaaataagcaattggatggccttcttgcatcaacacagccccaatcccaacatttgaagcatcacactcaatttcaaaagatttttgaaagtttggcaacgcgagtatgggggcattagttagcttttgcttaagaacattgaaagcttcttcttgtttctctccccatttgaaaccaacatttttcttgagcacttcattgagaggtgctgccaatgtgc

SEQ ID NO: 107759 - DNA, 235 bp, Glycine max
tcatgggagattttaatatcaaactgagaggaaaaataaaagctatgctaaacaagccaacaaaggaagaaagaaggttgtcttcgaacccggagattgggtttgggtgcacatgagaaaagaaaggtttccggaacagaggaaatcaaagcttcaaccaaggggagatgaaccatttcaagtgcttgacagaatcaatgacaatgcttacaaagttgagctgcccggtgagtat

SEQ ID NO: 107760 - DNA, 384 bp, Glycine max
agcttctcccccaattttctattttagggggagaagtgagtagaaaagggttcagccccttaggcacttctctctttctcgaaatagctgaggaaaattagttccgtgaagaaaatccaagccgaggcgcttccgtaacgtttccgtaacgtttccgtgagtgatttcgcgaaggttttcgaccgttcttcgatgttcttcattcgttcttcagtcttcaacgggtaagtacttcaaaccaagctttttaattcattctatgtacccgtgatggtccacatttggtttcatgtatttttattctcgttttcatttactttttataccccttttgacgtgcttaagccatttatttaagtcatttctcgcttaatttaaaaataa

SEQ ID NO: 107761 - DNA, 258 bp, Glycine max
cctctacaatactcaagcttgaatttgagtgttttaagttggaggtgttgtaaggtctaaagtgattgtggggtgagaattcaaggttgaaatggatgagttggggaagtagaattgttgtcgtcttgaaacttggtgtgtagagaagtttagagcattattagggttgtaataaggagcactagagttgatgatggaggatatagctgaataaactaatccatgttgtgaactcaatgagggagattggagcatgga

SEQ ID NO: 107762 - DNA, 385 bp, Glycine max
agctttcacaacataatttttataaagcacatgaatggagacatgaattgttctcatcatcagctcatgaatttacataataaaacaattttcataaagcacatgaattgacctcatcatcagctcaaaaacctcccatgtaaattttggaatctatatgtcgtcctgtgcctccttctcctgtcatagaataaattacttgcatatcagacatcaaatatattatagtgcaaaatatgaaacaaattttaaaacttcctattgttgaaaggaagagaaaataactgaatctatgtctgtgtcagttgcacaacagagagtgttatcatcaaagtatgaaaataccaagttatctacaaatgcaactaaaactaccacattgcat

SEQ ID NO: 107763 - DNA, 237 bp, Glycine max
  unsure (1)..(237): unsure at all n locations
tctccgaagggcatggttatttctagtttcctgaaaatatctaaaaatctcgccaaatgacgatccttctctttcttggaaggtaccacagaatatggtacttccataccttcgttcacagctttatcacttgtaccctacttttaattcccattttnnnnannnttnnnanannnaaattcttttttttttttttannnannnnttttttttgggcccctcattcttttttcctgg

SEQ ID NO: 107764 - DNA, 385 bp, Glycine max
agctttctaatgggcctatgtgtgcccaggggttgaggaatcccccaaattaaccattttgcccccattttgagtattttgcttatttctttccaaaacatcgtgaaaccctacggatcgcacggcaattggtgttaagcagctcaacttggctggcaaaaattcacatgttaacaaacaatcatccccggacgaaattagggtatgacacacaaattggagattatggaaaatgcctatatggagtccttcccaatacaaccgagagtgtctaatgcctccatgatggtggctcggattatgttaagggatggatatgagctcacgatgggtttgggtcgaaataatgatggcatggtggccttgctggaagttgctaaaaatc

SEQ ID NO: 107765 - DNA, 238 bp, Glycine max
tgaggaatgttttggatccattagagatgtcgctatcactgccagaatacacgtgagcccgcttagaggtaagggatgagtttatcgtaattggagttagaatgaacatgtgtaggaattcttaagggatcaaattgggatttattttgggatgtttattgtattgaaattcttcctgtatgattatgtgaaattgtttgagggtttttactccccgtggattgagaaatatttttgt

SEQ ID NO: 107766 - DNA, 380 bp, Glycine max
agcttctccccctttttgttatttataggggggagaagcgaagaagaaaagggttcagccccttaggcacttctctctctctctcgaaattgttgaagaaaattatttccgtgaagaaaatccaatccgaggcgcttccgtaacgtttccgtaaggaattacgcgaagattctcgaccgttcttcaagattcatcgttcgttcttcgttttcttcagtcttcaacgggtaagtacctcaaaccaagcttttcaattcattctatgtacccgtggtggtccacattttgtttcatgtatttttattctcgttttcatttgctttttatacccccttttgacgttcttaagccatgtatataagtcatttctcgcttaatct

SEQ ID NO: 107767 - DNA, 232 bp, Glycine max
tattttatcattattacctaaatcatttccaaatatgcatatgaattaggaagcatcaacaagaatcaagccaaggctattgtgcaagcaatcaatggggcaaaacacaccaaaagattatgatgatggatggctcaaattctcacaaaggtaaacttatcactttcaaaactatcatgacatgtagaggaaaaacaaggatttcaaatcacaaaatgtcaagagactttta

SEQ ID NO: 107768 - DNA, 374 bp, Glycine max
agcttcatctattttatcattatttttatcggacccaactatctttttctgttcgtatttttataatacttaaaaacaatcatcatttaattatttttgtttattataaattgagtattgccatacttcaaaaaggcttattatattggtatatatccgaatatctttaagtgggaaggtttatgtgatttgatatatttattgtgcattcatattgtttactgtaattgtagctgctgggggttctgattatctgaatgtgcatctccgcattgagatacgtggttttgatttgcacctgagtttgctgtgttactgaatatttagctatttttttcaagtctcttttgtttcttgtcagcttcttcaaaaat

SEQ ID NO: 107769 - DNA, 229 bp, Glycine max
gcattattcttacactcttccgagggatttttttttaatatgcaaatgagttaacggctctataattcttttagtttatatttgtatacgatcgatgacaaattttatttcaaaaatatatggtacgggtaaatgtaaaataaggttatttccaacacgtcaaattggggttatttaaaactaaaaaatctcatcaatattattaaaatctataatcatgtcttgttta

SEQ ID NO: 107770 - DNA, 285 bp, Glycine max
taactagaaaacaaaggctaaactcccttcacctaccagaaatactatttcactttaaatgctctcagaacgtgtatttatacataagtgttggccacagactactaaggaagtttagtggaaccttttccttaacgtatctagccatccaatgactatgccgtctgatcgagtgacatttaatacatattaatgaggggttacaatagagcctacttgtactaattctcatacccaaaaatggttgaatctaacaaacaacaccgtcaaccattgaatgccttt

SEQ ID NO: 107771 - DNA, 229 bp, Glycine max
tgtatggttatagtctcacgattgtcacatgctcatgtaacaattgttagccgtggctatacgagacatcttgccaaacaaagtcaggttaacaataactcgcctgtgctttttcttccattctatatgtagtaaagtcattgatccagtcatgtttgatgagttggaaaatgaggccgcaattatactgtgccacttggagatgtatttcccccctgctttctttgac

SEQ ID NO: 107772 - DNA, 381 bp, Glycine max
agctttgcctcatttatatatttgttctacatattccatttacacgcacttgcttagatggaatatatacactagttgataaaatattgtgaaaacatattagtaatatttattcatatttgacaatattttttaaatgttgccaaaaaatattaacaacaattttactaagtgttagacaaaaaaatgttgctaaagatcacaagtggtagtgacattttgatcacttgttttgcattttagatttcacttttaattagttcttaagtttaataaaaaattcattttgatctcttaaaatttctggtagagcatacttttttttataaaaaaaattgactttaatttagtcaacttagtgaaacatgacatgttgtgtga

SEQ ID NO: 107773 - DNA, 234 bp, Glycine max
taaggaaatattacataagaaagataactaagagtcagtcgggggatcgaagaaacgcctgatgaagctcatatcatctcaaagcctaatgatatgagtatccatcccatcaaagcgagtatccatcacatcaaaatgttcacccacaaatgctcgaagatcgtggagctctgtgaggacttcaatcagcagagaagaagaagtatccctttgtggtggaggagatggggtacg

SEQ ID NO: 107774 - DNA, 371 bp, Glycine max
  unsure (1)..(371): unsure at all n locations
agcttttctattcattctatgtgcccgncgggtccacattgtgtttcgtgcattttgattctcgttttgtttactttttataccccctgttgacgtgcttaagccattttacttaagtcgtttctcgcttaacttaaaaataaaataaatttccaccgaacgtttgaattgtattatccattaacttcggttaaaataaattccgaccgttcggtcatgccgtaaccacgttggaaatcaaaaagaggtaaaaaataatataataatcaaaaagacatcttttagtaaaataaagcggaaaatcaatcggaccgtttctctttgggatttctcattcttaatcgaattgattaataactaaggtgaaacta

SEQ ID NO: 107775 - DNA, 228 bp, Glycine max
tcaaaggaggaaaagaaagagagagagatggggggaacatgaaattgaaagaggaaaagagggagagaagttgaactttgaagtgtgtctcacaagactctcattcatcaaagttacaacaactgttacacatgcttctatttatagcctaggtagcttccttgagaagctttgttcgtggccggcaagtgcaccagatcgcacaagtagtataaaacggtaagaacc

SEQ ID NO: 107776 - DNA, 371 bp, Glycine max
agcttccttgcttcgaggattttgtttttttattggttgctgccaagagctcgcctgcttatgtacgtcacaggttctcactgactgactatgcccgggttgggtcgggattagtcaagcttagttttgggcaatagcaccccacctgacgtccccaaggtctcctgaccccgcgacatatcttcaggtaccactctgtggtcaacaaacaaaagtaggaagactgactcttccacgctttctcacatcaagcttattggattatggggcacccatcatatgtggtactaggtggcgatcgggcgatggcgcaaatcaactctcccacttccacaagtcaagcataaacacaccatccccagttgcccacc

SEQ ID NO: 107777 - DNA, 238 bp, Glycine max
tcttagaaaagtatctgacgacactggctcagacatggagtgtcttctcttactccaacctagctcccacatcccacacctcaaatctaaatatggatagagctaggttggtctatggcttggtgactaacatggagtaacatcaaggtggctcacaaaacactcaagtcccaaaactcacaaaataactcttcaatcccggacttggtcctcaaacctgtgcagccttcatgtttaa

SEQ ID NO: 107778 - DNA, 384 bp, Glycine max
agcttgtgcgaatcaaatcttttctgtattttatctctacatgcattcttttttttctttacccactcctcacgtttggttttttagggaaaaacaccataactaaacgcgccacaaggcatccctatcgcaccagatccaaatctagaacgatgggtgatcaagaggagacacaggaacagatgaaagccgacatgtcggctctgaaagaacagatggcttccatgatggaggccatgttaggaatgaggcagctcatggagaaaaacgtggccaccgctgccgctatcagttcggctgccgaagcagacccaactctcttggcaaccgcgcgccatcctccctcaaacatagtaggacggggaaggaacatgctggggcatg

SEQ ID NO: 107779 - DNA, 236 bp, Glycine max
tatgcgcaagatccagtccgtctagtggaatgacgactgtcaagtggcattccccccgtgcttatgtcgttggtgcccaggagaccccttatcctatacatgactgtgttggatgggtcgatggggtgtatgctggggaagcatgtcgtgtccggaaagagggaacgggttgtctactacttgagcaagaagttcaacacctgtgagatgaactactctttgcttgaaaagacatg

SEQ ID NO: 107780 - DNA, 331 bp, Glycine max
cagaggcatgcagcttgactaccacggagtttttttccatcttcttgcaccgccgccgctcttctctccatgctggcttcatatacataactcggtcgtcttatctgctcaccaagtttaatcatcttcgcagtgagccttgtagctgcggagatggtggagtatcttttcctcttgtagaagccctaccgactataatagttgtcgcgcaagtaaaaaatagaatgggacctcaccactgaacatagtgttatactcaagtacactggtgtatcagcggtttgaaggatttttctgttatgatatgcactcttgccttttaccactcttg

SEQ ID NO: 107781 - DNA, 225 bp, Glycine max
tgagctatatttttacaaaatgtcagaaccggttagcaattcatatcctctgtttttaaccctagatagacgattattgcttaaggcttaacatggttgagatcaattattaataggctcgctaggctacactgctggcggttcactttaaagaaaaattgcatctgcatgaatgaagttattgcatgccaaagaggttaaaaataaatgtattaatcatctttg

SEQ ID NO: 107782 - DNA, 126 bp, Glycine max
aagctgatttattggattcacaatcatgaattggccaagtccttagttggacatccataccttgggcgaatgactaacgatgagaagaatattattgttgatatgacacaattgatggggaaacca

SEQ ID NO: 107783 - DNA, 238 bp, Glycine max
tctttgagaaaacttttttgagaagctagaacttagctacacatacccctctcataactaagctcacctccttgagaagcttccttaagaagattcctaaagaagctagagcttagctacacacacctctctaatagctaagttcacctccttgagatgagaagctagagcttagctacataccccctataatagctaaactcacccctatgacaaaaaacatgaaaatacaaaaaaa

SEQ ID NO: 107784 - DNA, 400 bp, Glycine max
  unsure (1)..(400): unsure at all n locations
ttaagcaccgcggctgcagctatggcgtaaagggttttctatctagcctcaagcatttgatgttggtgcttgtgaacattgtatccttggaaagcagaaaaaggtcagcttctcaagggcagagaagactcttaaagttgaaaaattagaattggtgcacacagatgtttgggggccagccccagtgaaatctgttggaaactcatgctattatgtcacctttatcgatgactctaccagaaaggtatgggtttattttcttaaaaataaatntgatgtgttttctgtgtttaaaaggtggaaaacaatagttgaaaatcaggtaggtctaaaggttaaaagtctaaaatctgacaatggcggggagtatgatagtcaggagtttaaagacttctgttca

SEQ ID NO: 107785 - DNA, 130 bp, Glycine max
tttgattagattcatggtatatctattccagtgaatgcggagttattgaatgtgaatatttaatttctttccatcaatttaagggtgggatttttattattttttttttggcgggggggggggatcctcc

SEQ ID NO: 107786 - DNA, 382 bp, Glycine max
agcttatccttattgcctgtcttcggacttcacccccgtgccactccggaagatttaagccaagcccctacttttgaggggcaactcccaccttatgaagactatcccggacaagacgatggggaaggagatacccatcttggcttcctgctccacctcaaagatcaatccccgcatgaactaccccagccgaacatagttcgccatatcccggcctcacccacacccgtaaaagaatctgttccctttgcggaagataagggaaagattgaggcgcttgaagagaggttaagagcagtcgagggcctcggtaattacccattctcggatttggcagatttatgtcttgtgcccaacatcgtcatccctcccaagttcaaag

SEQ ID NO: 107787 - DNA, 233 bp, Glycine max
tgtatgattatggggtacccatcacatgtggtactaggtggcagtcgggcgatggtgcacaacaagttttccacatccacaaatcgcgcataaacccaccatcccctgttgcccacctccaactgagctcacgtactcccacgtagcccatatcctcgtttctctcaacaccgggtccccatcaatcctcccaagcttccccaacatccaagtaatacaacattcaaacagca

SEQ ID NO: 107788 - DNA, 380 bp, Glycine max
agcttagtgtggtataatattaacattgatgacgtgctcatatttctgataatgaagccgattgtggtgaagttatctgtgaccatgagggacaatatgtgttggggttcaaggtggatcgtggaaagatttcagtggttaatgttgaactgtggggtgtttttcatggcgccaggctcgctttagacaaaggaatgaacaatactattgtcaaaactgagtcttaagaggtggtgcaacttgttactagttattacaatatcaatcatcatcttcatttcttagtgcatgatatcagaaacttttctcggctctcgggaggatttatcatcaagcatatcctaggagagataaatggtgttgtagatgtgtctgctaag

SEQ ID NO: 107789 - DNA, 233 bp, Glycine max
ttgcttatacacccaaaagaaagtaaagatgaaaatgcaagataaaataaagaagaaaatagaacagaaaaacctgaaaagggatcctcttgcattgataaatctgaagtacaccatacatcctttggctttttaggcctgctaggccctaactaggggattagccactcatggtcatgaggggctttacaatgagagggggtgaaagaaagaatgtatacaaatgatagaga

SEQ ID NO: 107790 - DNA, 367 bp, Glycine max
agctatgcataatgtttatctgttcctcaaacaaccctgcaacttagcatctgaagactgggagctttgagcagatgggggtgttgatactggcgaagagggaacaccaactgctctggacctggatatccttgcccttggaaaaaaaactatttgggcattcacattccaacattttcttttaatataggccaagataatgaccagcctcaggctcttgtaagcagtaagagcatcagaaccaacttcccttgacctacacaagactttgattaaagcttggaagcctatgcaagaagagttgaactgggccataatgggttatccctgtgactaagccatatactaacccagctctgtcaaaatt

SEQ ID NO: 107791 - DNA, 232 bp, Glycine max
tcgcgctaagcgtgagatcagtgcactaagcgcagcaggtgccttcagccaggctaagctcgagactggcgctaagcccaatttcacatagtcgcgctaagcgcgagggtcgtgctaagcgcagtgtcacgatttcagagcttatttaaagcctgtattgtgtaaggaactatcattctctgcttttaatctcatttattgttagggtttcttagtaatggatggctaaaca

SEQ ID NO: 107792 - DNA, 298 bp, Glycine max
  unsure (1)..(298): unsure at all n locations
cgcagcatgcaacatagaacattgttttttaataataatanacgacccgcacgcatacggtaccgggacacaacaacaatcaaccatcagaatgagaaaccctccatgagacggcagactcgatgacaagaacaccaaagggactaaaacctgcgacccgtgtaaaaacaacaagcaagaagcgaacctcgacggaacacgaaggcacaagaggagcgcggcaccccacaccggaactcgaaagaatggatgcccatgaggaccaaaaaatggggccccatcgagaggaaacagaact

SEQ ID NO: 107793 - DNA, 225 bp, Glycine max
tgcgggagtgtcaatttccattttttgagagcagagacaggtagtccacccttcttttttatggagaaatgtcttttcaaggtcttgagttcggttctccacttgagctcttttgaatgtgctctgcttgagcatttaaatgtactcctctctcatcttctacctaatattcgagctatggtcaaggccttccaggactcgtgcctcttctttaacattccacct

SEQ ID NO: 107794 - DNA, 379 bp, Glycine max
  unsure (1)..(379): unsure at all n locations
agcttccttgggccattttcttcgaaagcaacacctggcaagttagttctaccaaggggacactactcttaaaacaaaaatgacatacaacctcctcccataaatacaaacatcaatgtaaatttagagcaagcttatgcgcatatttccctacgaacgttcacttcacaagacatcctattaactaagaaaaatgcacccatatacaatcaaggtagcttcattacctagattatttacatgtacttccaaggtgtatttgttatttacatcacacacgcctccttggctaaatttacatacatgcatactcaaagcatttcggggtaccaaaaattgcacatgcgctcatcttggtatntctaatacctatacatat

SEQ ID NO: 107795 - DNA, 232 bp, Glycine max
cttgctaagcgaaattccatatgtagaggaaaaaattcgttgagtgcaaatgtcttgcttagcggcaaccttccacaagaatttttgaaaactttggtttacttgtgtaaggggcttcatgccatgttgtaagtaggccttaaattgtgcgtttaagaggtgattaatgggtcagttatcttcttatgcctagctctataaatacatagaaactcctaattttgaggataac

SEQ ID NO: 107796 - DNA, 370 bp, Glycine max
agcttaacaaatatcttattatacttagacgcaagtgatcatgagatccgagatatagggcgagtagacgaacgcacatcttatttatataccattgtgtggtgcttgcttgaatctcgacttcaggtattgtatcgttatcatcataaagggggagatttgtgatgcaaacgcctttgatgttctgatgatgaacatgatgatgtgctgcaattgatgcagatgagcttttcaagattaaattcaagacaatgcttcaagattacaagtcacaacatcaagatgatcactagaatattaggaagggaattcctaattgaattagcaaaggtttggccaagtgatttatattaaaaagtgtttctcaaag

SEQ ID NO: 107797 - DNA, 227 bp, Glycine max
tcagcttcataccacctccagggtgctggagctacttgacagggacctgatggggcctatgccagtggaacgccttggaggaagcaggtattcctttgacgtagcggatgactgctgaatatggagctgggtcaattatattctacagaaaacacacaccttcgaagtatccaaagaggagagcttggaacgttcaacaatagagggactgtgacatgatgagaaaa

SEQ ID NO: 107798 - DNA, 365 bp, Glycine max
  unsure (1)..(365): unsure at all n locations
agcaagaaagtgtgttaccttttcatnnncacagcagaacactggtaacgtgtctactatcattggcatcattttttcgtcattgaggagccacttgagctgccaggttcttcacctttgggcgtattctttgaaagatccgtgcccccttttttgcacatgttttgtagttgcgtcctatctgaaaccattataccaacactgcctaacgaaagcaaccattaggtcctcccaggaatggactcgggaaggttccaagttagtgtaccaagtaacaactaccccagttagactttcttggaaggaatgtatcaacaattcctcatcttttacgtatgcccccatctttcgacaatacatcatta

SEQ ID NO: 107799 - DNA, 382 bp, Glycine max
agcttggtgagggttcgtgataaccatggaaggttcagttgggttacgagcctacacatgccgacaagagaagggttgccttataaaggaaggaaagaagcctatcccatttacaagggcggggaccacagatggagagggtccctatctgccacattaacaaaagttttgtcagcacggggtggatgcatgaaaatcaggatgttgtgctagatggagaaattgacaaagagtaggaaagttgggtgcagccgtgctcctcgagtttcaaattgaagaattagtggattgtggagcgacccgagatttcggtgtcaaatccaatgtaatccagtagtttgaaccttattgttgggcctaggctttagggtctacttctttt

SEQ ID NO: 107800 - DNA, 237 bp, Glycine max
tgctaagctcataggatgccgcaaccaatcgcgcttggcccaggaaagctcggcttagcgcacgaccatcaacaaaacaatgatttaagttacctgggcttagcgattcaacctcgcttagccacaggtagttcagcaagaggatgagtgttcatcctcaaaagatgaactcgcttagcgcggtaagcgcgcttagcgagttcttcagataacgttacatacaatgagcattgatga

SEQ ID NO: 107801 - DNA, 347 bp, Glycine max
agcttgacaaacctgagggctttcgtttctttgttcgctcctcgacccaccggatgtaatgactccctatcccctggtggtgttcaactttcgtcgaccagagaatgagggtccacattgtttggacttggaaacacatttttatgactaaaggatcctcagctctgaatatgggcgtttactccccttccacgctacgacatcgtgctcaaacacccctgagttccaaggtctcgatcgattcgttttacgacccatcccaaggcgaaccttccgctcgatgactggcacgactgtgttttcaacgttgaaccgagaaattgctaacacgcgctactaacacagcc

SEQ ID NO: 107802 - DNA, 236 bp, Glycine max
tgattacattttgtatttttgtacgacttatgagaaaactttggatttgaatgcataagctgagatatttggaattagacaagaaaaatatgattctgtggtagggaaatatctttgcaggactgcactctatgaaactggccacagtataggataaatagactgaatcttatttgagagatgatctctaaataaattaatgcacctactcctatgctgaagatatatggtacaat

SEQ ID NO: 107803 - DNA, 385 bp, Glycine max
agcttgtctatatatattactttggatacacttttgatttctccagggaaaaggtttgaaaattgaaacgtgtggctttttcttacatatacataaaccttaagcatactttcacagtagtacgacgcaggctcaacgtctcacgtgcatattttatgttcttgttttcttttccgttgctttctcacatcttcacggcaaattttcgtatcctagtaaaaactactctttataacttttgagatttacgtggtttaccaaaatttttaaaagaatgatatttacgttttttacgtacgtttcctgattcagtcacagaattaacatctaagctaataatttattgttttggttacccgtatgaatatatgtattttgttgagaa

SEQ ID NO: 107804 - DNA, 237 bp, Glycine max
  unsure (1)..(237): unsure at all n locations
taagctccttcaacttttcaaggctcttaatatttgaagagtatccttgtggaaccttcacccgacgaagacactgacaaaaacttatcttctncttcttggacaaagtatggcaggctgggggcaagtaaattttcttcccatcagaccttggatgcaactgtgctcttatacccatatcagctagatcttgacgggtattcaagccatccttcgtcttgccttgaatgttaagga

SEQ ID NO: 107805 - DNA, 388 bp, Glycine max
agcttccatcaactttaatctattacttaggtcatctaatcatcacattgttcttgagttgttttccatatgttggatgaccactttgttggaccttgtggcctctgttatcttaagagggataggcttataatgcagaagaagcaacaacaatcaatttaacaatgttctttaaacatgcaagacacaattgattgcaacaaaataaataagataagggaagagagaatgcaaacacaattttatgctggttcggccacttcctgtgcctacgtccagtactcaagcaacccacttgagatttccactatctttgtaaaatcctttacaaagtctgaaccacacagggacaacccatcccttgtgttcagatgctttacaacaagaa

SEQ ID NO: 107806 - DNA, 238 bp, Glycine max
taggaacccatacttgtttcttcaatgcaaggaaacatatttatggctaaggacctaaattttggttttagaagtagaaaagcatgaaaattaggacttgcttatgagagttttactcgaatttgagctgccccgtgattgatactttgcgcctaggtagcgtggaaaaagcttttcaatagaatgtagatatacgtgtgaatataggtaccatggaaaataccttgcaacggtgtga

SEQ ID NO: 107807 - DNA, 390 bp, Glycine max
  unsure (1)..(390): unsure at all n locations
atcttaagtcactgcggctgcagcttactttctgctttttatnngcacacctgcttccagaggaaaacacgttgcctaaaagctactatcaggccaagaagatattgtgtctgatgggtatggagtatcaaaagattcatgcttgccctaatgattgcatactatacaaatatgaatttgaagaaatgtctaaatgccttaggtgtggggtgtcacggtacaaggtgaaggatgatgaggattgcagttctgatgaaaactcaaagaagggccctctagtgaatgtgttgtggtatcttcccatcattccaaggtttaagcgtctttttgctaatgaaaatgatgcaaaagaccttacctggcatgcaaatgggagaaactctgatggaa

SEQ ID NO: 107808 - DNA, 228 bp, Glycine max
tttggttccgttgctggggaacttctttttatttgggaagttagctcgttattaggtgtctattctttatttgttattcttttattgtttttgtgaatttttgtttttgtttatgtttgtttttctctttacttggtgactgctgctctagttagtgcttcgtatgcatagtaaatcttctacagatgatttagttccatgagatgtggagctttttaaaaggtgaac

SEQ ID NO: 107809 - DNA, 376 bp, Glycine max
  unsure (1)..(376): unsure at all n locations
agctgtnattnttgtgtgtttgtttctctngggcatagaccacgcgtcttccctccaacctactggtcagaaattaatcttgctcgcagaatagaatgttccaactcatgtgaacgaacgctgcatggccttacatcattgcaccaatcctttgatttttttttttttttttttgtgtgtgtgtgtgtgtgtttgtgttctaatgtgttattttttaggtttgggatctgtttctttgtttttttgctggggggagggaatggtgctgctaatatatgtggtggtggtgacttttggggctaaatgtgtgttctgtagggtcatgtttgatgacttgcacgagatatgggtgatgtgtgatttgacttgaactaat

SEQ ID NO: 107810 - DNA, 233 bp, Glycine max
taatccatcattatttaagagtggcatttaagatcttcattcaatactttgtgtctgaaatctgttttgtaaaaacattctcctaggatttattgaaatcatatgaagtataaatgaagtccaagatctgaaagtgttgatctccattaaaagacgcgttatgttgtgcagacctactctgatgggtgagaaatgactttctaatgaagtgtacaacacaaaagtcaataaga

SEQ ID NO: 107811 - DNA, 371 bp, Glycine max
agcttaaggatggtatacttatttgttggtgaaaacaacagcgcagaacggaatctaataatgcgaaaagtagagatcctagggctgcaaactcgtaaataccgcgggtatggcttttgaaaggggggaaaagaagtttttgaatgcaaaaacgtcctccctttcgtcacttttatattctggcgcaggggttgctcgcccaagcgagctaacctgcacttttatttttgaggggaacattaaccatgtcccctcctttttcacggggtagcgtttacctaacttgaaccttcttaagtcagaattaggcgtcaattacttattttaaaacaaacaaatagtaaaagaaaactgtgaatacaaaagatact

SEQ ID NO: 107812 - DNA, 232 bp, Glycine max
tctttttgcctcttgttctgctagtcaagaaacgtgacgactcatgaagattttgtgtggactatagatcccttaatgctcttacgatacacggtcgggttccgattccaatggtggatgagatattggacgagttgggaggtgcccaatggttttcaaagttggatttgctgcaagggcaccatcaaattttgatgaaggatttcaatgtcgacaagacaacattttgcac

SEQ ID NO: 107813 - DNA, 358 bp, Glycine max
tttttatgtctgttggtgagcgcacaccgcaaacgctaatcatatacatggtcttttggctgtaacctgcaaaaaggttgttatgagacatacttattcacaagcaatgaaaggctaattaataatcgaatggaatcatatgccatattaagtaaactggcctccctactgtggctcatatcgctactgatattcttatgagaggattttgtgaataaggaacaaaagagttacattcttacgaagcaagagaaaaagttgatatctccaaaattggtagaatatggtgtttgatttggatattcttatttgcaaaacaagtactgaaagatcgaacattaatagcgaagtgacatct

SEQ ID NO: 107814 - DNA, 234 bp, Glycine max
tctccataatttaaaactaggtcataaactaaaactagtttatgcataggttaaaaattagcttttggagaagtaatatgagaaagcttctactcattagcttatggagaagctttttctttttaattttcttctcctattagtgcttatagaaaagcttatccaaacaaggtccactatatattctgcaatctggtactgtgccatatatatggatggtggttttggacattt

SEQ ID NO: 107815 - DNA, 234 bp, Glycine max
tctatactttttacatgaatgaagctctgataccacttgtcatacaagtggcctcagatatcttaaaaagggggttgaattaaaatattgcccactatttccccaattaaaattctatttcactttcaatgcaagttataaattcccttaaaaatgaactcttaaataatgattcaaatataacaatctgaatataaatataacgcccttataaataaaagagttcaagggaaa

SEQ ID NO: 107816 - DNA, 367 bp, Glycine max
agcttggtgtgatttactcttatgtgtgtgcgcctatccaatttgagtctcttggtggaaataggtcatttgtttcctttattgatgacttgactaggaaggtatgtatttacttgattaaaagaaggagtggcgtgattgaagtgtttaaaaagttcaagtgcctagttgagaaacaaagtggcaaatctctgaaagttttaagaacaaatggcggtggtgaatatgtttctgatgagttcaatagtttgtatgaaagagagggaataattcatgaagttattcctccttatacaccataacataatggaaatacaaagaggaagaacataaccactattaatatggtgagatgtatgcttaaaag

SEQ ID NO: 107817 - DNA, 231 bp, Glycine max
tctcatggcctttttatgactccaaatgaatatttagttatgttatttattggcacacattaatttgaagcctagaacattaaataatgaagcaaatactccaaagcaggcccaaaacaacaacagtacatgtaaatgcaaaagaaagcagtgtttgactgtttatatatactatcaaaacttggatttaattcatgggtccaactatttgacaccctcctttattttctt

SEQ ID NO: 107818 - DNA, 378 bp, Glycine max
agcttagagtgagttatggtttgctagggacccttaggtaaggaattgtgcaaaaaatgaaaaaaaaattgtgacttacgataatagggtagcgaagttcacgaccagcctatgaatttcatgttgcccgtgaaataatttcaaacagggcaacaaagatcacatccagcccgtgaaacactttcagacatgacaacaaagatcacaaccaacctgtgaattctctattgcccgtgaaccaatgtagaactcccaaaattcaaagatcacaaccagctcgtgaattccccgcttcttgtgaataaactttggtgctttctgacactagtcactaaagttcataggtagcccatgaaattgagtttactcatgaaacac

SEQ ID NO: 107819 - DNA, 229 bp, Glycine max
taacaaaaggcatgccaagtaggtggaattcctagatcaattcccttatgttatcaaacataaaaagggaaaaggtaatattgtagtcgatgctctttctcggtgtcatgcattactttctatgcttgaaacaaaatttattggtcttgaatgtttgaaaagcatgtatgaaagtgatgaaacttttggtgaaatttttaaaaattgtgaaattttttcagaaaatggt

SEQ ID NO: 107820 - DNA, 366 bp, Glycine max
ttctgtaatctggatttttgtaaagcccgaacactgcgtgtggttattatatgaagatcctttaatgcatactatactgtaatggttacaaaactttgctcttttcactggatcattaatgtgtgggtctgttttcatttgaattcatgatgactgatgttgtgcttcctatttttgatcttgatatgaaattctatcagatagcaattgttgggcgcccaaatgttggcaagtcaagccttcttaatgcatggagcaaagtatgtcacagtcattttacttatttattgaatcttttctgtagatcttagccttggtgttggtcaaatgaattaaaccatgcacataattatttttatacttaat

SEQ ID NO: 107821 - DNA, 230 bp, Glycine max
tctcacggatcaacttgatctgtatacttctttcggatcaacttgatccgtaactcgtatacggatgaacttaatccgtaagaaggttatggatcaagttgatctgtaaccttcttacggatgaacttgatccgtatgacccggttttaattaaaaaaaatgtaaaacatgtttaaattgatgaaatatgttttttatttgggtttagggttagttttgagggttttagg

SEQ ID NO: 107822 - DNA, 255 bp, Glycine max
ccgggggaatccttctagaattccacctggcaggcttgctttttttaggaattggcttgctgagatggagcaactcctccacattggtgctggttgcactgaaagcaaccctcagcagcggttagacatggcggaagccattagaaggataatagagattaaatttgagtgtggtcatgaataaagaagccttgcagattctcatcatgctgaacaatcacagaggaggcatggaacaaacagcttcggaaactg

SEQ ID NO: 107823 - DNA, 217 bp, Glycine max
ttcttgataggttttttcttatagaacaggcataggcttatttttagggtgcggaaatataatattcttactagggttcgatcaaaacattttttaagctatgatactttgacttcacattactatctcattgcttcgtgatcctataatcaaggactcttaattacccttaaggataaagataagatcccttctatattaatcattaaaaataata

SEQ ID NO: 107824 - DNA, 213 bp, Glycine max
ttcttgataatgttaagacacatgaacagctctaggcaataacattcatggggctccgaaaaatggtgagaatggaggattgccttgagggtcctcacttaggcaatcatgaaacacaactccaaactcgaaagtggaggacacatgaccagccctaagcaataacattcatgtggctccgaaaaagggtgagaatggaggattgccttgagg

SEQ ID NO: 107825 - DNA, 382 bp, Glycine max
  unsure (1)..(382): unsure at all n locations
tgcatccattanaagagaatgagcatgtgattggaagtatgactgaatatgttagtcagtttgtcagattgattgtgaaggaatgcattgagcgtatcccagtgacagcgtgatatttaaattttgagagaaacgactgtcatttagtactgatttttgcatgaatctctgaagtatggactgaatgcatgaaattgattgtgatagccacttagccaaaaagttgaccacgtgctagaatgatttatcccatgcacccagtttgagctgaatgaattattaattgattgaaccctgagcctatatagtgttatctcctgctaccttgacttangttgtaggagagcatcatccataggaagcgtggttcaaagcaaatttg

SEQ ID NO: 107826 - DNA, 214 bp, Glycine max
ttcttgagctagttaagaagacaaccattggcatccaatcctattccacgaattcatcttcattccttgccccttcatcttttacacccttttgtacagttaaacacttcatgaccttgaagaactaaacaacccattgttggggagcttctcactaaactctcttgatgtaaagactcttactatctatttaatcgtattactagttttattg

SEQ ID NO: 107827 - DNA, 384 bp, Glycine max
  unsure (1)..(384): unsure at all n locations
ctacaaaaagatttganatagcttaatgatcttcatgaccatctaaataaagaaagatatgatcaatggagaaagtgtgcacaaacgcacaaagagtatagggacttcaaaaaaagtaaacataatctttgggtggaatgtaaaagccacaaaaagtctatgaagttattaaatgaaaagcttttgaagaatgaagctttagaaggtcaatgtcaagatgttgtaaaactctatgaggaaattgactctttaaaatccatattgaccaaatttgttagagtaacaaaaggtcttgacaaattgttaatgtatagtagatgttctaaagacaaatctagaaataggtaagagggagaaatatatagccatgataaaaaaaaacat

SEQ ID NO: 107828 - DNA, 216 bp, Glycine max
atcttttagcgaccccggatgcagcggccaaacaataattgctgctaatattgtcactaaaaactcaataattgccactaagaactagttttggtgtagtggttatacgttaaagctagactagaactatataaatgtcattctgagtggtggtgaaattcactactatgctcgttttactatgttactaggcctagacccatgtgatgcacggat

SEQ ID NO: 107829 - DNA, 386 bp, Glycine max
tggatggaatctcataaatgacgctgatgctatttgggtgtgcattcttcgtaacaagtatgggtgtggctctcatactctccctagcatgaaccacaagaatgttacatctcatacttggaaagctatcactagcttaaggcaccacattgattctgaattgagatgggtggtcaataatcgtcaacaaggcaggtttttggacaaattgttggattccaggtatccaactcttgcaaatctgatcacagattctattttcaagcatagtgaaatttttcgttagcttcttatgtgagagacacaaggtggagatgggaggtcttgaacacgatcctaccacttatgacagagatcatttgggtcggggtattaaatattttcat

SEQ ID NO: 107830 - DNA, 207 bp, Glycine max
ttcttgtccattgaatttacattttcaaatattccatattggggaatctaaaataacagacaattgattgtacaaaacaatgataggagtaaaatctagtaacatcataatttaaactcactgcaacggataaatgacaatcaccatactcaagagcctcatggataatgataagatcttcactaccctaatctaagaaaattagac

SEQ ID NO: 107831 - DNA, 206 bp, Glycine max
ttcttggagaggatgcttcaatggaggaaaataaaaagggagagaaagagagaggggggagcatgaaattgaaggaagaaaaagggagagaagttgaactttgagttatgtctcacaagactctcattaatcaaagttacaacaagtgttacacatgcttctatttatagactaggtagcttccttgagaagctttcttgagaaaa

SEQ ID NO: 107832 - DNA, 380 bp, Glycine max
ttttcttaagcttttgctactacctttttctccccctttggcaacatcaaaaagccaaagaacccggaaatcaacacagttataacaatggagtagcaagatataagcatcagagtattaaatacaataagccaaactcacaaacaagaaataatcaaaccagaatccaaataactgaaaatgtcaacaaccacaaaacatccaagactgaaatttaaaatccacaagataaataagcaaagtacttagcataataatgtaaattctaagaaactaaaagccaaaatacacggcttataaaagataaataatcagaatctaaaagctaagaagacggaggaggtggtggaagatcgaaactctgacgaatgtatccgaca

SEQ ID NO: 107833 - DNA, 207 bp, Glycine max
ttcttgtgatatgtttgggatccactaaaaacagtcctatcattcatgaaagaaaaatttaggattaacacgagaaatataaaaccacctattccaagggccatcaaagatattttccagttcagggcattgcctgatcatcttcatcaggcacccatcgctgtaattatctccctgtctcaacatgacaggattgagatattactg

SEQ ID NO: 107834 - DNA, 367 bp, Glycine max
tgttcgggtagaaatttaattgtttattttatattttgaacctcattggaaatcggatggatatgcatgtttttaatgcttatttccgttgaatacttatatggctacattatcaagaagaaatgagtgaccttaatgctttattattttccaacataccggcaccataccaagatctgatatgctaaatttttaaccttataatatacctgttttttatacgaaaaccctaaccttagcccttgaagtgaactaaagtttcatttttctttgattattctaaaaaaaaaatgttcatggcaacccttatctaaaattaataatccgaaagacattgtaatatcacacatatatcgtgattgcatgt

SEQ ID NO: 107835 - DNA, 208 bp, Glycine max
ttcttaatattcatgttccaataaataccttatgtattcaatattttgggctattctcctatggcatacttgcagcaattgcatcaattattgtaatcaaaagcaaaaaacatattccatataaaaatcttctgacctcatgcagattctgaggaacttattttggacttgtactaattttcttttggcttcattatccattaaatag

SEQ ID NO: 107836 - DNA, 381 bp, Glycine max
  unsure (1)..(381): unsure at all n locations
taaagtaattntaagctaaaaaaatagtccaaataaatagccttacaattaaatattactataacttaattacccagccacttgaccgtcaacaaaccatgcacgccatttgtcacgtatgctcgtgttgaatgaattgatccaatattgtgtacccaggtgtggtacattcatatcaagatcagcactgcaattaatcacccgcaaaggaattactagtttgatcagataaactttaactgcaacataattaatgttttagtgtatgtaattcgatcggttggaacaatgtcaaaagagaaatgacgtcaacaagctggctcaaaactaaaaaaataattagcagttcaaagttaataacttgatcgttggtaagctaat

SEQ ID NO: 107837 - DNA, 375 bp, Glycine max
tgttaatttcacatttcagggtgtaacatactgattctgaatctatgattcttagagtatgtttagattttataggaatatataaattgatatgcttgaaaaaataggagaagtatcactgaattgctagcctgttattacattaataccttcatataatgaaatctaactatcttgagggttttgaagagcctgttagtgctactttattgttatctttcttaattttttaaccacttagctattttggttaaaaataactttatattaaaaattaaattattaattaaaaattcaaaatatattttatatacttagatgatttattttcttataatttagttacaatattttataaatttaaaaatacatgct

SEQ ID NO: 107838 - DNA, 196 bp, Glycine max
ttcttgtgattcctcaatacatccttattaattgtttaattcttacttcttaaatgtacgttatatacttgttataggaaccttataattctaagtatatatagttgtagtatggtgttctgccttaattgcataggtagtatggttgtttgtgatttcttgttcttagtgatgctaatactctatagttggatga

SEQ ID NO: 107839 - DNA, 374 bp, Glycine max
tgactctagatcttgtcattggccccttcaactcatgaagtgtttctaggtccttgtgctctttggatagccctctattagcattggtcagaatatcagccagttgatctatggcaggaacatgaacaacattgagttgtttggtgagaagtttctctcagacaaaaaataaatccagctccatatgcttggtttttgagtgaaaaacaggattatgagctaatgaaacaattctggtgttgtcacacaaaataataggagtagtgtaagctacttggagttcagaaagaagagactgaatccaagtaacttctgctgcaatacgagccatgcttctatattttgcctcagtacttgaccttgcaacaactgat

SEQ ID NO: 107840 - DNA, 215 bp, Glycine max
tttttgtaggattttggggtacccatcacatgtggtactaggtggcggtcgggcgatggcgcacaacaagttttccacatccacaaattacgtataaacccaccatcccttgttgcccacctccaactgagctcacgtactcccacgtagcccatatcctcgtttctctcatcaccgagtccccataaatcctcacgagcttccccaacatccag

SEQ ID NO: 107841 - DNA, 385 bp, Glycine max
  unsure (1)..(385): unsure at all n locations
gaagctctatatcccataaaggctntgatctttatgcagttagtacaaaacatgtggtttacatcttttattagttaaccttttgtttctctcaataataaaaaatacatttttcgtttctataaaattggtaaagttcctttcttggttcatgtaaaaaaagttgtctatttttcgttcctataaaattaaagtgtgatatttttttagttcaaagctaggtttggatgataccaaacctacgtgacattttccaatttaaattttaaaatgcaatttatgagagttaaaaattatcgcaaattgtaaaaaacaatattaaaaaagagctagaatggaacccctcttcccacaacaattagcttgtctcatccaagaaaaaaaa

SEQ ID NO: 107842 - DNA, 249 bp, Glycine max
  unsure (1)..(249): unsure at all n locations
ccctcctntacagggccatcctgtaggcacgaccttcttgcatgctttttttnagccaccatctatgggttctgtcatgcattgcttgggtgacaagtttgaatttccaagaaaaatttatgggatcgacccaccttaggacctgaactttgcaaatataaaattatgtctcactgcagtgtttaatgctggtgaaaggactacattatgggtacatatggtgaaaaaaagtagagtgttttatgacac

SEQ ID NO: 107843 - DNA, 382 bp, Glycine max
ctgttaaaatgctttattgtaatattgtgtctttactcttatggctttcttatcataactttttgggtacaagtattgcttaactaatttacaatcattcttatactttattcagggaaccgatgatgaggttgtcgattgctctcatggcaagcaattgtgggaactttgtaaagagaaatatgaacctttatggctcaaaggagggaaccactgtaatctggaactctatccagaatacctacgacatctcagaaaattcatatcaataatagaaaactcaccatcgcaggggcaaactttgtggaaaagcataggtggagttgaagaaaccagaaaaagtgttgattgttttgaagctccgaggatgagtgctgatcta

SEQ ID NO: 107844 - DNA, 215 bp, Glycine max
atcttatgcacggaaaatgtaattatgaaattgagatgcccgaagaaacaccatttcctagttaaccatgcattaggtaccatgttcaattattttgtttttaagtgaaacgggtttatgatcccaacatggttggctcgtggtgcctaacacatgaaactaagaatgtagtatgaagtttcacgcttcccccttttttgtttttgttttgtaga

SEQ ID NO: 107845 - DNA, 308 bp, Glycine max
  unsure (1)..(308): unsure at all n locations
ctaagcttcttctccggagcttctccgacagcccttggacccatttgcttcgaggtaggtggccttcttcttagctttggttttgttatgcactacattagggtaggttagtgtaacgttaggttagtggaaccttatggtagaagacgaaacctagggtagaagacgagaggggagaagacgagaggacgccggaaaaaatggcggaaatcgctgacggaggagtcttccggaagaccccttatgggttcttccggaagttccggaagaacgttttccggaaagtttccggaggnnttcttatattt

SEQ ID NO: 107846 - DNA, 214 bp, Glycine max
ttcttgaagaaattgctaaggagaatgtggagaaggtacgaagtattcttcaacaattatatgatgagtatgtggctttaagaaatgaagagtcatcctcaaatgaaaggaatgttggtggcataaactcctcaactatccatgtgcctgatacattttctatgactaggtttgatcaattaatgagtcttgtgcatgaaaaggaagcagtccc

SEQ ID NO: 107847 - DNA, 384 bp, Glycine max
cctacaattatacagctgatcaagagccaacacataattactagatttctaacaatatacatcaaatagtgaactagattttgttatactttctttctggtggcagatgtgtgctaagacttggggcaagtgccctctctaccttaaaatttattttggaatatgcattattggtccactaaatattttaaattgcccactaatcaataagttatataaacatggaaaaaaaataaaattctgttaccgataaactacaagataaaaaattatattgttttgaaccccagacctaagaaacccccttactcttttgtctattttgcttttggtatgtgaaagtcattgcctatgcataaatttttaataagaaatcagttgtag

SEQ ID NO: 107848 - DNA, 216 bp, Glycine max
ttcttctgttgttcagtttcgagcttttcgatacattatgcgccttaatcggacattcgagtgaaaagttatgaccatttgaatttctcgagagctttcgtagtccaattttgagcatctcgatatattaactccccgaaccagacatcggcgtgaaaagttatgaccacttgaattctcgagagcttccgttgcttaatttcgagcttctcgata

SEQ ID NO: 107849 - DNA, 388 bp, Glycine max
tctcggtacatcacgggcctcaatcatactcccatgtcaaaagttatggccctctgaattggtccagagcttccttgttaagtttcgagcgtctcgatatattatgtgtctgaatcggacatccgagtgaaaagctatgacaattttaatttctcgagaacttccattattcaatttcgagcgtctctatatatcatgggcctcaatcatacactcatgttaaaagttatggccgtttgaattggaccagagctttcttgtttaatttcgagcgtctcgatatattatgtgcctgaatctgacattcgaagcaaaagttatgaccatttgaatttctctagaattccattttcaatatggtgcatctcgatatattatgtgccctgat

SEQ ID NO: 107850 - DNA, 207 bp, Glycine max
ttcttgccgcccagctcgcccaggcgagcaaggttgcttcctcgaaaagcaacagccttctggaggaatcttctggaaggtccaagtgggcctgattgctatttacacccccctgtttactaaatgcaccccctttctatttttttgtaattctttttccgtaacgttacgaaactttacgaattttgtaacgatacttattttcct

SEQ ID NO: 107851 - DNA, 381 bp, Glycine max
  unsure (1)..(381): unsure at all n locations
tctcctgccttntcctataatgtggggaaggagggaagaacaaacctgttcaaccctcctggtatcagagattcactggagattagtgcgaaaaattgactcgtgcgcttagattttcatttcatttactttccgtaccccctgttgatgtgctttagccatttatttaagtcattttctcgcctcagataaaataatatctatatccatcaatcatgagcattgtaacatgctttaattgctgtgcaaatgaatttcgaccgctcggtcatgtcgtaaccacgttgaagaccagaaagaggcaacataatactatctcaattgagaaatatctttgtgcaataaatcacactacaaagatcgtcggacgttttctttggg

SEQ ID NO: 107852 - DNA, 218 bp, Glycine max
tgttgcatgcattcttttctacaagtcctaatggacattctaaactagaatcaactcactttagactccaatttccactaaccccaaatttggctttctaaccctcaaaatctcacacttttccacctacaacactaccattctcacatttaactctaagctaactctccccatcctctctaccagttttctatctacattttaagcatacatatatc

SEQ ID NO: 107853 - DNA, 382 bp, Glycine max
tcgcatatcctttgataaaccttcgatagtgaccagtgaggcctaacaaacctctcagctgcttgatattgagtcgtgtaggccactctagaactgcctgcaccttaatagcatccatagcaactccttcacctgaaactatatgtcccaagtactctatctccaatacaccaaaagagcatttagacaacttagcaaacaaaacattttctttcaacactttcaatacaacctctagatggcataagtgttcatgccatgtggaactatataccaatatatcatcaaaaaactataacacatatttccttaaagcatgttggaaaatatggttcatcaaacactgaaaagaagtcgtagcattggtcaaaccaaatggaat

SEQ ID NO: 107854 - DNA, 207 bp, Glycine max
tgctttaatttttcacacttaccaacttcttcaagcttccaagtttgtgatcttcaaggataagagagcttagtcacatcttttacttttacattccctgaaatcatcttaaaaaatgtcggatctactattttatgacttattttggtttcttgacccatttggtctttgtttttagtttgaaaatgatggtgatttaagtttatg

SEQ ID NO: 107855 - DNA, 376 bp, Glycine max
tatgatttacactgtttatgattactgttttatgtcctccattgtttctttgataatgatttttttgggtgaattttgaaaggaggcctctggttgatacaggtgtacattttatgatgttattcattagttatgaaaaatgtattccggctttaataaaaagagtgaaaagaaactctccaatttatccttgtggtcagatgcttgtttgtatggtatcaggatttgtccatgaccttgatgtaactaattctacttatcttcatggattttgtgtacttgccctaattttacatggaaatttttgttgcagattcaagtgataaaacgctcagtagaagtcccagctgatttgtttgcacaacgatttttgttt

SEQ ID NO: 107856 - DNA, 206 bp, Glycine max
ttcttatcattggtgaatcttagggaaataattgcgggaattttgtggaaatagaacaatgcgaatactgcaatcagaaagatacgaatcataggatgaggcagtgagcatgtgcaggccaagaaattctgcttatttccatacattgattaattatagaagaaggcacaatgctatccaaggtctgatcatagatggtgtgtggg

SEQ ID NO: 107857 - DNA, 376 bp, Glycine max
tgaaggtgtgtaccccaccattttttcatagtaaaacactggtaatgtgtctactattattgtgaccatctctttctcagtcattggaggttcttggggcaagtagcccccttgtacttgacaaagtctggcaccttgaacttaggaggggtgatgatattgggtactaggaacaactcttctaggttcgcaaaggcataatcttcgcctccttcaatggccctgagcctttcctcttgatgatcctactttcccatatctgccatagcatgagggtttttacccgctgtagaatgcaaggggtgtggttgtgggtgatactaagggccttccaaagtgttttgtaggagtataccaccaactgcttgcccttcag

SEQ ID NO: 107858 - DNA, 208 bp, Glycine max
ttcttcgaagggaagagagggaccaatcacgagtacatagcatggtcttaaaggaagagttagctgtttgctcaagattcaagaggagtttggcccaacacttagaagccacagagaaaagcatgctagctataatagggcagtacaaagaggagctaaaccaatctttggctcatgagcaaaagctagtagaggacttcgcacaagc

SEQ ID NO: 107859 - DNA, 197 bp, Glycine max
ttctttgtggatttggacttcgccggggaaaggatcgaagcgggtctgaaaagagacaaatttgatcatcctattttgatgaatgagaaaactagggcaaatgaagaggataagaatgaggaaggaacccatgttgtagcttccattcctacatggccaaacttcccaccagcccaacaatgtcaccactcaaccaa

SEQ ID NO: 107860 - DNA, 197 bp, Glycine max
ttcttgtctagagcactacatagactcaattgatagtcttcgggtgctactacgttgaagggatcaattactgtctagcttcttctcaacattaaaattgtccattattattgattatactatggaggctcaaaggatcaaattccaaatgactaaatatgaacaccataagataaaaaaaaaaacattgataaacg

SEQ ID NO: 107861 - DNA, 325 bp, Glycine max
  unsure (1)..(325): unsure at all n locations
tgtacaattncaagttcattcattatacctttaatccacagggcttccttcactccatcaactagggccatgtacttttcttcagttggagaaagagccacctactgaatgtagattttctttccaactgagtgtgtggccgaacaaacgaaacccatatcctgtggaagatttccctgtgtccacatttcctcccaaagttgcatctacatattttgagaatgctgcctcaagggctgtcttcttgcaccttaggtcaaccttcaaatattcatttatataccttactgcccacttcacaacattactatgtgcactgccagga

SEQ ID NO: 107862 - DNA, 230 bp, Glycine max
tctgcaggcacgcatttttggctgcattttctatccttttccccaaggttcaacctctgttgttgagccttacaacagtgtcctctccactcattcccttcttgagcacactgatgtggctgtcctgctcgacaacgaagccatttatgacatctgcagacgttcacttgacattgagaggccaacctacaccaaccttaatcgtttagtttctcaggtattgttattgt

SEQ ID NO: 107863 - DNA, 385 bp, Glycine max
tatgaggaggagaagctggaaaaaagatattgtcttttcttgcttgcattcatatcacacttttaccaaaaacatggacttgaaaacatctgaataggtgttggacaagatccaagacgaatttgagggcgataacatgatccaaaacaaatttgatggcaataacaaggttaaatctgtcttttttactgtttttcatctttatcaattcaaattcaaattagaataaagaatttgaattgattaagatgaaggacaatgagtcaaagattattttgacaggttaattgatgttttaaatcaacatcgcttcttggtgagacatcatttagagatcaaaaggttgtagaaaagatcatggtttcagtgcctgaaaaagttgaag

SEQ ID NO: 107864 - DNA, 217 bp, Glycine max
  unsure (1)..(217): unsure at all n locations
tctttctttcatgactttactngnangaagaacgtttgccttctggaggggttgttactgggataggtcctgtgcatgggagactgtgtatgtttgtggcgaatgatcccactgttaagggaggtacttattatcccattactgttaagaagcacctcagggcacaggagattgctgctcagtgcaaattgccctgcatatatcttgtcgacagtgg

SEQ ID NO: 107865 - DNA, 390 bp, Glycine max
tttaccacacgtatgcaactattgtcaatctcatatcattcaattggaaaagatttgacaaagtggattggaggtaaaagttgacaggttgatgtctacggaaacaagagaaaagtaaaagagcaaaacacaggcgtattttgataagtttgagttattagtaaggccacaaaagagatacgtcaggataatttttaaaggaatttccaagccaagaggacaatgccttgatgcaccaaagaagtaatgcataaaagaagaccaaagagggattaaatgaatgaccaaagcctcaaggataaatagatagagcataatatcatcattcaaaatattacacggtaatattaagggtttcaaaaggaccatcaaattcacaagataatctaa

SEQ ID NO: 107866 - DNA, 209 bp, Glycine max
tttttttgggctttttgtctttcattcagaggttgaaagtggaaatgaagccaaggatgacttgccgacattaatttgctatgatgctagagagctagctagctttatttgctaagtttttccggcaggttatcctgtggctacatttggctttctttctctaatgtaagattccggagaccgtatcatatgggcaaggcacatttcga

SEQ ID NO: 107867 - DNA, 379 bp, Glycine max
gcttgatgataactactggtgaacaacacacattgtaatttcctaatgtttactcggccttgtgaccattatttttatcatcacgtaggctttattgacctttgtataattcacaacggcacctttatcatggttttttatgatcatgtttgggggcaacgatattctttatgttgggactataacactattatgtagacttgttctttggtgggatatcagctatacaattgtttgttactcaaactcgctcccactaacttagataagctcgaacgagtttttgtgtcattccaaatacaacaatgacctcttgattattaaacacactgacgggtatagattggtcttgttccttgcatcatactctctaagaggg

SEQ ID NO: 107868 - DNA, 55 bp, Glycine max
agcttagttcagtttatcatcctcaaacagatggtcagactgaacgaaccattca

SEQ ID NO: 107869 - DNA, 386 bp, Glycine max
tgtaatcaattacacacatactgtaatcgattaccagaggagattttcagaaaatattctcaacagtcacagtttttcatttggttcttgaatggccatcaaaggcctatatatatgtgacttgagacacgaatttgctaagagtttttcagaacaacaagtgtttattctctcaaaaagaaaaatcgttttatcctcttaagaattccttggccaattcaattgcaattcattaaggaatcatttgagtgctcagattgtaaaatctatctctttcaagagagattcattcttcttctctttctaattcactaagggattaagagaccgagggtctcttgttgtaaaagaattctaaacacaaaggaaggattgtccttgtgtgg

SEQ ID NO: 107870 - DNA, 218 bp, Glycine max
tttttttctcaattatttgaagcgcgcccatttttttctctctaagatttctctctctaactcgtggtgggtgttgatcaagagagaaaaagtgaggaacttcgattgaagaaattggtaatacttgacgcaaggaaagatccattgggtgctcccattgtggttgtgctcatgcctgttctacaaaatcgaatgatctcacggtggcgtcagggggg

SEQ ID NO: 107871 - DNA, 387 bp, Glycine max
tgtcaatataacaatgttatctgcatgtctattaaaaaaatagcttgaaggaaaagccataaaacaatcctatgttacaacaaatttaaatggcgaagatttatgcttgaaattcaaagcaggctaagctcatataagaatctcattcttgcgttaacataatgatttgaagttcatatcagatctctagttctacaactcattgtaaatgctctaataatgctactttaataagtcatcacgaattaatataaaatggcataacaggatataaattagacattgatattaactgcgcagaaattcaatcattatgaataagtggcagtccccaccgaacaaaacataatatcaaccttcaaacagtgcaaaacataattgtttttt

SEQ ID NO: 107872 - DNA, 206 bp, Glycine max
ttctttatatatatatatatatatatatatactggttaactttcatttataataataactctttagaattgatcatgttgatatggatatatggacaggttaggaaagaaaagctgggggaccgcatcactgctcttcagcaattggtttcacctttcggaaaggtaaatttttttgtatgttctttctttcactttatttttttt

SEQ ID NO: 107873 - DNA, 383 bp, Glycine max
tatactaatagtagagacacttgtcttgacatataaaaccttggatcatactcaaatcattccttatttatgacattgatcaccagtaaacactgcaagttttttgataatgtaaaaatgctaaaaaagagttttaatagtctaaattggagaggaaaaaaatcatgtgacgaggccataaaatttgcaaagctttaaaattgttaaaaaataacttgaaacaataatattttattatgtgacggttaaattatactaatagtccatgtaataaatgcacattaaatctctctattcatgcaataccaccacactcattttccttcttcgcaaaaaaaaaaaaaactgattttctttctctatgtgattacaacagcaggtaa

SEQ ID NO: 107874 - DNA, 118 bp, Glycine max
gagaatttgaaatcattggctttgacaggtccaacatggcttcttttttttttcccttccttttgaccgaagttttactcagacagagaggaaaccaaaaaaagaaagagatcagaca

SEQ ID NO: 107875 - DNA, 381 bp, Glycine max
tcttacttatgaagcataaaccacgatcctctttatcttttaagaaaaccatttgtgtgagaaattggattgagtcacgataattttgattaaaaaataacatcaaaacacaaagaattagaaatacatttaaatttcgttataggatttaactcataattgaattggactaaaatattttaacatatgacaaatgttaaggatactatgacgaagttgaatcccaatcctctcacgtggggtatacagtttacaacctttttcctctcatccatcgaaacgctcatattcaatgacagaaaccgtggccaaaaatcattgcacgaatatgcatggcgcttctgttcatttaaatatatttggtttacataagatgttact

SEQ ID NO: 107876 - DNA, 234 bp, Glycine max
ttctttagagtccacctttttgtcatgcaattttttaggggaatgcctgctatggtaggaataacaagtattccatcatcctgtgggacaattaaaactaggagataatagggtggtattgaagcatacactggacttgccaaaataaattattttagccactttcattataagaatcagtgtacattgttacaccagactaattgcttatctattttccagtcttctaataat

SEQ ID NO: 107877 - DNA, 369 bp, Glycine max
tcaaggagagtgtgcataatttgtattctgtttgggattaaaacttcagttttaaaaagtgtaaaacaaatttagatgttctgatccgcttcacttaatccaaatcaacttgtttgtgacaaagttgtttagggttgggtttcataaaaaagtaacatgaatccaaccaaccttctcatggaggaagcttcagggtacaaattcaataaaagggacaacattttcttgtgtgtgtgtgcgtatgcgaagggtaaaaaagttggccaaatctatgctatcttttttagatttaagtaaaggttccatatatgaaaaatagacggtaggaaattttgaatcccgtcacaactaattttttatttggtatgg

SEQ ID NO: 107878 - DNA, 207 bp, Glycine max
ttcttggttcctaatgctttgttcaaactctcccaaaatctagaggtgaatctaggatctctatctgatactatggcacaccatgtaatctgacaatctcacttatatacaaggtggtaaacttctccaaggaaactatgatattaatgggaatgaagtaagcagacttagtcaatctgtcaacaataacccagatagaatctaaac

SEQ ID NO: 107879 - DNA, 288 bp, Glycine max
ccacgatcaacaaagtactttccgcacccactatatgttgacttcaccaacgctgttattggaatgctgcgacaatctttcaacaccttattcaaacattctgataaggtgggtgtcatgtgaccatatcgtcgtccaaatgtatcgtaagccatgctccatttttcctttgaaatgcgaacaatccatcttgctatggctggactcaattgacgaaatttttctaagttttgatcaaacacatgcttgcaaggagtgtacgctgcatcaaaacttttatcattcaaa

SEQ ID NO: 107880 - DNA, 197 bp, Glycine max
  unsure (1)..(197): unsure at all n locations
agcnncggggagaaaacttctnngagaagctagagcttagctacacacacccatctaaaaactaagctgaccnnncggagaagctagagcttagctacacacacccatctaaaaactatgctcacctccttgacaaaatacatgaaaatacaaaaaaaaagtctctactacaaagactactcaaaatgccttgaaat

SEQ ID NO: 107881 - DNA, 377 bp, Glycine max
tgggaggattgatggggacccggtgttgatagaaacgaggatatgggctacgtgggagtacgtgagctcagatggaggtgggcaacaggggatggtgggtttatgcgcgcattgtggatgtggaaaacttgttgtgcaccatcgcccgaccgccacctagtaccacatgtgatgggtaccccataatcctacaagcttgagatgaggaagtgttgaagggtgaaacttcctgcttttattgttgaccagagtggtacctggagatatgtcgcgggggtcaggagaccttggggacgtcaggtggggtgctattgcccaaaaccaagcttgaccaatcccgacccaacccgggcatagtcggtcagtgagaacctgtg

SEQ ID NO: 107882 - DNA, 197 bp, Glycine max
ttcttccatactgaaacgttgctctcaccaaatatcttcttctctcttctgtgcttagtgtgtaacagtacttcttgctctctatgggaaagtctcttcgcttttgatactgcaccatgcttctatttggactttctacttccactgaaatgccatgttgcatgatcctagaatctgagatccatgccaaccccgtg

SEQ ID NO: 107883 - DNA, 372 bp, Glycine max
tcacaaagtcagcttaatagttatgctcatcgtccctaacatagtaagtagtaaggtttttttttttttttttttgcttttttatagaaccacgactttctttcaattaaataagattattatatgcgataattattttctgagtacttaatactttatattgcttcatgttctaagctcaaagtcacgattcaaaaatcaatcttgtatttaataaacaataagtttgatcaaggacaaaaggagacactcctcattccgatgctttcatttacgatagtgggtccacacacttgcatgcagcttctatgcaaaggtggcagcttgtgtagctcctatattgcaaggtggcacttcgtctatatagtttct

SEQ ID NO: 107884 - DNA, 214 bp, Glycine max
  unsure (1)..(214): unsure at all n locations
ttcttgacagngtttgattcattgaccagcaagtttgcacctttgatatctctacagaaccaaatcaactcaaccattttaacaaacttcaaacagcaatgccaaacagattttattagcaagatagaatggttgctttcattaaacatccttgtcacctgtggatggttttgttactatgtaagnaagctaatcccgagagaatatgccttgt

SEQ ID NO: 107885 - DNA, 386 bp, Glycine max
  unsure (1)..(386): unsure at all n locations
ntacgtttaaagcgaacatacaaatggcatgctcctgttattcactagttggtctcgcaagcaattaacttagactagcgattgtttaccaaatttcagcgtaaacatatcctaaatgtaatactgtgctaacatgaaagacctcgatataatagatcctaattcaatgcaccagaagttgcaacaatttcagcatgattattttgaaggcttaatttatttttttaaaataaattagtctttctattttttaaattgtaattttagtcttcttattttaaaatagaaacatttagttcttcaattttgtgaaattcataattttgatccttccatcaaatttaaaaagcgttgatcaataagaaattaatttaatataactcaaa

SEQ ID NO: 107886 - DNA, 215 bp, Glycine max
ttcttggacaacttaattttacaactaataaaataaaataaataaaaaataaaaatgtaagataaaattaaatttatattctttttttatattcttcttcctatttatttttgctaaattgcattgaaagtgaaatatatacaatattataattataataagaattcagaaaatataatttggtggagtaaaactgtagagtatttaattttaaa

SEQ ID NO: 107887 - DNA, 385 bp, Glycine max
  unsure (1)..(385): unsure at all n locations
ngagatacaatattgtactaagaaagtatgaatcaaaccaattaaattaacaaaggctgctattaggtatctcatctcttggctatttcaagtagttatgcgtaaagacaataacaagaagaatcaagctaagaaaatcgtcaatgtcaactcataattaattaaaacattaacaaaacaattcctacataagtttactaattcaatttataaatatattgcattttgttaaagacttatcaatcctcaatacttattcctgtctcgattataagtaaaaaaggacatatgtcacatttattaaggaaattagttatcttcattaaagtgtgcgagtttcaattaaaaaatgagttttttccctaaattatctttcatttaaact

SEQ ID NO: 107888 - DNA, 216 bp, Glycine max
ttctttgagccattatcctgactcaccacaatccttaccctcggaagcggaaagaatagaagggaaatttccaatcaaagaaagggaaagaaggaagatttccaatcaaagagaaagcaaaaaaagaaaagaaggaaaattccccaatcaaagagtgggagaaagcaaaaagaaaagaaagaaaattctcaatcaaagaatgggagaaaataaaaa

SEQ ID NO: 107889 - DNA, 385 bp, Glycine max
gaccttagaatcctcagcttttagcttttattggtgtattttgatctccttttggtgctttaaattgtgggaatgtgctcaaatatgtggggcaattttggtttgttttcttgcttggttgggttgaattgggggtttgtatgagatggccctaggcctataatgtattttgaagcaatggggcatgccacattgtccccgttctcttgctattgatgcctaaacgcgcgcccaccaagtgttcggtgaaatgcctcaatggcattagcgcgtgatttttgtagggaaacaacctatgggacaatttggtttgcacatgttttctattttttgggacatgtattcagtttcgtaagggctagagtaattgccccacatatatcct

SEQ ID NO: 107890 - DNA, 216 bp, Glycine max
ttctttgatatataatgttgattacagtaacaagtgttgagcatggcaaataaattcttaaaaggggaataaggctggggttaccaatcagaatatataggaaaaaaagggaacaagtaccttgactgaggaggacccactgacagatgttatggagaacctacatgatccattttgaagtgcctggatgttatcatatgtgcattcagaaagatg

SEQ ID NO: 107891 - DNA, 387 bp, Glycine max
  unsure (1)..(387): unsure at all n locations
tcgtgggaaaccagtgattggagggcaatgttggatggtcaagttgatctgtgggattcataatcatgaattggtgaagtcattaattggacatccatacgttgggcgattgactaaggatgagaaaagaattattgttgatatgacaaagtcgatggtgaaaccaaaaaacatcctgctaacattgaaggagcacaatgccaatagttgtacaacaatcaaacaaatatacaatgcaagaagtgcataccattcttccattagaggaagtgatactaaaatgtaacatctaatgaagcttcttgaacgggatcaatatattcattggcatagattaaaagatgaagttatggtacatgatntattttggtgtcaccctaatgcagt

SEQ ID NO: 107892 - DNA, 378 bp, Glycine max
agcttgtaaaagagcatagcttctatccttaaatgaaaacaggaccaatcccattaaagaaaaatactgattatgattcaacataaaataacgaggcagaagaaatgtacctcctttgcaatactgtgttgcaaatcatttctagcaatctctagtctctgaatagcaagcctacagacatcaaaagtattagttatctgttttcaaggtctaaaattgaaagaaaaaaaaaggtgaaaaaaggagacaggtataaagcaaatcacataatgcaaggagataaccatacatagctggtacagctaatgaaaaaagccaagctagagaacctaacacgacctatccaaaaagtctataaaaaggcattgaaaaataact

SEQ ID NO: 107893 - DNA, 205 bp, Glycine max
ttcttgtggactataccttcgaccgaacacggccgtgtttctgtttaggcccggattcaaggcgggctgcagcaccggctccgcttccctaattgtactggaggcagttgcggtggctttatcctctatggttttctggagttttaacatgacctccgagatggaagccacttgatcttttaaggccgatagatcggccttcatc

SEQ ID NO: 107894 - DNA, 382 bp, Glycine max
tgtaggaactagttcagcagaggccaattatgagtgtagagcagttcattgagaaagtggcctggcctggagcccgaccttcttttgtgggacataatgaaagttttacagcccaggcacctcaaaagcatgagccagaaccagaaaacgatcactcatctgaagccaccatccctggagctgttgattttgcaaaaagaagattagagacgagatctaatgaggctgctcatcctggaccagtgccagcatcagctgatgcaccattttatctttttgtgaaaaatggatgtatgttttcattttgaattgagtgcataattgtgatggagtttgtgtttcctttcatgagtttgagcaaatatgtatgttagacaaagaa

SEQ ID NO: 107895 - DNA, 206 bp, Glycine max
ttcttctatagtttctagaataatcgattatcaaatgcagtaatcaattattttgaaacaaaaagagctcctaagtttccaaacacaatctgattgataataatacgtggtaattgattattttgagctacaaagaccctcttcttttgaaactggcttaggtaattgattacaaaaatttataatcgattaattagatgaaagtt

SEQ ID NO: 107896 - DNA, 271 bp, Glycine max
  unsure (1)..(271): unsure at all n locations
ttaagcttgcctgtgcgangcaacagtttttatggttttgtaacgacggggggcggcttctaactctatatggcgtttgtgcattacaactgttgcattactattcctattaatgccaaaggaaatcttgggaaatatgtgttatgctttaatccccctcacgcagatgtatagagaaacatcgcgggaaggaaaggcatgtgatatatctcgctgttgagacttgattgtgattgaatcccgcctctgcctattttttaatctttttaac

SEQ ID NO: 107897 - DNA, 216 bp, Glycine max
ttttgcatgcattcttgggttaaattagtctaaacttacgagggatcgaggtttagtactttaggctacaacatagaacacaagaacatgattaattagagaaatatcttcatatgcatcaacttgtttgttagaaagacccaacactttttacctattgttgtcaacttttacttacctgcatttacggtttttaccatagaattagtttatttt

SEQ ID NO: 107898 - DNA, 374 bp, Glycine max
tgtaatcgattacacaagtcttgtaatctattaccaaaggagtttttcaaaaaattatttccaagggtcacaacttttcaaatggtttttacatggccatcaaaggtctatttatatgtgacttggaacatgaatttgcttagagtttttcagaacaaaaattcttatcctctcaaaaagcaaaatcattttatcctcttaagaattccttggccaggacacttgcaattcaataaggaattaattgagtgctcaattgtacaatctatctctttcaagagagatgtcttcttctcctttttctatttctaaaaagggattaagagaccgagggtctcttgttgtaagaaatatgaacactaaggaagagttgt

SEQ ID NO: 107899 - DNA, 207 bp, Glycine max
ttcttcatcacgggtagcaaacaactataacacaattcaaagaaggtctgagatcaatgaacatttatgtaatataattattgtaccaacaacaaattaaacaaatacctaaaaagtattaaaggcatcagagcaatcaacatgttctactttcatgccaacatcttccttatttttaacattcatatcaacttcttcaaacatgat

SEQ ID NO: 107900 - DNA, 382 bp, Glycine max
ttgaaaagtgttatttttcaccttctcgctaagccagcaaattggcttagcgagcgtccgctaagcgcaacactcatgggctaagcgcgaggaagactctggaagaagatgagctgtacaggttcgctaagcgtaccacttcatctcactaagcgcaccgcttcagtccatctgctaagcgagaaaggcatgcgctaagccaaaattcactatgtgcgctaaacggtccataattgcgctaagcgcacgagcacgaacaagggcacctatttaaccctgaaatcagattttagagagagtttggactaggattcagagctttgcatgtctagagattctagagagagaaaagtccaagttctagagagttttgagagatttt

SEQ ID NO: 107901 - DNA, 196 bp, Glycine max
ttcttaggcttagcacgtgaagacatgacgcttagcgcaagggttgcgcttagcggttggacaactgaaaatttttttctgagtcttttttgcccatatcttcacatgagcttaaaaacccccttgttcacttctaaacaagctgcaaaattaatcacaatcacaagcaactatcctaactacatgcaagagatac

SEQ ID NO: 107902 - DNA, 356 bp, Glycine max
tggcagggcctagcttttccaaagcacgctcaacttgctcactaacttgttcagtaacaagcacaaaaataagaaataagacatgtccttgatcaaacattattcgtgtaaaatttataaagctattttccattatattatatttgataacactcaaacatacacattgcagaacaacttattccagaaagcctttgatggatgagtaaaatgggtgacctagggattgaggctcccacctaatgaggcttgggatgggtataagtagccttacccccacaagcaaagaaagttgtttttagaatgtgtgatgacattttctttcatagttgggttgataagggaaaagaaaagaa

SEQ ID NO: 107903 - DNA, 196 bp, Glycine max
ttcttgtaggccttggattttcttcatcaatagagtcctttgcttcttgaagatcaatgacagtagaatagagaaggatgaaaggtgatgggagacgccacttcaaggagaagatgagtaaagagcaagctcaccaccataagaagccatggataagagcctgaaggcaggagaagatgagtggagggagagggaa

SEQ ID NO: 107904 - DNA, 371 bp, Glycine max
tctacttatgtggcagggcgggcttccttcactttcttgtctcaaccgcgagctttgaccaccgctctttcttcccgcgatgcttctctttatatccgcctgagtgggtttatagcctaaaccatatttcccacgatttcctttggcatttatcaggctagttatgccgccgttgtctttgcctaaacccattccgggttcgtaaccgttccccaacataactcgggccatcattactgctgcatcggacaggcaagcttgcccggagaaggagtccacggaggaaatgcttaccacctcaaaagattggaaagcggtttctaattactcctctgcggcttccacataaggcatagaggatgggcagctca

SEQ ID NO: 107905 - DNA, 214 bp, Glycine max
ttctttgagagaaaaacatactagaagttgtcaccgccacagagagaccaacaacgagagtgagaccgagagcgagagtgagggtgagacctggaatgagagcgagagtgagaccaacagtgatagtgtcgacagtagttcagtgtcgcgagagtgagaaagggttcgtgggagtaaggttgccagaagcgcgagggagacgagttgtgagcga

SEQ ID NO: 107906 - DNA, 370 bp, Glycine max
tgaaagagcccgggtagtcaaagagaagttcaagtccatagccatcaaagtctgaagagagtatgatgaactaagggacgtcaatatggccacagctgaagccttggaacgagaaaccaagaaggcccgaaaggaagaacacgaccaaagcaaagttttgaggggctttatagggcagcaatagtgagctcaagctccgaagaggtgaaaggaatcatcacgggtcaaaggcatgatcttgaaggacgagctaaaggtttgccttatgtcgaaaagaaatttgtcccaacagttaagcgagactgaagggaatatgtgggccatcatcgatgagtgcaaagagaagctaaatctagcggcgactcacgag

SEQ ID NO: 107907 - DNA, 217 bp, Glycine max
catttttacttcgcttctaaggtggcctcttgggaatgaagcggctattcctccttctgataacgcatggacacttatccctgacccaactacaattcgtgtgaaaggtcagccaaaatcaacaaggataaggaatgaaatagattggttcgaatcatctgagcaccgacaaaaatgtagtagatgtggagcagaagggcacaacagacgtcgatgt

SEQ ID NO: 107908 - DNA, 367 bp, Glycine max
tcgaaaagaaagatgagtctattgtaaaggattcacaggttcaaggaagtatttacaaaatacaaggctaagacaagaaagaaggtttcgaaccattgggcgaatcgagctggcatatggtcgaatcgaagtcaaggcaacaagatttctggacttagcgcaatttctgacaaaacttcacaaaattagttcgacttcgagcaatatggataaccgttctaaggagcagttatgtgcatgcaaggtgtacgtagcaggacacttggcattaggatagtgttcgaccgttagggcagtttattttcgaatgtctatatatagcagttttttaggcagatttcggggtcgcaaatcatttctacaaatc

SEQ ID NO: 107909 - DNA, 215 bp, Glycine max
agcttgaccaatcccgacccaacccgggcatagtcggtcagtgagaacctgtgatgtacctaaacaggcgagctcctagcagtcaacagataaaaggaacaaagaccacaaagcaaggaggcttgtggtggctggccagctgtgaattttgtgtgatatgtggattatggcctctggtaatcgattaccaagggtgggtaatcgattacaaggct

SEQ ID NO: 107910 - DNA, 377 bp, Glycine max
tagtgcaaacctaggaatgattgattgtttatcccttgcagaatttaacttaacaagaattaaattacaaacatagacagtcgagatccagactgacatggaatgaaactcctaaccacttggccaaaagaggctacgatgtcaagagctatatcatccaaaattttagtgttttatttgcaaacccaggaatggttgtttatctctagcagaatttatcttaacatgaattaaattacatacagctcatagataagcatgaaaaccagtacggcatgcacaagttattttctattgaaaaagtaaaaccaccttccaattactatactcaaaggaagcctcaccaattttggtataacacctgcttcaaccatgat

SEQ ID NO: 107911 - DNA, 216 bp, Glycine max
atcttataagaataaaattgccttaatcatttccaaatatgcatgtgaattaggacgcatcaacaagaatcaagccaaggctattgtgcaagcaatcaatgggccaaaacacaccaaatgattataatgatggatggctcaaattctcacaaaggtaaaatcatcactttcaaattgagctttcaaaactatcatgacatgtagagaagaatcaag

SEQ ID NO: 107912 - DNA, 329 bp, Glycine max
  unsure (1)..(329): unsure at all n locations
ctcagatatcttaagaagagggaggggggtttaattatnatattccaaactactttcccatttaaaaatctatttcactttttattcaacttattaattcccttattgacactcttcttaaatattaattctaatcaaacaatttgaatatcaatataattcacttctctataaaggacattaatggaagataaattgcaaacttctttttatacttgttctgccacaccctttttcctacttccattccccaatcaaccctcttgagacttccactttcttttatattccttttaccagtttctaacccactttgaccatccttcctt

SEQ ID NO: 107913 - DNA, 216 bp, Glycine max
ttcttagatcatttaaggttctctacttgtcctctctaaatgtatttcaatgaataaagtaattacacaagtagatattctatttttatgtgttttatggttagaacttagaagttagaacaatttgaaacttatcaactaacaatgctgctactctatagaagctagttattttttgttatagaagaaaatgttgttgccttgatataaatccat

SEQ ID NO: 107914 - DNA, 387 bp, Glycine max
tggaatgaggtttgttgttcatgaatggataatggttggagagccaacagctggaaacattgaacaaatggaagaaaatgataaagttgaagctccacaagagcctggatatcaatggagtccttttgagtcactcatgattcagaagatggacactatgttccacctccattaagagcactcagctgaagtttatagtttgttggaaaatataactacccaactggaaaacattgaaactaggctgacccttagaaacctccttaaccccaatgaggatgaagctttgtggtgttttaagtgcttagttcagttgtttgattgtcatttctgattatgttcaattctgtttttgtgtctctgtctttttttgttaagtaggtatag

SEQ ID NO: 107915 - DNA, 215 bp, Glycine max
ttttgcatgcattctttctcttttatgcaactatctcatcctctttttttggtgtagaatgaagcttgacaggttcaggtgcaggtgctgctactggtgaaggcacttgaatttggttaccagacctcaaggtgatggcactcatatttttcggattctgcatagtttgtgaaggcaatttgtcagaattttgggtttgagcttggttcaactga

SEQ ID NO: 107916 - DNA, 373 bp, Glycine max
tttagtgtaagtgacaaaccttattcacctcaacattatgacattttcttgtgtatttatagtgtaaaaaatttcacagtgccaccaggtcaaactaaaatccatacactctctttactgggtttaaataatatgctgaggaatcaaatttacttcactattaaggaaccatttgatgcatctaatttagataaaaatttagaagcttttattgcaagagtaataccttagctgctacaataaagtggcacttaattgtttactgatggggaaaagaacattagcgtaaactatggtaaatatacatggttataatttgaaaatgaaatattatacttcaacacaagaaattgtgtacaaatcagatgcatta

SEQ ID NO: 107917 - DNA, 205 bp, Glycine max
tgcttaaatgaagaagacacctttttgataatgaagtacaagcggcagtcagtttcttggaagacatatcgcggggtcatattgatcgtcggacatcagattgctgggtttggaaaccagaacctagtggccagtattctacaaggagcgcatatcttatgctactagaaggagcagcatatcagactgtggatgaggcattaga

SEQ ID NO: 107918 - DNA, 379 bp, Glycine max
tctatataagttgaacctttttatcaatatacacaagttgagttttattcaaaaaattagagtttatctcttttatcttagtgagagtgattctactaaattcttgagtgattcaagaacaccctggctgtatcaaaggactttcacaacctttgtgtgttgccctcgctggaaagagtgattctttccttcctttcatcttcacccttgttctttcaaaccacaattccagaaaatccacctcctctgcccagaattatctcgtggccataactcccattttacgcactcaaattaagtgattcttgagcctaaattgaatttcaaaacgagacctttcacctcgctttggaatcacctcatttggagccctgtagct

SEQ ID NO: 107919 - DNA, 207 bp, Glycine max
ttcttgtcaagaactaattctccttacagataacctctcttaggtgaaaggccatgaatggttttatatctaacgcaccatgtatgataaagaatctcaagtttgaagtaaagacaatgcataaactcaatatactatatccaaaaactttaattatgaagaacggtggtgacaaggattgaattcttgaccacttggtcttaaaag

SEQ ID NO: 107920 - DNA, 379 bp, Glycine max
ttgaaaagtgttgtttttcaccttcttgctaagccaatctgttggcttagcgagtgtccgctaagcgcaacactcatgggttaaacgcgaggaagactctggaagaagatgagctgtacaggttcgctaagcgtatcgcttcatctcactaagcgcaccgcttcagttcatccgctaagcgagaaaggcacgcgctaagccgaaattcactaatgtgcgctaagcggtccataagtgcgctaagcgcacgagcacggacaaggtcacctatttaagcctgaaatcagattttagagagagagtttggactgggattcagaactttgcatgtctagggtttctagagagagaaaggtccaagttgcacaaagttttgaga

SEQ ID NO: 107921 - DNA, 206 bp, Glycine max
ttcttaagataaggaagtgttgaagggtgaaacttcctgcttttattcgttgaccacagagtggtacctggagatatgtcgcgggggtcaggagaccttggggacgtcaggtggggtgctattgcccaaaaccaagcttgaccaatcctgacccaacccgggcatagtcggtcagtgagaacctgttatgtacctaagcaggcgag

SEQ ID NO: 107922 - DNA, 380 bp, Glycine max
gagcttgatataacccagtattctttgtcataccaagtcattgttggctctacacgcatcaaatagattggttgtttgtttgcacaatgtctaactcttaaagcatcttacagacaaatatacaatctcagcaattagtcttttctcttaaggtgttcaaggtattttgaaagctttttagaactatacataaaatatacaaaaagctttttacacagggaattcaaatgaaagtgtgtaggtttgtaactatttctttaaagcttctggtatttataggctttcatctccatgtgctcattgtctctcaacaaatgaatttcttcactaaagcttgtgtctgatgcttatagttgttggagcacttattgcatgtcgtt

SEQ ID NO: 107923 - DNA, 197 bp, Glycine max
ttcttagagagggtgcttcaatggaggaaaagaaagaaagaaggggggagcacgaaattgaaggaataaaagaggaagagaagtggaactttgaagtgtgtctcataagacttttattcatcaaagttataacaagtgttacacatgcttctatttatagactaggtagcttccttgagaaaaattccttgagaagc

SEQ ID NO: 107924 - DNA, 375 bp, Glycine max
tctacttatgtggcagggcgggcttccttcactttcttgtctccaacgcgagctctgaccactgtttttccttcccgcgatgcttcttttcatgttcgcctgagtgggcttatagcctaaaccatacttcccacgatttccttgggtttttatcaggctagttatgccgccattgtctttgcctaaacccatcccgggttcataaccgttccccaacataactcgggccatcattaccgtcgcatcggacaggcaaggttgcccaaagagggagtccacggaggaaatgctgaccacctcaaaagactgaaaagcggtttctaacgattcttctgcggcttccacataaggcatggaggatgggcagcttaccaa

SEQ ID NO: 107925 - DNA, 197 bp, Glycine max
tgcttctccacgttttgttgaaaaatggttttcgggactttcgtggcttccgtaatacttcagtaaaatttctgaaaaccatgggtaagcatatttctcttgatattgatgaaagggaagagaaaaaaaaaagatgaaaatcaaattcgaaacacttccctaaggcttctataacttttccgtaaaatacgaaaagg

SEQ ID NO: 107926 - DNA, 376 bp, Glycine max
tactaataacatgcataatgatcaatagataagagcatgcttttctttattgattagtggagatatatgcaataatgtaatgccttataaatttgcagccaaaccagaatgataacttgacaatgaaaattagccaaacaacttagataaaatagaaatgcatattcaattgaaaacaactgttaaaaacagagaatgcagaacaagaactatatatatgctagtgctagccagtagctgtcccataaaagtataaaccttttatatacacatgcattgcatgtgaacaaccgttaaaagaaagaaaaaaggaaaataaaaacagaacacttgaaagcgaagaaaattacagttttgttttcataattagccttgg

SEQ ID NO: 107927 - DNA, 214 bp, Glycine max
ttctttatctcataattttcttttcttcattctttttatttgtcaatcccttttttattttttattttttatttctcttaagataaggagttgggatttacttactaacacaacctgcaaaatacattcatttcccctttttttccttacattttcacataatcacaatgcaagggatcaaaggaattaatcatactagctcaaaaatggtcaa

SEQ ID NO: 107928 - DNA, 385 bp, Glycine max
tcttagtttcagatgatgcagatgggtttgtagctacctcatgcactcctctaatgactatggcatcatttatggcgctaaactgctgagagttggaggccatcttctcaattaaatttctggcttcagcaggagtcatgtctccaagggctccgccactggcagcatctatcatacttctctccatattactgagtccttcataaaaatattggagaagaagctgttctgaaatctgatggtgagggcaactggcacatagtttcttaaatcgctcccagtactcatacaggctctctccactgagctatctaatacctgagatatctttcctgatggctgtggtcctggaagcatggaaaaatttttctaagaatactctctt

SEQ ID NO: 107929 - DNA, 215 bp, Glycine max
ttcttataagaactaaattgcctcaatcatttccaaatatgcatgtgaattaggacgcatcaacaagaatcaagccaaggctattgtgcaagcaatcaatggggcaaaacacaccaaatgattatgatgatggatggctcaaattctcacaaaggtaaactcatcactttcaaattgagctttcaaaactatcatgacatgtagagaagaatcaa

SEQ ID NO: 107930 - DNA, 375 bp, Glycine max
aacaattatctaatcattccaatccattcaaatcatacaatttctcattcaaatcattctcaaacactcatttcatacaaaacaatccactacatatcattttcaatcaattcgctgttcaaacacactttttgtacaagcaaacaactcaaagcactgaaatttaaataactcggaatttaaagaactgaaacataaaaactgaaatttaaatgactgaatataaatcataaaataactaaaataaaataaaatgttcaaaatgcacaaatttaaatgtcatactcctgtggttgctcctgtgcatgctcattaagatccaacacccgagcaactggtgaatcctaagggataggctgcttagctcagatgctg

SEQ ID NO: 107931 - DNA, 188 bp, Glycine max
aaaagtttcgaaccgcatttttaaacaactgggaacggcgaacaccatacaacggcaggggcacctgagcgcgtaaccagatgggcgcggcgaaaacttacgacccgcaaaatggcacaacagagaaaatcgcggacgggacaacccccgaaggacgttatgccgctcccccaatgggcaatgtgaaa

SEQ ID NO: 107932 - DNA, 131 bp, Glycine max
aacgcttacgagttacattccccccctgttaagattacgccctctgtaagttatgagcttcacagtgaaacctttcatttcttgagggctctcgcgctgattctgcacggactgctcatatgtgccggtaa

SEQ ID NO: 107933 - DNA, 215 bp, Glycine max
ttcttattaagatttagttttaaaatggcaatctagatacattagcacatttagcatgtgctggaatatcggtcaactacgcaagactttgactagaacttgtacttaaagcacttatagtataaataagttgggttgcatgcaaacatgacagaatttctcccaaatactctagctcagaaaaagaaccccaaatgagagatttgtgtttcatg

SEQ ID NO: 107934 - DNA, 384 bp, Glycine max
tgtctcagcgtttatgcgagacggagacttacatgctatctatcatcgccaagtgccaagaagagttaggtctagccgcggcccacgagcataggattgcggacgaatatgcccaagtatacgcggaaaaagaggctagaggaagggtgatcgactctttacaccaagaggcaaccatgtggatggatcggtttgctcttaccttgaacgggagtcaagaacttccccgattgttagccaaggccaaggcgatggcagacacctactccgcccccgaagagattcatgggcttctcggctattgtcagcatatgatagacttaatggcccacataattagaaatcgttaggaaacttgtatggtctctcagaccttgactagat

SEQ ID NO: 107935 - DNA, 216 bp, Glycine max
atcttgtataagatctggcatgttaaactcaaaaacaatatcttatgcaattgttaggtctggagggtccattgaccactatacgacccatcctgccttggattttgatgattacaaaggtataatttactaatggactaatgagttattgttaagtgaacaagatacactatataaatgagctaaagtgttattcaatcattctctatagcttca

SEQ ID NO: 107936 - DNA, 390 bp, Glycine max
tgtgcattaaatatcctgatgagggtgtttcatatgttctcaagactggactaatacatttgctgcccaagtttcatggtcttgcaggtgaagatcctcataagcatcttaaggagttccatattttttgttccaccatgaagccccctgatgtccaagaagatcatatctttctaaaggcttttcctcattatctggagggagtggcaaaatattgactctactaccttgctcccaagtccattttcagctgggatgaccttaggagggtgttcttggagaaatttttccctgcatctaggaccactaccatcagaaaagacattttatgcatcaggcaactgagtggagagagcttgtatgagtattgggaaagattcaagaaattgt

SEQ ID NO: 107937 - DNA, 218 bp, Glycine max
tttttttcatgcatttttgaaccaaatccgatgagagtgtgaccttactttgtgagtgaatgactagctgagagtcataatctttgcatgaatctctgaattttaaaatgaaatgtctaaatgaggacatgatgaaggccatgattgtacatacacaagctctttcgaccatacaacttaccttgaatgataattgcatcctttgctccctttagaac

SEQ ID NO: 107938 - DNA, 399 bp, Glycine max
tactaagaaccctcaagctgataaaacagaagagatggtttctagtttactcaactcatacaatgactgatgcacattatatacaacacttcattctatacaaaataaaaccactgaatatgatattctatcgcttcatagggcaattatgcttttgtgcaatctactactgtcatacaaaataactgaaatttaaaactgacgattaatgactgaaatctaaatgactgaaacataaaggataaactacataaactgataaagataaactgttcaacatgcagtaaagatgaagatcctgtcaatccttctgtgggtgatcggctgcatgctcatatagatccaacaatagatcatgtggtggagcctgtgaaaagggtagctcatgctccaatgctg

SEQ ID NO: 107939 - DNA, 205 bp, Glycine max
ttcttctcgatatttgattcgcctgaatcgaacttccgtttcaaaatttatgaccatatgaatttctcgagactattcgttatacaaattcgagcgtctcgatttattatgtgcctcaatcggacctccgtgtaataagttatgaccatttgagtttctcgagagcttccgttgttcaatttcaatcttctcgatatactatgcg

SEQ ID NO: 107940 - DNA, 376 bp, Glycine max
  unsure (1)..(376): unsure at all n locations
ttctcgatatattatgtggctgaatcggacttccatttgtaaagttatgaccatgcgaatttctctagagctttggttgatcaacnncgagcgggtcgatatgttatgcacctgaatcggacttccgtgtgacaagttatgaccatttgaatttctcgagagcattcgttgttcaatttcgagcatcttgatatattatgcgtctgaatcggacttccgggtgacaagttatgaccatttgaatttcttgagagcttccggttttcaattcagagcatctcgatacgtgatgcgctagaatcgggcttccttgtgaaaagttatgaccattggaatgtgtcgagagcttccgatgttcaatttccaccgcctggat

SEQ ID NO: 107941 - DNA, 207 bp, Glycine max
tgcttcttcaccccattttctccccccccccccccccaaattctaaaaaataccaaggctcacgaaattcatggttttgcagccctaagtcaccattttttgcgtttttgtttccattttggcactcttgttcactccctacaagtaagtacactattctttggttctttggctttccattgatgcattttagtgctctaaattgtc

SEQ ID NO: 107942 - DNA, 379 bp, Glycine max
tctcccctattttgctataaatagggggagaagtgaagaagaaaagggttcagcctcttaggcacttctctctctctcgaaattgctgaggaaaattatttccgtgaagaaaatccaagccgaggcgcttccgtaacgtttccgtgagtaattacacgaagattctcgaccgttcttcaagattcatcgttcgttcttcgttttcttcagtcttcaacgggtaagtacctcaaaccgagctttccaattcattctatgtacccgtggtggtccacattttgtttcatgcatttttattctcgttttcatttgctttttatacccccttttgtcgtgcttaagccatttatttaagtcatttctcgcttaatctaaaaat

SEQ ID NO: 107943 - DNA, 206 bp, Glycine max
ttcttgcctcaaagaggtccaggaaggacaagacggccgaaggaactagtttcgctccggagtatgatagtcaccgcattaggagcgctgtacaccagcagcgcttcgaggccatcaagggatggttgtttctccgggagcgacgcgtccagctcagggacgacgagtatactaatttccaggaggaaatagggcgccgacggtgg

SEQ ID NO: 107944 - DNA, 378 bp, Glycine max
ttgaacattgaagcattgatcttgtacaaatattttcatctcttcttcttcaaccagtatactcttgaaaaactagaaaatgctctcaaaacaccttaaacactttaagagaaaaagactaagcatcgatttgtatattcatctataaaacgattctagttttagtctctgacaaaaatttaaacaataaaacgcattgatttgtatcttttctgatttgtttagagccagtagagacttggtaagacaaagaatagtggttgttgatcaagcttggagtagagcttgatttgtaaaatcaaaaagtgattgtggcattaatacttgtaatttgtgagaagttaatggaacctggtgttttaccaagaactggacgta

SEQ ID NO: 107945 - DNA, 208 bp, Glycine max
ttcttgaagaagttttgtctttttacatgcccaattcattgagtgacatttgtatttattgttgcatcttagtctttatctttccatatgtacatcatgtatcataatgtagaggtaggaagattgtttctaaagttagaaacttcttcagtgccttaaactctctgttttaatcgattaccaagatatacgtaatcgattgcacaag

SEQ ID NO: 107946 - DNA, 338 bp, Glycine max
tataattattggagggagaataaaacaatccaaaatcaattgtacctttcaagtaacgaagaattctttttgcggcttttaaatgaggagaggtaggagcctccgtaaagcgacacacaactcccaccgcatatagaatatcgggccttgtattggttagataccttaaactccccacaagactcttgaagaccgtggagtctaccttctctccttcatcaaactttgataacttcaagccaccttccataggtgtgttcacgggattgcaatcaagcatattaaatttcttcaacacttcttttgtgtaactttcttgtgagacaaagatagcattc

SEQ ID NO: 107947 - DNA, 196 bp, Glycine max
tttttttactcggatgtccgattgagtcccgtaatatatcgagatgctccaaattgaaaatagtagctcctagcaaattcaaaccataataactttttactcggatgtccgattgtgtcccgtagtatatcgtgatgctcgaaattgaaaacataaggtctgagcaaattcaaacgacaataactttttactcaga

SEQ ID NO: 107948 - DNA, 361 bp, Glycine max
  unsure (1)..(361): unsure at all n locations
attttaatttcaagcgctgatatttttggacttaatcgggctccgggnttttagtatnggggcnaccattgctatgagcttctgtnnnnaanntcaagcatttngatatattacgggntnnatttacacatccgagttaaaagttattgtcgctggaatttgctcagagcttttgtattcaattttcagcgtctcgatatattacgggacttaatcggacatccgagttaatagttattgtggtttgcaattgctatgagcttctgttttcaatttcgagaatctcgatatattacgggattcattcagccatctgagtaaaaagtaattggtcgttgaatattctcagagcatctatttt

SEQ ID NO: 107949 - DNA, 195 bp, Glycine max
ttcttgcaaaccgacttcaactccaatggtttctaatctcaaactcttggcacaagaaagccttcctcatctaatctcaaactcactacttttggtgactcaaattaggcctcttgctcagattcttgaaaatcagtcattggattctcaatattctttggcccttctcttatttcatggagatcaaagaagaaa

SEQ ID NO: 107950 - DNA, 376 bp, Glycine max
tgcatatagaaattaattaaggataatccatgcatgatgcctaaactggcatatcaagaagggctctcttcacttttatgtagcagccattgtaatcaatattgatcctcatcaccatgcaaaagtactgcaaaccaaagaaaacaaaaatgattcaaatggtatttatagaactaacttaattaagaaaaccaaaagatggtgattagagcttgccttcaatgtcatgaaaacaatcaaagagagagagatagtaacaggaatttgaaaatccaaaatagtatgagtgagctagcaaaggcaaaggcagagtgaatcttaaaaggcaagcaacaacaaaactttgagagccaaaaagggtttataatgagctggg

SEQ ID NO: 107951 - DNA, 217 bp, Glycine max
  unsure (1)..(217): unsure at all n locations
tttttttnatgcattaacaagagaggtttcacggagaagaagatagcgcgagcaaaataggtcgcgtctgatataatttaaaatgtaagtcgaacatcgatttttaatacaaaaccgatgtaacaaaatgatgttaatgttaacatcagctttcttcaagaaaccaatgttaactgatcatacgttaatatcggttttcagaagaccgatgttaacg

SEQ ID NO: 107952 - DNA, 372 bp, Glycine max
attgaatatctgtttcttagctttccaaggattactcacaagctctgttttagagttctatagtgtcctataggcccttcacaagacagatatgacaagcacaaaaattcgaaaataagccacaattatcaattgagctcaattattggcctaagaccaaaactgacttaaggtgggaaaataagaataaaaaagaggtcaaataagctaagaaaaatagaaagatactaaactacaaatgctcaatcaaacatacattttttcttgctaaatgatagtcatttccttgtgcaatgtgtttgtgtaaaggtatttgtgtgatcttcataaccaaggaaaaatggttaccattgtgtctacttatagcctaat

SEQ ID NO: 107953 - DNA, 214 bp, Glycine max
atctttttattttcagtagatgaagatgaatccgtggccacctcatggactcctctaaggacaatagcatcatttcttgcactgaattgttgggagttggaagccatcttctcgatcaaattcctagcctcaacaggggtcatatcaccaagagctccaccactggtagcatcaatcatactcctctccatgttgctaagtccctcatagaaat

SEQ ID NO: 107954 - DNA, 403 bp, Glycine max
agaactatgaaactcagcttttgcaacatttttctcaaacctttataggttagattgcttccgaatccaacatctatagtttagtattttcatttctccataccaatattatcacctctacatattttaaactcaatatttttaacttctacaagttcttcaaccaaaattctctcatttcaaaaacctagagattaatgtaaccaattaataattgccaaaattattaaaaatctggctaaaatattactactataaaataataaagtcattatatagaattcattcccataaacgttggagtaactttaatttagcactacttcaatagacagtgaaagaacattgagtagtatcacgaaagaaacgcgtgacaccgaaatttgcgtccgcgagttggtga

SEQ ID NO: 107955 - DNA, 215 bp, Glycine max
ttctttaacatttaatttcgagcgtctcgatgtattacgcgcctcaatcagacatccgagtaaaaagttatggtcgtttgtatttgctcagagcttccacgttcaatttcgagcgtctcgatatgttacgggactcaatcagacatccgggaaaaaagttattgtcgtttgagttggctcagagattcaacattcaatttcgagcgtctcgatat

SEQ ID NO: 107956 - DNA, 392 bp, Glycine max
actaagctccggagaaccaagccaatcagaatgctagacgaaatatatatgggaatagaggtaacaatggcggttatgacggaccgaggcataaccgggttgagggagtaaagctcaatgttcctcccttcaaaggtagaagtgatccagatgcctacctggactgggaaatgaagactgagcacgtatttgcctgcaatgactacactgatgcgcagaaagtcaagctagcagcagctgaattctccgactatgcccttgtttggtggcataaataccaaagagaaatgttgagagaggaacggcgagaggtagatacatggactgagatgaaaagggtgatgagaaaaaggtatgtgcccactatctataacaaaaccatgcgacagaaa

SEQ ID NO: 107957 - DNA, 215 bp, Glycine max
ttcttcaacatcttaccacttccagggtgctggaactacttcacatggacttgatggggcctatgcaagttgaaagccttggaggaaagaggtatgcctatgttgttgtggatgatttctccagatttacctgggtcaactttatcagagagaaatcagacacctttgaagtattcaaggagttgagtctaagacttcaaagagaaaaagactgt

SEQ ID NO: 107958 - DNA, 385 bp, Glycine max
  unsure (1)..(385): unsure at all n locations
tcaagaatcatagaaaactgctaaagatgttattatctctatcagactacacacgtgagcccgcttagaggtaattgatgagttattcacaattgaggagtagtgagaacacgtgtagggatccttaaacgatcaatagggaagggttttggggtacttctgcaattttgattctatctttacaattataattgcgaattatatatgtttgacgggctaattgatgtactaatgcaaaattattgtgaaatttatgtgttcttgtgttaagtgtaaaccctanaaattggattttttttctaattagcgtgaattgatgaaactgaatgattagtatgatgtctttactagttaatttgcattatgaatttatatttgaatctag

SEQ ID NO: 107959 - DNA, 215 bp, Glycine max
atctttggagttttcaagtgccaattcgtcttcttctttagtccagtcttcttctggcttcaatccatcagtgggctttccttttgtgtccagcatcttgggatgttcccagcctttgatgacagctttccaggttctgctatccagtgatttgaggaaggccaccatccttgctttccagtattcatagctggttccatccagaattggtggtc

SEQ ID NO: 107960 - DNA, 387 bp, Glycine max
tgtaagctacatttacaaccatacattgactttgaacatcatgaggaaattcacacaaaaaactgaattggtgagacacggagttacaagatttgctaccactttcttaactttgcaaagattgcataagcaaaaggccaatcttaaaaggatgtttacttcggatgaatggttgaagtctaaggcagctaaagagaccaaggggaagcaagtaatagatgttgttcttatgtcatcactatggaatgatgttgtctacactttaaaggctatggggcctcttgtaagtgtgttgaagttggtggataatgaaaaaaaaaatctgcaatgggtttcatttatgaagcaatggatagggccaaagaggcaattcaaagagctttcaat

SEQ ID NO: 107961 - DNA, 206 bp, Glycine max
ttcttgccacccagctcgcccaggcgagctaggttgcttcctccagaaggcaccaccttctagaggaacatcctaaaaggcccaagtaggcctggttgctatttgcacccctctgtttactaaatacatccccctgcctttttttgcttattctttttccgtaacgttacggaactttacgaattccgtaacgatacttgttttcc

SEQ ID NO: 107962 - DNA, 377 bp, Glycine max
taagttgtcatttttgtggatataaacccttggtaatgcatagagaatggcttttgcacttaaaagttgcttctaacatggtgagtgttgaacatgggtctatgttgtgatcaacgcgaagcttgatgtgttgtgatcaacgcgaggcttgatgtgttgatctcatgttcataataattgtttattggtcgatgtcgagacataggtcccaattttaggattctcttggctattacaatcgaagtaatgcctagataggggtctttgttttggaccacataaggccaatatcgagtatataagcgggtgcaaccctaactctttgagttatcttttgggattgagttaggcctaaacccacattttaaggatgatat

SEQ ID NO: 107963 - DNA, 204 bp, Glycine max
ttcttgccattggaatgcttttgcaataagcatcataaaataattttttgaattattttgcaaaggttttttggtatttttgaaacccaacaccttatgctgggttttaaatttgttatttgcatctattgaaaataacaattagttcttgacatgcactatgaagattttttcatcaagctaactatcaattcttcgaacgtt

SEQ ID NO: 107964 - DNA, 375 bp, Glycine max
ttctgcagggaagctaagtgtgaagtatgcaatcctgcacaggattggggctgcaaactgggtacccaccaatcatacttccactgttgccacaggtttgggtaaatttctgtatgctgttggaaccaagtccaaatttaattttggaaactatatttttgatcaaactgttaagcattcagaatcttttgctgtcaaattacccattgccttcccaactgtattgtgtggcattatgttgagtcaacatcccaatatcttaaacaacattgactctgtgatgaagagagaatctcctctatccctgcattacaaactgtttgaggggacacatgtcccagacattgtctcgacatcagggaaagctgctgcttc

SEQ ID NO: 107965 - DNA, 206 bp, Glycine max
ttcttgccaattttttctttgtaaagatatagttttagtcatttctcatatttatagagaaggaaacttttgtgctgacaagctggctaatgttgatgctttgtctcgtgattcttgcacttgctgggactcgattcccatttttgttaggaatgagtttcttagaaatagaacgtctctttcgtattacaggtttcactaagttg

SEQ ID NO: 107966 - DNA, 377 bp, Glycine max
  unsure (1)..(377): unsure at all n locations
taagtggaatgcttatcaatatgtttgttttctttgtcctcattgagcagaccttatcctggtttatgtagttaattgctatgcgttattgccttagcggcaatttgtggggtgcattcatggatttgaaacaggtatgatgcctaaccttggtgcagcctgngttagctgttgtggcgggtgcggccgcattttgtggctaaatggtgctagggtgagtgcatgagcagctgcgattctgtgcttggggtgcaaaattgaaatttctcccattcatttgctgtttcgaattcgtttttgggctttttgaattttttaagccttttcattccccccacccccaattaattcttctgtcttttccaaattttcccatg

SEQ ID NO: 107967 - DNA, 206 bp, Glycine max
ttctttgatctaacactatgggcacctatcaaaaggtagctagggatacacttgactcatttttagatctaatatagacttctttgcctgaaacttaaccagcgttcatctctatagttcattctagtacttagcttcccttatttctcactagtaccttgtgcaatatctcacaacatctctatcgattctaatcctcataccat

SEQ ID NO: 107968 - DNA, 374 bp, Glycine max
tatgagcaagtagagcagtttagcaaaatttgtcactattcttatcatgcatatgatgaaactgaacgtgtttatgtgaatttctgccttcatcatggaccggaccctgggttcatatgatcccacctacacacaaacgtcgccttctctgaaaatgcagaacaaaatggtgagaatatgtttcatgttttgtttttgtttaataaccatgtcttttttagtcgtaaatgacgaaagtatatcattcttccactttatgtacaacaaaggtgcctaagaacctttgtgtggacactacttcaagggacttcattctacaagacaacatgcaaaaagttttcaagaaaccttgtatcatgcttcaacttggacaa

SEQ ID NO: 107969 - DNA, 197 bp, Glycine max
ttctttgatttcttgcttttgataatgagggtatcgatatggcctgacgttgactggagctgcttgagggagaaaatgaatgtgatgatcagtctcgcgagccgacgacaatgtgtgtggttgctgaaatagagcatcaaacttggtcagtagagtgcaaattgtgagagggagttcctgagaagtggaatcattgt

SEQ ID NO: 107970 - DNA, 366 bp, Glycine max
tcacgatatgacagggtggatttaaaaacttatgtgatcgtttagatgggtagatctatcgcattgatccatcatcgggagatgttgcatgtgtgtttggaaccttgatacccataagtccatgaatctttcatagaaaggtagaatttaaaatctctcactctggcgatgaaaactatatcacctttgacgatcttaattattgattctgacatgacttctttgcttaaggatctaggatttggaatatgatgcatgttccattggttgtcttcctttgcagctcgatgatgattttgttttgtgcttccaacatggttcgttgttgttggatcattgaggctatggttgcgactgatggatatg

SEQ ID NO: 107971 - DNA, 196 bp, Glycine max
ttcttgtaggccttggatcttcttcatcaacggagtcctttgcttcttgaagttcaatggaagcggaatggagaaggaagaaagatgattggagatgccacttcaaggagaagatgagtcaagaacaagctcaccaccataagaagccatggataagagcttgaaggtaggagaagatgagtggagggagaaggag

SEQ ID NO: 107972 - DNA, 371 bp, Glycine max
tagccgaatccagatcgaattgaagttagcttggctcaaccttggacaacttagtggacaaaatcagccttagatgcaagggttgggcactgagcacttgagactcgcggcttagcacatgaatagagatgtgcttagcgcgaggctcgcgcttagtgaaaggactattgttagaaaaaaagttttctaagttatttttcagtcctttttccaagaaattgaaacccttatgttaaacattcaatgataggctgatatactcctatgtacagctccgacagcaagttccaaatcattaaatgcatgaaaaacaaagataacagaaattaaaaactgggttgcctcccaggaagcgcttctttaacgtcatt

SEQ ID NO: 107973 - DNA, 196 bp, Glycine max
tgcttgagaggattgatggggacccggtgttgagagaaacgaggatatgggctacgtgggagtacgtgagctcagttggaggtgggcaacaggggatggtgggtttatgcgcgcattgtggatgtggaaaacttgttgtgcaccatcgcccgaccgccacctagtaccacatgtgatgggtaccccataatcctac

SEQ ID NO: 107974 - DNA, 369 bp, Glycine max
tataaaagtccttctgattcaatttatgcattcctaactgtatgccatgatatgaagtgcaaaggttggaccgcatgttagttgttaattattgattagcttaaacacttgagcttgagtgaaacagtgacattgcactggttaggcatccttccttgaaatctgtctgctgattagtttcattcagttgtgttgcttaataaaaatgctcttgtctctaaaaagctgcatgtcttatgaaaaaccattgattgagtcattgtatagatgtctcatcatatggttaatgttttggaagcaaacaccctttgtaaataatcactgcattatttttgcacttgaggacaagtgagttgttctttatttgct

SEQ ID NO: 107975 - DNA, 216 bp, Glycine max
agtcttatggagtattataaacaaaagcttgttgaggagattactcgtgcctatgcccaccaaatatatattgatggatttttcaatggtgatcctcatccaggtactctctctctctctccctctacgtttgtgcttatgtatgcatgtgcatatgatgtaacacttccgattgttccatgtgctcatgaactattttggctctcttactggaat

SEQ ID NO: 107976 - DNA, 384 bp, Glycine max
tgcctcaaagaggtccaggaaggacaaggctgccgaatgaactagttccgctccggagtacgacagtcaccgctttaggagcgctgtacaccagcagcgcttcgaagccatcaagggatggtcgtttctccgggagcgacgcgtccagctcagggacgacgagtatactgattttcaggaggaaataaggcgccggcggtgggcaccactggttactcctatggccaagtttgatccataaatagtccttgaattttatgccaatgcttggccaacagaggagggcgtgcgtgatatgagatcctgggttaggggtcagtggatcccgttcgatgccgacgctatcagccagcttctgggatatccgatggtgttggaagaggg

SEQ ID NO: 107977 - DNA, 214 bp, Glycine max
agcttgcatcacttttcatacagaggcgtaaagattctaacggcctgaacagggaagagcgttcttgtgaaactgaataccaagtttctagaaaaatcaaaggttcacgaaatgtggaaagcgtatttacaggagatgcttcttgtaggttactatgaaaccttaataagcaggcttctttaagaagcctcccattggatcttgtaagaagcat

SEQ ID NO: 107978 - DNA, 215 bp, Glycine max
ttcttgtagcgagtgaggtttggaaataagggttcaaagatgagatgagagtgagagtgggtcaaagtgagcaagagaagagggagaaacgaattcaatatgggaaaaacaatatcgatttttatgaaaactgatgttaaaatcaaaacacaacattggtttttgaaaaaccgatgttaacaagcatcaaataacattggttcttataaaaacct

SEQ ID NO: 107979 - DNA, 386 bp, Glycine max
tgtactccagtcatccataaacctatttttgacatcaatattgttaaccctttatatcgtcaagaatattcattatgaggtaataaaaaaaaccttgtaattcaatttactcacacaatccacagttgtagtatagatatgttcaaacacttgtcacctgatattatttcagttagatctgcatgtgtcatgaaaaaggatgcttgtacattaggaattccaaatttcatcccatcccacgacaattgaactggcttctagtaaacatcatacaagatcttcatcaattctcccaatggatcgtctccagcaactgtattgcacctttcaacaggtccaactggtttcaacacattattgtgtgaatcctatatagttaatgaaaa

SEQ ID NO: 107980 - DNA, 215 bp, Glycine max
atcttatggaatatgatgagggagcagctatgcaatttcttcagtccaaggcactttggatcatgcccatatctctaacctcagccatttttcgtatgcctcaatcagaagcatcaacaggcatcaagcctgaatctaacagtcactgatattaacgatagaaccgaaacaaaaagtatcatgacagacactatataattaaatgtcttcatcct

SEQ ID NO: 107981 - DNA, 385 bp, Glycine max
tctctccagcaacaactgagaccatcggatatatctcatggttcacattaaagcatttaaaaaagtcaacaaaagtaaatgttaacctacttccctttctacctctcaagtttttagtgcttctagccgtttattctaaggttaaaatgaattttttatctatataaaaatggtaaaatttaaatattgatcctgtaaatatttgttttttttccgccatatataaaataatagagtgttattgtttagttcaaaattatattcggatatcaaacctacctgaccaaaaaatatattgactctttttattacggaaacaacatactaattttgatcaatatttatcattctcccagaagctattttgggtcactctctggattca

SEQ ID NO: 107982 - DNA, 197 bp, Glycine max
ttcttgcatgatttacatctccctctttctcaagcaaattcttcttgatatcatcaaaatcttcatgatttacaacggcaaccctcatctgggatacaaccgagcggcttacccttatggattgccgcccaactactcaccacccgtcctgcaagacgatgcgggcaatattgcttctcctgtccttgaaagagagc

SEQ ID NO: 107983 - DNA, 376 bp, Glycine max
ttgtgagagttcaaaatataatatttactctctggtgattaattaccagaggatgtaattgattaccagtggccaaattgatttgtgaaacagtttttacaaattttgaatttgaattcaaaagcatgtaatcgactacataaggtatgtaatcgattaccagaagttgaaactttttttaacagctattagaaatttgaattcaaactttaaagcctgtaatcgattacaacatttgggtaatcaattaccagtaaggaattttcgaaaataactcccaagaatcatatctgttcaagagaattttgaatggccatcaaaggcctataaatagatgacttgggactttgaaatctttagagagtttttctgaaca

SEQ ID NO: 107984 - DNA, 205 bp, Glycine max
tgcttgaccggatgtaagatgcatcttctttaacctttgacatgcttgactccatttcattgaagcgcatatccacttgcaattccaaagtataaaaatttgaaatttaaataaataggtgcagggatgcattgcaatcgattacacatatatggttatcgattaccagaaagcaactctgccataaataactacttgtaatcga

SEQ ID NO: 107985 - DNA, 379 bp, Glycine max
tgcaatgaaagatatcgagtatgtatgagtctggagtcaatctaaacacacaaaccaaggccataatacacaatacgtcagatagaaatgatgatagtcattggcacaaacattgacttctgcaactgctactaagcttgcaatcaaagatatcgcatatatagtaattaactttccattcagcaacacaaattagttttatttgtacgcttaaatttgttagattgcctattcaatttgaaatgtcagatttctatcttacatcttttatttggacaatatgtaacaaaagatgcaacaaagaagtttactaaaccttatattagagatggacatcagttctgtatatattgcttgtctggcgcaccacaaattattt

SEQ ID NO: 107986 - DNA, 205 bp, Glycine max
ttcttcgcacttgttaagggagaacacatgaacagcgcttggcaatgacaatcatggggcttcgaacaaagggggaatatgaaagaatggcctggagggtccgaactaaggcaatcatgaaattgacctccaaactcaaaggggaagaaaaatgaaacagccttaacaaaaaccattattgtggctctggaaaaggacaaaaatg

SEQ ID NO: 107987 - DNA, 378 bp, Glycine max
tgtgactcttggcaatttctttaaaactagtcacttaaaaagtagtgacttttgaaaaaaatcttcaaaaacaagtcacttgaagaattgtgagttttggaaatgtatttttcaaaatcaaacattggtaatcgattaccattaaggtgtaatcaattacacattaacagatgtgacttttcattttgaattttgaaaattaaaacgtttagaagctctggtaatcgattacaagtattgtgtaatcgattacacaagtttaaaatactttaaaactgtttaaacataagttataactcttgaaatctgaaatcttaacattttaaaacactggtaatcgattactaccttctggtaatcgattaccagagagtaaaa

SEQ ID NO: 107988 - DNA, 236 bp, Glycine max
  unsure (1)..(236): unsure at all n locations
ggacctgagatcccaagctccagagcgaataggattctgattttttgttctcatcntcagaataagaatcttcggtaggacggtttactttgttccgtgactgagtatcacatggagttatcgtccagaccgttcttatccaagaagttcttacactctactcctgcatatactatagcttgctctgcgatttccgtcccttaagggactcgaaattgtttcaattgaattttcat

SEQ ID NO: 107989 - DNA, 205 bp, Glycine max
  unsure (1)..(205): unsure at all n locations
ttctttggagtttccaagtgccaattcgtcttcttctttagtccagtcttcttctggcttcaattcatcagtgggctttccttctgtgtccagcatcttgggatgttcccagcctttgatgacagctttccaggttctgctatccagtgatttgaggaaggccaccatccttgctttccagnattcatagttggttccatccaga

SEQ ID NO: 107990 - DNA, 328 bp, Glycine max
tgtaatcgattacacacatattgtaatcatttaccacagcatattttcagaaaatattctccacaggcacatctttttattcggttcttgaatggctatcaaaggcctatatatatgtgacttgagacacgagtttgccaagagtttttcacaacataaaagttttatcctgttaaaaagcaaaatcggtatatcctcttacaaatcccttggccaaaacacttgtgattcaataaggaattatttgagtgctcaaattgttcaatctatctcttttcaaaaaagattacttcctctcttcttttttattctgaaaaaggaataagag

SEQ ID NO: 107991 - DNA, 197 bp, Glycine max
  unsure (1)..(197): unsure at all n locations
ttcttttngctcatgctgggaacgcctctanttcaacacccgtgaagcctaaggcacccacccagagggaagctccccaagttccaactccgaacacgactcgaacggccggtaattccaacacgacaaggaacttccctccgaggccattgccggaattcaccccgctcccaatgacgtacgaagatcttctacca

SEQ ID NO: 107992 - DNA, 365 bp, Glycine max
tgccacccagctcgcccaggcgagcagggttgcttcctccaaaagcaacagccttctgaaggaatcttctggagggcccaagtgggcctggttgctatttgcacccccatttttactaagtatacccctctgcctttttttggtgattcttttttcgtaaagttacggaaacttacgaatttcgtaacgatacttgttttctttctgtaatgttacggaaccttgtggattacataatcatcccctttttgacttacggaatgttacggaacctcactaattgtgcaacgatgctttcatttgaattccggtgtgtcacggaaccttacggattgtgcatcaatattttcttttgtttttcggca

SEQ ID NO: 107993 - DNA, 372 bp, Glycine max
tgtggtagagcttgcaagtgtaagagccataaatggtagtgaaaaatacttgtaactttgataagttagtgaaaacttggtggttgccaagaactagacgtagtcttgaagttgagatcaaccaatataaattttctgtgtgctttcttgtttaactgaaaaagggtttttgaattttttttagatctcatatcttcttcttaaagaaaattgttttttctcatcgtctgatctatttatattcatcagatgataaaagtgttttacatacttaagaaaagccatagatttctaaaatcacaattcaaccctccttcttgtgttattttcttctatagtttggtatcagagctaagcctctaagggttgagc

SEQ ID NO: 107994 - DNA, 197 bp, Glycine max
ttcttcttaatcttgactgaagaagatgaaatcgtggttacttcatgcactcttctaatgaaaatagcatcatttctggcactaaattgttgggagttggaaaccatcttctcaattaaatttttggcttcagcaggggtcatgtctctaagggctccaccactggcagcatctatcatacttctctccatgttact

SEQ ID NO: 107995 - DNA, 374 bp, Glycine max
tgtagaatggctagacatgatacatgtcatggtttggtttggttcaaggataaaagggatgccccacattatttccatgacacaaatgcaaaaatgatgatttggaaactttatgcaaaactggtcatgcatgcacctatgcgaacactcaagtgtcaaatttttatggtcatgtgatgctagggctcaggattcgtttcctctattttaatcaacccaatgtttccaaaatatgttcttttatcaatttgtgcattcatccgagtccatttcgggcgtccggggaaatttcacagcattcacccttcaggtgtagacacatttttcaaaaattggttatgatcaatgaactttttaaaaaaaagttggaaatc

SEQ ID NO: 107996 - DNA, 356 bp, Glycine max
  unsure (1)..(356): unsure at all n locations
agncttttccagatcaacttgtttcggaagcttgttaatactcttccggatcaagttgatccgtaagagacttccggatcaagttgattcgaaactcatccgtacgtccgcgacgaacaaaccaccatctgcgtacctcgtttgtcgccaccgaccaccgcaaagctcgacgccggaaccttcaccttcaccgctgcgctcaacgctgttacccctacgaaccagaggcaatgccgcacgaaaaagagaaaacgagaagcaaagttttctgaaaatggaggtaagaagcttttttgaaaaaaaaaattacatttttaaggaagaaaggtgataggggcaatttttgcatttaatag

SEQ ID NO: 107997 - DNA, 367 bp, Glycine max
atccacagatgatgcaggccgcagctcggaattttgtcttctaatgcctgaataaaactctagtgagttggagatgaaattcattaagtgttgacgtaataaacaataataacatgatcattttacatcatcaaatcatgaaatcttttgtgacatgtcaataaacgtgtcattaaaaattattgttaataaataatgatatcatctaaattattatgtcatcctaatgatattattaggaactaaaaaatgatatgtttttggggactaaaataaaaagaattatattttcagagattaaaaacaaaaaataacatatttacaagaaatacaaattaaaaaatatacaattattaaagtaaaaagg

SEQ ID NO: 107998 - DNA, 285 bp, Glycine max
ctccaataaaggtgggctattgtaaaaattaatggtgtgacaaccgtcagtaatccctttatcatcgtcattagtaatgacttttccattgaaatcttgtttgactgcgctatagattttttatttctcttcattagtgagataattatcccaccatcctttcagttgtccagaaaatcatgccactaagatatctataatggtctcttctgaacattcgtgggaggtttggtaagtcgtggctaccacggtcatgtgttggagtgtattcatgatgttatactc

SEQ ID NO: 107999 - DNA, 344 bp, Glycine max
agcttattggcacttacccttttttttgttttcatgaaacgtcaaccacagatttgtcttgtaatttttgccaaggtttcgtggaataaaagttttatgtaacttaaattatttgtggtacaaattgagatggcatctttgttcgagcaccatctgaagtagtcagtgttttaaccaatctcatagagcttttgttggaacggcatgaattcccaattttcatctccagactgcttttggttgtagttcgaaatatattcttgtatgttctcaaactattaaggctatgtttgaatatttaatggtgagtggaatagaatggagtggatggtggcagaattgaa

SEQ ID NO: 108000 - DNA, 356 bp, Glycine max
agcttttagcgaccccggatgcagcggccaaacatttattgctgctaatattgtcactaaaaactcaataattgccactaagaactagttttggtgtagtggttatacgttaaagctagactagaactatataaatgtcattctgagtggtggtgaaattcactactatgctcgttttactatgttactaggcctagacccatgtgatgcacggatgatttatttatttattatcatttttattggatgtcttaaatattatatatcaaaaaggcaagtacgataggaaaggaagtagttgtgtttaaaaatactaatactttagtcagtaaaatctgactaaatatttttagaat

SEQ ID NO: 108001 - DNA, 345 bp, Glycine max
agcttgatatatttgttgtattaatgctgataaaaactctgcatctcgcgagcatcactcttaaatttttatgtcttgagctcttcttctccagggtcaataatctcttgttggtccttgttcctggatagtagtagttgaaatttgggtctattgagagggctctatggtacaaaggatcgagctgccaatagggtgcactgcaagtgccagtggcatgtgattaagtggtcattggtgaggccagatgcttgcatgaatgaatgaaccactgttggaccaacgtacctaaagcccctcctcaccatgtctttgcttatgctctctgattttgatgtcttcact

SEQ ID NO: 108002 - DNA, 348 bp, Glycine max
agcttggaaactttgtacattactgaagctctgagaccacttgtttgaccagtgtcctcatatatcttaagaaaggggggggggggttgtgataacaaagatgatgacaaatagcccataataatgagttcaagattgagtcaagaacacttctataatcaaaagaaatgtgatttccagattcaacaatcaagtttcaagaatcaagaatcaagaataatcaagttgaagattcaagaatcatgaaaagactcaatcaagataagtactaaattttttttcaaaacattgagtagcacatgaatttttcacaaaaccttttaccaaatagtttttactctctggtaa

SEQ ID NO: 108003 - DNA, 343 bp, Glycine max
agcttgttcgatttctatttttcacagtgcgagtcactcatgtcatgcaatcaattcagttcaaaacaagatatcaagacaaacacaccatttactgaggaaaaaattatgaaaatgctagattaaaccactgttcaaatccaacaaatagtaaaataactaaataaataaagaaaattgtctgaaaaacaagataattaaatggaatcttgtcactcctcagtcctgtgctagtgtgggccatggatcccaggcccctatgctgtagtgacgtctgctacataatcaacgtccacgcccacctctgctgcccctaaatcctccgcagcctctggggtgtcct

SEQ ID NO: 108004 - DNA, 321 bp, Glycine max
agcttgcgatgttttatcgttattcaactaacgggacgggcgcatatgctagctaattatttgatgtacactagaacagaagaatcttgagttcccaggggaacgaagaaaggaactcttacttggttagcccagctaacttcaagaggccgacgtgctgatgtataccaacctgtcagttatgacagctgtgattagatctcgctaactaacttactatcttagtgaactaagtcactaaaacttctactgggcgtcactacccgagactgcagttgaatggctgcatgccgcacgataatctcattcccgacacaaact

SEQ ID NO: 108005 - DNA, 351 bp, Glycine max
agcttaagctccttcaactgcacaaggctcttaatatttgaagagtatccttgtggaaccttcacccgacgaagacactgacaaaaacttatcttctccttcttggacaaagtatggcaggctgggggcaagtaaattttcttcccatcagaccttggatgcaactgtgatcgtatacccatatcagctagatcttgacgagtattcaagccatccttcatcttgccttgaatgttaaggagcgtcccaatcacactgtcacaaacatttctccacatgcatgacatcaatacaatgtctaacgtcaagatcacaccagtacggaagatcaaagaaaattgacctcttctt

SEQ ID NO: 108006 - DNA, 318 bp, Glycine max
  unsure (1)..(318): unsure at all n locations
tacccacgaaatttaagagagaaagaagtccacccaaacctgaattttcgaagtcccactcgtagccacgcacttcacgaccccgaaaatgctctcctttcacgaattggagcagaaatgatggccaaaggttgaagctatgtgtggagcttcaatggtgaatgagggaggaagaaaagcaacgtgagggagagggagagagagcttctgaaaatgtggggctgagtgaagagagagaagaattgcttttggttntaaataaaaggggttttctctttttccattattttattcaagctctgccacatgtccctatat

SEQ ID NO: 108007 - DNA, 344 bp, Glycine max
agcttgtctttcattatgtatccatggataggtacattcatacacacacacactagctggcatgtgcctgggagaagtttacaactaccgggagtatatttgcgacacaattttgcggctccatcagctcgtcaagagcactacgacccttcgtagtctacaatacgctgtaatgttgatctgatccaggattactggtgcatgcttaaggagtaaaggacagtctctatactctgcatcatgctcgcacatgttgatacttctctgacaaatgacgaacactgtccatccttcgagaacacgagatatgtgctcaatgaccatcttgagatagatcattaaaa

SEQ ID NO: 108008 - DNA, 356 bp, Glycine max
agcttgtctatggcaaatgatatcatttctctcaaccacctccttgaagtcttgcaggcttgctgcatagactggaatattaaaattgtctcgtttttcttggctaatcaatccctgaaatcaagaatatgatttactataaaataacatgttcatatcaatgcataaaaggatagatagtgaattggtctttaaactaaatcaagacttctgcttttgaaaaggtaacataaaaaaataaattctcacatcagtaatatatgacaatttagatctaccattctattaataatgtatatatactcaactataatgtgaaattatccttatatctatagtgttaagttggtaagtga

SEQ ID NO: 108009 - DNA, 354 bp, Glycine max
  unsure (1)..(354): unsure at all n locations
agctntaggagaaaccataattctaatgtagttcctaaacaaaaatcaattgaggaagcttcgccgagcatccccattgaaaaacctttattcaaacctttcaaagttagtgagaaggctaaacgaaaaattagggaacttagaaaaactaaatccttaattgagggcgtaggtgacaaccatagtgaattactaaacaagattggtagtttacttaaggtcattccagatactccccaagcctcagaaaatacttccaaaatggtaacaagaagtacctccaaattaattaatgttattaatgaagatagtgaccaaaactcagataacacaactgagataggatcagtgtca

SEQ ID NO: 108010 - DNA, 341 bp, Glycine max
  unsure (1)..(341): unsure at all n locations
atgatgtacaagacacctctatttgtgaagaggtcaacgcattactagatgaaaaggtatctagtgcatgaaagattcttcttaaagattcctagacttggaagaaaggttgaaatccttaatcacaactcttgaagattcataagaagagagcaaggaaatgcttaaacaaaagctcttactacaaaaagaatgcantcctttctataatgagcttgataagttgaaaaaaagaactcagacctttggatggatgtcaacattataaaaagggttcttctaatttaaaaagcatgcaatgattgaagaaattatcgtcttcaaaatgtanatgatggtca

SEQ ID NO: 108011 - DNA, 348 bp, Glycine max
agcttcctgcaaataatcattctgttagtctatcctgtatggacgcacgctggttaggcacacaaatatagagtagcaaatttggacttggttgatgtaagtgaatgaaacaattaatttgtttcctctgtcattcatttgataggaactgatgtctagagactagaataccctgcctatgtgacttatgcattgttgggaaatacccaagtcccacatcagatgaaatctaacatgcatgtcttaatagtttttgcttttgtataaactgttaagtgaaatattgaaaagaatttttactttcattgaaccttaaaaataaaaattatgagtaatgtggacatgtgg

SEQ ID NO: 108012 - DNA, 354 bp, Glycine max
agcttctgttggtcagattctagcatctcgatactttatgcgccttaatcggacattcgagtgaaaagttatgaccatttgaatttctcgagagctttcgtagtccaattttgagcatctcgatatattaactccccgaaccagacatcggcgtgaaaagttatgaccacttgaattctcgagagcttccgttgcttaatttcgagcttctcgatatgttatgcgattatatcgaacatccgagggagacgttatgatagttttaatttctcgagagcttccgttgatcaattacgagcgtctcgatatgttatgcgtctgaatcggacatcccagtgaaaagttatgaccatt

SEQ ID NO: 108013 - DNA, 348 bp, Glycine max
agcttggcatcttagcgcttttttcagcattggcactccacccttctcggggttcttagcaggttttttttaccagtaccttctctctccaatatttgcttgaaatacattactttaagaattaatttctaaattacaccattttctatagcaaagtcgggttctgacatcccaacttgatttttttttatcattctacacattctctctccatttttttcttaaaatacactactttataaattaattctcaaactagatcactttcaacaaattcacgaaaatcgggttcggacttcccttttttatttataaaaaactttatatattattaaaattaaatattat

SEQ ID NO: 108014 - DNA, 256 bp, Glycine max
  unsure (1)..(256): unsure at all n locations
gttcataaatggcatttggtaatcgtaattaacagtgaaaatgtaaaccggaatatgagacgagggaaatactatctatatgtagatgcatttgttacttaattttgtctacatgcatatataagcatctgattangaggtcgattctcgagtttgtgtatgaaaaaacatttgttgagaaatcaggcccttggttggatccncatacctcaagaatatagactgtaattgttggccaggagatacactatgcagt

SEQ ID NO: 108015 - DNA, 348 bp, Glycine max
agcttaaaacatggataaactaaaagcaaaatgacaaggaaattagccaaacattcgtttttaattactatcgccactctccagcagcatgttaggataaatagtcaaggaagtaaagaaagaaaatcaacaatcatgtaagatagaccccacagacatctgtacagcacccatactgattctaatcccctttgcaaggctagctctagctagtgtatcatatcttcaatggcaaccattcaattaaaaacaaaaacagaacaaaacaaaaccatcattatccaaacgggctcactctgatctgattctatcctcagatgcaacaaaattttctgaaggtcacaaagt

SEQ ID NO: 108016 - DNA, 302 bp, Glycine max
  unsure (1)..(302): unsure at all n locations
acgtgtcattcttttgggacaatgaatctattacagaaaagaatcctacatagtattcttttcacacaagctgtggtgctatggtattactctttttttttgtcacaaattagaaatttattaggaaggaattgacttcaaggatgaacaacattataataatcgcaaaattcatttgggtttgacttcattcatcttcttccacaaaccacaagttcctatataaatttgctgaagtagcattagaatcttaaaacaatntataggcatgagcttaaatttttcaaagtccttgatcttta

SEQ ID NO: 108017 - DNA, 343 bp, Glycine max
agctttacggctttaagaagtcatctatcaatattgcctataatcctatgcagcatgagaggacaaaaaatattgaaatagatagacatttcataaaagaaaagttggagggagctcttgtgtgcatgtcccgttacaacaccaactggttgatgttctcacaaaggggctaaacagcttgggtttttatgatctgccaaactgggaatggaagacatctatttgccagcttgagggagattgttaaattgtcagtatgtaaatctaatcattaggagaatccactgaaagtctcttaaatctggggattcacttaaaaaactaattaggcaagtttttattc

SEQ ID NO: 108018 - DNA, 204 bp, Glycine max
  unsure (1)..(204): unsure at all n locations
cttgaaatatngatataatccttctctttctctaaaatatacttttgaagaacaaaaaacaaacatcaagaaaatgacgctcgcatatcagttctcttatatgagtctgaaaaaattattcatggagtattttatactgaaaaataattttcatggaattataattcttataccatccaatctctatctctttggatatttatt

SEQ ID NO: 108019 - DNA, 344 bp, Glycine max
  unsure (1)..(344): unsure at all n locations
agcttcaaaatgattcaacatcttatttatataataaacaaaaaatggagatgaagaaaattaaacaaaaatctaattgataacaaaatccaaacttacttgttgttcggnagtcgacattatcctcaacaatcgacattataacaacaaacaagtggcgttggtaatctcaatcgagttggcaggaaactacctgcaaccaaaaataatactcaacaacaaaaatcgcaatgagttttgagtggccgagagtgagatgaattgaaaatgcaatcaaaagtcagtgcagtgcgagaagagcaacgaaaacatacctgtcgccagtgagcgttctactgatgtgc

SEQ ID NO: 108020 - DNA, 252 bp, Glycine max
atcgtcatgggatcaagagtttaatgacggttattcaaaaaatcatcattgaagagtgaggtcaatgacagtttttgaaaatcattgtagttggtcaactacgatttacaaaaccatattagaaaggtatgaactttcattcatgtgcctcattattctcttagtctctcgtgcatctctctctcatactaatactctcctctcactacggcctttatctcttcttttgtttgtcggtgatggcgttgtcaa

SEQ ID NO: 108021 - DNA, 354 bp, Glycine max
agcttgcatttttacttgctaaagccccactccatcattaggattattacctgccatctcaaacaaacaaatcaaacgtaacaagacaattatagtcgttgtttgaatacctcacccactcaagtgtagcacacaattatggattttctctaatgacaacactcttgccttttaccactctaattccccttgagttcttaggaaattcaagagattatggccacaacaaagaacaattcaccaatatgtgtaaggtaaggctatagagacaaggaaaaggttaaccaagaaaaaggctaacaatgtttttaggcacaatttaaggaaataaaattcagaatttaggaattcaag

SEQ ID NO: 108022 - DNA, 343 bp, Glycine max
  unsure (1)..(343): unsure at all n locations
atgaagctctgataccacttgntatacaagtggccttagatatcttaagaagggngggggggtgaattaagaaattccaaactacttccccaattaaaaatctatttcactttttattcaagttatgaattcccttaatgacaatcttcttaaatattgattcaaataaaacaatttgaatatgaatataaagcaataataaataaaggagattaacggaagagaaagtgcaaacttagaattatactggttcggccacacccttgtgcctacgtccagtccccaagcaacccgcttgagagttccactatcttgtaaattccttttacaagttctaaacaca

SEQ ID NO: 108023 - DNA, 342 bp, Glycine max
agctttatcctcatcaaggttaaagaggttgctaaaggttagcctagtctcaatgttttccagccgggtagttatattttccaacgaaatatgaaggtgaagcatagcgtccatcttttgaataataagtaactcaaaaggactccattgatgtgcaagttcttatggagcttcaaatttagcatcttcttccgtctgatctatgtttcaaactactagctctctagcccattatctattcatgatcaacaatcctcattccaagcttcttgagattcctttcggtaatctcgctagaggctttggtaaagtccacaatctcattagagacatcaagattga

SEQ ID NO: 108024 - DNA, 326 bp, Glycine max
  unsure (1)..(326): unsure at all n locations
agctttaacttttgttttcattttcagatgtgangatgattcttattttcgatttcagatctaaagatgatggttcttgttgttttcaattttagatctaaagatgattcttcttgttattttcgatttcacatgtgaagatggttcttgttgcttttattactcactctttgttttcgatggtggattgttgtgggtgagtaaggcatgggtggttgccatttgccatgtgtgactcatgagttataggcaaagagatggaaaccaatgcatggtggccttgcttgatggtcggaggggggagtgtcgttgctgtcacgacagtg

SEQ ID NO: 108025 - DNA, 280 bp, Glycine max
  unsure (1)..(280): unsure at all n locations
catattctcgtttctcttaacaacggggccccatcaatccttccaagctttcccaacatcaaagtaatacaacattcaaacagcacaaactatcacagccaagagaacagagcaaaggcagaaaactctgccaaaacaccaaccaatatcacagcgtttctcacttaaagaccgcagtaacaattccctcgttccaatatcgtaaccggtggatcgactacanaattttactggaagtctctagtacataagcctacattttgaccgttgggatctacta

SEQ ID NO: 108026 - DNA, 353 bp, Glycine max
agcttgctcgtcttgctgatatttatcatgcagacttttctgatgatgaccgaggaacaattagggatcaacttgaaacttatgtgcttcaagtgagaagaaatgcttctttttccacttgtgaagatgttcaaagtttggctatgaagatggttcaaactgagaaacatttggtatttccattggtttataaacttattgagctagctttgatattgccggtgtcgacaacatccgttgaaagagctttttcagcaatgaagattatcaagtctaaattgcgcaataagatcaacgatgtgtggttcaatgacttgatggtatgttacaccgagcgggagatattcaagtca

SEQ ID NO: 108027 - DNA, 369 bp, Glycine max
  unsure (1)..(369): unsure at all n locations
ttaagcacctgcggctgcaagctttagccaaagggcttatcttgtattaaattcttggatagcccttttgagccttgtttccctttccttgttttgaagctcactacaagccttaagtgaaaaaccatgatattaccatatccttaaggaattttggagctttggaattgttttgggaataagtgtggggggtttttgtttcattggacaacttgttttgttggctatgcttcatgatgtattttgggccatacttgatgtacattgtatattggttaaatgttggacatgctgaatgaaatgttgtttctcaaaggcaatnnnnanaaaaaaaaaaaaaaaaaaattcgaaaaaaaaaaaaacaaaaa

SEQ ID NO: 108028 - DNA, 347 bp, Glycine max
agcttatgtctggtcgagtacttatttgttcatacataagacttccaacaactgatgcatacgaaaatgcttccatttgttttcgctccagatcatttttaggacatcgtgcgagactaaatttgtcttctttctgaattggaacaagtgatgttgaacacttttccatcctgaatctctctagtactttattgatatatgctttctgagacaagcctaacaatccttgtgatctatttcagaatatttttatccctatccctatcacatagcttgtctcacctatatctttcatttcaaagttgttagagagaaacttcttgtctcatgaagaagaccaagatcat

SEQ ID NO: 108029 - DNA, 352 bp, Glycine max
agcttgaagacaagactatacgtggtatcttccataggtatagcaatatctctaagggctaccgtgtctacaacttgccaactaagaaactcgtcatcagttgagatgttaaagttgatgagtacgcttcttggaattgggatgaagaaaaagtggagaagaacgttcttatacccgctcaactacctcaagaagaagctgaggaagaagacccaggtgaaccaccttcacctccaccacaacaacaagatcaagaactatcatcactagagtctactccaagacgagtaagatctttggtgtacatatatgaaacctctaacttggccatacttgaacttggaaactttga

SEQ ID NO: 108030 - DNA, 266 bp, Glycine max
  unsure (1)..(266): unsure at all n locations
atgaagattaccaattacaaacagaacagtcttaaaaataccacaataaacgatgtatctacaccatgatctcgtagctagtctaaacccttgtctagccaagacaaaataagacaacctgcacatgagttatttattntatgacttatattatatccttttataataaatttctgaaatctgagttagagtgcactttttaagtgacatctcatcattcatctctagtgtgaaaaaccaaagtaccaccaaactactacttggga

SEQ ID NO: 108031 - DNA, 352 bp, Glycine max
agcttttaacccccttcttttgataggctcagatttcagaaaaagaagccacaatcaatttaataatgttctctaaacatgcaagaaaaaattgattgcaataaaataaatgagataagggaagagaaaaatgaaaactcgatttatactggttcggccactcccagtgcctacgttcagtcctcaagcaacccacttgagattttccattctctttgtaaaatccttttacaaagtctgaaccacacagggacaacccatcccttgtgttcaggaatccttacaactgaagagaccatcggtcccttaatcaatctctttgattaagaagaagaagaagaagaattttatc

SEQ ID NO: 108032 - DNA, 347 bp, Glycine max
agcttggcgaaagacccctttcgccgagcgcgcgcgactgatgcgagaggcggcggcggtgcttcgccgtcgcaaagccgagttcgccgagcttatgtgcgccgagatgggcaagacgctggccgacggcgccgccgaggtggagaagtgcgccttcaactgcgactacttcgctgagcacgccgaggacttcctggcgcgccagccgatagatatgtccagcggcgacaacaagggtccgaaggccttcgtcaccttcaatcccctcggtgtagtcctggcggtgatgccatggaacttcccgttctggcaggtcttccgcttcgccgcgccgggactgatggcgg

SEQ ID NO: 108033 - DNA, 336 bp, Glycine max
agctgggacatttgatattaaattttatgaacataaacggagaaaaaagctttaaaatacttgttctaaaaaaatacataataatttcatattcaaatttggcacaataaagttaactaagtgcaagttatatatatataaaaaaaaaacatacaatgttgcatacaactttcataattcaaaataaagacgcaaaaaaaagtaaattaaaagaagacaacttttatcaaaggtcttttactttttttttacagcaatcttttaaaaaaaaaactacttattttactctttttctttacaaaaaaataaactacttatttgtttaagagatttaat

SEQ ID NO: 108034 - DNA, 344 bp, Glycine max
  unsure (1)..(344): unsure at all n locations
agctnnagnngtttgcctgctantttagngaaaacaagtattccatcatcctgtgggacaattaaaactaggagataatagggtggtattgaagcatacactggacttgccaaaataaattattttagccactttcattataagaatcagtgtacattgttacaccagactaattgcttatctattttccagtcttctaataatctaatctaatttctaacaacgttcattgacttaaaataacctatatatgaaacaagagtaagaacagactaatacctttaatagactatgcaaaaaaagataaattcaaaacaagtatattgctcattatgtaggggagt

SEQ ID NO: 108035 - DNA, 344 bp, Glycine max
  unsure (1)..(344): unsure at all n locations
agcttgcctggtttggaaatttataatgtcgttgnggggttactgatatgcatatgtccgaaaaatccgaatccctactggcagcaggactgggtaccccctctggcatttgggttttccattgttcagattcaacagatgcattggtcaccaccatgtgccactttgtggcaattgacactatcccttgtgctctgtgtgtgattcttgccgcacccataaggcataaagaagaatccacataattgcacagccgaaaaaaatctgcataacacaaatcaatcgacaatcttaattataataaacactgtaattgactgtaaattattagatggcgtagaact

SEQ ID NO: 108036 - DNA, 296 bp, Glycine max
aaatatttctcacaccacataactttgctcaatctaagaatatctagaacacattagaactcaaccatagcgtagcataattgataaagaaagttccttaaacatttaatcaggcttattacctctaatccatcttcgtttttgacagtgtaatatagcaggtttaccaaaaagaaaaaaactcacagtacgttttgaatttgatttgcaatatacattaacttgacgaaataaacgcttgtgtcgcaattatctggatcgcaagaacagaatcaagttagacgtcatttcatttt

SEQ ID NO: 108037 - DNA, 345 bp, Glycine max
  unsure (1)..(345): unsure at all n locations
agccnagngtgtgtttnttgtaaggttcgcgcgagagaaaactgcgtgagacacaagtntncaaagtcacgggtctactacaacggttttcaaaaacccatctgtgtagtcactcttcaatgatggtttgttgaataaccttccttaagatagaaattccatgatggttatttgaaaatcatcttcattgtcaatccatctaattactagattgccacaacatcgtatttaatgatggtttctgaaaattgtcattgatggtgcatctggaaaaaacattttttggagtagcgcttagaacttctattttttgagaaccaagtacaaattctatgcacatgcaac

SEQ ID NO: 108038 - DNA, 341 bp, Glycine max
agcttttttgagaaaactttctttgagaagctgagcttagctacacacacccatctaaaaactaagctgacctccttgagaagctagagcttagctacacacacccatctaaaaactatgctcacctccttgacaaaatacatgaaaatacaaaaaaaaagtctctactacaaagactactcaaaatgccttgaaatacaaggctaaaaccctatactactagaatggtcaaaatacaaggcccaaaagaaggaaaaacctattctaatatttacaaagaagggtggatccaaccttgacccatgggctcaaaaatctaccctaaggttcatgagaaccct

SEQ ID NO: 108039 - DNA, 340 bp, Glycine max
agctttcatactgaaacgtttctctcaccaaatatcttcttctctcttctgtgcttaatgggtaacagtacttcttgctctctatgggaaagtctcttcgcttttgatactgcaccatgcttctatttggactttctacttccactgaaatgccatgttgcatgatcctagaatctgagatccatgccaaccccgtgctggtatcagtgtaattacttgtccctccacaatcaatgctaacaaattctgcaggtgaagaagtttagattgtgttttgtatcattacatgacatgatggttcaaaaagaaaaagagaaagttttagcaatcatggtttatg

SEQ ID NO: 108040 - DNA, 190 bp, Glycine max
ttttttttcgcttttatgacacacttcttcataatagatattatagcgaaatatttctgagactatactttatgctcagtctagctcaagccgatcaaaatcatctgttttataacataattgatcagacaaagagacctctcttcatcttcattacaaggggtccacctgctgcacttatcaagggagc

SEQ ID NO: 108041 - DNA, 352 bp, Glycine max
agcttgctgtgcaagagaaactgcattccggggctttccatccgcaggccactcagaatcaatatcaacaggctgcagaattgaagaagcagcaattccccttgtcggagaacaagtcaatctgcaataaaccaccatacatgcacccttacaccctataaggagacaactttggataaaaaatatagcaattgcaacaaatgaaattaacatgagattgcaattatcttacaagttctgtaaatgagaccggagatgcaactgctggacaaagtcatgcactaactgatcagcgttgcttgtgttacctttttcatgaactgaggtcatatccatctgccttgtatttagt

SEQ ID NO: 108042 - DNA, 207 bp, Glycine max
attttttttttttgagtagtaaaaatatgaatacctcttggtttatttccatttataataatttttattttactgagggtgctacaaatagaaaaaaaatactcttacttgactgaacattaacatctgtctatccacatatatagttgtctaataccaatatggtacattacatactgtgcataccagggctaggctcgggtacaa

SEQ ID NO: 108043 - DNA, 354 bp, Glycine max
  unsure (1)..(354): unsure at all n locations
agctntctcccactcacacattaactccacaatatccatgccacctaaacccccaaaaaccaacaaaaaccatatcaaaatcatgaaactaaacacttttgtgaacttcataaagtggtcatggggggaaaacaaaaataaaagatgagaggggaaagaagaaagttccttacaactaaaatagcatcaaaggtaaaaaagaacactgctacaaggtctcttgagtcaaggaaattgaaggtttcacactctctaatggtgggttctcttggagagaaaagagagtgaaatgagagcatttatgatttggttcaaatttacgaaagggttagtgaggagtttatgattttctca

SEQ ID NO: 108044 - DNA, 352 bp, Glycine max
agcttgtgggagttcatagtgatttttctagtggacagcctgtctcttttgccaagtgaaagatgacaggagcactacttgtagccgaaacttgcccacctagatcatatacttttcttgcataaacatatattatgattaaaatttacagtcaacttgatcagctagagagtcatattaagatataggataccttcaatttctactaattcacacatgccaccaactgtatgatgcttctccaagatagtgatattattataaccaagcctatccagtgcataagcaattgataagccacttgaaccagcacccactattccaattctggtgtttactggcatggaaggat

SEQ ID NO: 108045 - DNA, 352 bp, Glycine max
agcttatcgtaatcgattagataattattttttagacaatgactggtttttcaggagtctctactttaatcaattaccaggtgatgtaatcgattacttctctcttaaaagtgtttctgaagtgatcaataacactttatcgattatatcaagaatctaattgattacattgttcttgaaagttttccagattttgggaagaatactttaatcgattgaaatgataatataatcgattacttctttgaaataattgattacattgtatatttaatcgattacatgcgattataactattttctctataaatagccaccttgtgttctcacttcaatgtggaaaaattaagtg

SEQ ID NO: 108046 - DNA, 330 bp, Glycine max
cctaagtcgacctgcggctgcagccgaaaaatttattctttgcattcagccccagaagcccacctaaacttcttctctgcacgtatactcatgacatgcaaagattcggccagctttctacaccactttctatatgccactaggttacgcttcatctgaaaattaagaattttaagcttctccctttttgatgcaatcctaccctccaagggcattgactggagaactccattatcatacgggccctgatgcaaaaaaaggccctacggttgtcataaaccttatggtatatttcgggcccatgggctaagtatgagcccacttatcgtt

SEQ ID NO: 108047 - DNA, 346 bp, Glycine max
agcttggcgaaagacccctttcgccgagcgcgcgcgactgatgcgagaggcggcggcggtgcttcgccgtcgcaaagccgagttcgccgagcttatgtgcgccgagatgggcaagacgctggccgacggcgccgccgaggtggagaagtgcgccttcaactgcgactacttcgctgagcacgccgaggacttcctggcgcgccagccgatagatatgtccagcggcgacaacaagggtccgaaggccttcgtcaccttcaatcccctcggtgtagtcctggcggtgatgccatggaacttcccgttctggcaggtcttccgcttcgccgcgccgggactgatggcg

SEQ ID NO: 108048 - DNA, 346 bp, Glycine max
  unsure (1)..(346): unsure at all n locations
agcttccgnnctcgagagcttctcttatttaagcacttcagcctttgctttcgtgtagcttaggaaaaacgtcattccttcttctttctttcttctaaagccatttctaaagttccaagcactttctccatcacccacagccaccattagctaccacaaaccatcattgttctccattgaaaacccacaccgagagaaacccttcaaccgaagcggaatctttcaacttggcttgcggtttcggtagagaacgaaaaccctaatctgatctttcgttttctttcggggtaaccatggttctatgcttgtttcttgttagtttcatcttgtctttgcatcttttcta

SEQ ID NO: 108049 - DNA, 352 bp, Glycine max
  unsure (1)..(352): unsure at all n locations
agcttagntagctttcttcttctaagctccttgncctaagcctttcactactattaaaaaaattgtagtaatatatgttattatacctttcaccttatttgtggagttgttgctcttgatgtttaatcaaatatatgctttaatggtgcattttgttaaaaggtgcgacatactgattgtttagctaaaaaagtcacttgttctccttgggttttcatgtagcttctagtcataataagtaggttttctttcattttgcttttgttcaactatttcactgcattacatagtattctcggttctccactagtctctttcctactaggtatccatattatctgaatatcagcat

SEQ ID NO: 108050 - DNA, 342 bp, Glycine max
agcttatgcttagcacgtgatagacatgacgcttagcgcaagggttgcgcttagcggttggacaactgaaaatttttttctgagtcttttttgcccatatcttcacatgagcttaaaaacccccttgttcacttctaaacaagctgcaaaattaatcacaatcacaagcaactatcctaactacatgcaagagatacagaatgaaaaagtgaaaagggaaagaaaagttgggttgcctcctagtaagcgctcttttaacgtcactagcttgatgcatcatcctgttatcttgggtccaacaaggttccaacttccagatccttcttctctagtctcttttcc

SEQ ID NO: 108051 - DNA, 341 bp, Glycine max
  unsure (1)..(341): unsure at all n locations
agcttgcgagctagcttcatattttaattatncaaggaagaagaccagagcttgactttcttagatataaatatataaaaatgtaaatcgcaagacacatttaaagttattaacatttatttttatgttcaatcaattcaactagatcctcttagtaataaattagttggattttttttcaaaattatcaaatgaagacattttttttttaccatttaggagtaagtcatttgtaagtaggagttagaaatctttaaaccacttcttaattgtgtgttttgagaattaattcaaagtgaaattaatatttaactctcatgtgagagtaagactttaatttc

SEQ ID NO: 108052 - DNA, 337 bp, Glycine max
aaaatagtattttatgttatataagttagaaattaaatggggatagttaaggttgattaatggtgatctaaattacataaaattagaaaaggggttattaagtcataagaatttaaagtggaaggcatttttgtaaatgactgatgtagctccatgtggagctcgtaagccttggatcttcttcatcaatggagtcctttgcttcttgaagttcaatggcagcagaatggagaaggaagaaagatgattggagacgccacttcaaggagaagatgagtcaaacacaagttcaccaccataggaagtcatggataagagcttgaaagaggagaagatg

SEQ ID NO: 108053 - DNA, 311 bp, Glycine max
gctattcctccttctggtaacgcatggacacttatccctgacccaactacaattcgtgtgaaaagtcagccaaaatcaacaaggataaggaatgaaatacattggttcgaatcatctgagcacccacaaaaatgtagtagatgtggagcagaaaggcacaacagacgtcgatgtccaatgcaatctgaccgtgggagttgttcatttaattgatttatgtatgatacatgagtgacttgtattggtttaagttgtcttgaatgtatttactttgtggtcttcaatcaaatcgttagttagaaacattactt

SEQ ID NO: 108054 - DNA, 352 bp, Glycine max
  unsure (1)..(352): unsure at all n locations
caagctttctctcctttttcaattctgaaatccttttatggtatcagagntttgttcgatctcaaggatttttttttttttgatcagcaaaagtatgattatattatatataatattaagtacagtacaagaggtactattgtatatacaacctagcaccatactatgcaagtctatggcgacttaatacatgtagtacagcaagaattagacaaccatagatttgacttaagctaggcacccaaccacgaaatatctataagctaatcccccccctagcacagaacccatccctgattttgctggaccaataggggaatgggatgtgaaatcctttttccagatttttaag

SEQ ID NO: 108055 - DNA, 355 bp, Glycine max
agcttataagaacaaaattgccttaatcatttccaaatatgcatgtgaattaggacgcatcaacaagaatcaagccaaggctattgtgcaagcaatcaatgggccaaaacacaccaaatgaatataatgatggatggctcaaattctcacaaaggtaaaatcatcactttcaaattgagctttcaaaactatcatgacatgtagagaagaatcaaggatttcaagtcacaaaatgtcaagaacttttattttcaaaacaattacccatttcttgaacatatcctataattcaaagaaaaacatgcaaagtcgtacgtgcacacaaaattgatccaaaatattaaactgaaaatcc

SEQ ID NO: 108056 - DNA, 357 bp, Glycine max
  unsure (1)..(357): unsure at all n locations
agcttggagactgcaatatcttctttcttctagcttatcttgatgcacggggatggaattaataaatagttggtacatgattaggagtctatggattacactaggcggattgtggcttatgtcatgtactatgatttggggtaacttangcagcatgtgtacggaaatgccgtaatccttaacctttgatggatacccccaacagtaggcaattaatgaaccttttcagttatgaatcaatcggatcaaataataaaaatatatatgaaggctgagtaagatgggcaaaagaaaacactatacctcacaaccaggctccataaaaaatgtttctcgaactccaccaggtactaaaat

SEQ ID NO: 108057 - DNA, 343 bp, Glycine max
agcttgagatgtatgaagtgttgaatggtgaaacttcctgcttttactgttgaccacagagtggtacctggagatatgtcgcgggggtcaggagaccttggggacgtcaggtggggtgctattgcccaaaaccaagcttgaccaatcccgacccaacccgggcatagtcggtcagtgagaacctgtgatgtacctaaacaggcgagctcctggcagtcaacagataaaaggaaaacaagaccacaaagcaaggaggcttgtggtggctggccagctgtgaattttgtgtaatatgtggatggtggcctctggtaatcgattaccaagggtgggtaatcgatta

SEQ ID NO: 108058 - DNA, 347 bp, Glycine max
agcttgcctaattaacctgaaattgagagaaaatgattattaaacacacaaaatgaaaatactaagtatttattacctatacttaacagaaaatacttataacattacaaaataaccataaattgggagagtttgatacaatttatacaagttttaaacacaaaagttagtcgttttcaccaactaacaactcccctaaatttacagttttgtttgtcctcaagcaaaaagagaatagctcatttgtcctcaagtgacaatgacatgcagtgactatgtacaaaggtgtatgctacaaagttattgattgcatgataagagaatggagtaaaatgccctcatcactt

SEQ ID NO: 108059 - DNA, 345 bp, Glycine max
agcttgaaggcttacttgatgcattggttaacttggtaacccagctggccttgaatcaaaaatctgtacctattgcaagggtttgtggtttgtgctcctctgctgaccaccatacatacctttgcccttccatgcagcaacctggagcaattgagcagcctgaagcttatgctgcaaatatttacaatagacctcctcaacctcagcagcaaaatcaaccacagcagaacaattatgacctttccagcaacagatacaaccctggatggaggaatcaccctaacctcaaatggtccagccctcagcaacaacaacagcagcctgctccttccttccaaaatgttg

SEQ ID NO: 108060 - DNA, 345 bp, Glycine max
agcttgtaatcgattacacacatactgttatcgattaccagaagagtttttcagaaaacattctcaacagtcacatctttttgtgtggttcttgaatggctatcataggcctatatatatgtgacttgagacacgaatttgacaagagtttttcagaacaaaaaggtcttatcctcttaaaaagcaaaatcgttttatcctcttacaaattccttggccaaattacttgtgattcaataaggaattatttgagtgctcaaattgttcaatctatctctttcaagagagatttcttcttttcttcttcttcattctgaaaagggattaagagaccgagggtctctc

SEQ ID NO: 108061 - DNA, 350 bp, Glycine max
agcttctacaagttgtcagcacgaggtatggtgcaaggaatcatggaagattaaaatccctaaaaaaataacagcttttgtttggcggctaataaaggacagactaccaaccacgatgaatctgcataggagacaggtgcaacttcaggatttacgctgtcctttttgcacagaatctgcagaggaggcatctcatttattcttccattgcatcttgatccaaccaatttggtgggaatcaatgtcttggttgaatctacaaagcgcctttcctcttgggcctaaacaaaattttctaccgcatattttcatccaggcacaaggtttaaggattaagaaatggacatact

SEQ ID NO: 108062 - DNA, 340 bp, Glycine max
agcttgcttgctgtttaaaattacaaaaacaaacaaccccccctgcccacttcgttactgtttgataaacatatgttatgaacgtttggttgatcattgctcattgagagacgacctaggatcacttcctagatattgcatttttaatgtttatttgattcgggtacggcctcgatcaaatttggcgctgttgccggggagtagttgtctaaaggttaataatagtgtttagttgttttgagtgtagctttgttgtttagtattgtgagtgtgtgttgtttctttttgtgtagtgttttgttttgcatttcagccgcgtcccctgtttagcgcttccctg

SEQ ID NO: 108063 - DNA, 343 bp, Glycine max
agcttcatacaattaatatttaatttatatcctaatgtcacatcctatcagagcgttgggttctcgtgtcctttagcatgagattctttatagttatccaccaattcatctgctccccgaatacaaagttcaagatcatcacaggatccaaacacaaacaatacacacgagtgagttatcacattcctaactaatagatagaaacaagaaaacatatgcatgtaggtataaatatcatataaacaaaatacaacttacttaatagtcatcgacctattcatctgctccccgaatacaaagttcaagatcatcacaggatccaaacacaaataatacacacgag

SEQ ID NO: 108064 - DNA, 345 bp, Glycine max
  unsure (1)..(345): unsure at all n locations
agcttttatcttcattnnaatggctgatgtggttgttcggaatccgtataatgcataccgatttgttaatccgtatgagttatacagatgaaccaattcgtataactcatacggatttgttaatccgtatgagttatatggatgaaccatataactcatacggattagctaatccatatgaattattacgtaatccatatggtttttaattattaataaattaattttatttatggttttaatagtgaatgttttttatttataaatatatgattttgagttttgtttttaaatagttattttgtattaaatataaatatgtcattttgttttttgttttcaaat

SEQ ID NO: 108065 - DNA, 352 bp, Glycine max
agcttgtccctttcccatactaaaatagtttctcaatcccatggaagtacacacctccgaacaaagaggaagaagaaaccaccgacatcagttcattgtcggccaaagtaaccaatatcacggggctgagcagtgtgacccgcagcggtcatgtatttgcgccccccgacctaccaattcagcccacgaacatcaaggggaaggcaaaagtggtggaagaacaagatgataaaaccccccacactccgaacgaggatattccagcgaaaagtcctccggagaaaagggatggttatggcaagaaggaggtgtcactagaggaagccagcgagtttctccggataattcagca

SEQ ID NO: 108066 - DNA, 353 bp, Glycine max
agcttatcatttttataacattatagtgtttactacaatcaaatcacccaccaaagaaaaagaaagtgctactttctaatcatttgagaactccaatcactgataattcagccacatctaaactgcccaatcaagaaaattgaaaccttagcaaagtggctatatccattacatcttcaactaaccctgtctacttatttttaacattttctgattattacggcaagagggtgtctgctaaaagcagcttaaagctgctagcaaatcttcagaatgaaaaataaaaaaaaaattaaaaacagttaatcatgcgctgttgacagtaatgatgggcattaaaataataaaattta

SEQ ID NO: 108067 - DNA, 353 bp, Glycine max
agcttgagatgaggaagtgtataagggtttaacttcctgcttttattcgttgaccacagagtggtacctggagatatgtcgcgggggtcaagaaaccttggggacgtcaggtggggtgctattgcccaaaaccaagcttgaccaatcccgacccaacccgggcatagttagtcagtgagaacctgtgatgtacctaaacaggcgagctcctggcagtcaacagataaaaggaacaaagacgacaaagcaaggaggcttgtgtggtggctggccagctgtgaactttgattgatatatgggatatggcctctggtaatcgattaccaagggtgggtaatcgattacaaggctta

SEQ ID NO: 108068 - DNA, 351 bp, Glycine max
  unsure (1)..(351): unsure at all n locations
agcttcctattatttattttttatgtcatctgattgaactttctaaatgcaaggcagaaccagaaattatctggattttcgtgctaaatacactntagtacagaagttgtctaagtgcaagcagccctgatgtcttttatccaatgttatagctaataaatgctccctttgaactcaaatataagcaaaaaaattaatttatgttgatcaagaatgctaattaacttaatttaattttctgaatatcgtttaaaaatgaacttcgatccataaactacccctcatgctaattgatggaacttaaattttatggaagcttgtttcaaatgggtatgttcttctccattttga

SEQ ID NO: 108069 - DNA, 341 bp, Glycine max
  unsure (1)..(341): unsure at all n locations
agctngagatntgatgcttttcgtaccatcaagcttcaacttacagagagtagttcaagcttagcgccacaggtggtaagcgtacttccaagagttcaaaaaccgtaagagattggtgcttagtgcctcctggccagctaagcccagcttaaaagctcaagttacagaatggatatggggcttagtgcaggatagcacgcttagcgctgctacaatgaaatgtatacagagaagaagtggcgcttagcgcatcatccacgctaagcccacaggttaaagttcaattaccacaaagatatggggcttagcgcagtgatgtgcacttagctgaactattcagc

SEQ ID NO: 108070 - DNA, 345 bp, Glycine max
agcttctcgatatatgattctcctgaatcgaacttgcgtttcaaaatttatgaccatatgaatttctcgagactattcgttatacaaattcgagcgtctcgatttattatgtgcctcaatcggacctccgtgtaataagttatgaccatttgagtttctcgagagcttccgttgttcaatttcaatcttgtcgatatactatgcgcctgaatcggactcttgtgtgacaagttatgaccatatgaatttctcgagagcattcgttgttcaattaagagcgtctcgatattttatgcgccctaatcagacttgcgtgtcacaagttatgaccattagagtttcttg

SEQ ID NO: 108071 - DNA, 345 bp, Glycine max
  unsure (1)..(345): unsure at all n locations
agcttgatggatatatgagtttttagagaaagctngagtccatgtgttatgcccatcggtctggtaaatagaaatttatcttaacttataaggcgtttggtaggtaagaatttgaaagcttggaagcaatgcctactccatgctgaattttcttataatagggtattaagctttactacttattctccttttgaggtagtttacgggttctagtccactgccctttcttaatttgttacctttgcctaacacttctgctttgatgaatacgaatgggctttctaaagccaattttgtaaagagtttgcatgagaaagggaaaacacaatttgagaataagattga

SEQ ID NO: 108072 - DNA, 345 bp, Glycine max
agcttgcacaacatgtaacttataattgttttactacaaaatgaagtaactaactaacttccactaacatatatacttactactcagaaggaagggataagccttgattaggtccatctaatctacctaattaaactaattacacaaagcaaagcccaaattcgtagcccaattattcaagtgcagaggttcttacttccaagctcaatttgaccctcgtaatggccgaattggcctaagcttatttgtgacaaaattgaatatttttttcttagccttctagggactactcataaactccatttggagttctatagggtcctataggccctgcacaaggcagat

SEQ ID NO: 108073 - DNA, 322 bp, Glycine max
  unsure (1)..(322): unsure at all n locations
agcttgaggatttttactttttacctactcaanttattgcaaaaaggaagtcatatttagtcaaggtctgaaaaaccatacaagtttcctcacgatgtataattatgtgggccattaagtctatcatatgctggcaatagccgagaagcccatgaatctctttgggggcggagtaggtgtctgacatcgccttggccttggctaacaatcggggaaggtcttgactcccgttcaaggttagagcaaaccgatccatccacatggttgtctcttggcgtaaagagtcgaacacccttcctctaacctctttttccgcgtatac

SEQ ID NO: 108074 - DNA, 301 bp, Glycine max
acaacgggaaagagagaagaagcaaagagcgcacgaaaacgccaccccaaaaggaaacaccagacaaagacaaaaagggcgccaaaacagaccaacaggacacaaggagggaacaaacaaacacgaagagagcacaaaaggggacgcaacaaaccagaaaaccccgcaaacaaacgcgaaagacgtaacaccaagaaaacagccgacaaaacagggcaaaagcccaagccatggagaaagaccaaacgagccccacaacacaaggaaggacacgaacgaggggggcccaaagaccaggcca

SEQ ID NO: 108075 - DNA, 343 bp, Glycine max
agcttgcaaaccgacttcatttccaatggtttctaatctcaaactcttggcacaagaaagccttcctcatctaatctcaaactcactacttttggtgactcaaattaagcctcttgctcagattcttgaaaatcagtcattggattctcaatattctttggcccttctcttatttcatggagatcaaagaagaaatctactatatgctgatcctccttcgaggaagattacaaggctctcgcatcaatgatatatgaaacataatggatactttacctccttgaagatctacataacctcggccaatccggtgtctttatactgttgagtctatggatcaatt

SEQ ID NO: 108076 - DNA, 349 bp, Glycine max
agcttcggaagtagatgctgggtctgtggtaaatatagtggtaattcattttccagttgggaggccagctttacgtctgctagttctggtcctgttcatgaagtatccaaatcagttgatcattctaaagttgaattggatatggcatctggattctcaaaacattctgttggtgtaaacaagaatgatgatttcaatctttcagcatccacagaagacgattattttcagggtgatggatggagtacttccaattcagaggtacattgccagactgggaaatcagaatcaaccatggatattagtggtacaaaaacagcagaaagtgctaatggttcaagtagaaatc

SEQ ID NO: 108077 - DNA, 345 bp, Glycine max
attggcttatgaccatttaacttccttaggaaaggggtggccccttaaaataaactggttattttggggtaaagcctcaacacaatttccaaatatagatcaagtgatttgcaataaaaaggaaaatatgctctataacaatggatgcccaagctattccaaagagtgcttggtgcgattaagtaaaaaatcaaattgaaagagataaaggaaaattgaatatgttgaaaaaaaaaataatgttgtaaattgtgcaaaataataattgaaaagtaagatcgattgatttgaatttaagttgaaggtccctctagttgttaccgttcgaatatatatagatacaag

SEQ ID NO: 108078 - DNA, 352 bp, Glycine max
agcttaagcagtgatcaaacttgctctttggaactggctttgtaaacatatcagcaggattgtgcagagtgctgatcttatgaactttgattcttctttctgaccaaatgaagtgatatctaacatctatatgcttggttctatcatgatgaacttgatccttggccaagcatatagcactaaggctatcacagtagatgttagcatattcttgattaattctgagatcatttatcagacatctcagccaaattccttcctttgcagcttcagtaagagccatatattcagcctcagtagttgagagagcaatagaaagttgaagtgtttccttccaactcaccaagaagcc

SEQ ID NO: 108079 - DNA, 353 bp, Glycine max
agcttcaacatcagaccactttcgggttttggaactacttcacatggacttgatggggcctatgcaagttgaaagccttggaggaaagaggtatgcctatgttgttgtggatgatttctccagatttacctgggtcaactttatcagagagaaatcagacacctttgaagtattcaaggagttgagtctaagacttcaaagagaaaaagactgtgtcatcaagagaatcaggagtgaccatggcagagagtttgaaaacagcaagtttactgaatactgcacatctgaaggcatcactcatgagttctctgcagccattacaccacaacaaaatggcatagttgaaaggaaaa

SEQ ID NO: 108080 - DNA, 360 bp, Glycine max
  unsure (1)..(360): unsure at all n locations
agcttgcaaactaagngactttttttcttgctttcaaatcccattgctttatccatgtacacttcttcttcaagatccccatttaagaatgttgttttcacatccatttgatgtaattctagatcaaaatgagctactaaggccatgattatcctaaatgaatccttcttagagaaaggagaaaaggtttcatgataatgaatacccctttttgagtaaagcctttggctacaagtctagctttatatctttcaacattaccttttgagtctctcttggttttaaaaacccatttacactatagagactccttttcataattctattacgtcccaaacttgatttttagccatagattcc

SEQ ID NO: 108081 - DNA, 345 bp, Glycine max
  unsure (1)..(345): unsure at all n locations
agacaagnnnntctcttttcatttctttcaataattttcctctttcctcctctcttattttctctctttcgccttgacttatttcttccactctttttttacctttttcttttctctcttggttttctttccacaacttaagggatctcaactcatctaatatcttatacaaagggtccttaggagtagaaccctcaccattaacactagatgaagaatgaagactcatgttggttcctaagttatggttctttcttattgggggtttgaaaacaaaaggtaaaagaaactatggttgaaactagccaaaataaacactaaaagaggtgtgaaagataaggtaaa

SEQ ID NO: 108082 - DNA, 344 bp, Glycine max
agcttgccattggaatgcttttgcaataagcatcataaaataattttttgaattattttgcaaaggttttttggtatttttgaaacccaacaccttatgctgggttttaaatttgttatttgcatctattgaaaataacaattagttcttgacatgcactatgaagattttttcatcaagctaactatcaattcttcgaacgtttttatgttcttgcaatgctcatgttttccagcagttgaagtttgaaacattagcatttgggagattttatgaatttcactaaattctgttattctcatgcttttttgtataattgcaggcagggaaagctgacaactatt

SEQ ID NO: 108083 - DNA, 350 bp, Glycine max
agcttgtgcagaataggtgtttttcctgacaaacccattccaaagaagagagatgctcggatggtgcggaattctggattttggaacactgggagaagagaaaacaagatggttgcgatgcccaatacagtgataaatcccaagtataggttacagaaaaatgggtcacacataaaagagtaatatactggaggatagaaagaggtagatatcagggctgcaattccagcatagtcgagcctgagcataatgtatgccatgcgtgcagagtgacaagagaggagatggcaaatactgctagctagcaagcaaaacatggcaccccctaaaaatgcgaaaaaaggccacct

SEQ ID NO: 108084 - DNA, 347 bp, Glycine max
  unsure (1)..(347): unsure at all n locations
agcttcgtcttcatagtaactacttcaccgncgntttgaacggtgaagtcaaacttgttggcgccatcagtggcgagagtgttctgaagtccgttattggatttgagagtagctttggactggtaaaccggaacagcgtggaattcaagaagcgcggccttaccagattttgttaggtttttgaatttggggagaaaggctttaaacgcgtcgtcgagggggcaaaagacggttaagccaccgtcgaggttgtcattgaaggtgttgagagcgtcgggttgagcagagagagtgtcggcgaagactttgcaaccgtgttttgacataatgttggtgaggttttgttg

SEQ ID NO: 108085 - DNA, 339 bp, Glycine max
agcttgtaggccttggatcttcttcatcaacggagtcctttgcttcttgaagttcaatggaagcggaatggagaaggaagaaagatgattggagatgccacttcaaggagaagatgagtcaagaacaagctcaccaccataagaagccatggataagagcttgaaggtaggagaagatgagtggagggagaaggagagaaggagcacgaaatttagttcctcaaatgaggtatgaactttgaagtgtaattctcaaatgatcaaagttcaaaaaatacacacatatggcctttatttatagcctaagtgtcacacaaaattgtagggaaatttgaattt

SEQ ID NO: 108086 - DNA, 345 bp, Glycine max
agcttctcttggactcttatgtctaatcctaaattcatccttcaagatcaaactgtctactcgtgattggtccctttcctctctccggagcttaagctcgctgttactaccccacagagccccttgaaatttgtttcggccatgttcttccctatgggcccttttggtttcttgttccaaggccttggtggtggctatatttatgtctcttagttcggcgttctcttttcggatcctaatagctgctgatttgaacttttctttgactgtttgggctttctcgagttctaccctgagggcctaaacctcttcgccctcctccggagcttcaacttccaccccctt

SEQ ID NO: 108087 - DNA, 272 bp, Glycine max
gatggatttttcaatggtgatcctcattcaagtactctctctttctctccctctaacgttgtgcttatgtatgcatgtgcatatgatgtaacacttccgattgttccatgtgctcatgaactattttggctctcttactggaatcatcataagaaattttcttgtgagcaaagaatctccacatcgtcctattttacttgactttggccttacaaagaaactatcaagcaccattaagcaagcacttgcaaagatgtttttggcttctgctg

SEQ ID NO: 108088 - DNA, 353 bp, Glycine max
  unsure (1)..(353): unsure at all n locations
ctgcagcttgcttacctcaagtttgggtgttagctctataggagcttgaaggcctangatcttcttcattaatggatttctttgcttcttggaacatgaatggccgcggaatggataaggaagaaagagaggagatgccccttaaaggagaatatgaatctcgaagaagctcaccaccataggacgccatggataaaagcttgcgcgaagaatgagatatatgaaaggagaggaagccaacagcatgaaattttgtgctctaaaagagctctgaaatctgaagcttaattttcaaatcatcaaagttgaaaaaaatgcacacacatgacctctatttatagcctaagcgtcac

SEQ ID NO: 108089 - DNA, 355 bp, Glycine max
agcttctcttaactggaagattatatattttcagctttttatgctagttgcttaactgcaaatgtagtggagcagctttggaattttgcttggccttctgccattgccttgattcatccaagccttttgccagttgctgtaatgagtttcttcaccaaagtggctataattgttggcggtcccttggttggcaaacttatggaccattttccaagagtgtctgcatataattgcttaaccattgttcaggcaagttgtttgataatctatacaaactataaattcaagcaagatatagctcttttcctaaaagtgatcattctttctaatttccaggcagcagctcagttgctat

SEQ ID NO: 108090 - DNA, 358 bp, Glycine max
  unsure (1)..(358): unsure at all n locations
agcttaacaaaattgagaatagattntttttagacaaatncatatgatagaaatagattttgcaaaacaaaataagtttttcaaaaattaaattaaattcaaaccctaagccaatttataacagaagataaacaaaaagaatataagacacaaagatttatattggtttgtccctaccactaagaatacattcaattcttagttaacctgatgcaatcctacccccaagggcattggataaaagactccaagaagattgagccaaagatgaaggagaaggccctaaggttctcatgagccttagggtagattatgggctcataggctaagaatgagttcacttatctttgtacatatt

SEQ ID NO: 108091 - DNA, 334 bp, Glycine max
agcttcaatgtggtccttctatggtgattttccaccatggagatgcaacggaagataaaggagaagacgtgagaggaggcgccatccactaaggaataagccatggaaggagaagcttcaccacaaagagagtgtcttggataagaagcttagagaggaagcttcaatagaggaagaaaaagaaagtcgtatggaaaataaaaggaagaaagagagagaagttgaactttgatgtgtgtctcacaagacttccattcatcaaagttgtgacaagtgttacacatgattctatttataagctaggtcactaactaaatgaaattcatgtgaatct

SEQ ID NO: 108092 - DNA, 342 bp, Glycine max
agcttctagccatatagacttaccttgaattaatacctgtgatagcccctttgagcctatgttcccctttctttgttttgaagctcattacaagccttaagtgaaaaaccatgatatcaccttacccttaaggaattttggagctttggaattgttttgggaataagtgtgtgtgtgtggggggggggacacacctataaaatttaatcactttatgaaacaaaggtagcgattggcaaaattaaccttagtattaatattacatgcttaaactgagaggacacttattaagggtatttgagaaaaaaacatttagatatccattgaagagcctactgcgac

SEQ ID NO: 108093 - DNA, 344 bp, Glycine max
agcttatcctaaatgacacttcttgtaccaccaaattcctaactcaatcacttttaatgtcttgctgaatgagtacaaagtgacttgttgcagtttggtgagtaactcagcactgtatataatcagtacaaaagatttgttttttctaaaaaccgatgttgtggtttactaacagcggttttcaaaaaacgatgttggtgagcataaactaacatcggtttttcaaaatccgatgttaacattgatactttaacatcagtagtttaaacatcgattaataaccgatgttggaagtccttattaaccaatattaaaagtctattttctagtagttctcgtaacct

SEQ ID NO: 108094 - DNA, 350 bp, Glycine max
agctttgattgtcctgtctttaaaagaagaatggaaaaatccaacatgaaaactttcaaagataagaaagcaaagaaagcatatatcacttgggaagataatgacatggattcatcaagtgattcagaaaatgaaattgtaaatctaagcctcatggccaaagactatgaaagcgaagaagagaggttgctccaaacacatgatgggagatgcatcaaagtatactcatatttctcccaagaatagtgggcatgtgacctatggagacaacaacaaaggtaaaattcttggagttggaaaaataggaacgaatccctctacctccatagaaaatgttttacttgttgatg

SEQ ID NO: 108095 - DNA, 348 bp, Glycine max
agcttgtaatcgattacacttatactgttatcgattaccagaggagtttttcagaaaacattctcaacagtcacatctttttatctgattcttaagtggccatcaaaggcttatatatatgtgactagagacacgaattttataagagtttttcagaacaaaaaggtctaatcctcttaaaaagaaaaatcgttttatcctcttacaaattccttggccaaaacactggtgattcaataaggaattatttgagtgctcaaattgttcaatctatctcttttaagagagatttcttcttttcttcttcttcattctgaaaagggattaagagaccgagggtctcttgtt

SEQ ID NO: 108096 - DNA, 338 bp, Glycine max
agcttggatagaccctatgtttctagtagattagggatgttaaacccttgctaagtgaaccactccaagtccaaatacctgggtattctcacattcttcactgcgtatatcatcttgaagtcgttcttcttactctcatccgcgaaccatgtaccaagcctgttaagagaaacctgagaacacttttcttgcttcctcttggaggtcttagctttcttctgagctctggagtggttgctagccatttttagaagagaaataaagggtttggagggagaaaaaaggttgggttcaaaaatgggtggttagaagagatattggtgtgacatgtgaagggg

SEQ ID NO: 108097 - DNA, 341 bp, Glycine max
agcttcatcctcttcgacctttgatacgccgacgccgcagcgggcggcgacggccgaaaaccaacgtcgatctcggcgttctccgaaacataacagtctcgcagcaattggtgatcaagcatttctacaccgttcgaagaatgcaagaaaagcaaccggttaaccggaaccgctacggtttccatctcatgaatcctctccttcagcctcaaaacggtgtcgttgttcacgtccacctcgagagggatgacgtgcgttttggacgcggttttcacgttgagctgaattttcgtgtgcgtggaattgacaactaagtccttactattcctctcctttttggg

SEQ ID NO: 108098 - DNA, 337 bp, Glycine max
agctttgagcacttcgttgtgttattaacattcagcgcggctgtccgcactcgtctcatgagatatccatactctctggcactaaatccgaggcagtgggaagctcgcatcgtcaataactttatacgctgatgtcgggtcgtgtcccgtaaggcatcgccactgtcagcatcgataacactagcttgcatgatactgaaaccactcataactatatactcggatgaactgctgaaatatctggtggatagggccactggcacagatactacatctttcgaccaattcgtattggctctctccactgacgccgaaggcctgataaatcccgtgtgat

SEQ ID NO: 108099 - DNA, 61 bp, Glycine max
aaaaaaaaataaaaaaaaaaattttattttttttttccttccccccccccccccccccccc

SEQ ID NO: 108100 - DNA, 371 bp, Glycine max
agcttctacttatgtggcatggcggtcttccttcaccttcttgtctccaacgcgaactttgaccattgttcttccttcccgcaatgcttcttttcatgtctgcctgagtgggcttatagcctaaaccatacttcccacgatttccttgagtatttatcaggctagttatgccgccgttgttttttcctaaacccatcccgggttcaaaaccgttccccaacataactcgggccatcattaccgctgcatcggacaaacaaggttgcccaaagagggagtccacggaggaaatgctgaccacctcaaaagactggaaagcagtttctaacgattcttctgcggcttccacataaagcatggaggatgggcac

SEQ ID NO: 108101 - DNA, 403 bp, Glycine max
cgcgatcgtgatagtctacactgcacgcatgcaggctccgacattgtggatcattcttttcaaattagagattgttcttcttccttcaatcaagcaaaatagaatgggtttccgtttacctgctgttcgacgggcatcgttcacggctagccaagcagcttcaaaatctgtacaagttccaaagggctatcttgcagtgtatgttggggagaaacaaaagcggtttgtggttcccgtatcatacttgaatcagccttcattccaagatcttttgtatcaagctgaggaagagtttggatatgatcatccctcgggtggcctcacaattccttgcagtgaagatgttttccaacatataacttctcacttgaattgagaccacaaatctcactgtgggagactc

SEQ ID NO: 108102 - DNA, 366 bp, Glycine max
agcttatgaacctattactccattgggcactttggttagaaacatctatggtgatttgactgagtggtattgcacatccccactctttctccatatcaagcggccatcaatgttgttagaatgaattggaatctctttgtttaaacaaaacaaaacatgcatgaatcaagggatatagttgttttatcgtcaactgaatacaagaaatataatcattttgactcatggggtggccctattcccattttattagataaccgcaaacactgacttgatcatttatatgcttgcttattatttcatttactctccagtgacatagtgatccactattaactttgatttgtgaatatttacttttgtcat

SEQ ID NO: 108103 - DNA, 356 bp, Glycine max
agcttgagcatatgaccacttactgtgtgctcgagctacctcagcggcacttgatggggcctatgcaagatgaaagcctcgcaggaaagaggtgtgcctatgttgttgttgaagaaaacgtcagatttacctgcgtcaggtttatgaaagaggaatcatacaccttctactcattctatgcgttgaggataagacttatcagagaacgctactgagacataatgagattttcgagggaccacggtcgacacattgacctctccatgtctcctgaattttgcacatgtgcatgcattggtcttgaatactctgctgacttctcaccacaactatatgagctaaatggaaggacatac

SEQ ID NO: 108104 - DNA, 394 bp, Glycine max
tactctacactgcagctgcgcgcatgcaagcttgcattaagacaagcttaaactaagggccgtgtctgttggccgcccactgacaatgattttgacaagaacttcttaccctggatcggggatgaagattgttcaagtttatttgctttttgttttgttatattgttatattccatagtaacaaatcatgatttaattttatatatattgaaaagtttaaataacgtaatgatgatttatatatcgctaattgttaggctcaggactcatcacgaacaaatactttggattagtttatattattgctgaaaaaattaaaatattttgttttattatagagcactttttgaatataagataattctgttgtgcctttcaaatacagctttagtta

SEQ ID NO: 108105 - DNA, 282 bp, Glycine max
agcttgttcacaaaagatgattcctaaggagggagttgatacctccagcacttcactaatgactaccgcgtcaatggatcatctataatgtccagcgccttaagacgatcactttacaagaaaaaagaatcgcttgagacacccgtaaacagagccaccaccgcctaatgtactcttcaatcgagggtacgtatgaccgagagccccatttttgtctagctcaaaaaactgatctaaatatctgtggagagcgcaactgcacactattctcatataaggctg

SEQ ID NO: 108106 - DNA, 369 bp, Glycine max
agcttctccttccttttcctataaataggggaaggagggaagaacaaaaatgttcaaccctcctagtatctgagattcacttaaaattagtgagaaaaattgtttccgtgaagaaaatccaagccgaggcacttccgtaacgcttctgtgacgtttccgtgggtgattttgcaaagattttcaaccgttcttcgtcgttcttcattcgttctttgtcgttcttcggtgttcaaccggtaagttcctgaaatcgaacttttcaattcattctatgtacccttagtggtcctcattggtttcgtgtgcttttattttcatttcatttactttccatacccccttttgacgtgctttagtcatttatttaag

SEQ ID NO: 108107 - DNA, 371 bp, Glycine max
  unsure (1)..(371): unsure at all n locations
agcttttacatgcatgttcacaccatatttactatacttcgatcaactgatgcaatctatttgattgaaaagataatttatattactcttctaatgtagtcgacaactaaaaaaaaaatataacagaaagtaatgcttaggccaatctaatcaagtcattttgaatctcgtcattactatcatgcatctcaaagagaaggagaatcaggcatcgtaatacatagcacaacaaaacattaaaagaaaacatgccttccaaagccaaccaaggttaaaatgtattcatanttggtgaactttttcaaaataataacacatatatataaacatggtggaacaatctgaccacatgcacaacacattccacacat

SEQ ID NO: 108108 - DNA, 364 bp, Glycine max
agcttggactttctgtgttttgggaacctctccttcctcaggtgtacccaaacccaatcacctggttcaagcacgactttctttctgcttttgttggcttgccttgcatagctcgcatttttcttttcaatttgaaccttcacttgctcatgcaacttcttcacatactcagctatagcctgtgcatccttatgcttaaacatagcaatgttaggcataggcaacaaatcaagaggagtcaaaggattaaatccatacactatctcaaatggtgaacaattagttgtgctatggacagcccgattataagcaaactcaacatgaggcaaacaggcttcccaagatttaagatttttctttaaaa

SEQ ID NO: 108109 - DNA, 344 bp, Glycine max
agcttctcggctcatgctgtgaacgcctctagttcaacacccgtgcagcctaaggcacccacccagagggaagctacccaagttccgactccgaacacgactcgaccggccggtaattccaacacgacaaggaacttccctccgaggccattttcggaattcaccccgctcccaatgacgtacgaagatcttttaccatacctcatcgccaatcatttggccgtggtaactcccggaagggtcctcgaaccccctttcccgaagtggtatgaccctaacgcaacttgcaagtaccatgggggtgttccggggcattccgtcaaaaaatgcttggcccttaaata

SEQ ID NO: 108110 - DNA, 371 bp, Glycine max
  unsure (1)..(371): unsure at all n locations
agcttgaatatctntatntgtactaatgctacctatccaaagcatttcatgggctatacactctccaatctcttcctttcttgacccacctatatttgtcagactgcaaactccctcactataatgaaccatccttgctcaacttctcatctctgcaaactctccatctttccttcactagttattcccctgccatttcttttgtccccaagtggatattcaaattgaagaaacttgtttctctcaaattatggggtaataaattccaaggtcggattcctggtggtattcgaaacctcacacttcttcaaaatctttactggtctggaaattcattntcatcttctatacctgattgcttatatggtctt

SEQ ID NO: 108111 - DNA, 374 bp, Glycine max
ctgcagcttctctgcttgaatttgtctttatcgtaatgaaaaataacaattaaacaacaattaataaaagaaaagtccagcttattgaaaagctagtaaatacttggaaaatatccatttgcaacatgttggagtaaaaaagtaccaattatctcactaatgaaacttatatataaaaaacattaataaattaatcaacatgcacctttcaataagcgataataaattaatcaaagcgtataactagagacatgttgacagtaaatattaatcttcatctattattgattttatttataaagaaactgtaatgaaaaaaaatatcaggttagaagtcgggtatgcgaaacacaaattcttaactgatttttaaa

SEQ ID NO: 108112 - DNA, 371 bp, Glycine max
agcttcagcacttctgtagggtttctatgactttccatcagctctgataaatctgccatatactcagccggtattaggcctcatgagctttctcatattcagcagcttactggatttaacttgggtgacttccctttcagatacttaggtgttccccttttatcatctagattaaatgtatgtcattatgctcccttgctttccaagattactggcctgattcagggatggagcaaaaagtctttatcttatgcaggtaagttagagttgatcagagcggttattcaaggaattgtgaatttctggatggggatttttcctttgccgcaatctgttctggaccggatcaacgcttcgtgccgtaattttct

SEQ ID NO: 108113 - DNA, 284 bp, Glycine max
cggcataactagcttgataaatgccaaaggaaatcgggggaagtatggtttaagctataaacccactcaggcggatatgaagagaagcatcgcggaaagaaagagcggtggtcaaagctcgcggttgaggcaagaaagtgaaggaagcccgccctgccacataagtagaagctttataagcgcgggtctgggagacgaaggtcaagtggtcgcggtatacgaagatgatgttccgagtacattggatttggtacgaccatgccctcctgatttccagctgggaa

SEQ ID NO: 108114 - DNA, 375 bp, Glycine max
  unsure (1)..(375): unsure at all n locations
agcttctacttatgtggcagggcggtcttccttcactttcntggctccaacgcgagctttgaccactgttcttccttcccgcgatgcttcttttcatgtccgcctgagtgggcttatagcctaaaccatacttcccacgatttccttgggtatttatcaggctagttatgccgccgttgtctttgcctaaacccatcccgggttcataaccgttccccaacataactcgggccatcattaccgctgcatcggacagacaaggttgcccaaagagggagtccacggaggaaatgctgaccacctcaaaagactggaaagcggcttctaacgattcttctgcggcttccacataaggcatggaggatgggcagctta

SEQ ID NO: 108115 - DNA, 351 bp, Glycine max
agcttgagaatggttaatttttctaagcaatcactacgcatagctccaaactcgaaggtggaggacacatgaattaaaacacaattcatggggctccaaaaaaggttgagaatggagaattgcactaagcaatcactacgcatagctccaaactcgaaggtggaggacacatgaacgaaaaagcaattcatggggctccgaaaaaggttgagaatggagaattgcactaagcaatcactacgcatagctccaaactcgaaggttgaggacacatgaacgacaacgcaattcatggggctccgaaaaagggtgagaatggagaattgcactaagcaatcactacgcatatct

SEQ ID NO: 108116 - DNA, 364 bp, Glycine max
agcttgtaaagttatgtcttttatcggcttaatcaattacagccttctcgtaatcaattacacaattatttttgagacaatgactaatttattcagtagtctctgctttaatcgattaccatgtgatataatttattacttctctttctataagtgtttcagaagtgaacaagaacactttaatcgattactttgagtatctaattgactacattgttcttgagttatttcaaggttttgggaagaacactttaatcaattaaaaagataatctaattgattacttcattgaattaatcgattaccttgtagatttaatcgattaaaagcggatataactgttttctctataaataaccacctt

SEQ ID NO: 108117 - DNA, 367 bp, Glycine max
agcttatatagaatttgttgttattgcccacatctcaattggaatttcttcgttcaaaggcactgctaatcgattaccaaaacattgtaatcgattacagctttatgaaataaactggaacgcagaaaattcaatttgaaaactttttcaaaacaattgtgctactggtaaacgattacaacaatcgggtaatcgattaccagagagggaaaactctttgggacacatgtcggagaaaaatcatgtgcttctcaatcctttagaaaaatgttttatacttatgaagataaagcctctctgtgaatcgtgaatcttgcaactcgactcttaactgtcttctcgagtcctgaatcactgttgattctta

SEQ ID NO: 108118 - DNA, 370 bp, Glycine max
agcttgtattccaatttttgtattgtattgaaattttgcaaaggaagagattctaagcgtggaatcagaccttttaaaataaattgaaaggtgtggaatctgattaagattaatgtgttgagaaataaattacggatgtggaaaacaaaacgtataaagatgaaagattaagggaacataatactcgtaccaaaccctctgtttcaccgtccaatgcttcattccaattcctccacatggcccaaaatagtttgattccaatttccaatcaatctatagcgacgagcatgccgtccgttgatgaagtttgattattttgtatttttcctcccccagatacaattcagtcattcttgttctttttatgaat

SEQ ID NO: 108119 - DNA, 373 bp, Glycine max
agcttataagaacttatttttcttaatcatttccaaatatgcatgtgaattaagacgcatcaacaagaatcaagccaaggctattgtgcaagcaatcaatggggcaaaacacaccaaatgattataatgatggatggctcaaattctcacaaaggtaaaatcatcactttcaaattgagctttcaaaactatcatgacatgtagagaagaatcaaggatttcaagtcacaaaatgtcaagaacttttattttcaaaacaattacccatttcttgaacatatcctataattcaaagaaaaacatgcaaagtcgtacgtgcacacgaatttgacccaaaatattaaactaaaaatccgacgaaactaacaacatt

SEQ ID NO: 108120 - DNA, 362 bp, Glycine max
agcttaaaatttcttattttttaaaaagtttcataagtgttttgatacaattctccattcagaaatcaatgttgacacaagcatttattattatagagttaccaagataaaacttcaattcttatcaaagaacaatgctacaaacatctattactattcaagttaccgagataaaacttcaattatgattaaaaaacaaagctacaaacacttaaatgcatctaagttttatgtttaccaaaaatgtacttatgttgcaactgaaattaccaaaatgccactactcttgactcaccgggttcagactgttgtgttccttgaatgtttctttcagcaccaatgcctgttccttggacaacctt

SEQ ID NO: 108121 - DNA, 366 bp, Glycine max
agcttcctcgtggcttcttttagaagctttctcaagaggcttctttgagaagctagatccttatctatctacacccctctattaactaaattaacttccttaaaataattacggatgaaaataacgcaacaaataatcaaacatcaaacataattactaataatatatagatatatatatcagggtgttacattggtgagctgcccctcctccgcaccatacatagaagcggcagaagaatcattagaaacggctttccaatccttcgaggtggtgagttgtgcctctgtggaaccaagtccgttgctaccttctctttccaacgcggccataatggtggcacgtgttatgctcaggaacggattt

SEQ ID NO: 108122 - DNA, 209 bp, Glycine max
  unsure (1)..(209): unsure at all n locations
tttgaaatcttagtcctgatgaaaaccttcaattgtgctcgtcccctctttgagaatgaggaggatcttcataggacttaatccaactgatgtttgctgntctccangaggatatacgacctcggctgtgggcatctctggttatccccatgtgtaagtccaattcagaagtttttctcgatgttttttgtgaatgatctcacatctta

SEQ ID NO: 108123 - DNA, 369 bp, Glycine max
agcttcttcggtccctttggtacttttttatcctatagagttaataaacataagtcaatgacaatcaatgctttatttgtaacaaatctttttttaataataataagcacaacaaaaaagaaataccttttctgaaaaaggttgtataagatgcgtcaaccaagcaaggaaggtgttaagggtttgtccgactaacttggtaagttccaaatttgagattaaattgttagcacttatcctttgattgtaatagttttcttccaaactacccttgaatctagatgtttatatatattgtatagttactaatattgttgcttaaatatgaatgattcatccatgattatgtaggttttttatggttgtttg

SEQ ID NO: 108124 - DNA, 370 bp, Glycine max
  unsure (1)..(370): unsure at all n locations
agcttgggtggagtggcgaatttagttttttattnagtacactgagttaagtttatataatgtaattttaaattatgtaattattaggagaagagaaatactccatatttctctatacattttaagttaaataaaataaagaaaaaaggtttaaaagtttttaaaaaaataagaaaaggaaataattacctaaaaagtagtgggacagtcgttaaaaaaataataaaatgataattctcattattaataattatagataacatgatataatcaagattttataataaatctatagtacttgataaatcaaaatttcatttataaaaaattatgtataggttaaattttaccaagattaaattttttgaca

SEQ ID NO: 108125 - DNA, 375 bp, Glycine max
agctttcccaacatccaagtttttctatcttcagacaacacaaattatcatagcccagcaaaacaaggcaaaagcagaaaactctgcccaaaacaccaaccaaaatcacagcttttctcacttaaagaccccagtaataattccttcgttccaattcgttaaccgttggatcgactcgaaaattttactggaagtctctagtacttaagcctacattgtgaccgttgggatctactagtaaacatccagaactcattctatactactctttccacagtcaatcacacacaagcatttttctgcacttgtgcaaaattctgctgcacaatttcacagcaaaaatctgcacaaagtgcagatttcgaaaaccacact

SEQ ID NO: 108126 - DNA, 376 bp, Glycine max
agcttacaaagctttgggatgggattcatgtattacatactacatctttttgttcaatttataaagataagagagagagtcctgttgtgttgcctcatgtgaacctcatgattatgaatttaacaatatctgatctatttatgcatatttcttgttacagaatcttgtaaataaagagctttgtttttcggggctctatcccaggcttatccaaggcagaaaaacttgaatttgtttggtttgatgattgtgaaagcttgcgtgagctccacccatccatgtcatctctccccaaccttataactttgtctataactagatgtagagggattgaaagccttaatgttcattcaaaatctctccaaagggtgtatga

SEQ ID NO: 108127 - DNA, 368 bp, Glycine max
caagcttgagccaattcaatctacaataacattttactcggatgtctgattgagtcccgtcatatatcgagacgctcgaaattgaatgttgaagctctgagccaattcaggcgacaatatatttttactcggatgtctgattgagtcctttaatataacgacacgctcgaaattgaatgttgaacctctgagcaaattcaaacgacaataacttttttttcggatgtctgatggaggttcgtaatatatcgagacgctcgaaattgaatgttgaagctctgagccaattcaaacgacaataactttttactcggatgtctgattgagtcctgtaatataacgagacgctcgatattgaatgttgaacc

SEQ ID NO: 108128 - DNA, 368 bp, Glycine max
agctttaattattagattgtttatttaaaaaagactagctttacgctgtaaacacatcatcctcttacttatataccctttaatttgtttgtttctaacccacaaatgtgagatttattcaccaacaatctcattccttcaatctctagcttaagcaaccaagcttcttttatttattatctggatttgtacctacttcttttttaaagtttcagaggtctcaaatctatttttttatttaattttttaagcttgacatatatatatatatatatatatatattgagccttcttttgcccgtacgtccgtaatttttttcttcactattttgggcttcaaaatttatcttaaatatgtttgaacattg

SEQ ID NO: 108129 - DNA, 362 bp, Glycine max
agcttgggggccttttggtgttctacctgaccctaaaccgcgggcgcttactgtccgctttcatgctggaaacggggctggcctactgcataaatgaataggacagcgcgaactcgatggataccaacgaccatggtagaaccaacgccaacaaagacaaagaggaaggtggctatgaattcaacgatgagggcctgaatgcagtctggctgagtggcctctttggtgcttccaagtgcaattttggccatggctcctctgctcaattgcagaattaatcaacgaccaaaattacttggctcccacattgaacataagtggcaccatatgttgccaatttatatgcaataatgcacaaaaaa

SEQ ID NO: 108130 - DNA, 352 bp, Glycine max
agcttgataggcggtattgttgttcgctaatacctaataatttattgctcagtccgcagagagtgaccttccaatttatgacatgggtgagaagcaccatggcggatcgcaggcgagatgcaataggcctgatcccagcgagacctcctccgaaacgggaacgacctttgagttctatattagccgaagcggtactttctcctgcgagctcttgcacattccacttttttatataagtaaccacagaccttggttgcaagtgatgtggcaaacccactttgatctttgaatgttaatgagaatatggtctatcctctacgactctaaaaggattgaatttgatcctacgcta

SEQ ID NO: 108131 - DNA, 346 bp, Glycine max
ttttctataccggaggcaaggagaaaataaatcattttttcataccaagctcaaagagcctgggtttaaacatatcaaaatctgcgtagtctgaaaaactgaataggaaaattatctccccttaaccaaggggggtgtgcaatatcaaactgctcttggatgagacccactgaaaatggggcttcttcatctatccgatacaactacatgtttctatgagccatatatgaaagttgaatgtgggttttcttaacaaaagagggtcatcccctctaagttcattcataaatctttcgatagccaccaatatatgaacatctcatattaccccctttgcatggcaaac

SEQ ID NO: 108132 - DNA, 364 bp, Glycine max
agctatgatgacctgaaactcactcaaagaggatctctaacagctggaagtaagataaccggcccacaagcaaaaaatgagcaaacataaggatcattgcttgctgctatgagacaaaaagattatgaaagcaggcttgattgtggcaacttaagatcgcccaaaccacaaagataaaactagcaagaacaacatctttagcttgcaggtgaacaactaatttgccaacaaccaggataagatccataggagaagcaagattaaaaccctgaccagttaagttatagatgataaccaagaccaaatctaatctccaacccaacttcttctaaaagagagcatactttgtgcaaagcaagaatgg

SEQ ID NO: 108133 - DNA, 368 bp, Glycine max
  unsure (1)..(368): unsure at all n locations
agctagctcacncaaggaagttcctattttcttccaactttttgggggggggctattcttggaagggccttaatttttcaggtgcacatggccccattttaccaactacaaaccctaagataactatattactaacacaaaaggcacacttctctatatttgcgtagagggtatttttcctaaggactgaaagaacttgcctgagatgtcctacgtgatcatctaggctcctactgtacactaaaatatcatcaaaataaacaactacaaagctacctatgaaatcccttaagacatgatgcataagcctcataaatgtgctcggtgctttagtgagcccaaaaggcatcactagccattcatacaaa

SEQ ID NO: 108134 - DNA, 370 bp, Glycine max
  unsure (1)..(370): unsure at all n locations
agcttcaagaaaaggccaatctcatttctaaatctggntncaggcttatataggtggctttgttcgtgctcgtgcgcttagcgcaattctgaaccgcttagcgtgcattagtgaatttcggcttagcacatgcttttcttcctcagcggatggactaaagcggtgcgcttagcgggataatccttcgctcagcgaacatgcacaactcatacttcttccagattcttcctcgtgctcagccgaggagtgttgtgctcagcggatggctcggtaagccagaagattgacttagtgagaggatgaaaatcagcacttcacaaaaagtgtgctatttgatgttttttgaaaaatactttttactacctacttt

SEQ ID NO: 108135 - DNA, 373 bp, Glycine max
agctttcgacaaaaaaatttatgttactaatatacttttgctaattttatgtgaaatgttatgaaaaaatattagtaacattttttaatatttggtggcaatttttataaaattgttgtcaatgttagacaagataatattaaatgtcacatgtgtaatagtgaattatgatccatgcatatctcaaccataattaagatgactatttaaattggactaattttgaatcaattaaaatacacattcagttgtattttctataattttaaaatataaaaaactaaattaataattgaattaaaatatcttttaatctagtgtgaaattctggcactattaaaaaaatgagtttttacgacaaactttctaagac

SEQ ID NO: 108136 - DNA, 197 bp, Glycine max
  unsure (1)..(197): unsure at all n locations
agctttgcaaaacacaacatttgtcgtgtgtagaattttttagntggctcttccttccttctttgatgctcacaattttggtgtgtttgagggaggaagatgagtggcatttgctttctcttgggtcaactgaagggtgaggcgaaataagataccatcttgtgccctaatttgaattgacacatcacctaaaaagt

SEQ ID NO: 108137 - DNA, 358 bp, Glycine max
agcttcacaaaagtttatattgcttgaaacaagcatcgaggtagtggtacaagaagattaatgagtttatgagccactcaagattctgaagatgtgacatggaccattgctactatgttgagaaatatactaatagttatgttatccttgccgtgtatgttgatgacatgctgattacatgatctagtatgacagaaattaataggttgaagcaatacttggcagaaaactttgaaatagaaggatcttggtccagctatacaaatccttggtatgagaattcttataaacagatcacaatgaattttgaagttgtcttacgagaaatatatacacaagttgcttgacaggttttacc

SEQ ID NO: 108138 - DNA, 365 bp, Glycine max
agcttagccaaatgcacgtttcttaattcatagacaatgttcattgcatagtcttcatccagggctgggcttgcgtgccattagagtcaatgcaactattagaataagccaatttaagtagtgacattatgttaactacaagattcatttgactattaaaataacattgattaattcttaggtgtttgctcacatgtagtagttgtgcaataatatcttattagaattagtagctaataattagattattgacatgaagaaaatagatcttaattagatgtattgtaagatttggacggtccaatatgatatatctagacgatataaaatactcataattttgatgataatagaaatataaatta

SEQ ID NO: 108139 - DNA, 368 bp, Glycine max
agcttgctcttctgtaattgtatcttgattcatcttctgctcatgaaccaacaaagaactttggagcttgtcaagggagagtgtatcaacatcttcggattcttcaatggaacacacaacatagttgtactttggtgccatggaacttaagatcttctcagctataacaacatcttccatgttttcaccatggaattgcattttatttgcaattgtcatggttcttgcaaaatagttggttaccgattcatcactcttcatgtgtaacatttccaattcctttctcaaggcttgaagctgtgcacgctttgttctattagagccttgatattttttcttcattgaatcccaaatatctttggaagttt

SEQ ID NO: 108140 - DNA, 367 bp, Glycine max
agcttcaattaattatacctctgttatactatctaagactaaatttgtataaattctaaacgtttatgtttagtataacctctttaactctcttcacgcaagctcttgtaattggaaccccgcaaaacatcaataaatcacttatatttacctcttgtttagatcattgatctccatcacacaccagcgaacaaactagcgccactgatagcaaccagaacctaagcttacctgatactgatactgcaaaggaagcccaagctagcaggcccaaaaggagtgcaaacagaccagcataccttgaagattacgtgtagcaatcgtagtagtgcaatgataattctgttaacaatgcaatattgttagt

SEQ ID NO: 108141 - DNA, 372 bp, Glycine max
agctttgagccaaaatcctgtctcaccataaaccttgacccagggtgagaatgtcaatccttaccctcggaagcaaaaaaagaatagaggggaaatttccaatcaaagaaaaagagaaggaaaatttccaatgaaagcaaaaaaggaaaagaaggaaaattccccaatcaaagagtgggagaaagcaaaaaaagaaaagaaggaaaattccccaatcaaagagtgggagaaagcaaaaagaaaagaaaggaaaattcccaatcaaagaatgggagaaagtaaaaaggaagaagaagaaggaaagaaagctcctgatcaaggatcgaaagaaaacagaagaaaagtgcagagaggtctttggaccggacaata

SEQ ID NO: 108142 - DNA, 367 bp, Glycine max
agcttgaacaatgcatccctttatagataaaaagtcattgcaacagtcgataatgacctattactgctgcctcataattttatgccttgtgaacgtggaaaaaactgtacgccagggatgagaggagggaaaattaaaacaattaataataacacggtggcatgatatacatagattcattaatgataagcaagggatttcttataaacacttgacttttgtcactaaagattttatgagtaaattttaactaataatatagcgtatgttgcaatctctttttgtatttaacatttcttagtcataattttatgagttaactttaattaatagtacaatacatgctataaaaagttcattaccaaaa

SEQ ID NO: 108143 - DNA, 371 bp, Glycine max
  unsure (1)..(371): unsure at all n locations
agcttataagaacaaaantgtcttttttttttcaaatatgcacgggaattaagacgcattcaccagaatcaaacccaggctattttgccaggtatcaatggggccaaacacaccaaatgattatgatgatggatgggtcaaattctcacaaaagtgaactcatcactttcaaattgagctttcaaaactattatgacatgtagaggagaatcaaggatttcaagttacaaaatgtcaaaaacttttatttttaaaacaattacccattttttgaacatatcctttaatttaaagaaaaacatgcaaagtcggtcatgctcaccaaattgacccaaaatatttaactaacaattcgacgaaactaacaaaaa

SEQ ID NO: 108144 - DNA, 372 bp, Glycine max
  unsure (1)..(372): unsure at all n locations
agcttccttgagaaacgagagctanctatgcaaacccctctaatagctaaggtcatctacctgagaagcctgcttgagaaacttccttgagaaactagagcttagatacacacgctcctgtaatagttaagctcacctccttgagatgagaagctacaacttagctacacacacccctctaatagttaagctcaccccatgccaaaatacatgaaaatacaaaaaatttcctactacaaagactactcaaaatgccccaaaatacaaggctaaaaccctatactactagaatggccaaaataaaaggcccaagagaaggaaaatctattctaatatttacaaagacaagtggactcaaccttggctaatggg

SEQ ID NO: 108145 - DNA, 368 bp, Glycine max
caagcttcatgctttgtggcactcctttattttcaaacaggaatccttcttgtgcccaccgtggggaatcacacctcccttttgtagggcctcgtagataaaccttctcgggggttgttacatccttcaaaggtttggacctgcgcgacctacttgcctggatggcattaacaggtccccctcaatgattggcaaacgggtttgtctttacgttgggccagtcctcttgaaatgtcagtcatccggcttctatcaaactttggacattgcatttgagggccacgcactattcagttgagtggcccggggttttcccatggtatgtgcaaattgagctatggttgtaccaccttgggaaaggaggctgg

SEQ ID NO: 108146 - DNA, 369 bp, Glycine max
aagcttctcgggcctttctgcatagcaaacatttggaaagttagttctaccaagaaaagctactcttaaaacaaaaatggcatacaacctcctttaataaacacaaacatcaacgtaaatttagagcaaactcatgtacatacttccttacgaacgttcacttgcacaagatattcttctaactaagaaaaatgcacaatcaaggcaccttcgttacctagattatttatatgtacttccgaagggtatttgttacctacatcacatgtacttccttggctaaatttacacacacgcatactcaaagcatcttggccaccaaaaatccgacacgtgcacattctggtatttctaatacctatgcatata

SEQ ID NO: 108147 - DNA, 217 bp, Glycine max
agcttggggaagaaataggtttgtatttttgtttcatccctccctatgataaactgttgtatcagacattctcgcccaaactagctcagctcgcccaggcaagctaacccccccacccccattatattacagaaacccctgtgtaagcacatgatatctccttgttttgaggccatatatatatatatatactctcataaagacggaatattaggca

SEQ ID NO: 108148 - DNA, 364 bp, Glycine max
  unsure (1)..(364): unsure at all n locations
agctttnggnttaagaattatggttnntctctttttctattattttattcaagctctgccacatgtccctatttgaggggagcaagaaaggcccactttctcttttgaatgggactcatactcaaccacaaaaagtgagaaaaacctgacctttgaaatgctaaaatcctgcctcggtttgcgtgtcgtttctctggttccagttcctcgcgtttctctgtgtccgtcgggaccagttttcaaaagcaagcaatatatatatcaaaacgctcagaaaaaaaccccgagcgtggtttagaggttggtttcgttaaattttaagtcgcacgcaaaacgatgattttaaactaattaattaagaatt

SEQ ID NO: 108149 - DNA, 369 bp, Glycine max
agcttgtcaaatccaatatttattttagaaatcaacaatgtcaagtacagttgtttgcagaaaactttacctggcagcacgtaaaatacgacaccaagaggcttccacttatgctgctcttcgagcctccattcccttatgtgccgcttctctagctgccattttctctctcaacactcttgaataatgtgggttagaactaccaagagtctgatcaagcgtcaaattcataccatctacttcctgaaaagggcaaatgtgtcttagcattggaattcaaaagtaataaacgaaatatcagtaacaaatatatgtgtgtatgccaaaacctgaagcatcttaattttcctattcatgtaggtatcccat

SEQ ID NO: 108150 - DNA, 225 bp, Glycine max
  unsure (1)..(225): unsure at all n locations
agcttgtagggntntatttctactattgacacacgctcacgcaacgtttggtaccacgtggctatacctacacatcctgccaaacaaagtctagttcatgataacctcgcctgtgctctttctcccatgctttatgtaataaacagattaatccagtgatgtttgataacctggaaaatgtagccgtccacaatctgcgccattttgaaatgccgctccccccgc

SEQ ID NO: 108151 - DNA, 362 bp, Glycine max
agcttgccacgacggagttttactactatgctctagagaggaggaacaagcttcaaaaggagagagcaagacttgtagagccgatggttgatacatggacggagatgaacacgatcatgaggaagcggtatgtgccggctagttactcaagggacttgaaattcaagctccaaaaactaaccccaggctacaagggggttgaggagtatatgaaggaaatggatgtgctcatgattgaagctaagattgaacacaatgaggaggcaactatggctcgatttcttaatggatagactaatgatctccgtgatatgtgctatctgcaagagtttgttgaaatggatgatttgcttcacaaagca

SEQ ID NO: 108152 - DNA, 373 bp, Glycine max
agcttagaaggtctttattgtactattcaagggtggaaaacatggtgttagaggataaattgatggttgtcaaaggacaaagaggagtttgtccaaacagctaagtagaatgaaatagagtatgttgacaattattgatcagtataaagagaaagtaaacctagctgctagtcatgggcagagactagaagatgagcatgcgaagttgtcggctttgcaaatggaaagggaagcaaaaaagaaggtgatagaatcattgcatggggaagctatgaaatggatggatagattcgctctcactctgaataggagtcaagagcttccaaggttgttagccagagccaaggtaatggcagatgtatactcaacttcc

SEQ ID NO: 108153 - DNA, 354 bp, Glycine max
  unsure (1)..(354): unsure at all n locations
agcaagagttttattttttttaaacgcncggggcattctatggactgagcgaaaaggctcatgtcatcaaaaactacacattttttaaagcacaaagcgaggatcggaacctcaaccctacgttcttttgaaagactacgatgagaaaattacagaggacatgaatccctgggggaaaccaagaagaacacacataaataaatacaagctacgacttgcttaattgccccagatcttaagcgtagtatcgcttgacaacgtccgagttcacgggggagggtagcttctccacatccatgtttgcgagcaccagcgtccctgcggaaaaatacctttttcaacgaaaggcccctc

SEQ ID NO: 108154 - DNA, 315 bp, Glycine max
tagctaagctcacctctttgatatgagaagctagagcttagctacacaccccctataatagctaagctcacccccattccaaaatacatgaaaatacaaaaaaaaagtccctactacaaagactactcaaaatgccctaaaatacaaggctaaaaccctatattactagaatggccaaaatacacccaaaaagaaggaaaaacctattctaatatttacaaagaagagtggacccaaccttggcccatgggctcaaaaaatctacccttaggttcatgagaaccccagggccttctttagcagctttagcccaat

SEQ ID NO: 108155 - DNA, 334 bp, Glycine max
gatcaagtgaataagagccatttctatggcaaaattgggtgttgaagagtcaaattttgattccgtggaattttaggtgtaaattcagtttgaacaaggatagattgaggttatggacttgtgtgaggtgagagtttgctccaaaattacctcattctcaatttcacttttcaaacctagaaaacccattgaatgaggggttttggacacctagattttgcgttgctgtggtttgaagcttgactttggtttagacatgattgatacatgatttgcgacttgtacgatttgatttgggcaagattggatgacgggaagtgtggttttcgaaata

SEQ ID NO: 108156 - DNA, 370 bp, Glycine max
cagctttgacttgaggcatcattatattattaatatgggacccttcctggatccatctttccacctccctggatcaatccttccaccatcttcaaataatttcttttaatccctttccacacctttcaaaaaactttctaaatgatttctcttcatcattctaaaagtttttgttcaacactttctcttccaagaaaagttctttgataaaaaacttgtgctattcatctttttcattctcttctccctttgccaaaagaacgaaggactaaccgcttgaattcttttgtgtctctcttttcccttacaaaagattcaaaggactaacctcctgagaattcttttgattcttcccttccccttaagaaaa

SEQ ID NO: 108157 - DNA, 372 bp, Glycine max
  unsure (1)..(372): unsure at all n locations
agcttgtccaatgaggtgactatgtttattcctagggntactacctgatatacagnttttgctgctcggtttattgtcaattccaactgcatcaatgcatctttaacaagcataccacgaaccagagcagcaaccaagttgaccttctttggactctaaaataccatagaaaacaaggtatgtaaaatgtgcaactagtcagatattaatcagatccttcttaaaccataaattaaggcattttccacagcaaaccagggaaggcatttcaatggctaaaaaattagatgccaacttttctgcaaaataacatgttggttaaaacacagaagtttcttagcaagtagctaggcagtggccccacattaatgt

SEQ ID NO: 108158 - DNA, 375 bp, Glycine max
agcttatcatttaataattttatgattattttaacaacaaccacactggaagatggacttaatcgtgggttaatcaaagatgaatcattttgttagcatttatcacaaagcatactgcatatgtatgttgagtagtccactaaaaagaaaaattagttttgataaagacaagtttcatcattaaatgattgaataagataaactttgaaaacagattttcaaacaagtactctgtgtgagaagaatgataaaaaaatgctacgagaataccttatttacctaataaatagataaaccaattaacagatgttcatttcactaccctaaattaatttttttaacatctacagcgggaaagagattacgattatgacc

SEQ ID NO: 108159 - DNA, 372 bp, Glycine max
tgcaagctcatgatgaatcaagagtgattcaaagaagttttgatgataacaaagatgataacaaaagatgatgacaaaaagctcaaaggtcaatcaaagaatgagttcaagatattcaagatagaatcaagaacacttcaagattcaagaggaaagttgatttcaagaatcaagattcaagagatcaagatttcaagaatcaagattcaagagatcaagattcaagaatcaagagaaggcttgatcaaggtaagtatgtaaaggttttctaaaaaattgagtagcacatggatttttttcaaaacatgtttaccaaagagtttttactctctggtaatcgattactagattgttgtaatcgattaccagtag

SEQ ID NO: 108160 - DNA, 353 bp, Glycine max
agcttggcgtcgtgttttatttgttaacaaactcaaacgctcgatccaccaacccgcgtttgcacatgcccctcaaaatgacattgtaagtgtgcatgtcaggctgaagccctcttgacatcatctgatccagaagcctcattgcatcatcaatgctgccgtgtataatagtcgcttctatcaagatagtataagtaatcacagtagggttgcaattatcttccagcaactgatccataaccttcaaagccaaatcaagcttcccccttgcacaaagactcccaatgagaatgttgtaggtaacaacatcaggggagaagcctcgatactttattctcaaaaatcccctattg

SEQ ID NO: 108161 - DNA, 369 bp, Glycine max
agcttcatatttctttttcatcatgaatacccatgtcatcctggagggatcattaatgatggagaggaaataccttgcccctcctagtgatggagctctcgaaggccccaagcagtcaaaatagacatagtccaacatggcctttattgtgtgctcaacctttgggaacttcattcgatgttgctttccatagacgcagtgctcacaaaattgaagaggttccaccttgtgatttcaagtaagccttgcttgctcagaatatgaaggcttttttcactcatgtggcccagacatagatgccacaaaaaattatcaatcaagacattggacacatggcttccagattgtgaaacaacaaagatagagcct

SEQ ID NO: 108162 - DNA, 369 bp, Glycine max
agcttttaactgcttcaatttattccacaattctctcttcccagctatgtcacacggggcatagacatttacaatgttcagcagcatgttgttcttaacccatctccctgtcaacagcagaaaattcgtacccttcaccctcctatctacttcaaaggctagattattccacctgcaaaggagacctccagtagtgttaattgaagggacagagtcccaggatacattagcatctccccaaataggctgacaagcatccttagtaacagattctttctttgtttcctgcaagcaaactaaatccaccttatgctttatggtgagcttacgaatagcagcccacttcacccccctacccaagcctctgca

SEQ ID NO: 108163 - DNA, 359 bp, Glycine max
agcttaaagattaaggtgtttttaagcattcaataattaaggatgggtgagccttattcttaatcagcgcaatataataactttgagaaaccacgacacactcaataaattactagccaagagcttattgttcaatgcatatattctatgtcgtgaacagcttcattttcttttatcaaaccaaaatgtactttgtaaagatcccaaaggaactgatggaccatagcttatactttttgtatttggacagtatgatacaccattatgaaattgtaactttttattagcatcacgaattgcaatacaaaacagcaggggtacataagtcgaattggtaatttgtgaataaatatcggctt

SEQ ID NO: 108164 - DNA, 264 bp, Glycine max
agcttaatgactagaggttgtttgttttccatctgctggacagaggatcgattcatccaactgtggaccgtattgtatactatcttaacctcctcagtgaccatttggaatgcaaagaaggaaagctcccctatgacgaaatatgaactgtgctcgaccgctattacaactaaatagtggttagaagatgatgccctgaccagagggccaaatctctatgagtacagtgttctacactacttcctttgtcaaaactgtgatgaa

SEQ ID NO: 108165 - DNA, 376 bp, Glycine max
tgcaaagcttcttaagaagattcctttagtttcttgagcttagctagacatacctctctaatagctaagctcacctccttgagatgagaagctagagcttagctacacaccccctataatagctaagctcacccccatgacaaaaaacatgaaaatacaaaaaaaagtacttactacaaagactactcaaaatgccccgaaatacaaggctaaaaccctatactactagaatggctaattataattccttgttgattaatccttgagttccaagccaaatttctaatgttttaggtgatttagacctagaaactcagagcttgatcaatgaatgtctacaaatgcaagtgtttgatccatttttgacatcaaatcc

SEQ ID NO: 108166 - DNA, 370 bp, Glycine max
agctttctttctaacatttttctaccattgaatcgttccggcccttcacctccacaaccccaaggttgggcatcaatgacagtcccgtcatatcttgtaatcaaataggggttctgctcatcaaggtatccgggaatatattggtaataagctggagaatagaccacaccaggataaaaggcaattacggcaccaacatcagctgcaccatctaaaaatagaccttggccagaatccttgtgagatatttgagaaggtttaacattaagcttgtagccaagttgatcttttaacttctgagaaacttctgcttgggtatatgatctttgtttaaagacaactgcacaacaagcggaacaataacaaatga

SEQ ID NO: 108167 - DNA, 374 bp, Glycine max
agcttctgtattgttgattatgctgttttattattgatataatgtccacaatactcgtaaattgaaagtcaaggagaccaccaatatgatggagaagttagttttacaagtcggcagagacaggcaaccaaaacttcctctaaaagaccatgaatcactaattacttccttttacttcaaaattactgttacttcttatcagactagctagttaaacattatgatccaaatcaactttatgtcccaacaagttagaagagagtcattatatttgaccttggctttggttatggttagaaacaaaattaaaattgcaaactgaatgtcaattatttataagctgttgttgttgagcagtatatacaagttagaat

SEQ ID NO: 108168 - DNA, 347 bp, Glycine max
agcttgctctaaatttacatttatgtttgtatttatgggaggaggttatatgccatattttgctttaggagtgatgtccctctggtaaaactaactatccaaatgtttgccttccctggaatggctccctaggaagcttgcctcaaataagcccaggaaggactacgcggccgaatgaactattttcccccccgagtaccacagtcaccgctttagaaacgttgtgcaccagcagcgcttttaaaccatcaagggatggtcgctttttctggagcgacgcgtacagatcaaggaccactagtatactaattttcatgaagaaatacggcgcctgctgtgggcaccac

SEQ ID NO: 108169 - DNA, 366 bp, Glycine max
agcttgtgctgagagagagcttaccctcttctcaggcttctgaccttaaacagaattgattcttgtgaacgaaggtttcacgctgaggcggatcctactgtgacttatctgttgatctcacatcacggccttattctatgcatcatgtgcgtcggtcatgtttataatatcttcgtgccgctgtgtaatgtcagcaggggctgttcacagcaatttggcatcggagaatagatctcgaactcaagaaacctatggcactatattgcatcgtgtggcaagcagagcttgactccaaagagcatttcaaccttctttccatcaatgcggtgcaggaacattatagacactatacacacactctatgat

SEQ ID NO: 108170 - DNA, 223 bp, Glycine max
  unsure (1)..(223): unsure at all n locations
actatcggccacaaaaaacgaaaaccgcaaaagaagaggaaaagcgaacatgaaggcaaagaacaatctaganatngncnaagctagcactgccttgggagaaaggacgacaaacgaaaagcaggcgagaaagatcctcagaactcagcccaagagaaccgacacgaaagtcactgcaagacacgaggcccaacaacatggccacatgagagcggaagaaccc

SEQ ID NO: 108171 - DNA, 366 bp, Glycine max
agcttggagaggatgcttcattggaggaaaagaaagagggagagaaagagagaggggggagcacgaaattgaaggaataaaagagggagaggagtggaactttgaagtgtatctcataagactttcattcatcaaagttacaacaagtgttacacatgcttctatttattgactaggtagcttccttgagaagctttcttgagaaaacttccttgagaaacttctttgagaaaacttccttgagaagctagagcttagctacacacacccctctaataactaagctcacctccttgagaagcttccttgagaagattcctaaagaagctagagcttagctacacataccccatataatagataagc

SEQ ID NO: 108172 - DNA, 331 bp, Glycine max
agcttggtcttgatttttctttatttctttaacaagctttgaacaatatacatgtccttcatttaactatctttgggcttggcggccacgctcaacaaagtactttcgacacctactgtacgttgatttgaccaatgctgttatgggaatgttgcgacaatcctttaaaaccttattgatacattctgagaggttggttatcatgtggccatatcgacgttcttctctatcataagccatcgtccatttttcctttgaaatgcgatcaatccatgttgctatggctagactcaattgacgaaatttttctaaattttgatcaaaaatgtgt

SEQ ID NO: 108173 - DNA, 361 bp, Glycine max
  unsure (1)..(361): unsure at all n locations
ncaagcttgagcttattcatactaccataactatttactcggatgtctgattgagtcccgtaacatatcgagacgctcgaaattgaatgttgaagctctgagccaattccaacgacaataaatttttagtcggaagtttgattgagtcccgtaatatatcgagacgatcgaaattgaatgttgaacctctgagcagattcacacgaccatcacttttttctcggatgtgtgattgagtcccgtaacatatcgagacgctcgaaattgaatgtggaatctctgagccagttctaacgacaataactttttactccgatgtctgattgagtcccgtaacatatcgagacgctcgaaattgact

SEQ ID NO: 108174 - DNA, 367 bp, Glycine max
  unsure (1)..(367): unsure at all n locations
agcttcttccacaaactcctttaaagtagggttgccaagccaataatcaaacactctaaatggtttttggccccaatcttgtatagaacttttcaagatgttaggacaatggttggaaaagttcctatccaataccacaagcgagctcccttgccatttgtcaacccattcccttgaagtcaaacctttatcaaatacattcatggtcctcccatttggatgaaaccatgtgaattttctccccacaaatggaatatcttccacattcatatccaagataaattcattaaactctctattatgccccccctctatgaggatgtgtattatcactttttctttcatgcaaactganattctgatacca

SEQ ID NO: 108175 - DNA, 381 bp, Glycine max
  unsure (1)..(381): unsure at all n locations
ctgccagccttggcccgacccattcacttcatttttcctttaattnccttccattccattccacctttattattggaaagtttctcatgacattaaaaaagttaaaaattattccggtgttggggagttctgcnaaccaaactctctttgatgtaatgattctaaattatctattaatatgatgttgatattattggtctttcctatgctaattcacatgtttgtggtttgatcatccattttcatgtacttttgtaagatttagacattgaaaatgtttatatgctaagaacttgggaaaaacatttaggtgattcatgtctaggaaaagagtgatattgtctaacctgtttatgcatctttgtttataatgtaaattat

SEQ ID NO: 108176 - DNA, 276 bp, Glycine max
gaaaatacgcgagaagaggacccctccactagggaataagccatggaaagaggagctgctccaccaagagaatgccttggattatatgcttacagaggaagcttctattggggcataaagatatagaaagtggggaaggggaatgaattgaaagggaacaaagaggaatagaaatggaacttttaaatgattgtcacaaaactctcattcatcaagaacacaactgatggtacactatcttccttgagaaactttcctgagaagcttacttgaaag

SEQ ID NO: 108177 - DNA, 377 bp, Glycine max
agcttgtgcaaatcaaatcatctcccgcatcttatctctagcatgcattctttctttctttacccactcctcacgtttggttttttagggaaaaacaccataactaaacgcgccacaaggcatccctatcgcaccagattcaaatctagaacgatgggtgatcaagaggagacacaggaacagatgaaagccgacatgtcggctctgaaagaacaaatggcttccatgatggaagccatgttaggaatgaagcagctcatggagaaaaatgtggccaccgctgccgctgtcagtttggctgccgaagcaaacccaactctcttggcaactgcgcaccatcctccctcaaacatagtaggacggggaagggacacact

SEQ ID NO: 108178 - DNA, 374 bp, Glycine max
agcttgatgtgagaaagcgtggtagtattaatcttcctacttttggttggtgaccacaaaatggtacctggaaatatttcccgggggtcaagaaaactttaagacatcaggggggtgctattggccaaaaccaagctttaacaattccgacccaacccgggcatagtcagtcagtgagaacctgtgatgtagctaaacaggcgagctcctggcagtccacccattaaagaacaaagaccacaaagcaagaaggcttgtgtggtggctggccagctatggatcttgagtggtatctggaaattggcttctggtaatcgattaccaagggtgtgtaatcgattacagggcttaaaaatggagacaggaagttaaga

SEQ ID NO: 108179 - DNA, 369 bp, Glycine max
agcttctcaatcgccttgctccagtgcattcctccaccacgcccaaccccataccagtccctcgccactccacctctgttcctgcacaaatccagttcaccccatcatcgtatgaggaccctgtcggtgccctgttcaaactcactcagacggattcagtgctaacatacctgaaggagtttgaagacttggctaatagaattatcggcttgtcggtccccttcctgttgccttggttcatctcaggtttgacgccggagatccgccgtgcagtccaggcccattagcctatgactgtggaccatgccgtctgcctcgcgaagatccaagagcaaaagctgtcggacctttgtctgccttcaccgtggc

SEQ ID NO: 108180 - DNA, 368 bp, Glycine max
agcttctacttatgtggcttgtcgggcttccttcaccttcttgtctccaacgcgaactttgaccattgttcttccttcccgcaatgcttcttttcatgtctgcctgagcgggcttatagcctaaaccatacttcccacgatttccttgagtatttatcaggctagttatgccaccgttgttttttcctaaacccatcccgggttcaaaaccgttccccaacataactcgggccatcattaccgctgcatcggacagacaaggttgcccaaagagggagtccacggaggaaatgctgaccacctcaaaagactggaaagcagtttctaacgattcttctgcggcttccacataaggcatggaggatggg

SEQ ID NO: 108181 - DNA, 370 bp, Glycine max
agcttattggattatggggcacccgtcatatgtggtactaggtggcaatcgggcgatggcacaaatcaactatcacatttccacaagccaggcataagcacaccatccccagctgcccacctttaaatttagctcacgtgcatgtacgtagccttctcctcgttcctctcagcaccgggtccccatcaacccctccaagctttcacaatatccaatcaattcaatcccatttgtcatgaaactaccttaaacaaagaaaaacagagtggaggcagaaatctttgcacaagattcattcaaaattccacagagtttttcctacccacatacctcagtaacatcctttttgttccgattcgttaaccattgg

SEQ ID NO: 108182 - DNA, 247 bp, Glycine max
  unsure (1)..(247): unsure at all n locations
gcgacgcagccgcacgcaaggcgagggaaggattacctatttgtcggngaagaacaaaagcgcgaaacggaaacaaaaaacgcgacaaaggacgaccctgggagcggcaaaaccagcaaacccgacgggaagggattcgaaaggggcgaaaagaagacacagaacgataaaacccccccacgcgagccatgaaaaaatgagaggcaggggggcgcacctcatccagcccaagcgacccaagaagaaa

SEQ ID NO: 108183 - DNA, 371 bp, Glycine max
agctttgatgatatggtctttttctacgaaatgatcaaagtgagtctaaaaagagacaaatctgattatcatactttgataaatgccaaaaaactagggcaaatgaagagggtgaggatgaagtagaagcccatgctgtgactgccattccaatacagccaagtttcccaccaacccaacaatgtcattactcagccaataacaaaccttctccttacccaccgcccagttatccacaaaggccatccctaaaatcaaccacaaagcctacctaccgcacttccaatgacaaacaccacctttagtgtaaaccaaaacaccaaccaagaaatgaattttgcagcgagaaagccttagaattcaccccaatt

SEQ ID NO: 108184 - DNA, 362 bp, Glycine max
agcttctccctcatttctattttagggggagaagtgaactgaaaaatggttcatccccttatgcacttctctgtcttttgaatttgcttggaaaaattgttttcgagaagaaattctaagacaatgcgcttacgaaacgtttccgtaacgaatttcgcgaacgtttcgaccgatcttcgacgctcttcattggctcttcatagttcttcgatcttcaacgggtaagtacctcgaaccaggcttttctattgattctatgtacccttggtggtccacactggggctccggtatgtttattctcgcttcatttacttgttatacccccttttgacgtgcttaacccattttatttaaatccttt

SEQ ID NO: 108185 - DNA, 361 bp, Glycine max
agcttaggccattcacacattatttaaattatgaaaatgtgaggtacaatctctcttaaacaccaactaccttgttctcttttccaaattcttcatcatactgcactccctctttcacatgccaccacatttgttccacttagaatttccaatgctgtgagtgttgatccaatagaaataagatgtgtgtgaccataagccaaacccatcaaggcagcaacataatatgcattaacagctttactagtactctactgatttcctccatctccaaacttagttaaccctccagcccatgaatgcagtttataaaggtcaaaacaccttagccttgtgtaatttgagttcaatcttctgatca

SEQ ID NO: 108186 - DNA, 369 bp, Glycine max
  unsure (1)..(369): unsure at all n locations
agctnttcacctgtcttctcttaatcagagccatcaacagacttcaaaaacatggtaccagcttgagagttaatcaaaaaattaatgatgcatctttgttttcgatcagtccatgcatcggacataatagtacaaccatacttgacctattgctccctatggcctttcatcaaattttcagtatattcaacttccttcttcaagagtggaactctgatgtcatgatagctaggaatgggcaaatgtggcccatattgaccaatggctgcaaccatgttctcaaagcttttcaatttaatgaggttgaatgacaaacctgcttggtaccaaaagcgagcaatatgttgatgcaccttcattacttcattc

SEQ ID NO: 108187 - DNA, 220 bp, Glycine max
ttcttctccctcaattttctataaatagggggagaagtgaattggaaaagggttcagccccttaggcacttctctctctttcgaatttgcttggaaaaattgtttccgtgaagaaaatctaagccgaggcgcttccgaaacgtttccgtaaggaatttcgtgaaggtttcgaccgttcttcgacgttcttcatctgttcttcatcgttcttcgatcttca

SEQ ID NO: 108188 - DNA, 220 bp, Glycine max
ttttttaattttacttacagattacataagccgtatgctttatacggattatgtaatccgtaagttatattaaagcttatggattacttaatccgtgtggtttatattaattttttatttttttaaataaaaataaatattaaataaaaattatatgtttatttgaaatataattcatattattggttgaaatgtttttaaaaaatgtagattgataatt

SEQ ID NO: 108189 - DNA, 124 bp, Glycine max
gacccctagaactcgcgagcattttatttaactaacgctcgaaagaccctcggcacatatgacatgtttgtgaagttcaaccaatttaagaagatcaacggtaacaagctgacaagtttaccga

SEQ ID NO: 108190 - DNA, 217 bp, Glycine max
  unsure (1)..(217): unsure at all n locations
tttttctgattttgccatattgngtgctgcttttttattttaaggaaaattcctttagcaatcccccaaattaaggacttatcataacttgaaacccttatgctctcttagaatcctaaaacaaggtcaaggatatcaaaattaggctcaggggtttattcaaacaaatcattattacttttggctcaacaagggtgcaagggatgaattcatcata

SEQ ID NO: 108191 - DNA, 220 bp, Glycine max
  unsure (1)..(220): unsure at all n locations
tttttcaacttctgactactnccagggggctggaactacttcacatggacttgatggggcctatgcaagttgaaagccttggaggaaagaggtatgcctatgttgttgtggatgatttctccagatttacctgggtcaactttatcagagagaaatcagacacctttgaagtattcaaagagttgagtctaagacttcaaagagaaaaagactgtgtcat

SEQ ID NO: 108192 - DNA, 249 bp, Glycine max
  unsure (1)..(249): unsure at all n locations
cgctttgcatgcaattctngtttaaggagancataggggtgttgaatccgaatatctctcagaaccctataagtgcgcaatcgcacgaacccaaacgcccatacaacatgttcctcatactatgaaccacattattctgaacgttaattaactggtccattttaccgccaaatagcctacagatgcaaaccgacaactatcctatatttagggatcccccgaaaatgccatcacccacattcaattaat

SEQ ID NO: 108193 - DNA, 219 bp, Glycine max
tttgcatgcttttttgtaacaaaaagaaaaaaaagttattgaaaatatattaaaaaatcaactactttttttggttatgagtagattaatcaaattaattaacttcacctttttgaaattgtaagtgctcaccctgcgaaaattcagtccaatttactacacgaactgaaagaagtagctagaagctgcaaattaagcaacttaattgataaagaaaat

SEQ ID NO: 108194 - DNA, 225 bp, Glycine max
cgtttttttgcttgcttatgcgcagaaatcccgacgaatgcacacttgcacaagacatcctattaactaagaaaaatgcacccatatacaatcaaggtatcttcattacctagattatttacatgtacttccaaggtgtatttgttatttacatcacacacgcctccttggctaaatttacatacatgcatactcaaagcatttcggggtaccaaaaattgcaca

SEQ ID NO: 108195 - DNA, 63 bp, Glycine max
cgaatataagggcacctatattaggggatcacgcagacaatagataacagatgccggaatagc

SEQ ID NO: 108196 - DNA, 204 bp, Glycine max
ttcttccttgataagctttcttgagaaacttccttgagaagcttctttgagaagcttccttgagaagctagagcttagctacacacacccctctaataactaagctcacctccttgagaagcttccttgagaaacttccttgagaagcttccttgagaagattcctagagaagctagagcttagctacacacacctctctaata

SEQ ID NO: 108197 - DNA, 221 bp, Glycine max
ttcttctagttaaatgttacttaccttgaattaattcctttgatagcccttttgagccttgtttccctttccttgttttgaagctcactacaagccttaagtgaaaaaccatgatattaccatatccttaaggaattttggagctttggaattgttttgggaataagtgtggggggtttttgtttcattggacaacttgttttgttgggtatgcttcatga

SEQ ID NO: 108198 - DNA, 218 bp, Glycine max
tttttgaagttgtctgagcaccaatcatatttgggaagaaagacaactgtcgaaagaaccaatctgaggatatatgctagggtaacttcaaattgttcacaatgtatgaggtctagaaaagatgggttttagtttcattcgtcaacaatgtatcaatgatgttgaaagcactcttattgctctcactatgagaacttgagtttcttttgaactctgga

SEQ ID NO: 108199 - DNA, 217 bp, Glycine max
ttcttctttttgaccttgaacaagcaatcaactcctcttttagaaccatgctatgtgctcgcgactggtccctttcttcccttcgcaacttgagttcactattgctaccccatagagctccgcgaaatttgttccggccatactcttccttgcgagccctcttggtctctcgttcaagggcccttacggtaattgcattctcttcccgtaacccggg

SEQ ID NO: 108200 - DNA, 217 bp, Glycine max
atcttcaaattttgcaaaaagggtaatagtcatggaaatcctcttgtgctttaaattagttaatgtgttcttcgcctctagggtgcattcattattttgatttcctgacaaaacattgtttattaaggtgattgcttgtcttgatgtgagaacaaatgataagggggaccttgttgtaaccaaaggagaccagtatgatgtaagagaacatacaaaa

SEQ ID NO: 108201 - DNA, 221 bp, Glycine max
  unsure (1)..(221): unsure at all n locations
ttctttacgtttgaacaccngcaacagatgcaaccaagtatcacaaaatcaagccttctaatatctcgctctcactcagccagacttctgcttgtctgtcaataagctgtgttagatcatgcacaatcccataatactacatcttcaacacctgaaatgggcaacagccgtaagtgttaataaataaataataccgtcatgggggaataaataaatcaata

SEQ ID NO: 108202 - DNA, 243 bp, Glycine max
cccgggacctctgaaggacccgcttttttgcatgtttttcacgagaccactgacagggagctggaaccacttgacatggatatgatggggcctatgcaggttgaaagccttggaggaaagaggcatgcctatgttgctgtggatgatttctccagattgacctgggtcaactttatcacagagaaatgagaaacctttgaagcattcaaagaattgagtctaacacttcaaagagaaaaggac

SEQ ID NO: 108203 - DNA, 221 bp, Glycine max
  unsure (1)..(221): unsure at all n locations
tttcatgcattcttattcaanngaaaatngacggtgngagattttccctggactttactaggggcaattttccttggcacccttaatcatgttcaatttgttggtaagtttaggtcttttaatccaaaaaaggaaacttggttaccatgtgagagtaatttggataaatgaaaatagttttggttgttatatgcatgagtatatcgatgcttgtttgcaac

SEQ ID NO: 108204 - DNA, 210 bp, Glycine max
ttcttgccacccagctcgcccaggcgagcaaggttgcttcctctagaagcaacagccttctagaggaatcttctggagggcccaagtgggcctagttgctgtttgcacccccatttttactaaatacaccccccttgcccttttttggtgattcttttttcgtaaagttacgaaaacttaacggatttcgcaacgatacttgttttcttt

SEQ ID NO: 108205 - DNA, 198 bp, Glycine max
gggcttctatggaggctggatctttgagcttcaatgaggttctttaatggtggttttccaccatggagatgcagcggaagacaaaggagaagaggggagaggaggcgccatccactagggaataagccatggaagaaggagcttcaccaccaagatgagccttggataagaagcttggaaggatgcttcaatggagga

SEQ ID NO: 108206 - DNA, 214 bp, Glycine max
gcttttttgccggcgcagagatgagcaagtatgcacccgcgaggaggaacaagccacaaaaggggagagcaaccaaatgaagagccagaggatgatgcccggacggagaagaaaaagaacaagaggaagcgggatgagccggctagtaactcaagggacttgaaattcaagctccaaaaactaacccaaggcaacaaggggggcgaggagtatt

SEQ ID NO: 108207 - DNA, 208 bp, Glycine max
  unsure (1)..(208): unsure at all n locations
tgcttgngcnngnnnnatnnaaattctcaggatcctgaacaactaggtgtgtcctactatgacttgagaaacaaaggtgatcaaataacaagcagagatttaaaaggtactaggttgcctcctagtagcgcttctttaacgtcttgagctggacgcctgatgacttgtcggtcaaagacctagtacttttgcttacctttggctttgg

SEQ ID NO: 108208 - DNA, 205 bp, Glycine max
ttcttgtgtgaagcgatggcggattcaatgttctttacttattggaagattcaatgtttaaaaaatgaatggaaccctctttggtttctcaaaggcaatataaaattttgattatgattaaaagagaagcgatgtacttgacaatatccgaagaggattttgttttataataatattaataataatttcaaaacataagcctctc

SEQ ID NO: 108209 - DNA, 216 bp, Glycine max
  unsure (1)..(216): unsure at all n locations
ttctttccctcttngttcaaanacccctcagccaaatagaatccatcttgggcctttttccaacaactctcgtaaatgggagagaaatgttcatctaaagcatacaagtccctaatattatcaaatcctaaaatttgagctcctagggagcaaaacaatgggtgtctcctagagaggacatcaactaccacatttgtttttctctttttgtatttg

SEQ ID NO: 108210 - DNA, 227 bp, Glycine max
gcaggcatgcaatctttgagccaaaatcctgactcaccataaaccgtgacccaggtgagaaagtcaatccttaccctcggaagcgaaaggaaagaaggaagatttccaatcaaagagaaagcaaaaaaaaaagaaagagcagaaggaaaattccccaatcaaagagtgggagaaagcaaaaagaaaagaaagaaaattcccaatcaaagaatgggagaaagtaaaaa

SEQ ID NO: 108211 - DNA, 170 bp, Glycine max
cgcagcatgctttttacattgtacttggaaccgaggacccgagaatgcgcgcctacgcgcgtattgggtggagcttactaaaaataaatcttgacttcaattttctatcccttttggcttggtacacccccatttttatatccggaaccaaaaaaacaattaaagaaatt

SEQ ID NO: 108212 - DNA, 174 bp, Glycine max
ttttgacggccgggaaggagatagccagggcgaccagaggaacaacaaacgtcccgacaagagagaaaattccgggagagggacaagccccgggtgtagaacggcacagagatctcatggaaaagcaggcgaaaaaagaaggaacacggcaagggggaaaaggaaggtaccata

SEQ ID NO: 108213 - DNA, 210 bp, Glycine max
tttctttataggggagactttgatgcgactatgtaacaataatcaatgttaatatggtttatcattaaaattataattattaatccaataaattaccaatcaataattgatcatttacaactataccatgggcacattattcaatctcctcatgctctgcccctaatgaacaacactatgctacccattctacttttggaaactccgcca

SEQ ID NO: 108214 - DNA, 223 bp, Glycine max
ttctttagcttcaaattacagacaatccaacatggcaaggcactggtaatcgattaccaggcggtggaatcgattaccacaagacaattttgcaaatctgctttgcaaaagggcattgaaaatagaattttgaaagttgaagtcgattagccattggccgatgtgatcgattaccagtaacgaaactcctaaaatgaaaattgaaaaatcatgacccttcaaa

SEQ ID NO: 108215 - DNA, 219 bp, Glycine max
ttctttaaatttgacttgatgaaatgagacaaacttgcgcaagcttttgataatataggacatctcttatccttgaaggaaatttcatctttatattagaaaaactgatcttatccccttggtgtccttcacaattaaactgtcttcatgaaaaaataccaaaagcaaaaaaataccttggaccaagcatatttgaagctatcatttgacgggacaatg

SEQ ID NO: 108216 - DNA, 288 bp, Glycine max
  unsure (1)..(288): unsure at all n locations
actcggaaanncgaaaaaaaaanangaaaaaaaattttaattaatttaaaatnaagggggataaggggaaaggggaaaaaaaaaaaagaaaaagaaaagaagaaaaaaaaaagaaggtaaaatagaaagaaaagaaaaaaaaaggagaagaaaagagaaagagagaaaagaagagaagaaggaaaaagaaaaaaaaaaaaagaagagaaagaaaaaggaagaggagaaaaaaaaaaaggagaaaagaaaagaagagaggaaaaaaaaaaagaaaaaaaaaaaaagaag

SEQ ID NO: 108217 - DNA, 217 bp, Glycine max
  unsure (1)..(217): unsure at all n locations
atctgagcatgcaattttgtttttaagnacangaactgtgctagtagaattcattttcaggcagcaaaaagagttcttagatatgttaagggcacagttgattttggaataagatacaattatgttaaaaacttcagacttcatggttattctcatagtgattgggctggatgtgctgatgatatgagaagtactttaagttatttttttagctttg

SEQ ID NO: 108218 - DNA, 219 bp, Glycine max
tgcatgctttcttctttgagaaaacttccttgagaagctagagcttagctacacacagccctctaataactaagctcacctccttgagaagcttccttgagaagattcctaaagaagctagagcttagctacacatacctctctaatagttaagctcacctccttgagatgcgaagctagagcttagctacacaccccctataatagctaagctcaccc

SEQ ID NO: 108219 - DNA, 209 bp, Glycine max
  unsure (1)..(209): unsure at all n locations
tttcttggncgaccaaaaggttcaaatggaagaaagaagaggattgtgttggttggtaatcaagttgtaggtgagattcacgacctaagaagcatggcaggccgaagggttcaaaaatttaaatgaagaatgttgttgaggttggtaatgaagttcatggggctggtgatatttcttgagctcataatgattactgacttctatgtttc

SEQ ID NO: 108220 - DNA, 209 bp, Glycine max
ttcttttaaatgtgaagtttaatattcaaatgatcaaagttgaaaaaaaatgcacacacatgacctctatttatagcctaagtgtcacacaaaattggagggtttgaaattgaatttggggagccaaactttggagccaaaatttcactaattatgattagtgaattttagttatggttcagcccactaatgcaagatcaaatataata

SEQ ID NO: 108221 - DNA, 219 bp, Glycine max
  unsure (1)..(219): unsure at all n locations
ttcttatanattaacttaacaaatgttttcaacatcttgaaagagagcatgaggatctcaagaaaactaatcaagctcatttagttgattttgttctggaaaccacttcagctggtgatctacaagacaactttgtttgtaaggaggtcaagacattattggacgaaaaggtatccagtggacgaaaaattcttcttaaggattatcgagacttggaaa

SEQ ID NO: 108222 - DNA, 107 bp, Glycine max
  unsure (1)..(107): unsure at all n locations
ttcttgactatgcnaanagaagggagcacggagaancaccaaagggcaacagcccaagacaaccagagaacggagaaaggcccaaagaggaaaaccggccgagacga

SEQ ID NO: 108223 - DNA, 183 bp, Glycine max
acgcagcagcatttgaattaatgagaccagggatagctggacgaaagaaaaggaacatgctcatggagaaaaaaaactcgaccagagaagaaacaaaacaaggacaagaagaattgtagacagaagactgcaaagaagggaccgagaaaaaattgggaaaaacccataagaaaaccatcaaca

SEQ ID NO: 108224 - DNA, 223 bp, Glycine max
  unsure (1)..(223): unsure at all n locations
catgcattttttgagttattaacaacactgattngaaaatggataaccagcgatagtttctgaacaaatcaaaagatgtaactcttcaaatagtttttgactttttcaaattggttttaagtttttctaaaggtcataactcttctaatggttctcttgaccaaacatgaagagtctataaaaacaaggctttgttttgcatttgatcatctatcttttccaa

SEQ ID NO: 108225 - DNA, 220 bp, Glycine max
  unsure (1)..(220): unsure at all n locations
ttttttagtttttataacanctatgaatggaatatagatgcccaaacaaaatataatattttgaatacacttcaacatatgaccatggtagccacggcataccagacatctcatgaatgttcgaaggaaacaatcatagatatcctagtggcaggatttttcgaccaattaaaaggatggtgggataattatctcactaacgatgaaaaataaaaaattt

SEQ ID NO: 108226 - DNA, 212 bp, Glycine max
  unsure (1)..(212): unsure at all n locations
ttcttttttacaactnctgtaatcgattatggtaaggttgtaattgattaaactgatacgatatataactctacaagttttagaaaacttgtgtaattgattacgataaggttgtaatcgattaaaacaaagagttttgtcttctgaagaaaattttctaacttagaaaattttcttctcacttactaatgatgatgcatgatgcacaaaat

SEQ ID NO: 108227 - DNA, 220 bp, Glycine max
tttcatgcattcttaagctccttcaactgcacaaggctcttaatatttgaagagtatccttatggaaccttcacccgatgaagacactgacaaaaacttatcttctcctttttggacaaagtatgacaagctgggggcaagtaaattttcttcccatcagatcttggatgcaactgtgatcatatccccatctcagctagatcttgacgggtattcaagc

SEQ ID NO: 108228 - DNA, 211 bp, Glycine max
  unsure (1)..(211): unsure at all n locations
ttcttgttcaaancaagncactcccgcattttatctctggcatgcattgtatgttggtctcgtcctttgtcacgggaagccggaaggtccatatcaccttcttaatcgtacacatggggcactgcgcccccaaatgcgcaagtaagaatagataattttccgggctctcgtgtccgtaaaatgcattcatatcatgcatcgcataagcatc

SEQ ID NO: 108229 - DNA, 215 bp, Glycine max
ttcttttaaaggagaaagagaaaaaaacgttggagagtaggggggaagtgtccacgccagcaaaaaaattaattttagctttaagaggagaaagagaaaaaagcataggagagagtagagggaagtgtacccgtcagcaaaaaaaattaattttacttaggtaacatctactgcaagctattcagcaaaaataaaataaaatctattgtaagctt

SEQ ID NO: 108230 - DNA, 54 bp, Glycine max
tcttgcattctttgggcaccaacgatgacgtcgcagctagggtccagaggacgc

SEQ ID NO: 108231 - DNA, 217 bp, Glycine max
ttcttacacacaggcttcaggctaacttgggtgcaatgctggggtatcccactttaggcttgggatatgaaacatattcagaagatattggtagctttgggggaaacggtggacatggatgacgacgcagaggacaaacgcaggctagacagagctcgggtgctcgtcaagaccccatggagcccgacaatcaagcacaccgtcgacgtccatatag

SEQ ID NO: 108232 - DNA, 218 bp, Glycine max
  unsure (1)..(218): unsure at all n locations
atcttataccttcntgttgggtatagccttgagctactaacctagcttttttccttactaccttaccttgttcagccagtttatttctgaatacccatcttgttccaatgatgcttttgttctcatgcttgggaataagtgtccagacatcatttttagtaaagtggtggagttcttcttccattgcaataatccagtcctcatctatcaattcttca

SEQ ID NO: 108233 - DNA, 218 bp, Glycine max
ttcttgtgcattcaatatcttgatgagggtgttccatatgttctcaagattggactaatacatttgctgcccaagtttcatggtcttgcaggtgaagatcctcataagcatctttaggagtttcatattgtttgttccaccatgaagccccctgatgtccaagaagagcatatctttctaatggcttttcctcattctctggagggagtggcaaaaga

SEQ ID NO: 108234 - DNA, 207 bp, Glycine max
ttcttactctttttaagggagcctcttgggaatgaagcggctattcctcctactaatgacgcatggacacttatccctgacccaactacaattcgtgcgaaaggtcggccaaaatcaacaaggataaagaatgagatggattgggtcgaaccatctgaccaccgacaaaaatgcaatagatgtggagccgaagggcataacaggcgt

SEQ ID NO: 108235 - DNA, 202 bp, Glycine max
  unsure (1)..(202): unsure at all n locations
cacgggcaaatgagacattcccatagaaccccaacagacaaaggaaaagaaagagagagagagaacctatccacgcncccacgcggcactaatgagtgattcacatcatgtggcggtatgttaatttccataacttgcttactctcgcttagtaatttttttctcttcatcaatatgtttttaaagtctctcacacacacaa

SEQ ID NO: 108236 - DNA, 210 bp, Glycine max
tgcttctatataagctgaaccattttatcaataaagacaagttgagttttattcagaaaattagagtttatctcttttatcttagggagagtgattctcctaaattcttgagtgattcaagaacaccctggctgtatcaaaggactttcacaacctttgtgtgttgccctcgctggaaagagtgattctttccttcctttcatgttcacc

SEQ ID NO: 108237 - DNA, 221 bp, Glycine max
  unsure (1)..(221): unsure at all n locations
tttcantgcttcttcaagaaaaagatggcctcatcaaattccttatttccagaagggaattctatcaatagacctccaatctttaatggagagggttaccactactggaaaacccgaatgcagatttttatcgaggcaatagatctaaatatctgggaagccattgaaatagggccttatatacccaccacagtagaaagagtttcaatagatggtagttc

SEQ ID NO: 108238 - DNA, 222 bp, Glycine max
ttttttttctttttttccccaactggttagggtgacgaaattgacaactgtatactgataaagcatgggtaatgctgccaccagactttccgtaagcccacgcggaccttgcacaaatagggtgatctccaaaaaggtccataaaaaactcaaaacggtgtgggctgttcttctcaatctcaactaaggctgcaatatttgtgtcaccagcctgtaccaatt

SEQ ID NO: 108239 - DNA, 204 bp, Glycine max
ttcttatgcatccaatatccttatgagggtgtaccgtatgttctcaagagtggacttatacatttgctggacaattttcatggtcttgccagtgaatatcctgatatgcatgttaaagagtcccatatagaatgatccaccataaaaccccctgatgtccaagaagatcatatcttgctaaacagctgacctcattctttggag

SEQ ID NO: 108240 - DNA, 214 bp, Glycine max
tttgcattcttgcatttggaattgcgaaagccccactccatcattaggattagtacctgacatctcaaacaaacaaatcaaacgtaacaagacaattatagttgttgtttgaatacctcacccactcaagtgtatcacacaattatggcttttctctaatgaaacactcttgccttttaccactctaattccccttgagttcttaggcaattca

SEQ ID NO: 108241 - DNA, 213 bp, Glycine max
ttctttccttttcttttttccccctaccagaggtactgaaagggccctgctaccggcaaataaaaaaactgtgtgggcgttagcgctagaaaacaagccggtggaccatccgagcataaccgacaaacttatgctcgaagggtaacatataattgaaccggtggtggacctgcccaacaacgtactgatttactggatacccattattgaccc

SEQ ID NO: 108242 - DNA, 217 bp, Glycine max
ttcttatcctatgcttctttggccgtcgttgcgttggatatcttctcaaatgtatcttcatccaccgattgatatatgagaaagagagctttcttgtctctctttcttgactccttcaacgtctcctttacaccttggcttagcgaggcttcatcttgctcctcgaagccattctctacgatatcccacacatcttgagctcctaatagcgccttca

SEQ ID NO: 108243 - DNA, 218 bp, Glycine max
  unsure (1)..(218): unsure at all n locations
ttcttcttgttccctaanagatgttttcataataatcaggcctaacatagaaccacataaaacaagaggtggaatactagatagcatgacaagagttagaagccatctcctgatgaatgatattacaaaatctccgacgaaagttgtcatcaactgtatgaactgtgccacctgatatgaaaggggggaaaacaatcaagaaacaaaatttagcttaa

SEQ ID NO: 108244 - DNA, 225 bp, Glycine max
cgctttcatgcattctttgcagaagggggattcgccaaaaaaaggatcaatgcgggtccaaaaagaagcgaataatgacatcccactaagacaacggataaaactgtggcaaaagaagaaggtgataaaaaaggagaaaccaaagcagagactgccatccctatacggacaaatttcccaccaacccaactatgtcattactaatgctaacacagaccttctact

SEQ ID NO: 108245 - DNA, 208 bp, Glycine max
tttttgaatcggacatccgtgtgaaaagttatgaccatttgaatttcacgagagcttccgttgttcaatttctagtgtcactatatgtgatgcgccataattggacattcgagttaaatgttactaccatttgaatttctcaagagcttccgttgttcaattctgagcgtctcgttatgtggtttgtctgaatcggacatccgtgtga

SEQ ID NO: 108246 - DNA, 210 bp, Glycine max
  unsure (1)..(210): unsure at all n locations
tgcttttcanccaaggcacatccttgggggagaagctccttcttccatggcttattccctaggggatggtgcctcccctctcctcttctcctttgccttctgctgcatctccatgctggaaaatcaccattgaaggacctcattgaaactcaaagatccagtctccatagaagctccacaagcaagcttccatcaagattattccccttt

SEQ ID NO: 108247 - DNA, 253 bp, Glycine max
aggcttcctgcacgtttgctttcttgggtcactctatacatatgtaagcctagacaataaccagacttaacaccgtcggacaataagcgtataaggaatatgttgcagccccaagaaacgaaaggtcttctttggagtgactggtgggaattctttcatacaccaaggggcatgcgctttgctggaaaagacttcttggtccaagggtcacggaagtcatattccttccaaagcgaatctccttattttctac

SEQ ID NO: 108248 - DNA, 214 bp, Glycine max
tttgcttttttctaactctataatgtatgcctaaagatgcccataagctacacaatccataattcatgtacaaccctttaagtacaacaatcattaccattaaacttaagataacttattcaaataataaattaatttaaaaccaactcatttatccttttactgccagtagttgttatgcctaagaatataaatataaaagaattatcaaact

SEQ ID NO: 108249 - DNA, 220 bp, Glycine max
ttcttgctatgagttggtccttgtccatgactatctcgttagtgcttgggatgttacatgcccatcaacttccgcttgatttgtcctctaaccacaccatattggtaaggccttcctttaatatcacttgcagcaccaaactactttcaagatcgattactatcccctaaacaaacacaagacttttcaacatgctttaacattactcacttgattcttg

SEQ ID NO: 108250 - DNA, 168 bp, Glycine max
tcttaccaatatgtcacacgggcctaacattacaatggtcacagcatgttgttcttaacccatctccctggcacagcagaaaattcctaccctcaccctcctatctacttcaaaggctatattattccacctgcaaaggagacctccagtagtgttaattgaagggac

SEQ ID NO: 108251 - DNA, 211 bp, Glycine max
ttcttgagatgaggaagtatagaagggtgaaacttcctgcttttattcgttgaccacagagtggtacttggagatatgtcgcgggggtcaggagaccttggggacgtcaggtggggtgctattgcccaaaaccaagcttgaccaatcccgacccaacccgagcatagtcggtcagtgagaacctgtgatgtacctaagcaggcgagctcct

SEQ ID NO: 108252 - DNA, 212 bp, Glycine max
tgcttgcacttcttcactttccacaagaatttcagcctctttcctacttagacttctcagctttgggagccaggctatcccttgcattctagacttcaaccacttgtgatagtcactgatgacgccattgctacctcccctaagctccttatcttttcttcccactctattccacgctttacagattttgtgaagtatcttcgcattagctt

SEQ ID NO: 108253 - DNA, 205 bp, Glycine max
ttcttagcaacagccccaaaacccaatttttgtcgaaaccaagtgtcatgatttctatattaccaattttgctagctgttgatgttgcatcatagttttgctatgtcatctacctttggtctcatctctttaccttacaattcaggcaattctatcattaccctttttcaatatatagaattggcaacatgcaaacatatctaat

SEQ ID NO: 108254 - DNA, 203 bp, Glycine max
tttttttttgaaaaggtgcaaaaagtgcagcaaacactgtagaaaattgtggtctgaaaaagtgctgtaaacatgttttaaaattgagatagacagctttttttctgccacagtggccatgctttcattccaacacaagggagcttttgtacaatttctctttccatcatgttcggtttaattagttcttgagatccaatgca

SEQ ID NO: 108255 - DNA, 203 bp, Glycine max
ttttatcttataattattttattctgtcgtaattaattttatagttgaggtatttgtttattattcataataaagacaaaaaatataactataaaatatacaaaacatgtgtgtgacatggttgatatataacattattccttaaatatgtatgtagttagggattcaatctcaatttcatgtgtatgaaaaaaaaatctatt

SEQ ID NO: 108256 - DNA, 202 bp, Glycine max
agttttttttggcgaaatcctctcatcttactaaaatgacaaagttgttgcacaagaaagaaaggcactaataataattagtgaaccttggacaaatgaaccttactacgattatcttgtacgactaatatataatctaataacatgaaggaatggcattacatgacttccggacaatactttttcaaaaacataattacaa

SEQ ID NO: 108257 - DNA, 203 bp, Glycine max
tttttgttaaagatctaacagactcagcctaatgttcatgagaatgactgttgcagacagtattaagacaactctccctaaaaccgatagtgctaaagagtttatggggttagtaggagagcgctctcaaacagctgataagtctcttgctgggacattaatgagtacactaaccaccatgaagtttgatggttcgcgtacta

SEQ ID NO: 108258 - DNA, 202 bp, Glycine max
ttcttgttcctcaattggggccaggcaccagccccactatctgaggacctactcggttcaaaaacaaaatatagttttggttttcaattataattacaaaatatttcactttattttcagtttttcattccaattcctatttccaaacattcatgaaaaaaattgcaccagccacctccgataaactttaaacaaaaaaaaa

SEQ ID NO: 108259 - DNA, 203 bp, Glycine max
tcttttttctcgacatatgatgcgcccgaatcggacatccgtgtgaaaagttatgaccatttaaatttcgcgagagttttcgatgtttaatttcgagcgtatcgatatattataagcctgagtcgtacatccgtgtgaaatgttatgaccatttgaatttctcaagagcttctgttgttcaatttcgagcctctcgacatatt

SEQ ID NO: 108260 - DNA, 200 bp, Glycine max
ttctttgcgagagtcctcacggagaacgttacggaaacgtttcagaagcgccttggctaagatttacttcacggaaacaatttgtccaagcaaatgctcaagaaagagaactgcctaaggggctggaccctcaccttcttcacttgctcccctatttatagcaaaataagggcaggaggttgtcgcccaactcgcccagg

SEQ ID NO: 108261 - DNA, 204 bp, Glycine max
ttatttttttaccaggagaaggggggttcagctttgagctcgttaatgcaggtttgagcacgaaggagttctgagaggagaacagagtcaccacctattaatttggtttctctaagaagcttccggataggagtgttggcgcgtttggtaccctcttgctctgtaagcttgacacgtggcggagaagattgaagctgaggacgg

SEQ ID NO: 108262 - DNA, 202 bp, Glycine max
ttttttttgtacattgaaggccccactaaaagctagcacagatgttgggcttttctcaacataatgaccttaatcgccaagtctgggttatttcaaatagcaagcaccaattaatataaattatacacagagaagaaaaaaatagcactggaattaattgatagaaaaactcacacaacaccatactatgataaggtagcca

SEQ ID NO: 108263 - DNA, 201 bp, Glycine max
ttttcttcttattttcatcagatgaagatgaatctgtggccacatcatggactcctctaaggacaatagcatcatttcttgcattgaattgttgggagttggaagacatcttctcaatcagattcctagccttaacaggagtcatatcaccaagagctccaccactagcagcatcaatcatactcctctccatgttgctat

SEQ ID NO: 108264 - DNA, 204 bp, Glycine max
ttgtttttcttcattaagaggcttcctccagaagcttcattaagagacttctagcatactccatacatcttttcaaagatcccaacggtcagatcatggacaagtgtcttgtgaagttggagaccaaattttgaaaagatccaacgattaaagaaggctgggcagaatttttaccgaggcagcttcatgtagctttctctagaa

SEQ ID NO: 108265 - DNA, 204 bp, Glycine max
ttcttctatagaaggttctttcctaatttttctacaattgcatctcctctcaatgagctggtgaagaagaatgtggcatttacctggggtgaaaaacaagagcaagcctttgctttgctaaaagaaaaacttactaaggcacctgttctagctcattctgactttcctaaaacttttgagctagaatgtgatgcctctggagtg

SEQ ID NO: 108266 - DNA, 202 bp, Glycine max
ttcttctgtcaatatcccattcattgagacatttgataatcacttctggaagtaagtcttcagtatgagaagaatcaagtgtgacgaagttaaggattttcttttgtaatgtccattcctcatcaatataatgagcagataaacacaaatacaaggaattttctgttgaagaccacatttcaatagatagattaatcctacc

SEQ ID NO: 108267 - DNA, 203 bp, Glycine max
ttctttttaagggaacaattatgcatgaattcatagatgagagctttcttgtgtccttccaaacagaatcaaagaagtatgactacattaacatgagaagttctactgatactagcaacctcattgacaaagtgtttgccatttcctttggatgcattctatcattacagccacagggcaaccgctgtgtagctctccttagt

SEQ ID NO: 108268 - DNA, 192 bp, Glycine max
caaaaagggtggatatttcatggacattcctctccgtgctttaaattaggtgtatgtggtactatcgccttctatggctgcatttcattatttttgaattccctgacaaaaaccattgctttattataggtgaactgctttgtcttgtatgtgagaaacaaatgataaggggggaaccttgttagcaaccaa

SEQ ID NO: 108269 - DNA, 193 bp, Glycine max
atcttttatctataggagggagaattaaacaagccaaaaacaattgcaccttccaagccacgaagaattctttttgcggcctttatatgaggagaggtacgatcctccttaatgcgacacacaactcccaccgcatatataatatcgggccttgtattggttaaatagcttagactccccacaagactcttga

SEQ ID NO: 108270 - DNA, 204 bp, Glycine max
tcattctttaggttgctcattgactccagatagttgcaaagaaggacagagatctgtatggtgatttgcagaagaacatagaccacagactcttgcaacaggtgcagatgcagatttctgattcatggcaagctgagttactaggttgaccaaggcatcaagttttccctcaagctttttattttcagtagatgaagatgaatc

SEQ ID NO: 108271 - DNA, 201 bp, Glycine max
ttcttatgcacggaaaatgtaattatgaaattgagatgcccgaagaaacaccatttcctagttaaccatgcattaggtaccatgttcaattattttgtttttaagtgaaacgggtttatgatcccaacatggttggctcgtggtgcctaacacatgaaactaagaatgtagtgtgaagtttcacgcttccccctttttttg

SEQ ID NO: 108272 - DNA, 203 bp, Glycine max
  unsure (1)..(203): unsure at all n locations
ttaatcttttataagncagagggggataatgatactccacaaacctttgacaaaaatttggctaacatagcaccttgtggtgacaaggagactgttttcgagccaagtgacaatgttatccactctgtcaaactccatcctacccatgggtttatatgggagagggaggaaattgatgctgtttcctctgaagatggagtcaa

SEQ ID NO: 108273 - DNA, 203 bp, Glycine max
tcttttttatgctgaaaatatgttgaatggacctcctcaacctcagcagcgaagtcaaccacaagagagcagttatgacctctccagcggcagatacaatcctggatggaggaatcaccctaacctcagatggtccagccctgagcaacaacaacagcagcctgctccttccttccaaaatgctgctggcccaagcagaccat

SEQ ID NO: 108274 - DNA, 201 bp, Glycine max
tctttcttaagacctatgaacatttctattttagggtacagttaacgtttacctaaaaaataaaaacaacatttgacgttgatccactggttccatgatcagttccactcgttacatggtacgaggctttcagtcaattgtacggacgagcgtatatgagagttacttaagcggccgtacaaagaattgccgtgatatatt

SEQ ID NO: 108275 - DNA, 205 bp, Glycine max
tttttttttttagcaaacatgcttatctattacttgttgctatttaatatgaacttgactaatttaatttagagtggtgtatttcaatgttcagtatattggttctgttcatatattttacattgtaatatttaaatagttatatgtttgttattgttaaattagacataagtggctgtacatttttgtgtacatatcatatcac

SEQ ID NO: 108276 - DNA, 204 bp, Glycine max
tttttttttttcatgatgaatcaagattgattcaaaaatgttttgatgataacaaaggtgatgacaaaaagctcaaagttcaattcatgataatcaaagaatgagttcaagatgttcaagatgtttaagatgttcaagattgaatcaagaacacttcaaggttcaagaggaaatttgattccaagaatcaagaatcaagattca

SEQ ID NO: 108277 - DNA, 158 bp, Glycine max
ggaacggaggttgatgaatccataatactgtcctgccactggctaccatatgactcaaagaaaaaatagtcccggaaaggtaaaagttaaaagaaaaatcctaacctcattaaagaaagagaaagcgacaataaaaagaggggaaaactagaagagac

SEQ ID NO: 108278 - DNA, 203 bp, Glycine max
ttcttgctaacccatggaagctcctaatatctcccacactttttggggtgggccattcttggatggccttgattttctcagggtccacttggaccccatttctaccaactacaaaacctaagaaaactatattatctacacaaaaggtacacttctctatatttgcatagagggtgtttttcctaaggactgaaagaacttgt

SEQ ID NO: 108279 - DNA, 203 bp, Glycine max
ttcttttgctgcaaacatctacaatagacctcctcaacctcagcagcaaaatcaactacaacagaacaattatgacctctccagcaacagatacaattccggatggaggaatcaccctaatctcaaatgatctagccctcaacaagaacaacagcagcctgctccttccttccaaaatgttgctagtccaagtagaccatacg

SEQ ID NO: 108280 - DNA, 201 bp, Glycine max
ttcttattttcatatctccctacgaacgttcacttgcacaagacatcctattaactaagaaaaatgcacccatatacaatcaaggtagcttcattacctagattatttacatgtacttccaaggtgtatttgttatttacatcacacacgcctccttggctaaatttacatacatgcatactcaaagcatttcggggtacc

SEQ ID NO: 108281 - DNA, 203 bp, Glycine max
  unsure (1)..(203): unsure at all n locations
tcattttttagncagtagcctatttcgaggtatgtatgtgattctgaaacttatgtcctcatttattacattgttgcttgatatgtagcctagagatttccaaataatagcagttagttactatttagagagtatagcttaaataggaggttgagtagtgagtgggattcagctttgttagaaaaggttgtagtggcttggtt

SEQ ID NO: 108282 - DNA, 205 bp, Glycine max
tcattctttatgacgatgaaccaagccattttggtgatacctaaaaccccagtgattgattcaagactgcaagatcaagctttatgaattcaattcaagattcaggattcaagagaagaaatcaagatgcaacaaatcaagacttcatataggataagtattaaaagagtttttcaaaaaccaaatagcacagtttggttttaca

SEQ ID NO: 108283 - DNA, 202 bp, Glycine max
tcaatctttatatctataatatctagttgctcttaacctagtaaaagttgcagagaatcaatagatgatattgatagatcacttgcttgatttggaagttaaatgcaaggtggatggagaaaattcacttctgcactaacaattcctttcaaattttatgtgaaaatgcaaaaactgaaatttcacgaattcatgtgcagaa

SEQ ID NO: 108284 - DNA, 203 bp, Glycine max
tcattctttttatccaaagcaattcttggtggtgaagttccttcttccttggcttattccctaatggatggtgcctcccttctcctcttctcctttgccttccgctgcatctccatggtgaaaaaatcaccattaaaagaccccattgaagctcaaagatccagcctccatagaagccccacaagcaagctttcatcaagtgt

SEQ ID NO: 108285 - DNA, 202 bp, Glycine max
ttattcttgtacaataagtaactaattttgttttttacaatatgaagtaactaactaactaaaaaacactaatatatagagtgataaattagaagtgatgtatgggccttgattaggcccatctaatctaactaattacacaaaacaaagcccaattattcaagtgcagaggttttgacttccaagcttaatttgaccctcg

SEQ ID NO: 108286 - DNA, 206 bp, Glycine max
  unsure (1)..(206): unsure at all n locations
ttttttttttttgctngnggagcttttatggaggttggatctttgagcttcaatgaggtccttcaatggtgattttccaccatggagatgcagttgaaggaaaaggagaagaggagaaaggaggcaccatccactagggaataagccatggaagaaggagcttcgccaccaagaatgtgccttggataagaagcttggagaggatg

SEQ ID NO: 108287 - DNA, 204 bp, Glycine max
tttgtatttttgccacccagctcgcccaggcgagcaaggttgcttcctccagaagcaacagccttctggaggaatcttctggagggcccaagtgggcctggttgctatttgcacccccatttttgataaatacaccccctgtcttttttggtgattcttttttcgtaaagttacggaaactcacggatttcgcaacgatacttg

SEQ ID NO: 108288 - DNA, 204 bp, Glycine max
ttctttactaatcaaacttccagtcgtcaacaatggttccctcaaaaggtgcaccttgactaggtaactgggttaataaaaagaagacagattcatcaataatcatagggataccgtgcacctcagaaatcaaagttccatcctgaattttcaaatttgagtaaaagactcgtacaagttcaggatagtaaggtagtttcaaag

SEQ ID NO: 108289 - DNA, 203 bp, Glycine max
ttttttttaagattggctaaaattttgttaaaacataagcacttagacaatgaaggaaagctggagttgctgcacatgctgtctaacattatgtcaaggaatcagatcgggctgcacaatgcacaaggcaagataaaatgtcaaatgaagaattgaagctgcaggatccacgatgtcggatacaatgtccaggacatcctgcc

SEQ ID NO: 108290 - DNA, 203 bp, Glycine max
ttttttttttgtgtccaagactagttttgcaatattatgtctaacaaggacatgaaaatttattggagtcttaaccgttgatacctatgattttgacactctcttgactaaactttatacatgaattatctttttgaatttggggttcatattgttttgttccaggattaagatgataattcattcaactaatatccctttcc

SEQ ID NO: 108291 - DNA, 203 bp, Glycine max
ttcttttttgttattagttgttactgagtttttcctctattgggcaagccaaggactaataatatcatctcaagtctcaactatgtttaggaaaattatcctactattaaatttattttttcctttcacaccttgcaactcatttatttttatatcaaaactagacactcaccatatttttataatgttcaacttctagaggt

SEQ ID NO: 108292 - DNA, 201 bp, Glycine max
ttttttgattaaggatacagctacctgtagcaaaattgtaagcccacatccttaactttaataatgttatttattttttcattctgatgttgcaaatcatgcaattgaatatattgtacttactttgacaacaaccatctaaatgtctttttgttttatctattttcacattttgtagaacttccgcaaagagtttgctgc

SEQ ID NO: 108293 - DNA, 204 bp, Glycine max
tctttctttgaacaatatacttggccttcatttaactgtctttgggcttggcggccacactcaacaaagtactttcgacacctactgtacgttgatttcaccaatgttgttatgggaatgttgcgacaatcctttaaaaccttattgatacattctgagaggttcgttgtcatgtggccatatcgatgtccttctctatcgtaa

SEQ ID NO: 108294 - DNA, 204 bp, Glycine max
tttttctttaacacatgaatatatattttgcaggtatcacaagtttaaatgtggtggaatacaacttgaagtctcatattagataataataagaaatttaaataacatataaataaaaatatttaaattttaaggttttgaattataataccatgtccaattcatttatgtggttgttcatccattgataaaaatctctcactt

SEQ ID NO: 108295 - DNA, 200 bp, Glycine max
tttttttcctgctcgtgcaaggcaccgatcgccatattttcctgcatgccctcctcattcttgcttctaatttcaattttcaacaatttacatatccactaacacatcacacattaataaaactatgcctattgatgatatataccttgagtgaccttatgaaatctgagttgtcaaatttagttctaactcttctctct

SEQ ID NO: 108296 - DNA, 198 bp, Glycine max
  unsure (1)..(198): unsure at all n locations
tttttattgttgnttgaattttctggggtctttcgtttttattttcgagcgtctcgatatattatgggactcaatcagacatccgagaagaaagttattgatgtttgaatttgctgggagcttccatttcttttttcgagcgtcttgatatattacgggactcaatcggacatccgagtaaaaagttattgtcatttg

SEQ ID NO: 108297 - DNA, 205 bp, Glycine max
tttgcatgcttgccgccacggagttttccgactatgctcttgtgtggtggaacaagctacaaaaggagagagcaagaaatgaagagccaatggttgatacatggacggagatgaaaaagatcatgaggaagcggtatgtgccggctagttactcaagggacttgaaattcaagctccaaaaactaacccaaggcaacaagggggt

SEQ ID NO: 108298 - DNA, 203 bp, Glycine max
ttcttttttgatgattgttacgatttttaaccacaaaacagtttatacctgataagattgtaaattaatagttcaggaaaatatagtgttcttatataggttaaatccccgagtaatataactggttgcatattaagtgaaaaacagtaagatggaaactttggaacccagctaccccatgtatgctttatgactcttaatgg

SEQ ID NO: 108299 - DNA, 203 bp, Glycine max
ttctttgaatgctctattcaatggagttgacaagaatatcttcagactgatcaacacatgcacagtggccaaggatgcatgggagatcctgaaaaccactcatgaaggaacctccaaggtgaagatgtccagattgcaactattggctacaaaattcgaaaatctgaagatgaaggaggaagaatgtattcatgacttccaca

SEQ ID NO: 108300 - DNA, 200 bp, Glycine max
  unsure (1)..(200): unsure at all n locations
ttcttttttaacggcnggacatgacatatgtcaaggcgtgggtttggccagcggtttctggataaaaggggatgtcccacattttttccatgacacaaatgcaataatgatgattaggaaattttatgcaaaacaagtcatgcatgcacctatggggacactcaagtgtcgaaatttttttggtcatgtgatgctagggc

SEQ ID NO: 108301 - DNA, 233 bp, Glycine max
gggatccatcctattcaacctgcctgcatgcattctttttgtgctcattgactccggattgctgcaaagaatgaccgatctctgtatggagatctacagaaaaacatgtaccacagcactcctgcaacatatgcagatggagatttctgcttcatggcaagctgagttactaggttgaccaaggcatctagattttcctcaagcttttgattttcagcggatgaagatgaatc

SEQ ID NO: 108302 - DNA, 203 bp, Glycine max
tgtcttttgcgcatatttccttacgaacattcactcgcacaagatattcttctaactaagaaaaatgcacccatgcacaatcaaggcactttcgttacctacattatttgtatgtacttccaaggtgtactacctacaccacatgcatttccttggctaaatttacatacatgcatgctcaaagcctcttggctaccaaaagt

SEQ ID NO: 108303 - DNA, 200 bp, Glycine max
tgcttgaaatgttatgaccatttgaatttctcgagggctttcgatgtttaatttcgagcgtatgaatatattataagcctgaatcggacctcagtgtgaaaagttatgaccatttgaatttctcgagagcttccgttgttcaatttcgagcgtctctgtatgggatgctcccgaatcggacatccgagtgaaaagttttg

SEQ ID NO: 108304 - DNA, 202 bp, Glycine max
tttttcttagacaacttctgtaatcgattatggtaaggttgtaattgattaaactgatacgatatataactctacaagttttagaaaacttgtgtaattgattacgataaggttgtaatcgattaaaacaaagagttttgtcttctgaagaaaattttctaacttagaaaattttcttctcacttactaatgatgatgcatg

SEQ ID NO: 108305 - DNA, 200 bp, Glycine max
tttttgtctcagcgtttatgcgagacggagaccaacatgctagctatcatcgccaagtaccaagaagagttgggtctagccacggcccacgagcatagaatcacggatgagtatgcccaagtatatgcggaaaaagaggctagaggaagggtgatcgactctttacaccaagaggcaaccatgtggatggatcggtttgc

SEQ ID NO: 108306 - DNA, 200 bp, Glycine max
ttcttgtaagatacaaagaaagcatgcttctataaaaattatgagccagatagatcaatgaaggggacttgaattccaatttttgtcacttgtgtttcaaaggcagaaaatgaaagaatcaaattgttgtcattaattctaaccatggttagattgaaggagtagaagctataaagaatgaggttttggtgcactttgaa

SEQ ID NO: 108307 - DNA, 199 bp, Glycine max
tttttggaacacatgataaatatgagtttggtttgatcattgactttgtcatatcaccaataataatcttatcatcctcagttagtcgaccaacatatggatgtccagtaaatgacttagtcaacgcatgataatgagtctcacatattaagttgaccatcaatacttcacctcccaagattggttttgttcgcagctt

SEQ ID NO: 108308 - DNA, 200 bp, Glycine max
tttttcttgaaggacaacttggggccttggtcaacctattaactcctcttgccatggatctgaaatctgcacctggtgcaaaacttcgtgatcaatcctctgctccaaatcaccatacaaatgttcgtgcttcttatcaacaacctgtcgtcagtgaacaacctgaagcttattctagcgacattaataatataccccct

SEQ ID NO: 108309 - DNA, 204 bp, Glycine max
  unsure (1)..(204): unsure at all n locations
ttcttggtttgtagncatacctcacaaaatatatgtatgtgtgtttaggtagtgaaaataccttagatatgcatgtatatagcaaaaaaaatacttcacaaaatatatatacgtatgtttaggtagcaaaataccttagatatgcatgtatatagcaaaaatacctcacaaaatatatgtatgtatgtttaggtaccaagatac

SEQ ID NO: 108310 - DNA, 212 bp, Glycine max
tttctgtctttatatcgacacgctcaaaattaaacatccgaaacactctcgagaaattcaagaggtccgtaactgtttcacacggtatgtccgattacggcgcctaacctgtcgagaggctcaaaacagaacaccggaagcttgttgagaaatcggaaatggccataacttattcacacggatgtctcgattcatgcccatcacatgtcgag

SEQ ID NO: 108311 - DNA, 202 bp, Glycine max
atctatttttggaacgcgaacaagcaatcaactcctctttcagaaccatgctatgtggtcgcgactggtccctttcttcccttcgcaacttgagttcattattgctaccccatagagctccgagaaatttggtccggccatactcttccttgcgagccctcttggtctcttgttcaagggctcttgcggcaatggcattctc

SEQ ID NO: 108312 - DNA, 201 bp, Glycine max
ttttttttggtgctgagaagaaatcacatgtttgtcatcaccaaaaagggggagaatgtgaatgtatgtatacatgattttgatgatgtcaaaagaagaatcacacaaggctcattttgcttcaagccttgcctcacaatgaaaggtttcaagtcattcaaggcacatgtaatcgattaccaatacatgtaatcgattacc

SEQ ID NO: 108313 - DNA, 202 bp, Glycine max
atcttcactctcacttccgatctttgattcgtgtgaagacacatcaactttaaactgagcttgaaagtgttgctttgacaaatgggtcactgtcaaaatatcttcttcacattcaaacacttgataattctctggatccgattagtgtttccattactctttaagagcatctcgatgttatcctcgaaggacttcctaaggg

SEQ ID NO: 108314 - DNA, 201 bp, Glycine max
ttcttagttcagcttatcatcctcaaacagatggtcagactgaacaaaccattcacactctagaagatctacttcaggcgtgtattatagagcagcaaggaagctggatggattgtttgccattgattgaatttacttacaacaacagctaccaagccagtataggtatggctccttttgaagctctatatggacgaaagg

SEQ ID NO: 108315 - DNA, 200 bp, Glycine max
atcttacccctatggcttgcctccggacttcgctccccgtgccgcgccggaagatttaagccaagcccctaccttcgaggggcaactcccaccttatgatgactatcccgggcaagatgatgaggaaggagatacccatctcggtcccctgctccacctcaaagatccgtcccccccatgaactaccccaaccaaacata

SEQ ID NO: 108316 - DNA, 208 bp, Glycine max
  unsure (1)..(208): unsure at all n locations
gtaccgggatcttaatcgacgcagcttttttttgtcggaaaaattttctaaaaaaaaattggcacantcatgataagaaactgtaggtgataaaattattcatttttaaaaatagtcgttattaaatagacaggtaatataataacgagaatattacttttgagggttgattgttatattatggatataatcaccatctaattgattt

SEQ ID NO: 108317 - DNA, 199 bp, Glycine max
  unsure (1)..(199): unsure at all n locations
ttttttngaggttgngttgaatgcattaaaggtaaacataccaaaagcaagaaattaggtgcatatagagctacaattttcttggaattgatacatacagacatttgttggccatttcatacaccttcatggaatggtcaacaatattttataccattcatagacgattactctagatacacatacttgtttcttatac

SEQ ID NO: 108318 - DNA, 199 bp, Glycine max
ttgtttgcattgggaattgcgaaagccccactccatcattaggattagtacctgacatctcaaacaaacaaatcaaacgtaacaagacaattatagttgttgtttgaatacctcacccactcaagtgtatcacacaattatggcttttctctaatgaaacactcttgccttttaccactctaattccccttgagttctt

SEQ ID NO: 108319 - DNA, 203 bp, Glycine max
ttctgtcttccagctcgcccaggcgagcaaggttgcttcctccagaagcaacagccttctggaggaaccttctggaaggcccaagtgggccaaattgctatttgcatcccccttttttactaaatgcaccccccttttctatttttttgtaattctttttccgtaacgttacgaaactttacgaatttcgcaacgatacttat

SEQ ID NO: 108320 - DNA, 202 bp, Glycine max
ttctatctaacaatgcaaatggtcataacttttcactcggaggcccgattcaggcgcataatatatcaagacgctcgaaaacgtacaacggaagctctcgagaaatccaaatggacataacttcaaactcggaggtccgattgaggcgcataatatatctacacactcaaaaaagaacaacggaacttctctaaaaattcaa

SEQ ID NO: 108321 - DNA, 202 bp, Glycine max
ttcttgtttttcccatcagcctagacgagcattgtgcaggctatggttgacacgttgtctaggatgagcatgatttatgtcccttcaagtagggtcaggtattggaatgccttctggttggggtctttgcatttgaccatcttgacccttctgactgttaggcaacacgtttgggagaggcctttcatttcactcaaagtta

SEQ ID NO: 108322 - DNA, 202 bp, Glycine max
tttttttttatcaactatgtgccgggttatggcaatcagttgagccggatatcttggagatcctccgatcatttaaatcgtgtcgctccttttggaaaaaagcccaggaaatctttgccaatgatatccaaagcttgtttgatgcaaccatgaaggttacagccctcaaacaaaccagtcatgacatgattgctcatgtggg

SEQ ID NO: 108323 - DNA, 214 bp, Glycine max
ctgcacgcatgcatttttttttgaacaaccccacctggttagggtgacgaaattgacaactgaatactgatctaacatgggtaatgctgccaccagactttccgtaagcccacgcgggccttgcacaaataggctgatctccaaaaaattccataaaaaactcaaaacggtgtgggctgttatgctcaatctcaactaacgctgcaatatctgt

SEQ ID NO: 108324 - DNA, 203 bp, Glycine max
  unsure (1)..(203): unsure at all n locations
tcagtttggtangaggtacttacccgttgaagaccgaagaaaacgaagaacgaacgatgaatcttgaaaaacggacgagaatcttagcgtaattactcacggaaacgttacggaaacgttacggaagcgcctcggcttggattttcttcacggaactaattttcctcagcaatttcgagggagaaagaagtgcctaaggggct

SEQ ID NO: 108325 - DNA, 204 bp, Glycine max
tcattctttcatcagcaaccataataaaaagctttctgttttccctcccgtggatgtagccttactcaaggtgaaccacgtaaatctgtttgtgtgttctttctctcttttcttctctttcaccttgctgcaaaactctgtgtgtatgacatagctttctgttgcatcttccgctgctgttcttgcttgttcttcatcacttcc

SEQ ID NO: 108326 - DNA, 161 bp, Glycine max
aagagcaggagggggggggaacccccttcccccaggggtaaacccaaaggggagggagccatcccctagccagccaaccaaggacaaaggcggaaccgcaaggcgggaaaaacaccaacgaaggacccaaaggaagcgcaaagacccagccgccaaaaaaa

SEQ ID NO: 108327 - DNA, 198 bp, Glycine max
taatcttgtccactcaatatggcgtggaatatagaaagtcatatacacattcaggaatttcaggaagctcatgtggtagatgtacatccactcaataaagcatgagtgtatatattggataaatggtgttatttattttctgagtagaaaacaaataaaaaactataggagaacagagcttgcataatagtaataata

SEQ ID NO: 108328 - DNA, 198 bp, Glycine max
ttgctttgagtcttacggatagcaaataagactttttcgaagtctcggctgaaagacgctgacatctccggggatggtgcagatgatgtcgttagtcactgcatgctatcaggctttgagtcttacggttagccaatgagaccttttcgcagtctcggctggaagacgctaacatcttcggggaaggtgcagatgatg

SEQ ID NO: 108329 - DNA, 204 bp, Glycine max
ttctttttataaaaaattgtaaccttaaaaatcaaaacaaaatgaaagagctctcctccacctacaaaactactcacacctaaaagattcacctaatatttaatcccaaaataataggagtttaatgcattacaaaagaatgagttggtaaacataatatatttagaaaatctctttaagaaaaggataatatatatatatata

SEQ ID NO: 108330 - DNA, 203 bp, Glycine max
ttctttttttgaaaaggccctcgcacattactatttggcccatgctgggaatgttacatgccaatctactgaccatagatgagacctcggaccacaccctatcggaaaggccttcctttaaaaaaaggtcgcaaacagcaaactactttcaagagcgatgactatccccttaacaaacacgggaatagacaacatgcgataac

SEQ ID NO: 108331 - DNA, 231 bp, Glycine max
  unsure (1)..(231): unsure at all n locations
gaggccccctatagaatctgcctgcatgcattctttcttcacancgacacttgcccgataaattcagccccctacctacagatcctattgcgaaataggtgccaaaataagccatcatgaatgtccgcttaaaccctaagaatgtgtttgtatcatcaaaacaaaccacacttgattccgataaagcctaacatatttgtttcacttgtaaattgggccaagcctttaaaa

SEQ ID NO: 108332 - DNA, 202 bp, Glycine max
  unsure (1)..(202): unsure at all n locations
ttttttttttttgagnagagaaagtgtagaagggtgaaacttcctgcttttattcggtgaccacagagtggtacctggagatatgtcgcgggggtcaggagaccttggggacgtcaggtggggtgctattgcccaaaaccaagcttgaccaatcccgacccaacccaggcatagtcagtcagtgagaacctgtgatgtacct

SEQ ID NO: 108333 - DNA, 204 bp, Glycine max
tcattcttccttgagaagctcgagcttagcaacacatccccctctaataactatgctcacctcctcaagaagagaggctagagcttagctacacacccctataatagctaagcgcacccccctgacaaaatacatgaaaatacaaaaaaaaagtccctactacaaagactactcaaaatgccctgaaatacaaggctaaaaccc

SEQ ID NO: 108334 - DNA, 200 bp, Glycine max
tttattcttgaaatgaggaagtctagaagggtgaaacttcctgcttttattcgtcgaccacagagtggtgcttggagatatgtcgcgggggtcaagagaccttggggacgtcaggtggggtgctattgcccaaaaccaaacttgaccaatcccgacccaacccgagcatagtcggtcaatgacaacctgtgatgtaccta

SEQ ID NO: 108335 - DNA, 199 bp, Glycine max
ttcttgcacttcttcactttccacaagaatttcagcctctttcctacttagacttctcagctttgggagccaggctatcccttgcattctagacttcaaccacttgtgatagtcactgatgacgccattgctacctcccctaagctccttatcttttcttcccactctattccacgctttacagattttgtgaagtatc

SEQ ID NO: 108336 - DNA, 201 bp, Glycine max
ttgtttttttttggatacaagattagaaatatttttgagagcttttctattagaaaaagttctatattttctgttaaaaaaattctcaaaaacaccttatattcaaagaggcctaacatgtgattaaactacttacccacttgtgaacttaccgcgcagtttggaatgggaagcgcgttggaaacgctatgtggacaagct

SEQ ID NO: 108337 - DNA, 394 bp, Glycine max
gaaccctatgagaccaaggaaagcgcgtaattccctgatcgtcgccggggttggctttttcaccatggcctgaatctttgatggttgataactgctaaataattgtgaattaatagtagttaaatagtccaaatttggctttaaaattaattatttaccatttatttataattaaaagttgaaaaaattaattaaattgaatttctggttgcagatacgaaaaatgagggtacattaagcaaaaatggcaacagaaatgaagagaaagaaggaattctgaagtaggcctagcccaacagtggcgctaagcgcgcatcatgcgctaagcgagcaaccaactgcaggcgctaagcgtggcgttaagcacgaatgagcagaataccgtacgcgcact

SEQ ID NO: 108338 - DNA, 232 bp, Glycine max
atctttgctgatataatgccatgctatgcatgttagattcacgatagtgtattgatctgaagtattctatgttttgctttatacctctgtatttgagatatcatgcattttttgttatctgctgtcatctactataaaacagttgaatggagcctggatatgtttacgctctaactctgtgcttgcacacaagtgatatagaaacgctggatcacatctctcagcccataaa

SEQ ID NO: 108339 - DNA, 440 bp, Glycine max
  unsure (1)..(440): unsure at all n locations
gatactctgaggcgtgctgacgcatgcgggttgctgngcatcggaataattctcactnttaggttggaaggaggannaatggtggaagttctataatgctggaaggaagtgggttgaagagaaccagtggattcgaattgttaatatttatgcaccttgtgacttagctgggaagaggaccttgtggaatgatttgaggcatctaaggcttgccaccccactggtctgtggtgcttcctaggggactttaatactgtcaggagccaggaggagagaataagcttatcccagaggagtgtggtctctgctgacagttcacaattcaatgattggatttctgagctggatcttcatgatattagatgcctcggaagccaatttacttggtttaggcccaatggcagtgccaagagtaggttggacagattcttggggtctga

SEQ ID NO: 108340 - DNA, 352 bp, Glycine max
  unsure (1)..(352): unsure at all n locations
ggacttgtatgatctgatctgagcattattggatgacgggaagtgtgtatttcataatctgctcttatgcagaattntgctgtccaaataggtgcaaccacgattttatgcttggtgcacaaaatgcttgtgtgtggttggttgtggaaagagtattacagaatgagttctggatgtctgctagtagatcctaacggtcaaaatgtatgcttatgcactatagacttccagtaaaatcttggagtcgatccaacggtctacgaataggatcaaaggaattgctactgtgatctttaagtgagaaaagctgtgattcggttggtgttatggagacgtttctgcctatgctctg

SEQ ID NO: 108341 - DNA, 378 bp, Glycine max
taattagggaaccttggacaaatgaaccttactacgattatcttgtgcgactaatatataatctaataacatgaaggaatggcattacatgacttccggacaatactttttcacaaacataattacaagcggtgcagaaatcaataaattgtgttatggcctttaagcaaagtaatactcaacattttcgactgcataatattccacagccaaagaatagcattaagatgaccaaagagatcaactctcaagtgcatagtgatctatctgagaactgctaaccccatgtttggttatgcttccaatcctccctgacctgtgtatgtttttggatccacattcaaatattatcgatctctttacatcttggacgtgaat

SEQ ID NO: 108342 - DNA, 328 bp, Glycine max
  unsure (1)..(328): unsure at all n locations
agagaagatcacacaaccaagttctgagggaactcngttttctgaaccatcttcagtatttccagcagacttgatggaatccgacgatggtgcatctgaagcacatatcatggcagacgagcaaccacaaagggttactcttgatgattactccagctctaccatgccgcaattcttcacaagcattgcgcggccgttagtccaagctcacaacatcacatatccatattccttgatcaagctgatccaaggaaatttgtttcatggtttgcccaatgaagacccttatgcacaccntgcaacatacatagaaatctacaatacagtg

SEQ ID NO: 108343 - DNA, 360 bp, Glycine max
tcatttgaagatttctcttataaagctattattcttagaagagcaacgataataatctttaaaattttgtattataagaaaattgtaaagacttggtgatttccctctattaaaaataaatgaaataaactttattagaattatattgtttaaaaaaatataaatttaaatactttataattttattaaacatttttttctatttatacaagaataaattggattatacaaatcatatattatatttaaaactaaccatatatatttgaaattcaatttaaattaggtctatattaacaaatataataacactaattcagcacataattattaagtcgattaattcaaataataataacc

SEQ ID NO: 108344 - DNA, 244 bp, Glycine max
  unsure (1)..(244): unsure at all n locations
tcttatagttatattntattatcgatcatgaatgctatgactcacgatangattcgatccgtgattcggaaaatgggtcttccgcattcacaattgtatccncaatcaactaccttatatgattaactgtctncaaccccagtctctanatgattataggcccatctctctcattgctgcatgtataaagtatatcacaactcctggcagatgggtgaggattctgctggatgagttaattgat

SEQ ID NO: 108345 - DNA, 346 bp, Glycine max
  unsure (1)..(346): unsure at all n locations
ttnattacctaggcgtaacagaaaatacttataacattaccaaatagccataaattgggagagttcaataccatttataccaatcttatacacaaaagttaggtattttcactgactaacaacctcccccaaatttacagttgtcgcttatcctcaagcaaaaagagaatagctcacttgtcctcaagtgacaatgacatgcagtgactatgtacaaaggtgtatgctacaaagtgactgattgcatgatatgagaatggagtaaaatgtcctcatcacatgtctttcacaaggtattgcaggtatcccaaagagaagaataaaatgttacctaaacagatagatg

SEQ ID NO: 108346 - DNA, 304 bp, Glycine max
ctgcgctttcttattatctatttaatgcaatgcccaattatatcgcttatttcccgtgctgtattggtatttgtatagccttatcatccatgcattaattttaggggttatacattgaaaaatgattatctcttaagaattggaaaggacatctcaacacatcattgctatggataccatgactttgacttgcctctgtctacatcttcatacttaatacaaattaatcattcacatcttgttaaggaatttgggagaaaaatagataaagtatacctcttatcggatcagggttgagtgcttt

SEQ ID NO: 108347 - DNA, 250 bp, Glycine max
  unsure (1)..(250): unsure at all n locations
tatatattgttgcgctaccaacaaaaggtggtctttggtctcatctctntgagctagaagatatgcacttacaagggttcttttatagttttccttgattcgagctgagaagatggcaccaccactcaagcatcttgctatagactggatgatcctgttgagggtgcgagatatagacatcgccctattcaagggtggttgatttatctctctttcaagcatcacgtttgagacatttaacaaaatgtta

SEQ ID NO: 108348 - DNA, 417 bp, Glycine max
  unsure (1)..(417): unsure at all n locations
ggtagagaatgcttcaatggagganaagatagagggagagattgagagaggggngnggggggcacgaaattgaaggaataaaagagggagagaagtggaactttgaagtatgtctcacaagactctcattcatcanagttacaactagtgttacacatgcttctatttatagactaggtagattccttgagaagctntcttgagaaaacttccttgagaagcttctttgagaaaacttccttgagaagctagaacttagctacacacacccctctcataactaagctcacctccttgagaagtttccttaagaagattcctaaagaagctagagattagctacacatacctctctaatagctaagctcacctncttgagatganaagctagagcttagctacacacctcctataata

SEQ ID NO: 108349 - DNA, 316 bp, Glycine max
tactccatacatcttttcaaagaacccaaccgtcaaatcatggaccagtgtcttgtgaagtttgagaccaaattttgaaaagatccaacgatttaagaaggctgggcagaatttttaccgaggcagcttcatgtagcttttctctaaaagcttcattaagaggctttctctagaagcttcctcgtggcttctttgagaagctagatccttatctatccacacccctctattaactaaattaacttccttaaaaataattacggatgaaaataacgccacaaattatctaacatctaaccataatactaataatata

SEQ ID NO: 108350 - DNA, 334 bp, Glycine max
  unsure (1)..(334): unsure at all n locations
ctcagcttcagttggatacaggtgatcctcccagccaactctcttgtaaaaatgcatcaagagcctctcgtctctggagtatgccctcatcttctgacagtatatnnttaggtggttcttatggaaagtagtccctttgtacttatcgaaatctggcaccttgaacttcggcgggatgaccacatcagacacttgacacaactccaccatgtcggcgaacgggtaatcaccaatccattcgatggcccttagcctctcctcgatgagatcgcaacttcttctttcttccaccatcggaggcagtcttcctactgagaagtgcagaggttgtaac

SEQ ID NO: 108351 - DNA, 232 bp, Glycine max
  unsure (1)..(232): unsure at all n locations
tatgaagaggatgacggaggaacgacgaatgacagatattaagagagaactaatcatagaagatatgtaggtacgcaaagagaggataggattganggagtgaacgtaaaaaccctacttttaaagggacttatgatccagaagtgtatcttgagtgggagatgaaggttgagcaagtctttgctggctacaaatataatgaacagcaaaatatcaaatggcctccctggag

SEQ ID NO: 108352 - DNA, 356 bp, Glycine max
cttttggaatggccaatcctcatcaatattacgagcagatcaacacaaagtcacggaattttctgttgaacaccacatttcaatagatagaatactcctaccatgtaggctgcttatcatatgaaacaacttctctttctacctcctgcagatatcgatacaagaaatctctacatcactgtttggcatgaactcaaaaagaggctggaggttcatcacaaagaccttgaatgctaccttgtcaaccaagctcactgggtatccatgtaatatggccatgcgcgcaagatcaaagtgacatctttgctgatcaaagttactacttccaaagataatgattgcatcttctctatgct

SEQ ID NO: 108353 - DNA, 279 bp, Glycine max
ctacctcacatagacttatttggtccctctacaactatgactttgagtggcaactattatggcttcaatatagtacgtgaatacgcgacgttcacatgaactatgtttttgaacaccaaaaatgaagctattgatgctcttcacagacgtgccattgtgattcacaacgaatatggacttaacattgtttcacttagaagtgatcttggaggtgaactccataatgagtctattgaagaactatgtattggtcaaatatatgttgatgatattatatct

SEQ ID NO: 108354 - DNA, 364 bp, Glycine max
ttcttcgcctcttaggggcattcattattttgatttcctgacaaaacattgtttattaaaagtgattgcttgtcttgatgtgagaacaaatgataagggggaccttgttgtaaccaaaggagaccacgttgatgtaagagaacatacaaaagagaatgaggtattagcaatagtacctcatttgttattatatttatggtttttgaagttgctcaaaattcaactagagtatatgccaagacacactgtacaatataatctacttgtaggtgtagtagataagttttttttttttggaaggcaaaaatatatatatattattataggcaaaaacagtacaagtggtactggataaaggaaatac

SEQ ID NO: 108355 - DNA, 273 bp, Glycine max
  unsure (1)..(273): unsure at all n locations
gatcatacacattactgtatcattaccgagagatttctaaatatctttcagcacatgttttacttggntctggaatggccatcanaggcttatatatatgtgactngagacacgaatttgctaagagtctttcagaacaaaaaggtcttatcttcttaaaaagcaaaatcgtnttatcctcttacaaattccttggccatnacacttgtgattcaataaggaattatttgagtgctcaacattgtcaatatgtctctttcaagagagattact

SEQ ID NO: 108356 - DNA, 401 bp, Glycine max
cctgtttttggacctcccacaagagtatggagtcagcaccacttttaacatttctgatttaactccttttgtaggtggagctgatattgacgaggaggaactaacagatttgaggtcaaatcctcttcaatgggaaggagatgatgcaattctccctaggaagggaccaatcactataaccatgagcaagaggctccaagaagattgggctagagctgctgaagaatgccctacgattctcatgaaccttaaggtagatttctgagcccatgggccaaggttgggtccaattatttctgtacatattagactaggatgtcattatatttggtccttgtatttagggctccatattgtacgtagggtaccctacaaatatatgattcttcaccccttgtatt

SEQ ID NO: 108357 - DNA, 112 bp, Glycine max
tctgtctcttgaagctctacgaagcagcgctctatcaattcatctgtgtagtttctttcaaaggtgtctgttgttggaacaagtggccttggaataattaagaaggagggag

SEQ ID NO: 108358 - DNA, 208 bp, Glycine max
atctaatggagctaaattccctgctgaagaattacctcgcctacaagaagcactaaatagaagcagcagtgatcgaggcccgacccgaatcaaataaacatgaaaatgcagtaactaggaagtgatcctaggtccgttccccaccgagcagtgacaaaccaaatgttcataatatacttgcagtaacagtaatgattggggggggggg

SEQ ID NO: 108359 - DNA, 341 bp, Glycine max
  unsure (1)..(341): unsure at all n locations
agccaagctcctacttttgaggggcaactcccgccttatgacgactatctcgggcaagacgatgaggaagtagatacccatcttggccccctgctccacctcatagatccgttcccccatgaactaccccaaccgaacatagtccgccatatcccgacttcactcacacccgtaaaagaatctgttcccttcgcggaagataaggganagattgaggcactcgaagagaggttaagagcagtcgacggccttggcaattacccattctcggatttagcggatttatgctccgtgcccaatatcgtcatacgagattgtgagagtgggactgttcttatatg

SEQ ID NO: 108360 - DNA, 370 bp, Glycine max
  unsure (1)..(370): unsure at all n locations
atgttcattaatttgttttaagtgaaacgggtttatgatcccaacatggttggctcgtggtgcctaacacatgaaactaagaatgtagtgtgaagtttcacgcttcccctttttttgtttttgttttgtagaggaaaacgcaaggatgagcaaacatgaaaacaaatggtatgcaattttgcagatcaaaaagtttgttgaacgcatatgcatgatgatgccatgactcatgcagaatgtgaggctggaatatgataacggacaaatgcaggatatgtccattatgatgttatgaagagatgcttatgcgatgcatgatatgaatgcattttacggacacgagagcccggaanattatctcttcttactt

SEQ ID NO: 108361 - DNA, 397 bp, Glycine max
aacagtcttctagaggaatcttctggagggcccaagtgggcctatttgctgtttgcaccctcatttatactaaatacaacccccttgccctttattggtgattcttttttcggtaagttacgaaaacttaacggatttcgcaccgatactttgtttcttttcgtaacgtcacggaaccttgcggattacataatcatccccttttttgacttatggaatgttacggaacctcactaattgtgcaacgatgcttccttttgatttccgatgtgtcacggaaccttatggattgtgcatcaataccttcttttgatttccggcatgttccgaaacttcacaaaatgcctaatgatgggtgccaagcaccttacaatgaccatacaaaagttgcatgcta

SEQ ID NO: 108362 - DNA, 375 bp, Glycine max
catggagatgcagccgaagacccttgagaacatgtgataggatgcgccatccactatggaattatccatggtagaatgagcttcctcaccaagatgagccttggataacaagctttgtatcgatgcttttcctggacgaaaacaacgacggagataaagagagaggggggcgcatgatattgaacgaattaaagatgtccagaagtgagaactttaagtatgtctcacaagactctctttcatcaaagttacgacaagagttacacattcttctatttatatactaagtagcttacttgatagctttctttgagaaactttcttcagaagctgttttgagaaaacttccttgagaagctagagcttaacttctca

SEQ ID NO: 108363 - DNA, 134 bp, Glycine max
  unsure (1)..(134): unsure at all n locations
tacactgcngaccattatctttcacgaacgttgangaagtgccactaatcaagactctattactaacaattattctatcctacctgtctcaaccaacccttcagatgaatggcaatgaaagactcatgggtgcg

SEQ ID NO: 108364 - DNA, 310 bp, Glycine max
  unsure (1)..(310): unsure at all n locations
atatattttacaatcgtaatattaaatagctatatgtttggtattggtaaattagacataagtggctgtacatttttgtgtacatatcatatcacgactnttgttattgatgtaccaaatgagttgctactctattgtgattttataattatgtgataatttttcaccagtggtaatgttccattctttataacatgatggagaaaaaatngatattttatgtgataaatgagagggtggctgacatgggtgagttagttattggcactgctgagttcagaatgggaacaaaaggcataatatgtcttgc

SEQ ID NO: 108365 - DNA, 252 bp, Glycine max
  unsure (1)..(252): unsure at all n locations
tcatcctgcttggacgaatgagaanacttgggcaaatgaagagggtgagaatgaaagaganacccatgctgcgactgtcattcctacatgaccaaactttccaccagcccaacaatgtcattactcagccaatattagctcctctccttacccaccacccagttatccacagaggccatccctanatcaaccacanaacccacctaccacacaaccaatgctaaacaccacctttagcacaaaccanaacac

SEQ ID NO: 108366 - DNA, 309 bp, Glycine max
aatggtcatctaaagcataccaggtccttatattatccaatccttaaatttgagcttctaaggagcaaaacaatgtgtgtctcctagagaggacatcaacttccaccatttgttttctctttttgtatttgataacatatggaaattgctctaggtactctacccattttgcatgcctcttgttttacttgctttgccctctaatgtacttaagtgattgatgatcactatgaatgacaaattcctttgaaacaaagtaatgttcccaagtttggagggctcttattaaggcataaagctctttatcat

SEQ ID NO: 108367 - DNA, 413 bp, Glycine max
  unsure (1)..(413): unsure at all n locations
caatatctcttacacttttttgtgtgggccattcttttatttcttgattntctcaaggtccacttggaccccatttctaccaactacaaaacctaagaaaactatattatctacacaaaaggtacacttctctatatntgcatagagggtgtttttcctaaggactgaaagaaactgtctgagatgtcctaagtgatcatctagcctcctactatacactaaaatatcatcaaaataaacaactacaaatctacctatgaaatcccttaagacatgatgcataagcctcataaaggtgcttggtgcattagtgagcccaaaaggcatcactagccattcatacaaaccaaacttggtcttgaaagcagatttccactcatcacaccttttcatcctgatttggtgataaccac

SEQ ID NO: 108368 - DNA, 340 bp, Glycine max
  unsure (1)..(340): unsure at all n locations
tactaagcttctggtatgtgtgaaggcgggctcncttactttcttgcctatactgcgtagcttgaccactggtnttccttcccgctatgcttctcttcatatcctcctgagtgggcttatagcctaaaccatacttcccacgatttcctttggcatttatcaggctagttatgccaccgttgtctttgcccaaacccattccgggttcgtaaccgttccccaacataactcgggccatcattactgccgcatcggacaggcaaggctgcccaganaaggaatccacggaggaaatgcttaccacctcgaaagactggaaaacggtttctaatgactcctc

SEQ ID NO: 108369 - DNA, 413 bp, Glycine max
  unsure (1)..(413): unsure at all n locations
ctgcagctatgctgatacatctacaagaccttctatcctcattatctaaancaactacaacagaacaattatgacctctccagcaacagatacaattccggatggaggaatcaccctaatctcaaatgatctagccctcaacaagaacaacagcagcctgctccttccttccaaaatgttgctagtccaagtagaccatacgttcctcctccagtgcaacaacaacaacagcaacagcaacatctgatgcaatcctaccccccaagggcattggatagaagactccaagaagattgggccaaagatgcaagagaaggccctanggttctcatgagccttatggtagatttcgggcccatgggctaagtatgagcccacttatctttgtacatattagattaagggttcattaa

SEQ ID NO: 108370 - DNA, 235 bp, Glycine max
  unsure (1)..(235): unsure at all n locations
ctcctgatttccgactgggaaattggctagtggaggaacgccccgacatttacgcaacgagcataatgtaaacctttacggttttaaaagctctatagttgggcctaggctctagagttattcttttgttaaggctctgtgtcttttgtttttgaatntataatataaggatctttcttcatctgttcctacgtctctacccattctcatccatttgcatgtttacttctttatt

SEQ ID NO: 108371 - DNA, 337 bp, Glycine max
  unsure (1)..(337): unsure at all n locations
acactgtttatgtgtctactatcactgttatcatctccctctctgttattgaggtcgccacttgngctgccatactccttccacctttggcatattctttgaaggattcatgccctttntacccatgttctgtagttgcaacctatccgaagccatatcagaattgtagtaatactacctaccgaacgaaaccattatgttcttccaagaatggactcgagaaggttccaagttagtatattaggtggcagctgccccagtaagactttcttggaagaaatgtatcagtagtttctcgtcttttgcgtatgcccacatcttccaacaatacatcttt

SEQ ID NO: 108372 - DNA, 301 bp, Glycine max
tctttatacattgagcagatatgtacctaaagattttcacataatagcagttagttactatttagagagtatagcttaaataggaggttgagtagtgagcgggattcacctttgctagaaaagggttgtactggcttggtttgaaaccaataaaccccatcatcaaaaaacaattgaatatgatagatttattttaacttataggtacgtataggcttaaggcgaaattgtgtctataattatacatatatctataaaaatattgatttaatagattgaatacatgtattaagctttacca

SEQ ID NO: 108373 - DNA, 407 bp, Glycine max
  unsure (1)..(407): unsure at all n locations
cgtgtattttataagtggtaggttcatacttgaactctgtaaattcgtggaacttgggcgtttccaaaactaatgtggtcttgggttgagacaactacttaattctcgtgtgtttcttcttagtgatttaaactaaaggttgaattcattttagatctatatcttgttttgtgtaccaacaaaactttnttctcatcatctaataaagtctgtatgaaaaccttctttatctgtttatatttatctgcatcagacgataaacgtgtnttcagtcttagaanacatctaaaattctacaaacacacattaatccctcttcttatgctatttgcttctacaagaatgatatcatcgttttatctttatactttttcgagtacaatactcacattactctctcaaagcgt

SEQ ID NO: 108374 - DNA, 347 bp, Glycine max
cataaaccatgggaatctttctttcttttcttttcttctctttgctctctcttgtgacgggaattgaattcagaaggaaaattatcactatagagttctgaatggtccgctcacaaccctattcggagtcatttcttttctgatcacccatagccgttaaactatttcgctctttgctatattaaaatataccaaccctcattttacgtcagcacgtgaaaaatattaaatgccgtcgatgaactcttttcgataatatttgttaacactttctcttgacataacaagactaaacatgattgcattcgtcctcttaatctgttcaaaatttgggatgttcgcgaaat

SEQ ID NO: 108375 - DNA, 334 bp, Glycine max
  unsure (1)..(334): unsure at all n locations
ttctcacgtaccaagcttctaaagatgaaggttacaaaggctacagatcagttgttgaatctacaagcatagacgattcattggtatactatggcctacttcattttctgtccgctttattgtcaccaaacaaatattgataatgtttttgactcgacattatgaacttcttattgaagatgggttgtgctgctaggagccaccttatggtcaatacttatatatccatggcagaattataagaaagtaagtggggactaaggcatngtgccttatggtcatggcatacatggatgttatttctgaataacgacttgtgcattctgacatacct

SEQ ID NO: 108376 - DNA, 439 bp, Glycine max
  unsure (1)..(439): unsure at all n locations
agctggcacaatantaactaattttgntttttattatatgaagtaactaactaactaaaaaacactaatatatagagtgataaattagaagtgatgtatgggccttgattaggcccatctaatctaactaattacacaaaacaaagcccaattattcaagtgcagaggttttgacttccaagcttaatttgaccctcgagatggcagaattgaccaaagcttatttttaaaaaaattgaatatctttttctcaactttccagggactactcgcacattccattgggatttctgtagtgtcctctaggctctgcataacacatataggatcaagtaagcacaaaatcttaaatttagctacaattctcaattcaactcaatcatttgcctaagaccaaaactgagttaaggtgagaaaataaaggtcaaagagatgtaaa

SEQ ID NO: 108377 - DNA, 283 bp, Glycine max
  unsure (1)..(283): unsure at all n locations
tgtgcagcatctactgagctaagcgagcttcgctcgctaagctcttcgatacttagtggaattttgaagatcaagttctcanagggaagcactaatatcttgatcatgttgatgagcttcaagtagtcttttgaggcttttactcttaatagtacgtttgggacaacctttctaagcacctaagtatgcatgcacatatctaattntcaaagatgtttaacacagaaacacttaagaagaaatgttagtcatcacacaaatttcatcatccttacaattttca

SEQ ID NO: 108378 - DNA, 192 bp, Glycine max
  unsure (1)..(192): unsure at all n locations
agttcatcagacacgcacaaaagttgtgaagaatagcatgaactccctatgcacataggtcatgcttagcgaacttatgaccaaacccagaaaagatctccanatgtacaaacctgttaagtcataaggataggcttagcggttacacacatgctagagaggtacaagaactacacatcatgacaggacaaa

SEQ ID NO: 108379 - DNA, 304 bp, Glycine max
  unsure (1)..(304): unsure at all n locations
cagagtggtctctggagatatgtcacggtggtcaggagaaccttgggacgtcaggtggtgtgctattgtcccaaaccaagcttgaccaatcccgacccaacccgggcatagtcagtcagtgagaacctgtgatgtacctaagcaggcgagctccttgcagtcaacagataaaaggaacanagaccacaaagcaaggaggcttgtggtggctggccagttgtgaatattgtgtgatgtatgggttgtggcctctggtaatctactaccaacggtgggtaagtaatactaggcttcaaatgataca

SEQ ID NO: 108380 - DNA, 426 bp, Glycine max
  unsure (1)..(426): unsure at all n locations
ctgcagcttaaagatggctaaaattgtaaaattattcacttatacaatgaangaaagctggagttgctgcacatgctgtctaacattatgtcaaggaatcagatcgggctgcacaatgcacaaggcaagataaaatgtcaaatgaagaattgaagctgcaggatccacgatgtctgatacaatgtccaggacatcctgcccgaaatactggacacataaacctgttatatctttaacagattaatgtgcagttagcaacagatttaggcgatctatctttaggaacgaattaaaagataattaaagttcgaattacaaacttgaatagttcgttcagggattaaagattaaagataaaaactaaaagatcaaactctatcttttagatctttaagtgcagattntcaggagaatgatagatcttat

SEQ ID NO: 108381 - DNA, 347 bp, Glycine max
  unsure (1)..(347): unsure at all n locations
tactggnaggagcatatgatagctcactttgaatccattcatatagatcgatgtggtggaaaatggagattatatttcatatgatgatcagctgaatgaaattcctagaggtcaatgggcgaaagagcaaaaactcagattcctgctcaactccaaggctcgaaatgtgatgttgtgtgctctatcaaaggaggagtacatcaaggtacatagcttcagaagttccaaacaaatatgggacactctggttgtaacatacgatggaacgtcacaggtcaaaaggaataaactcaatctcttcactcgtgagtgagaaactctctctatggaagaaaggcaaaacatac

SEQ ID NO: 108382 - DNA, 172 bp, Glycine max
atggaaaaatattttacaatagagaaatatagtttagataagatatgatcttttgttcatcttctatttttaaacatattggtttcaccttatatttataagataaataacataagataagatattagttttatttaatatttatatcttatatgcaagatacaataagata

SEQ ID NO: 108383 - DNA, 374 bp, Glycine max
tcagctgggtaactgctgggaagctgctggcaaagcttattgacactaaattcttgaacttgatgctaataacaattatggatgtcagaaggaactattctcagttgagatgactaatcaattctcgtgtgctctcttttcttgtttaattgcaaagaattaatgaatttgctttaaatcttatatattctttgtttacaaagaacacaattttctattgttaacaagtctgatcaaaccttcttctctgtgtatgttatctatatcagacataacatgtttttctttataaacataatgttacaacacactgatcgtatgatatctttacaaatatgatgtctatcactggcttttttctattgggttgtcat

SEQ ID NO: 108384 - DNA, 320 bp, Glycine max
  unsure (1)..(320): unsure at all n locations
actgccacagaatanggttttcaactagcacttgattagttctgatggtatttgtgacccaactgacattacaaatccttatgattaacgatgtttttgttgtgctttcatgagcaaggagcatttcttacgtcttgtctttggtagattggcatgaaaccaacaaagtcgctcgcaaacactcatcataatacaaatatagatatacaattataagcatgtgcatgcacaccatctgattctctgtcgagaggaataattgttggataattgacagtgaaacaatctggagattttcttctattctcacgattattcat

SEQ ID NO: 108385 - DNA, 229 bp, Glycine max
  unsure (1)..(229): unsure at all n locations
ctacacctaacataatgttatggaatggtgcataagtgcaaactactctgtgaaaaagtgatgaccacatacactgaagataggaagacgttggaaacagtttaacaggcatgcaagcttcaacgaaggggatgaagttaaatatgtcttcgatgttgaagaaaacgaagattatgttcatgtaacanaagtatgagtacatgaataacgctatctatgtaactacatc

SEQ ID NO: 108386 - DNA, 344 bp, Glycine max
  unsure (1)..(344): unsure at all n locations
tctcacgaggtggaggttgtgccatgttcttagaatgtgcaaaatcagaatgctcagaatcagaatgctcaaaattataatgctcaagatcaggatgttcaaaatcaccaataacagaatgcacagattcaccagttatggaatgctcagaatgatcataaggtataaaatgatgcctaactaatctatgaaatgtcctatctatctcangatcaaagggttgtaagtcagatggattgcctctagtcatacactaccttcagcatgcacacagctagttgccttgtcatgtaaataaaggtgtacggttgaactacagctaccctcacatgatatccaaatga

SEQ ID NO: 108387 - DNA, 385 bp, Glycine max
  unsure (1)..(385): unsure at all n locations
cagtgggtgttcactctttttcatagacactgccattgtcactgtgtgtaaaagtaatatagtttactaatttgtcctctacttttttggtcaatgtcgtaaatagtggttaggtatgaagtgactgattgggttaaagaagaaatgattgggcacggtctgagcagaaagatggtccatctattgtctgtgttgctttttctagtttcttcggcaatcttcaggtatcctatctcttcaattttttaatctttgatactagtttacgtgtgtgaactgcaatgcattgattgctggtgatgctgcaatgtttgaatgttctgatgtaattgctangatagcaataactccggtaaggctacccactttgctgcttttgtactct

SEQ ID NO: 108388 - DNA, 252 bp, Glycine max
  unsure (1)..(252): unsure at all n locations
gatgaaaaccccatggattaatgcatataccacaaggtcagtgggagtaaaatcatgtttcttattntatatgtagatgatattctacttacagccaatgatcgaggtttactacataaaggtgaaacaatttctctctaacaattctaacatgaaggatatgggtgatgcatcttatgtcattggcattaagattcatagagataaactctgaggtattcttttggtctattataggaaacctatattaac

SEQ ID NO: 108389 - DNA, 448 bp, Glycine max
  unsure (1)..(448): unsure at all n locations
cttcagtcacgcagctgcagcttgctaccaagaccatttgaatttttgngaaagaagcctcttggtgggctcatgggccactttgggatagacaaaacccttgtcttactcaaaaaaaagttttattggccccatatgaagaaagatgtccataagcattgcactaggtgtgtggcttgtttacaagccaagtctatggtgatgccttatgggctatacacacccttacccatcccatttgcaccgtgggtagacattggtatggactttgtccttgggcttcctagaacaaattttactatcatttgctgctcatagcaatatgaaactacatcaaatggacataaaaagcacattcctaaatggaatcatcaaagaagaagtttatgttgagcagcctcctataattgagagtgacactnttcttaaccatgcttttaaacttaac

SEQ ID NO: 108390 - DNA, 280 bp, Glycine max
  unsure (1)..(280): unsure at all n locations
tatactcttgtgctccatagctaagatgcactacaattttctgctgtcataccaagtctgcctacaattcactntggggaggagaggaacactccactgatgatcacggcgcccacagacacttangggggtaatgccattattggaagtacttacanggtacgcctattgactggaatcactctcctacctctcgcgtgcgcgaagacactaccatgactgcttagtggagcttatgtatngcaaggttagctacttaatgacatatataccttgtcaa

SEQ ID NO: 108391 - DNA, 388 bp, Glycine max
  unsure (1)..(388): unsure at all n locations
tacaactcgaagtctcatattatataataataagaaatttaaataacatataaataaaaatatttaaattttaaggttttgaattataataccatgtccaattcatttatgtggttgttcatccattgataaaaatctctcactttgagtttggatcaggaattttaaaattttagaaaatntgaaatggttggaatttgaatcgctttgattttaatttccttcattcttgagttttgtttggataaatcaattcaaatttcttgaattntaaattctttgtttggataaggcaattcaattttctccatatgcagaattttaattatatatntaaatagatgaaattttatattaaactttatagaanaaaaacatgatctaatgt

SEQ ID NO: 108392 - DNA, 367 bp, Glycine max
ctaattacaatctacaacactctacatatccactgacacatcacacattagtagactatgcctattgatgatatataccttgagtgaccttatgaaatctgagctgtcaaattaagtactaactctacactctattctctctatgtatacattactaagaaatgaagagagggcgtgtgtatgcaatatgatcaatgcgaattccttgagtaatccgattacttggatagctagcagctattgaaagggggcacaaaatattgtgattgcctacaaaagcactaatcgtgattcctttacaactatgttttaatcataatgagcatatatatatagatttttcctaccgaactgccttaatttcata

SEQ ID NO: 108393 - DNA, 301 bp, Glycine max
  unsure (1)..(301): unsure at all n locations
ggaactctatagacaccatcgngatgagaagctgactgatctttctgacacgagtattgacatctgcattgggaaggagnannangacaacctctatgtccccgatgatgaaacacctaagcagacgagggtgagagggcatttagtgaagcttgaaatgatactctttcacacttttgaaacccctggtagttgaagaggggagaactgtgccttattcatgctttactcttaaggctgatctcacgagtggctgtatccttgtttccaggaggggattcaactaatgtgatggcccctt

SEQ ID NO: 108394 - DNA, 343 bp, Glycine max
  unsure (1)..(343): unsure at all n locations
gcttttaatggaagtcaggagaatgaaagtccgccacaaccattagctggtaacgaagtttatgatcgggtgaaggacattgtatttgttttgggagacacanaaaaaaagacatcatctaacacgaacatatggaagaaaaggtcaatattctttgatcttcaatacttgtttgatctacatgtgagacactatctagacgttatgcatgtggagaaaaatgtttatgatggcttaattggtacccttcttaacattaaaggcaagacaaaggatggtctgaaatgtcatcaagacttggttgacatgggaatatgagagcagtngcattcgatatcacaag

SEQ ID NO: 108395 - DNA, 387 bp, Glycine max
  unsure (1)..(387): unsure at all n locations
tacatttaanataatgggagagctttatgctgcacgattttgttttgaaattcaactaatctaagcctggaatgaagtttacccaatttgaaaagatatgtttcattgtaaagtgatgtgtagcagctgagtcccatgatgaacgcggctgctgagtatgtatatgttaaaagtatatgtagatgagtcccacatggaaagaagctgagagatgtttatagaagcaagtatacaaatcaagcctgattagcagcattgaagcatacatacctggaccgggccaatgggctaacaagaaggtncgtgacctagacaggtgaccttcattgcacttggagggtgctggtctanggctccttcctctaaanggagacctatgcatatttt

SEQ ID NO: 108396 - DNA, 343 bp, Glycine max
  unsure (1)..(343): unsure at all n locations
ttatccttcattggtatttcttaatttttctacatgtatttcctcacatgtcttgtgttgaatgttgttaacatgatcctttagaaattccaccgattaaacttgctacaaaagctagaatttatttctatggttcaaattcttgttcttgttcttgaaccatgaattgtgttgagtttacgttcctttgagttttgtattgctatttctttttgtggctgaaactgttagtcgtcatttacaactaacttttgtatagaaaaattttccaaaatgtatataaatctcccaatttatggttctttttggtaggattgtaataaaattgctttngtttgatctc

SEQ ID NO: 108397 - DNA, 217 bp, Glycine max
aaactagctggaacatgatcaaatcgtgcaaagcttcattcgtttagaatatgactagcctatgccatatgtctggtgatataattacctaaacaccattcaattaagattacatagagctcatatagtaattaatatataccagaggaaacagtcacaaattgattaaagaaactaacacaatgttcgaaataacacacatatccatttgtcaaat

SEQ ID NO: 108398 - DNA, 406 bp, Glycine max
  unsure (1)..(406): unsure at all n locations
ctgacccccgcgacatatctccatgtaccactctgtggtcaacgaataaaagcaagaaggtcacccttctacgctttctcatctcaagcttgtaagattatggggtacccatcacatgtggtactaagtggcggtcggcgatggtgcacaacaagtttttcacattcacaaagcgcgcataaacccaccatcccctgttgcccacctccaactgagctcacgtactcccacgtagcccatatcctcgtttctctcaacaccgggtccccatcaatcctcccaaacttccacaacatccaagcaaaacaacattcaaacagcacaagctatcacagccaagcaaaacagagcaaatgcagaaaactctgccaaaacaccaaccanatcacagcttttcttacttaaa

SEQ ID NO: 108399 - DNA, 310 bp, Glycine max
caaagaagcccatcattgaaaacacatatgggaaaatgcaattgtatggtcttgaaatatatcagccatgaatgctcgaagcgggtactcttggagccaaaacacccttattccatgcatcaacataatcccaataggttaacctaccggatctaatggaactgaaaatactctttctctgttcaagtccgaaccaaagtgctttggttgaagaacttttactattcgattgtggagtgcgcgttaatgcttggcctctcggcttcgaatgttgataatactgatctgatcatcaaaacattcataaagt

SEQ ID NO: 108400 - DNA, 466 bp, Glycine max
  unsure (1)..(466): unsure at all n locations
atctctgagcacctgcggctgcagcttgatgcttattaatgggtgacattattattttatactgatcaacacatgcacagtggccaaggatgcatgggagatcctgaaaaccactcatgaaggaacctccaaggtgaagatgtccagattgcaactattggctacaaaattcgaaaatctgaagatgaaggaggaagaatgtattcatgactttcacatgaacattcttgaaattgccaatgcttgcactgccttgggagagagaatgacagatgaaaagctggtgagaaagatcctcagatccttgcctaagagatttgacatgaaagtcactgcaatagaggaggcccaagacatttgcaacatgagagtggatgaactcattggttcccttcaaaccttngagctatgactctcggatagggctgaaaagaagagcaagaatctggcgttcgtgtccaatgat

SEQ ID NO: 108401 - DNA, 197 bp, Glycine max
acaagatgaattgtgtggacctgacgattcgcctatgagtgtgacatgaagacaaaattttgcagcacactcatatgaaattcatcccatgacgagtcatttggacgttgatctgcacgccttaatatcctattggtatcaaggaaacatattcttggtattgatatggatcactgatgagtaggattgtggataac

SEQ ID NO: 108402 - DNA, 435 bp, Glycine max
  unsure (1)..(435): unsure at all n locations
agctnntcattttgcagagctattgcacaagtttnctcatttttctcatagnnncaccnangtctttcaacccttgtggcaccaattttcttctattagacacataggagtggactcacttatctgttcatgtntcttctttgtcttgtgctcccttgcaataatctctacttcttcctcctcctctctcaaagatggggactttcttcttctttttctcttgctcaagcataatcttctgtattttcttggcaatgccaaaactgttgtgacctctgtcttcgaaggtgatagccttggcaagcctcttctgcttcatcgtatttatggcgtctaggtccacttgaggagcttcctttaagttttgttctaaagcaacattcattgatnttatgttagtcatgctaattttttgttgttagcaacaactgaact

SEQ ID NO: 108403 - DNA, 130 bp, Glycine max
gtttggagaatcatttattcagaagtaagtacatctcactctaagtctaagcatatttgttctctcagttgtcccacttcccgtccctatcttgatatttcagtagtttttgtaccgaaggaaagagtat

SEQ ID NO: 108404 - DNA, 365 bp, Glycine max
  unsure (1)..(365): unsure at all n locations
acccaacatcccacaatgttgatactcccagaactaaccacctatatatgaattaacacttcattatatattaacctcccaacaatgatatactttgagtgtattttttaaaaaatattattaataacttgttaacctattccttctaaaaaaataaaatggtgtatgtgtgtgtggtataagggaatttttgcaaaattctaacacaatcattgttaaataacatgttaattgtcacaaagcaatttaaatataatttttaataaatcattattgaaatcttaatgaccccagtattagtgacaaattatttccaacaaaaaattggntacacatactttcctgtaaaaaaatacaatataaat

SEQ ID NO: 108405 - DNA, 417 bp, Glycine max
  unsure (1)..(417): unsure at all n locations
cctactcacccttcctctcatgtcatctctatataaattcatcaatccttcttcaccatgtcataccattgccatagtataaatctcaccaaattctgctgagactaattattagnntngaggctgcaaatggaatctaaagagtccatccttgtgaagcttttgctgattctgcatttgtccgctctctgtgtttcacaggattttgacttctactactttgtccaccacggtagaatagattctgtctttaatattgctgaagatcattcattaattctgttagtaaaaaatgtattctttttcttcttcttataaccaaaatgatcgctcctggatcttgcatttgcagtggccaggatcatantgtgacacgacacagaacaagctgtgctaccctaccactggaaacccgct

SEQ ID NO: 108406 - DNA, 267 bp, Glycine max
  unsure (1)..(267): unsure at all n locations
aacacgcgagcgtatgaatatatgataagcctgaatcagacctcattgagagaagctctgaccatttgaatttctcgagagctttcgtggtgcaataactagcgtttctgtatgggatgcgcccgaatcggatttctgatgaaaagtatagaccttttgaatgtccgagagctcncggtgttatgtacgagcgcctctatatgagatgcgcctgaatcagacctcagcgtgaaaagataatactgctagaatttctcgagggccttc

SEQ ID NO: 108407 - DNA, 270 bp, Glycine max
gttgtcatcgattaaaacaaataagtctgtcttctgaagacaaatttctaccttagaaaattttcttctcacttactaatgatgatgcatgatgcacaaaatttgatatggaatcagatgcatcatttaatataacaaccaatacatatgccactcaagggagttgggcatgtcaaagagaaaacttctttaagctcttctctaagcttcaagccttaatcctcatgttgttgatgatgctccctctatctctaaacaaaagatcgacca

SEQ ID NO: 108408 - DNA, 361 bp, Glycine max
  unsure (1)..(361): unsure at all n locations
ttgtcacgggaagccggaaggtccatatcaccttcttaatcgcacacatggggcactgcgccctcaaatgcgcaagtaaaaatagataattttccgggctctcgtgtccgtaaaatgcattcataatatgcatcgcataagcatctcttcataacatcataatggacatatcctgcatttgtccgttatcatattccggcctcacattttgcatgagtcatggcatcatcatgcatatgcgttcaacacactttatgatctgcaaaattgcataccatttcgtttcatgtttgctcatccctgtgttntcctctaccaaacacaaaccaaaaaggggaagcgtgtaactttacactacatt

SEQ ID NO: 108409 - DNA, 361 bp, Glycine max
ttcagtcacctgccgcatgcaagcttaaaaggaaagagaattttctatgtatttgggggaaggcttctccacaaaaaaataattttacttttagaggaaaagaaacaaagccttgagagagttagggaagtgaccccgctcaaaaaaaaaaattttacttaagtacatctactggatgctatcccccaaaataaaatacaacccattggaagcttaattggcatatgacgcgagtaacaacgctctgaaagataagacgagtattcatttataaaaaaagaattaatgttacttaattctattaatctcaaataaaaaatataattatgttctaaaaaatattacaatttgatatcataaa

SEQ ID NO: 108410 - DNA, 198 bp, Glycine max
ctttttatcctcaagttcttacatactttgaattaattatacacggagattaaaatatatattataaagatacaattcacatccatcgattaattacctacgagctgacatgcttttcgtatgaaatagttccacctccttgtcacattatgccatatagacgatttgcacaatggtatattgccacacagaaataat

SEQ ID NO: 108411 - DNA, 262 bp, Glycine max
catactctaccgtgaagcccgcttggaataaagacaatggctggtagcggaattgcattctataagcgaaacccggaacactccattcgaacgcgcgtagaacccaacataaactgctacgagtggagacttgccttaactaacttccttctgagagctaggacttcttattcctctatcggtgctttaaaaatctcttcgatgaccacttttaacttggcgagacaatcgaaaccttgcatgcgaactctcagccattcct

SEQ ID NO: 108412 - DNA, 447 bp, Glycine max
  unsure (1)..(447): unsure at all n locations
agcttcactcacactacgaccgtatgattctttgtatacacaacaacngnagacggagctggaaagtgatgctaagacaaatggggcactgtcaaaatatattcttcacattcaaacacttgataattctctggatccgattagtgttaccattactctttaagagcatctcgatgttatcctcgaaggactttcctagtgagcatgagtctacaatgtctctgatctgcaacaagtttgaacctctcactattgatgaggttgaaactttgctactaagacatgaagctcgtcttgacaagtgacacaagaagaaatgtttggtttctggtaatctaactgaaggtgtttcattatccaatactgctattgtccaaatagttcatatccttaattctcttgcaaatattcctaattcttcgaatagcaatntgaacaataggtcta

SEQ ID NO: 108413 - DNA, 343 bp, Glycine max
  unsure (1)..(343): unsure at all n locations
gaagcgccacgctacatgaagccaccgcaggcggcagactgacagcggaagagagcattgaattcggaacactgagcaaagagtaccagcagtcgacctttgccggcatttgttgatgtcggcgtgcatagcgcgacaggagaagttcgggtccggcgtatgctcgctgtgtgtgctgcaggacgcatcctgaatccgaaaactgcgcgcagccaggtcattggcgcaatgactatgggcatgggcgcggcactgatggaggagctggcggnggatgaccgtttgggctacttcttaatcacgatatggggggtatgagggccggtcatgcggatatccaaac

SEQ ID NO: 108414 - DNA, 172 bp, Glycine max
tggtatccagcaagttcgttctaatggccatagcccctcggacgcccccatcctatgtttcccgagaaaccttccccggccatgcagaacgggagctatctctctgtgactcaagcatctgcccgaaggcaatcctcccttggaatcacgtgcgattgtgtctctgactcac

SEQ ID NO: 108415 - DNA, 353 bp, Glycine max
  unsure (1)..(353): unsure at all n locations
caccttatgatgactatcccgggcaagatgatgaggaaggagatacccatctctgtgcgctgctccacctctaagatccgttccccccatgaactatcccaaccaaacataggccgccatatcctggcttcacccacacccgttaaagaatctgttcccttcgtggaagataaaggaaagatngaggcgcttgaagagaggttgatagcagtccatggcctcgacaattacccattctcggatctatcggacttatgtctaatacccaacatcgtcattcctcccaagttcaaatgaccggactttgataagtactaagggacgacatgtacataagggcatctttcgatgta

SEQ ID NO: 108416 - DNA, 93 bp, Glycine max
gacgtatgcaaccatgaaccactctgattagacttctcttataacattacgaacatgcccttcatgagaatagcttgcgccgatgtattcacc

SEQ ID NO: 108417 - DNA, 277 bp, Glycine max
  unsure (1)..(277): unsure at all n locations
acctgacatctcaaaccaacaaatcaaacgttacaagacaattatagttgttgtttgaatacctcacccactcaagtgtatcacacaattatggcttttctctaatgaaacactcttgccttttaccactctaattcccctngagttcttaggcaattcaagagattatggccacaacaaagaacaattcaccaatatgtgtcaggtaaggctagagagacaaagaaaaggttaaccaaaaaaaaggctaacaatgtattgaataatanttggatga

SEQ ID NO: 108418 - DNA, 267 bp, Glycine max
  unsure (1)..(267): unsure at all n locations
atctttcagagaagatatcagcatattcaactattcatatctantttaactntctttcgatgtcttggatgttgaagcttccacctatgtccaacaagtctgatgttacgggatgaatttgtaaatcatccatcatcacgtaagttntttcaccatatttcttctttggaaagaaattacccctccacatttcgatagagaattttaacttaaggaaagtaatntatcagagaattngaatttctggtatctagaattcattggttg

SEQ ID NO: 108419 - DNA, 471 bp, Glycine max
  unsure (1)..(471): unsure at all n locations
atcctctgagttacctgcctgcatgcaagcttncatcaacacatntgcatgaggaggaatatttaattgttaagatgacattncaggatctcgcattcttgctctctctctctcccacgtaagtttctcctctctctctttattttattttatcaaaatggttgggattaggtggaaaatcccattttcgtaggcccacatgtgtttttctaatgggagttgataatggtccctactaaaattgctattggtccttacaaaactttaaaatttgaggaaaaggccaatttaccctctattcagacactccacccctccttcccccttcttcttactattgcttatgttcttctcaaccccatgttaaatatacaatggaaatacaattctatggtaaacttcgttaaaaaaattaatacacaacgcanacatgactttgttgtggtcttngttgagacacacaacataatt

SEQ ID NO: 108420 - DNA, 322 bp, Glycine max
  unsure (1)..(322): unsure at all n locations
aaatgtgtgattgactatatttcanattaagaagtacaaacattcatgtgacctcattttatcattccttaaattttgcattttgggagaaaagtgagttatcanaaacacgagtcgctcgacttaatctatcaattgaaaatcctttaaatgtttctcgtccttgaaaattcatttttgagaacctgcatgatttctttcatttttccctactacaaggtcatagcaaaaggcatgaatagatacctcagagccctacactaaggcaatatgaggcaccatgcatgagccacaagcgaacctatgggcagacaagaatttc

SEQ ID NO: 108421 - DNA, 386 bp, Glycine max
  unsure (1)..(386): unsure at all n locations
gccgctggatggagaccaggccgcaacacattgatggacttcctatcgacgacancacagctgcaatataaccatcagatgaaagacgcgagctgctattcacgattgggtgcctattaccagcagctaaggtagatagttgtcccccactctgaactagccttctggcagaatcgatggctggagatacagtattcacatcctgtgacagagtgggttttccacccatgctcccaagaacatttgtagcacccatggtatattttttatttgtaagaccatcaccatcagcatagcttgaagctgacatttgaaaaacatcatacgtttttgggaacgatgatgttccacccggcaaagaagctctctgtgagatccttgtacta

SEQ ID NO: 108422 - DNA, 386 bp, Glycine max
cgattgatatatgagaaagagagctttcttgtctctctttcttgactccttcaacgtctcctttacaccttggcttagcgaggcttcatcttgctcctcgaagccattctctacgatatcccacacatcttgagctcctattagcgccttcatcttgatactccaattatcatagttgttctttgtgagcatcggcatttggaaaggaaaaactccattcgccatcttttgaggatcttgaagctctgataccactttgttggaaataaggctttttatgtttaagaaaagtgtttaggaatattggagactttgaatagaaacttgataggaaggagaattcttatggaggagagaactttgtatttttgcttgatacaaatgtg

SEQ ID NO: 108423 - DNA, 411 bp, Glycine max
agaaccacataaaacaagaggtggaatactagatagcatgacaagagttagaagccatctcctgatgaatgatattacaaaatctccgacgaaagttgtcatcaactgtatgaactgtgccacctgatatgaaagggggggaaacaatcaagaaacaaaatttagcttaaacaagataataatgacttaagactcatgtggtgtttcgttaatatgttctcacccatggcatcttcaataagaacaatgtaacctgacatctttccaacaacctctccaattctagtttctttatcaaataagatggcatgttgcctcaaaatattgtgaagggataagcctctaattcttgcagcttgtctgtcccccgtgatcattcaacatgtcagccttgatacttgggcaaaagtg

SEQ ID NO: 108424 - DNA, 288 bp, Glycine max
  unsure (1)..(288): unsure at all n locations
ttgaatcagtttgcaatgtatcatacatangggcatgtgctngctgaaaagactcttgtccacgatcttgaatcatatcctcttagcgatctcccatttctacatcaaataggtttgatngggaccccctctgcatatctgtcaatgcaccatgccatatccatgttctataattctttntaattccatcacacaacagatgctctcgtatgtcatctagtatttgtcctctcctgctcacacaatttatacaagtacaaaaagaatttccgtcaccatccgttcgac

SEQ ID NO: 108425 - DNA, 436 bp, Glycine max
  unsure (1)..(436): unsure at all n locations
gatcctcagagtcacctgccgcatgcaagctnggntngaggactcacccttttatgacctaatattacgacaaacgaacgatgaatctngaagaacggncgagaatcttcgcgtaattactcacggaaacgttacggaaactgtacggaagcgcctcggcttggattttcttcacggaactaattttcctcagcaatttcgagggagaaagaagtgcctaaggggctgaacccttttcttcttcacttcttcccctatttatagcaaaataggggagaagcttgccgcccagctcgcccaggcgagcaaggttgcttcctccagaagcaacacccttctggaggaatcttctggagggcccaagtgggcctggttgctatttgcacctctatttttactaaatgcacccctcttttatttttattgtaattctttt

SEQ ID NO: 108426 - DNA, 206 bp, Glycine max
  unsure (1)..(206): unsure at all n locations
aagtgaaatatggaagtaaccatcctgcagaatcgnggcaaaagatgaatcgagcacatcactgttcgtctactgcaacatattaggatatcgtgtcttgtactccagttcccttgcaaaatgtatggccatgtgaaatctaattgataacccatatctggtnaattccaaacttcactgacatcatcgatgatcatgtttcattg

SEQ ID NO: 108427 - DNA, 337 bp, Glycine max
cgcaactagaattcattatcgctaccccataactctccgcgaaatgtattacggccatactcttccttgcgagccctcctggtctcttgctcaacggcgtttgcagaaattgcattctgttcacgaaacccggcacactccttaccaacgtgtgtatgggccaacatgaacctatccttggcaagtactgacttttctaactcgctattgagagcttggacttcttcatcctcttccggtgatacaaaaatatgatcactgacgacttttaacatggtgagccaatctaaacctagaatgcgaactttcagccattcatggaacccaccaatgatgc

SEQ ID NO: 108428 - DNA, 367 bp, Glycine max
ccgtaattctacgctcgttccttgttagtttcagcttatctttgcatcttttccgactttggaaccaccattgtatgttttacgtgtcctttgaaaaaccttacagaaagagactttgtaaacgttatcttttttctgaaatgggtgttattttcgtgaccttcactgaaccccgatcacattggcatgatcggaattttaaaatgatgttccttttgtagaatttgaaacgcccttagccttttcatgtagtgatatcagtatttgactcagaatacagttgttaaccttatttctaaaatcccgagtaatttccttcgtttggcgtaatagagacttgcgttggaccgacaagcgtgaatgaaag

SEQ ID NO: 108429 - DNA, 235 bp, Glycine max
  unsure (1)..(235): unsure at all n locations
aatgaatcggctcattgtgatggcttaaacaatgggttgccttccaaaaatagattgtccctgaacattntgttttcagaatcaacttaaaaggcgactccatgctttaactattgcttctgcaacatgttntatgtgtcctattgccatatgggacatgatcatagtgagttctttgtaattttcactattacgtctatattacatacggttatgtctttgtgggatgcttata

SEQ ID NO: 108430 - DNA, 367 bp, Glycine max
  unsure (1)..(367): unsure at all n locations
tcacattcaggaatttcaagaagctcatgttttaattgtacatccactcaataaagcatcaatttatttntnttctaattttttttatttattttctgagtagaaaacaaataagaaactataggagaacagagcttacataataataataataataataataataataataataataataataataaaacaaaacacacaaaaagaaatttgatcgttgaatgtaatcaaatgtaataatgacaaaaatatgatacaatgattcaacaattaattacatgtatattaatatttaatgaattgttatatatagtaatcaattattatatgttaataaatgtaacgaaagccataatttcttgatgct

SEQ ID NO: 108431 - DNA, 323 bp, Glycine max
  unsure (1)..(323): unsure at all n locations
actcagcttggtcccttatgcaagttcttcccgtatgcagtcgtctcttatatcaagcaattttaagagtctctggaatgctgtccaatcaaggttntggtgactttgacagactgcggtgtagaagccctagtcctatgacttcttcaaacctcatgtcaagtgtcactggaatgggattgggtggatggaatagtcttcagtaggagttagccccatggcctataatgtgatgcgaggaaatggctccgaaaaagctttccgcaaagagatctatgagggacgccgcggccgaaggaactagcgccgctcttgagtttaca

SEQ ID NO: 108432 - DNA, 234 bp, Glycine max
  unsure (1)..(234): unsure at all n locations
atgcaaagctaaattctagagacattctcctaaatcaactttttctttttattccaaccctattacttgccctctgtttacattcagcttccttttctttcaataacagcacacacacaagttttattttatacttacagatggttttntttaatacatttgactgtgtgtgcttctctgctcttangacttgaatgaggctgggcttgcaataattcatggttcttataggat

SEQ ID NO: 108433 - DNA, 263 bp, Glycine max
gttactaaatacacccctgccttttatgtgattcttttccatatgtacggaacaacaatactaacatcttgtgtcttcatatgtatggaactactgatacgtaatcatcctttttgccttcgatgtacagacttacggttgtcactacacttctttaatttcgcatgtacggacttacggatgtgcacatgcttttgtgacttcggatgctcgacttacaatgctacgatggtgcagtctcaatggcaacaggagatccacat

SEQ ID NO: 108434 - DNA, 390 bp, Glycine max
gatcgaaagtgacgctaaagccttggaccattatgaattgactacgaccctcttgattgatcacgaccctcatgatttgaccaaagccctcatggtttgaccacgcctgttgtcagatcttgacgttattttggaggactattttcactttattgtggtcatgatcaatgtactatggccatgatcaaaatcttcaaatctccataaatttgtacaatctttgactatttcactcaattaagcgactgtgcttctataatacaaaactaatgaccaaacgtgagttttactaatggaaagaatataaaaatattctaagaaattctaataaaggacatatgtaccatgtagaaagttagcacaaagaccaggaattaacttgtagtaata

SEQ ID NO: 108435 - DNA, 280 bp, Glycine max
  unsure (1)..(280): unsure at all n locations
acaagtataaacacaaccaagtagtctgtacaaaagactaggaatttcatgctgcctttggattttatcctcatagaagaacattttccggtgagatagctggggatacttgaaactggtatcattaatattccacaaatgggcacccgtgacaantaacattgatccgagtgactcaacttcaatccaataccaaggtgtgtggcctanaatgaatgagctcaccaccctatcttaactgaatcctctcttgggtagttggtcgatatcttgtcaatct

SEQ ID NO: 108436 - DNA, 232 bp, Glycine max
tggaaataccgatatcatatgatactactacacgtagaggggttatgtgttataccaacgtggcagtgacacagtcttgacaatacaatgatactacaacgtcgacaacgatagtaaacttctgatgcaagtgccaaacgatatcacgaagcagctgtgacagtgactcaacagtcactataaaaaccgggtcgcatgcaatacaacatggtcttcactgagagccttagaa

SEQ ID NO: 108437 - DNA, 308 bp, Glycine max
  unsure (1)..(308): unsure at all n locations
atgcatgtaatgtgcgtgtgttcgatagatagtacctagtaaacaaacaagtacaaattcccactacttaactctgttggcgtgacaccaacnggtgatgacgatactctgtcgattttgcatatgttgagggcgaacgggttaataacgcggtctgggctttacaatggtttctaggctgttttctcagacatgatgccctccctggagttattgtgactgacagagacctaacattgatgaatgcaatgatgactcgattccatgagtgtgccaacttgttgcgtaggtgtcacatcgacaagaat

SEQ ID NO: 108438 - DNA, 402 bp, Glycine max
  unsure (1)..(402): unsure at all n locations
acatgctcatcaacttccgcttgatttgtcctctaaccacaccatattggtaaggccttcctttaatatcacttgcagcaccaaactactttcaagatcgattactatcccctaaacaaacacaagacttttcaacatgctntaacattactcacttgattcttgggaaatttccaaggaggtaactcatctggtaattgttccaagccaaacacacttaattgtaaagttcttaagcgagaagctaccaaaaaataaattcatcttattggtataggtaatataaattaatttatttaagtcatcatcaacactatagtcccaaacatgcataactnttangtcactctcattctactgcatattggattcattcatgagcccatcttgttggaagtatgc

SEQ ID NO: 108439 - DNA, 225 bp, Glycine max
  unsure (1)..(225): unsure at all n locations
ctgagctcacgtactcccacgtagcccataatcctcgttctctcaacaccgggtccncatcnaatcctccaagctttcccaacaatcaagtaattcaacaataaaacaacacacactatcacagccaagaaaacagggcagaggcagataactctgcccaaaacaccaaccaaaatcacagctgttctcacttanagaccctagtaacaattcccttcgtccaat

SEQ ID NO: 108440 - DNA, 329 bp, Glycine max
  unsure (1)..(329): unsure at all n locations
acggattgaattcaaaactcaatagccgacattggtcacgaaatagccacgactgatattgttcagccgacattacgcaattttttttaataaacactcgctggtagataatgctctttattacggcagaggaagtggatcagagcttcngctcttgatacaggatctatcctatcctattattgtcctttgtaatttgaccaggttcgtgctatggccttgatctgttatttgatctcttgtttgcgcctagatgcgttgttttttgtgtcattactacattcgtgttcttgatgcatgtgtctcccagacattgtgcaaaaaagaaa

SEQ ID NO: 108441 - DNA, 229 bp, Glycine max
atcgagctcgcctgtggtatttcgcgggaactcaaccgccgttgtgtatcggtcgacattggcctgcgttgataaaagaggcacagaagaatatatccgaccttggcagcagaataaaatcctcgtctaacatggataaaaaacaattctagccgacatcggtcaagacagattactggtcgctgtatcccgaataaaatcactggatgaagccgatcgaacatttcct

SEQ ID NO: 108442 - DNA, 285 bp, Glycine max
  unsure (1)..(285): unsure at all n locations
gtgctacccacttaactaaaatacttctagaggaagcagaaaaaggtgacaattggtaaatcatgccaactagtagagttggtntgagggccccattctaaagaacatttcttataagcattatgaagatacatcacaatggtgattatgatgttagctgagaaaggatccaacatgaattagattcttttgaagaagtaaaactaatatggatttctgaagtatcatggctatatcatacttaactcatcttcatagtgcaaaagtattttgatgaagactact

SEQ ID NO: 108443 - DNA, 402 bp, Glycine max
  unsure (1)..(402): unsure at all n locations
tcaaaacaatgctcaccttctcaagaagagaggctagagcttaactacacacccctataatagctaagcgcacccccctgacaaaatacatgaaaatacaaaaaaaaagtccctactacaaagactactcaaaatgccctgaaatacaaggctaaaaccctttactactagaacggccaaaatacaaggccaaaaagaaggaaaaaacgtattctgatatttacaaagaatagttgatccaaccttgacccatgggctcaaatagctaccctaaggttcatgagaaccctanggccttctttagtagctctagcctaagcctcttggagtcttctatccaatacccttggggggtaggattgcatcattctctccatcttgcaaggatttgatctcaaatcc

SEQ ID NO: 108444 - DNA, 277 bp, Glycine max
agctgtcgcttgtctatactcatgccaactaatattattctctagctggtcgttgattcttgacagggaaggagaccaaaaatcagcggtagtccttgcgaattctttttggcaaagggagaaaggaatggaaaagatgaatagcacaagttttcaaggtttggaaaaccaaaaaactttggaaagctttggcaaaggaagaagaagaagttcaaagagactcagaaatcaattggcaaaagtttgttgtctaaagaatgaattggaaagatatatg

SEQ ID NO: 108445 - DNA, 461 bp, Glycine max
  unsure (1)..(461): unsure at all n locations
gatcctcagagtcacctgcngctgcaagctttaactgattgcaatgtttcaatgttttttaatggngnaancgattataatatattggtaattgattaccagtgtatctaaacgttgaaattcaaattcaagtgtgaagagtcacatcttttcataaaaggcattgtgtaatcgattacatgattatggtaatcgattaccagtgacaagttttgaataaaaagtcaagagatgtaactcttgacatgattttctcaaggttataactcttccaatggttttcttgactagacatgaagagtctataaaagcaagaccttgacttgcattaaaacatcttttttttgataacttttgaacttctttgaacaacttttgagaaatcttgaaacctttcctactcatgtntcttcttcttcttcctttgccagaaagctntctaagttttctgtttccaaacc

SEQ ID NO: 108446 - DNA, 295 bp, Glycine max
caatggcggtaatgacggaccgaggcagaaccgggttgagggagtaaagctcaatgttcctcccttcaaaggtagaagtgatccagatgcctacctggactgggaaatgaagactgagcacttatttgcctgcaatgactacactgatgcgcagaaagtcaagctagcagcagctgaattcttcgactatgcccttgtttggtggcataaataccaaagagaaatgttgagagaggaacgacgagaggtagatacatggactgagatgaaaagggtgatgagaaaaaggtatgtg

SEQ ID NO: 108447 - DNA, 407 bp, Glycine max
  unsure (1)..(407): unsure at all n locations
tacttagacttctcaactgtgggagccaggctatcccttgcattctagacatcaaccacttgtgatagtcactgatgacgccattgctacctcccctaagctccttatcttttcttcccactctattccacgctttacagattttgtgaagaatcttcgcattaactncattgaaacctcgctcgatgaaaggcgtgatgattntctccgacgactcacctctcataggatagcctaattatcttatggccagaacgggattataattaatacaacccctcgtccccatcaagggcacattttggaatccctcacatgagcataacactcctggctctcctttcttccaccgtgggaaccaactaatggacactcccgtcatgcctaccaagaagttcttccaattt

SEQ ID NO: 108448 - DNA, 330 bp, Glycine max
  unsure (1)..(330): unsure at all n locations
ctcttatcacatccaaacaaaagcttcaacacttaggaagtggtggaggacaaatgcattgcaaggttcctttctccatctacatttatctgtgcaaaatctgccattgctacattttcctaagggtctgatgaacctttttgtgaaacatgggagatattcacagccttgttgcagaggtgcccataccatatgtgtgatgatgctgcataactaccatttacttctacagtgcgttgaaacctcacaccaagatgattcttgatgcctcagatggaggtactatgatgttntatagcctgcacgaagcactctaattattgactctat

SEQ ID NO: 108449 - DNA, 336 bp, Glycine max
  unsure (1)..(336): unsure at all n locations
tattcctgatattaaccataggtggtttttcataatttctttagaatataactcccttttaagctcacatttctctcgtggtatgggattgtttctctatataagaatattggaatacttttttatgcctgttctgaacttgtttagtctatggcttataggacatcatgattggtttcctcatgttctccttcataactttgcanattatatagnctggattatttgtgataaagtaattcaaaatgaaatttgtacttttggatagcttggttgtgtgatgggtttgaacaatgaaatgaacaaatcgatttttaattatattagatggtagat

SEQ ID NO: 108450 - DNA, 322 bp, Glycine max
  unsure (1)..(322): unsure at all n locations
tgtctactatcattgtcatcgntttcttttgtcattgaggtgccactatgagctgccatgttctccacctttgagcgtattctttgaaagattagagccccctttttgcaaatgttctgtagttgcatcctatccagaaccatatcataattgtactaatacttcctaacanaggcaaccattaggtccttccaagaatggactcgggaaggttccaagttagtgtaccatgtaacagctaccccggttagactgtcatggaaggaatgtatcaacatatctcatcttttgcgtattccgacatcttctgaccatcatcttt

SEQ ID NO: 108451 - DNA, 313 bp, Glycine max
ctattagaaaaaggtctatattttcttgtaaaaaattctcaaaaacaccttatattcaaagaggcctaacatgtgattaaactacttacccacttgtgaacttaccgcgcagtttggaatgggaagcgcgttggaaacgctatgtggacaagcttactgagcggggcaagtgcacatgttgggagtgtacatgcagcgctcgtgggtgattgtgaacgccaccgcgatcctgctgtcgctcctctacatcttcgcggggcctatgcttacagctataaggcagacagaggcgatttctgcagcgggggggggg

SEQ ID NO: 108452 - DNA, 438 bp, Glycine max
  unsure (1)..(438): unsure at all n locations
tccttaagaagattcctanagaagctagaagctagctacacatctctctctaatagctaagctcaccctcttgagatgagaagctagaacttagctacacacnccctataatagctaagctcacccccatgacaaaaaacatgaaaatacaaaaaanaagtccttactacaaagactactcaaaatgtcccaaaatacaaggctaaaaccctatactactagaatggccaaaatacaaggctaaaacgaagganaaacctattctaatatttacaaagataagcgggctcatacttagcccattggctcgaaatctaccctaaggctcatgagaaccttanggccttcccttggatctctagcccaatctacttggagtcttctaaccaatgcccttgcnggataggatngcatcaattatgatgacctattcatatg

SEQ ID NO: 108453 - DNA, 145 bp, Glycine max
gtctatatgtgctatttgttgtgagatccctttgctgccatagaggtatcttcaggggtgactggaaagctaactcactgggtcctgctgattgtttaatttgtaagtcacgttatgatagtagtggttgtcctcacgttatatc

SEQ ID NO: 108454 - DNA, 260 bp, Glycine max
  unsure (1)..(260): unsure at all n locations
tgtcacctgatattgtcctccagccctctggctctaaacaatataagatctttgttgtngctcatgactacacacatcatctacaaagacataccatcacacattagtcttttctctcanatattcanggtgttgagagtgttcttaacttacaggaattacaggagctnttgtagaaagattttgatatgacacttgngttgtgtcatttttcaagctttatatattaaccttctcatagtgnntgtgctctaatgata

SEQ ID NO: 108455 - DNA, 231 bp, Glycine max
  unsure (1)..(231): unsure at all n locations
tctagctgtaagagctggccactgaggagagcgtgcatagcctttgctctttggtcaacattgacggattgtgcaagcttgtgtgctcctgccctcgatgggtatttcttcattggtgaatgtgaggtanatgttggccgcgatgtctgtgattatgctcccganacccttcacagatatgacttgtgctacgtgngcgttcattcaaatcttgaccaatagcgcctgatg

SEQ ID NO: 108456 - DNA, 207 bp, Glycine max
tcagataccagcggtgtgcgctaagcactcgaaactagtggcttagcgcatgaacgattatgcacttatcgagcagctggcgcttatcgaaaggactatattgtaaaacagattctctaagctttaaacttagtccttttcccagaaattgaaggcttaagttaccattcaagggacggtgattgctctaatgtctagatatacaac

SEQ ID NO: 108457 - DNA, 128 bp, Glycine max
ctgaaaccatgaatttatcagcataattaatattggagctaaataggctattaccccacagaaagatcataatgtgtctcagtgagctaccttaaaactaaataatggctgaagataaacagtcatca

SEQ ID NO: 108458 - DNA, 364 bp, Glycine max
  unsure (1)..(364): unsure at all n locations
catcgctctcttgtcagctcttgcttattatagggcttctttggtcacactggagtccaccttatacatttcagtctgttcacgatgagaagcacatctgcttcagatatantgtcctcaaatggggctgtactgtctctctttcattcataaatattcctaattactaggatcaggccgttatacatgaattatcaagcaatggacaatgacacatcctcaactgaatattgatgtgaaataacagaaaccaaatgtaccatggccgactcttgggtccacagagaacataatagtatcaattaacatgtaacttactacaacgcacttctaacattaataaccttatcttatcttcggtcat

SEQ ID NO: 108459 - DNA, 122 bp, Glycine max
aagtgtttggctaaagatgggatttaattctcgctcttttatcatattcaagctctcgctaggagacaaagtaatactattgtctctctcgagcatgatgacgatactgcggctatttctca

SEQ ID NO: 108460 - DNA, 114 bp, Glycine max
ttattatctctagattgcagatctaagaattcttgtaaacaatctaaccaggattaatagctaaaatatcttatgtgatcgatatactcactgtatcttgaacgcgaccaattg

SEQ ID NO: 108461 - DNA, 437 bp, Glycine max
  unsure (1)..(437): unsure at all n locations
tgctttctgtgtggatgtcctancatacacacgaacaacatcttcagtgccagatggtcgcacaaagcatcgaccttgtgggtcctttagctgtaatgcagaagaggaaagagtatcaagctgcaatattagtaaactgaaattctgcactttaatctttcacactanaaggctttcatggatggatgaaactgacacatatctcgcagtcagtgaaattttgccaagccacttggacttgataacagtnatagtattattccctatacaagaaaccacctttcaaaaataacaatncaatttggtttattaggcctcctgcctcctactctgcccattctggtggtcacaataaaacaacaagcatgtaaaccaacacaatgtgtcttgacaaacatgcatatatacacatacaaacagcctcacaatcttgaaat

SEQ ID NO: 108462 - DNA, 342 bp, Glycine max
  unsure (1)..(342): unsure at all n locations
atgtctctagctaatatatctttgggataagtaatgaggctctccttaatggntcaatagtgggttaaatcctgatattagaagagatagttgtgctatgtgcccttctaccttattatgntgcagtgctntagctaaactntttgaagaaaaatatggtcctgtttctaagccatttcgacattcctatagtcacaaatattcccaaatttcttccaccccagtctctattaatgcttcaaccaaaacacagattanatctaatttaccttccgctttacctacttcaccaggcccttcaattcggcctcaaatgtaaaaagcatactcctactgaaatgt

SEQ ID NO: 108463 - DNA, 306 bp, Glycine max
taaaactgttaacgctgtatggccttcatttaagaatgactactattgatgacattaacaggtttcttttttacttactgttttcttagtctcttgagccatagaaagtgtcttaaaaccctagaaacttttttatactcatgacacatccttgtttatagaactacttcatcctaatactaatctattttatcactgttctggaacttattggaatgtatatttgtaccactacaccctttctgggatttgtttcaactagagaatcacaaagaattgtcacgtgtgaaaacccgagcttaatcc

SEQ ID NO: 108464 - DNA, 360 bp, Glycine max
  unsure (1)..(360): unsure at all n locations
gtctacggccgaaccttcgccttcgaantgatttcgtcaaacacattcctcactccgtcaacacgctccgtatatatgttgcatgtaataacggctcataaaaagaagcaacctctctctntctctcttccttctcttaggtgtccaaaaaccctcatatntaacactttcatctcccttctcctcttccattcaacattgaaatctccaacattcccacatctctcgtataccctcttgtctttcttcactaaggtatcttatngagaagtcaagactagtcctttgatacgttgaatntctttcaagtattgagaatcatctannaaaatcaattttgatatcttatacatacatcta

SEQ ID NO: 108465 - DNA, 370 bp, Glycine max
  unsure (1)..(370): unsure at all n locations
gatgtatgctataattcagttagttagttaggagttagttagcttgacagctcatgaacggtgttgtagttacatatgcagtgtgtataataatagtagtgatcataaatgagatatatgagagtgcacgaagtttaattcagaattataagttctctctattttcaccntcaaatctttctatcttctctaattcttacactataagaggggagtgcatagtgggagngagagaagagctcttttgttcaacaactacacctcaccacactctcacaacctagaaatattatataccacaacacaacacagtgtctcattaatcaagtcatatatagacacatgtttatgtcatatacatgactctcat

SEQ ID NO: 108466 - DNA, 301 bp, Glycine max
  unsure (1)..(301): unsure at all n locations
tagctacttntgatcgaccatcagaaaaagctggaatgaatatctggcagatagatgactacttaacagaanacatcaaagtctatatacaatactggttgtccaaatagaataaagaataataaacagctagctatatcttctaagatccaacaattatatgatagaatgttcgagaacaatatataaagaataatatatcatccacaattgttcaagaaaggctctgggagtattctggtcctatcgatagatacgaaggtcattcccgcgctgttgatattgacttgtactactgact

SEQ ID NO: 108467 - DNA, 226 bp, Glycine max
tctcgacatatatgcgcccgcatccgacatccgtgtgagaagtatgaacatttgaatatctcgagagcttccgatcgttaatctcgagcggatctatatattataagcctgcaacagacctcagcgtgaaaagtatggccatttaatttccgagagttcccgtgtcattttcacggcttatatggatgcgcatatctacatcctgtgagagtatgacattgaattc

SEQ ID NO: 108468 - DNA, 224 bp, Glycine max
gaaagtaagcgcctcctggaacctgaaagctccccaatacctgtaactgaagtctatgggaaaaaggaaaaaagggccattagaaaagaagatactttttgtcaaatttttattcacggtccctatttctgctctgaatttgaatctgatttgaatctgactatctcccccttcactcttgatttaaatcaagtatcccccttattatcttgagatagtttccc

SEQ ID NO: 108469 - DNA, 319 bp, Glycine max
tacaatgttttgggtatttacaggggtcacttttccagacagagtgagcaatctaaaagacgttgcatcgctctagaaaatatgcatggccatctgatacaatgtgagaaggcggattaatcactctatccccttggcaaagaaggcgagagtcaataaattaaaaatatcaagatgacggctcaaatggtgaagcgctttctctgattacctatacacttatgacatgcgttctggtatgatgaacgctccttagaagtctccagaactacgatagctaaatcatggtcacctcacactacttgagacgtgcgctact

SEQ ID NO: 108470 - DNA, 197 bp, Glycine max
  unsure (1)..(197): unsure at all n locations
tcctcacgttgggttttgtaangggaaaacaccataactaaacgcgccgcaagggatccctatcgcaccagatccaaatctanaacgatgggtgatcaagaggagacgcacgaacagatgaaagccgacatgtcggctctgagagaacaaatggcctncatgatggaggccatgttaggtatgaaacaactcatgga

SEQ ID NO: 108471 - DNA, 237 bp, Glycine max
tgactactatcctcttatacatgctatttgcctaacgtgagtgagcactctataatttgttcaagatatgttcaggtcacatgagatatattttttcttatgtctttaaaatgaagactgttaattatggggcacgcctgtctaatttcatcttcagtttcctatgtaactaaatctctagtggctgacagaaatttaatctttagctcatcatgctgacagatccactgctcttat

SEQ ID NO: 108472 - DNA, 369 bp, Glycine max
tgctacaaaatgtgtgttttttcttacgctactgaagaaagttgcacacacttgtctcactctaagaaaagaggagaaagagaagatttgagaaaggtactgtgaaacacagaaagataaagaagacaatcctccaatatattaaaatcacggtaaaaattttatatgaaaatttactttcccttatttaatggttaaatatagactccattgacttaatacttcactatgctgacaaataaatatttactaaatataactccatttatatctatacatttattagtctcttgcattatgtccatactatctttttataaataagtattctttttgattgcatttcatagatactcattattgtatgta

SEQ ID NO: 108473 - DNA, 273 bp, Glycine max
tctctactctctcttgcttcctgattcatggaaataccataagacctatgactcaagatccacctcatataacccacaagcactccatacttaatgaataagacaagtgaaccctcattaagaccaatactatcacttgtaaatcacacactaaaaaactctaaatatgctccctttcaggattggggcctcaaccaaaaaggaactaaaacaccttaaatgtcacagcacatatctaagtgaagacatgttatcccaaaacatatataggca

SEQ ID NO: 108474 - DNA, 400 bp, Glycine max
  unsure (1)..(400): unsure at all n locations
ctcatgcactcctctaatgatctactgcatcattctggcgctaaactgctgagaagtggaagccatcttctcaattaaatntctggcttcagcaagagtcatgtcttcaanggctccaccactggcatcatctatcatacttctcttcatattactgagtacttcataaaaatattggagaagaagctgctccgacatctgatgtgtgagggcaactggcacatagtnnttaaatcgctcccagtactcatacaggctctctccactgagtngtctaatacctgagatatatttcctaaatggtgtggtcctgaagcangaaaaatgtttctaaaatactctcttaggtcatccaactcgtatggccttggacaagtaatacaccagtctttgcacttct

SEQ ID NO: 108475 - DNA, 306 bp, Glycine max
attcactttaaaaaaatattgtcaaatcaaaaagaagaactacagtgaataaatttaaatgggtgtgttttttatggacaatgatatatttaaggttgactggagattataatattattgttaaaattaaggcattatgaaccccgtccattggtgcgacctcttctttttacacatgtgtgaagactttactccggaatgactttatatttataacctcttcaaggtgtatatattctatataagggtgtaattatggtttttaacattattacataatcaaagtgtattcgttcttaaaaaata

SEQ ID NO: 108476 - DNA, 289 bp, Glycine max
  unsure (1)..(289): unsure at all n locations
ccttatcanaataactcgtgtagatatccctggcattgacttatcatcgcagcaagcagcacagcaccttgttcgttcctgacattgccttatggagcttcccanatctatacttccttcgtcaaaaacagaaccgagntatcaagcgaaccagaaaagaaatcactaagcacacaactgataaagtttacacatcacggagtaatcaactgatanatntacannattngataaaatgaatcccaacatctaattctgcttggcttatgatccttaggtattagcacta

SEQ ID NO: 108477 - DNA, 87 bp, Glycine max
atgacttggccaaatcaaattgaataagagaaagatctgattccatacatctgaatgcatgtgcctgctgggaaaaagaaataaact

SEQ ID NO: 108478 - DNA, 386 bp, Glycine max
  unsure (1)..(386): unsure at all n locations
taatggtgtactctgggacataaatctcttttatggnctgagggacacgatggtttactgactgtttcttgtttacaagtcacatatcatgattctaacatgcaaataggttttagtttactatggtggtgtctttangaaaattccaacgaccttggtggtgctggctttttccatagactggatgatgcgatgcttgtagactcaagtgctatggaatctttcacgtgaataatatcgagtgctttttgaataagatgactagataacttgtgtcatatcttgatctatcttcatacatctgacaattgacagttaagatttttctgagtgcttacaacgatatggacgtgatgtaatatggttaacaaaagttgatctacctg

SEQ ID NO: 108479 - DNA, 317 bp, Glycine max
  unsure (1)..(317): unsure at all n locations
taaacatggataaaataacaccacannataaatcagacatcacatataatttaataatattcaggggtgtacatgctcttgcgctgtgccatgtctacgacgtaatcagtgtctgcagcgctgtcttcctccttagtggcctacacaggcgtggcggcaggcgtagcctctggagtctccttcggtgatgcctatggtgtcgccttcggctctggctgcggctcttgtngtgtatgagcctcacctccctccgcaggagaaagctggactcttggccangccacctangccatgaaaaatctcatgctgatgatggg

SEQ ID NO: 108480 - DNA, 223 bp, Glycine max
acttactactaatttcttaccaagacggctaaaaaattcttactaaggacaccaaattgttgtaaacataacttggggccaattgttgtaaaatgctatcaaaaagtaaaacaaaatgttatcaatgttttaaagataggtaaaacttatcttaatattctataaaaagaaaaaatatgtacttataaacaattacctccataattaataataatatttattt

SEQ ID NO: 108481 - DNA, 351 bp, Glycine max
ctactttctatgtctatttacagcagtaacacatgaactaatggctacttaatctaggcttaagcttgaaagactcattgcttttttaccatctgcaggaatatatgagttcacatatatcatgtgtgtggtgagctgaacactgataccttacatactcacactgcgtcatgtaatatgctgaagacatgcatcactcaaatgaccatttcatatataaccatccctgtgagtgtctagtgaccagcctacaactccatgaatcactggtgaccttgcttgtctgtgaaactaatcccctaccttatttacatcctataaatcaataatatttgtgctgaaccacccttt

SEQ ID NO: 108482 - DNA, 371 bp, Glycine max
tggtgggtggacagaaactagcctgcatatcttctgctcacactgttgtgggaaatctattatctcagtgatcgccacctggcttggatcaactaacacatcatctgtcttattgtgccgtatgttcacaacacatcttgtgaagccacaagaacgaattggtgagaagctaaatttgataacagccacacctaatggcgacacccaatgtgtcacacacaatggacaacaagaatgacctatgtaacacacctacggtcacaggcttgataagaaggcgcgatattgccatgtccttaacacattttttatggagctgattatgcaatgcaatttggctactacagcacagtggtctcggtgagttcgaa

SEQ ID NO: 108483 - DNA, 127 bp, Glycine max
  unsure (1)..(127): unsure at all n locations
agcctaatcctntctngatgatgcgacaatcttctcaaggatntcgcttagctctctattngaaacttctgcttggccacttttctggggatgataaagtgatgctatcttatgtctgacattgtaa

SEQ ID NO: 108484 - DNA, 199 bp, Glycine max
aatgctgtaactcatactgtggttccatttgtgagattatatggtgaagctttaactacaataataaacttatcattatcttcattgtatgcagtggcacctagctagatacatctgtgcatgtttatatgaacattgcatgaaaatgtagaatcttataaaatgagtcaaatctatcttcattaacaaagaacctgtc

SEQ ID NO: 108485 - DNA, 264 bp, Glycine max
cttcatttaactaatagggaaaagacaattgggagcactcataccaacgatatccacataggtgggataatcaaacaaatatgttccttcctcgaactcaggaaatatcatggcggcaaccaccttacagaaaatgtaatggtattttatgagcccaactttaatttgcattttatcggtgacaaactttgctctcaatactaacatgaagccaatccctacataccggtctaaccacccacccataacttcttgaaagaactc

SEQ ID NO: 108486 - DNA, 159 bp, Glycine max
  unsure (1)..(159): unsure at all n locations
atctataaacttatgtcatacctcggtgtctgctgatagataccaggaatnggttcacaatatactaaatcatgtacactagttaatatatatctatacttggtaaataagcagaaagtaccatgtaactatctccactattatgtcattatcattgga

SEQ ID NO: 108487 - DNA, 242 bp, Glycine max
  unsure (1)..(242): unsure at all n locations
acttttcctcgaatatagcaccgttagacgcggcaccacacgctcaaccgcagggggctnttcgagcgacctcactaggacacattctgttcagagaataggcccgcgggcaccctggtactccatggcaagttgaccagaatatccttgatttatccatgttggcacagagaggcggcggacttaaaccgggtagggtagggaccgttatccaccttggcattctggattcgtgtgtaaaa

SEQ ID NO: 108488 - DNA, 236 bp, Glycine max
  unsure (1)..(236): unsure at all n locations
aaaccccattacccacgagattaagagaganagaagtcaccccaacctgagnattggatagtccactcgtagccacgcacttcacgactccgaanatgctctccttttgcgtattggggcagaaatgatggccanaggttgaagctntgcttggagcttcaatggagaatgaagaagaagaaaatggcaacgtgagggagagagagagctgtctgataagtgcggcggctgagtga

SEQ ID NO: 108489 - DNA, 300 bp, Glycine max
ctgcacaagccggaagcacatgtaagtttttttcttcatgtgtgttgataaatgctttgaaaataaggagttacctgcatcgatctggctttcttgaatttataagaaatatcgattatgttgatagaataatgagattgaatcagtaaggatcttctttacgcgatgatttagaatttaaaaattatgttataaaaataatattaaatatttttgcactgctactccttggttgaaatacatcttaaacgtatataagagtactctttccaattattacaatgtaaatgatatcattat

SEQ ID NO: 108490 - DNA, 214 bp, Glycine max
gtatcgctacaattcacacaacatacagccggaactaaaggtaagctgggtgctaagaggactactcacattatgcgtgcctcactgccgcttcatcgaaactgcgtgcactgataatgatcggcaaccaaccttctgcgctggtgtgactaattagttttactttatcattctgtttatcctttatactataagcttcaatacctttaggccc

SEQ ID NO: 108491 - DNA, 291 bp, Glycine max
  unsure (1)..(291): unsure at all n locations
aagtcacctgcggctgcagcttagcctaagtaggccatgtgctgcttctctatctctatcaatctnnccctctnagctncgatgatgccgaacatgaatgcgacattgagtgcatctcgagagtctatgagatggatnggaaacatgatccatttgcctatcctgacgaatgcataacacttaataaaggagtgattcatcatcatcgtcatggatgtctatatattacttatgcacgcactcacactcgctcttacatatatacatatataaccatctttatatacatca

SEQ ID NO: 108492 - DNA, 264 bp, Glycine max
  unsure (1)..(264): unsure at all n locations
agacttatctccttgaaaagcttcccgagggagcggaattcctatccaaggaccgtaagctgatgataagactgtttgaacatggtgctaatagaaataatatgagctatgcactgactaaacttatgttgatgtcactggtgcatcatgacagtctgcataaatttccaatcatcattgctgtatgagtgtcatggaaataaatgtgtgacatccactttattcctgaacagtggccanaccaacacnctgacatacatcatg

SEQ ID NO: 108493 - DNA, 408 bp, Glycine max
  unsure (1)..(408): unsure at all n locations
tagcgagaagggacacatggactaggcgcggcgggttcattttttttatccatggcgctagccacatccctgtggcaccgctctgactacgtctctcacgaagcatatctcngtcttgacacacgggccatcaatctccaagcttcaaacatcaagcaaacagatgttaccgacaagctatacagccaatcaaacagacagaggcggagactctgccaaacaccaccaaatacagctgtctcacttaagacctagtacaattcttcatccaattcgtacggtggatcgactcaaattactgaagtcatttcatagccacattgtgcgttggagctatacaacatcataatatttgtctactttcacagcataccacagcatttctgacttgcaaatctgtgacaatta

SEQ ID NO: 108494 - DNA, 162 bp, Glycine max
tatcttggatagatttgaatctcttcgaggttttataagttttaagagaatcgatgagtgagaataaattcatgattgctttcttaagactcacgcataaaaatactcttgtctattgatcgatcatagagtgtgctgcttcggctatgttgttctcatcgc

SEQ ID NO: 108495 - DNA, 371 bp, Glycine max
  unsure (1)..(371): unsure at all n locations
ctctgctccgtctggtaanatcaaacaatctctaactacttttgatcttagtctgatatacacctcaatgtgtcgtccctcttctttctgcaaaaagaaatcatatcaagaaacatgatgaatctagaaatcatataagaacatgatgaatgacataaagccactccatcttaagccttggtaatgctgctctttggggggttgtaaaaatatcttgcctcaaaactatacgacttttataatcattgatgtatgaaaagaatgtttcactgctcatctctctctctcttttcttctctgttctcatcgagctgtcaccgcggaggacccactacttaacggccaacctggtgaacgggtgtactcttgag

SEQ ID NO: 108496 - DNA, 147 bp, Glycine max
ctcagctctaagaagctcatgagctgcgcggtaaacgttgccagccttcgtaactcgtgatcttcttaatttggtgtactcacagacatttactgactacgtggatctgaattgttgagtgtgagctcgtcccaagcttttattaac

SEQ ID NO: 108497 - DNA, 287 bp, Glycine max
  unsure (1)..(287): unsure at all n locations
aattttaatggataccgcagcgcgcccgactgcgatacgaagaccgaaggaaatatatattacttacactcgggagcctnacactaatatatataccagatgatattactgctactacgtaacaatcgaatcaatacacctgtacggcacttgtcactccactccaagaccattgtgatcgcgtactgcgacgctggacagtttttccataactccaatgttgtacagacccacatccaagctcacgcacagtctctctcgtaaactgatctgcttcgatgtgatta

SEQ ID NO: 108498 - DNA, 391 bp, Glycine max
  unsure (1)..(391): unsure at all n locations
cacttcgttatgatataaacgcccatgactcatggcggccaaacagcttgccttctatgaaattaagctgatcgaaacgtgcttgggcccattctgattcctttaatttggattccgccaagattcttaatgacgggacttccacctcanacggtagcacaacctccattccatataccaatgagaacagtgttgccccggttgacgtgtgtactgagggtcggtaaccgtgtaacgcgaatgggagcatctcgtgccaatcttgatgacacggcatcttctgataatttcttgtattctatttgctgcctcacngctcgtcatctntgtcggtnggtgtgaattgtatgtggatctaaattctcgcacattcccatcatctgtatcaagt

SEQ ID NO: 108499 - DNA, 383 bp, Glycine max
  unsure (1)..(383): unsure at all n locations
gctgatgaattccgtggccataaatctatcaattataacattgcattactgagtgagtatttacacaagaaacttttgagaattctcttaatgttcgaccagtatatttgcacttgaaaattactatttttaattataccgctaaaaagaggtggagcttaagctgtgattattctgcgccaattctttgtttggacagagaactgactttattttcatctaaaatntctatatgagaaaatatccgactcattcagcccacaataaagatatgaatcnacctgtacataacggtctcacagactatgcttgcaaaagtaaatcatcgatgctaacatgcaggatgcgacacaccgccaattatgtagaaaatataactcacg

SEQ ID NO: 108500 - DNA, 283 bp, Glycine max
cttctgcttgtgattcgtgaccacagagtggtacctggagatatgtcgcgggggcaggagaaccttgggacgtcacgtggtgtgctattgcccaataccaagctagaccaatctctacccatcccgtgcatagtcagtctatgagaacctgtgatgtacctaaacatgcgagctcctggcagtcaacagataataggaatatagaccactaagcaaggaggcttgtggtggctggccagctatgaacttgattgatgtgtgagagatggcctctggtaatcga

SEQ ID NO: 108501 - DNA, 409 bp, Glycine max
  unsure (1)..(409): unsure at all n locations
tgaagtacggaaagttttggtcacacatcaagatataataaagagatctaagagttattttaattattttataagcattctgatgatggactgcgattgactttgtaatatggaaggactagtaatgtatgaggacaaacagaatntggcttaccaccgtagaattcagattggagtggtgaaataagtccttaagacgatgatggatggatagtggtgaaatgattggtctagatggtattcctattgaaggttggaagtgtgtatgaatctcgagtatagaatatcttacgaatctctgattagactactattgatgtctgaagtgtgtacgagtctccacttagaatatataagaatcttgattagatactattgttctgatgctcatttaatatataaatataga

SEQ ID NO: 108502 - DNA, 237 bp, Glycine max
  unsure (1)..(237): unsure at all n locations
accatggtggctggaaatcaacaatagagaaacctagagaagagtggtctaaagaagaaagaagactactgtagtacaatgtaaaggctgaatacatcattacctctgccctangaatggatgaatatttnacggtgtcaattgtcagagtgtaatgatatgtgggacactctactangtacacatgagggaacaactgatcgtcaaagatctaggataaatactctaactcatgag

SEQ ID NO: 108503 - DNA, 390 bp, Glycine max
  unsure (1)..(390): unsure at all n locations
ctaagctgaggcaactgatgcgtggtcaactnggtacccagctggccttgaatcanatatctgtacctgtcgcaagggtttgtggttngtgctcctctgctgaccaccatacagacctttgcccttccatgcagcaacctggagcaattgagcagcctgaagcttatgctgcanatatntacaatagaccttctcaacctcagcagcaaaatcaaccacagcagagcaattatgacctttccagcaacagatacaaccctggatggaggaatcaccctaacctcagatggtccagccctcagcaacaacaacagcagcctggcttcttctttcaaaatgctgctggcccaagcagaccatacatttcctcatccaaatcaacacagcaac

SEQ ID NO: 108504 - DNA, 251 bp, Glycine max
  unsure (1)..(251): unsure at all n locations
gctctatcaggctatctggtgtgagctcttcttcatggctatgcttaatggtggcgcctnctctctacctatttcctttgtcttccgctgcatctncatggtggagaatcaccattaaatgactccattgaagctcaaagatccagcctccatagaagcctcacaagctagctctcatcaaaggtgcagatgacgatagtagtcactggatgctaccagactctcgagtctgacagatagcaaccaacaca

SEQ ID NO: 108505 - DNA, 465 bp, Glycine max
  unsure (1)..(465): unsure at all n locations
ctatgagctctctactggtccctntcttcccttcgcaactngagttcattattgctacnccatagagcatcgcgaaatttgttccggtcatagtcttncttgcgagccctcttgtctcttggtcaaaggctcttgcgtgtattgcatatctcttccgtaacccggcacactccttccgaacgtgtgtagcagccaacttggaccttctcttggcgagttgtgcctttctaactcgcttttgagagcatggactatctcgtnctctttctgtgctgcanaattctcttcgctgacgacttttaacttggcgagccaatctaacctcgtatgcgaactttcagcatncgtggtcccaccatgatgccatacaacgcctctagctcttgatcttctaacgcgttgcatgcttatgatcttgatagctggatttgtcgcgagacctacaagaaagaacatgcttttctc

SEQ ID NO: 108506 - DNA, 75 bp, Glycine max
tgaatatgtaggattaggatcatgtttcattaataatatagatataattggattggattatgatacattattatc

SEQ ID NO: 108507 - DNA, 273 bp, Glycine max
  unsure (1)..(273): unsure at all n locations
aacttcaaacacaatacagtttataaaccgacattctgtcattgtaccgtgatcatcaattttctggagcttagtcatagcctacgtttgaccgttggatctacagcanaatacagactcatttgactgctcttcacaacagcaatgccagtattttctgcctgtgcaaatctgctgacaattcacagcaaaatctgacaaatgcagattcgaaaccacactttcnctcatcatcttgccaatcaaatctacaagtcccaatatgtataatat

SEQ ID NO: 108508 - DNA, 424 bp, Glycine max
  unsure (1)..(424): unsure at all n locations
tctctcactttttgngtngangacgccacacatgaatatgacattgagtgcatttagagagtcttgagagtgggatggagacatgatccttattcttatcttgnaaaactcttacacttaagtaagggataattcatcatcatcatcatcatagatgtcaaaatatagcttatatatataccatcttatataaacaagctcacatgcttgcatgtaccagatgaaatgcatgcttctctccctttgcctacaggccaagggtgggtccccaaaaaccccattacgacataacctttctaccttaccgtctactttaacaacacactaccttctactaataaactgctgtaagacttacccacaactgctcgtgtcttgtgagagaactctttattagataaatcatgtacattgtgctttctct

SEQ ID NO: 108509 - DNA, 340 bp, Glycine max
  unsure (1)..(340): unsure at all n locations
ctcttctcgcgtctgcatgcttttatcttgaacaaatgatgtctgatgttgaaacatgtatgaaatatgaactttggagaatnttaaaatgtgaaattttcaaaatggttcttagacatgaagctttcttataaaaaacaaatggtgtgcctaatgtctcttnaattgctggtgtgacccatagaggttatgggattggtccaaacttaaacatcagacatttatgccttataaacgaggcgaatttgacatgatgttgaaagcagcaagaaccttgtgtctctacatcaaatctgatgtatctgattgtggtcaacacatgaaatctttggtgtgtgat

SEQ ID NO: 108510 - DNA, 200 bp, Glycine max
  unsure (1)..(200): unsure at all n locations
caagtatgcctgggtgcttgataaagctaaggctgagcgtgatagaagaatcacaatngatatttgccttgtggaagttgaaaccaccaagtactattgcacagtcattgatgcgcctggacacatggatntcatcaagaacatgatcactgngacatcccaagctgactgtgctgntcttatcattgattccactactg

SEQ ID NO: 108511 - DNA, 296 bp, Glycine max
  unsure (1)..(296): unsure at all n locations
tagcacggctgcactgtggcccagggggtattttcttcctagcaccggcgactataatgatcnattgacatcaaagaagaaacaaattcacattgctagcgttaatgtaaaatacttgcatggatagtataatattatatatatctttagatctcatcgcatctggaaagatatatcatattaatacatattttgattgataaatatatgacctcgaggattagtcatcttaaaaaaatctttaacggccaacctatgtatggataaatcgtactatattagcaaaactgtatatg

SEQ ID NO: 108512 - DNA, 468 bp, Glycine max
  unsure (1)..(468): unsure at all n locations
tcttggtggngaagctccttacttcatggctgattctcttatttgatggcgcctcctctcacctcttctcctttgtcttccgctgcattgtcatggtggacaatcaccattaaacgacctcattgaagctcacagatccagccttcatagaatctccacaagcaaacttgcatcaacgccccgacatacacagctaagaccctatactactacaatggccaacatacatcgccatgacgaatgagaaacctattctaatacttacaaagataagcgcgctcatagtatgccatgggctcaaatctacctaatgctcatgagacnctatggccttgcttgatctctagccaactactggaagtctttacaatgccttgcgtgtggattgatcatccatcacttgaatggatcgactcaatccatgttctatctctggctccttccaccctgtataaacaaaccattata

SEQ ID NO: 108513 - DNA, 181 bp, Glycine max
tacatacatgctcattcagaactcatgacttcaacacatgcttcactctctcattgcaccaattcacaacaccatattcacaagaaataattatgtgtgcactgcatactaagataatcaagtcatactggtcagtatgcttcaagacatgcatactactattcacaatcaataagtaccc

SEQ ID NO: 108514 - DNA, 211 bp, Glycine max
  unsure (1)..(211): unsure at all n locations
atcaagagagcacgtcatgcatttgaacgcagtctgcagacgctacccctgtggtggccgagaactcaatacatacccgggcattcttcaagttcactgtcttggaaggatatatcttgctctttgtgaaaggaagtgatgtagcttcttgtcgagctngtacgcctcggatcttctntatcaatggagttctctgttctttaatatcaat

SEQ ID NO: 108515 - DNA, 173 bp, Glycine max
  unsure (1)..(173): unsure at all n locations
aataacttataatcttatataaaatataatacaacctcttaacaatcccccaactccanaattgcaggattcttttcttttttgtttctatcgtaaatgtttcttctccatccatatagagtggggtggggacatacttttcttttaatggtttgccatggtatacttttttg

SEQ ID NO: 108516 - DNA, 282 bp, Glycine max
  unsure (1)..(282): unsure at all n locations
tggagatgcagcggaagacaaacgagaagagatgagaggaggcgccatccactacggaataagccatggaagaaagagcttcaccaccaagatgagcctttgataataagctnggagagggtgcttcaatggaggaaaagaaagaaggagagaaagagagatgtgggagcacgatattgaaggaatataagaggtagagaagtggaactctgaagtatgtctcacaagactctcattcatcacagttacaacaagtgttacacatgcttctatttatagact

SEQ ID NO: 108517 - DNA, 268 bp, Glycine max
tctgctacctactgccgggatgctttcctggcaaagaaagaatcatcagaagaagaatcataagagcaagaaagaattcatcagaaagaagaagaatccatcaaatggaaacaaagaagaaaattcatcagatgggaagaaaaaagtaaaaaaagtcttcaaaactaaaatggcaagtttgaccacattacatcgatgtccatacaagagaagaactgctaatgctttcttgttccacaaattcctcacttttccgctacaaacaaga

SEQ ID NO: 108518 - DNA, 240 bp, Glycine max
  unsure (1)..(240): unsure at all n locations
atcgtagactagactcangcctnttaacacctgctctgacttgtcctattctcacncctatcttangggtggtaatgtgacctatttcccctgatntgagtgtaatgtcaacattcttcttattcatattcttgatatgttttacactatgtctctctattttaatttctccttctcatacatgcaagttataaatagagcaaatatcaatttataatatttaagctaaaaataataata

SEQ ID NO: 108519 - DNA, 205 bp, Glycine max
  unsure (1)..(205): unsure at all n locations
ctgtatcatacaactgatcatcgtttgaacatgactgaatcatgaactttgaaccattgttactgtatcatcacattgtatcatccaaagaaactctggactgttgaaaatctgctctagttgaaaacttcgctactgatacttttgttgaattgatggattgttgtctgactgactgattactcttttctgaggctnacttctt

SEQ ID NO: 108520 - DNA, 310 bp, Glycine max
  unsure (1)..(310): unsure at all n locations
tctctgccaatgtattttccttatcgtaggtataatatcaatgtcgtggagccaacttctatcgatgtgatagatagaaaatttagtagactccgctgactacaacganggctggtagctataaaagcccaatgttgtatgatgaatatttcattatatngtgacanattcngatatcttgaagttaaagcanaaatctgttaactaactctctctatcgtattcatcaattatctttcacttctagaaccanatcaatactactntaatgcattacgtgataatccaatgtcaagtagtataaacaagt

SEQ ID NO: 108521 - DNA, 103 bp, Glycine max
  unsure (1)..(103): unsure at all n locations
aaccatcgcatcagaaaagtattctgttgaattgtcaagcttcattttcattcagcgctagaatatacnggacacaatcgacatcgagaaaagtttgcgtaaa

SEQ ID NO: 108522 - DNA, 302 bp, Glycine max
  unsure (1)..(302): unsure at all n locations
tgtactactgtgtgataggagagtaatccttttgttatatactccctgtaatattcaagtgcttccgatgccagactgctaaagtcgagacaggcgagacattccccggacacatacgttagacggcacaccgtanacatagtgcgttcgacacctcctagcacattcgatcaagaaagccgctgccctgtctcctgcaatatcaaatctatttccactgccaagaggcgcaaatctgaggcggacctatcacttccctctgtcagtgaagccacaatgcaggacgttgtaaagaccatctt

SEQ ID NO: 108523 - DNA, 314 bp, Glycine max
acttgtttagtgaatcctgggtgcactgacatcactgttaatactgaatggcctcttttgatgagttactgatttaacttgccaattataaaaccagcattgataagaaaatataaatgccattgagatatcatgccgaaaaaaggaaggaagggctgtgttactaaattgtttatgtgctttttcatctgtcgaatcatgaatatggaacagcccacgagtttgatttttaagtttctctattacatcagattttggcactgtttgcgttttttatggatactgaatgctgaaccttgtactcatatttttgc

SEQ ID NO: 108524 - DNA, 211 bp, Glycine max
  unsure (1)..(211): unsure at all n locations
tatagatccctcttgtcagactagactcatcttaagcagcttacgaaagtntaacctaatttatcctaagcttcatatgcaaatccctcttgtaagactaagtttcgatcctgcttcaatcaagttctaatgcaatagtacattttccaatgctaaagtcacctaactatgctcacaaatggatgatcagaccacaagcttacatacatta

SEQ ID NO: 108525 - DNA, 59 bp, Glycine max
atgtgaactaagattgccaatcatggccattgccctggcgactatgtctataatgtcat

SEQ ID NO: 108526 - DNA, 256 bp, Glycine max
  unsure (1)..(256): unsure at all n locations
ctgcagctgcttgtcatgcatcttgtgcgaactgactaatctacatgcttgtttctattacactacacttgtcatnggtgcaaagtgcanatngactaatgatgaagtttattgngtggccagccataattnatccacttaattagctcagtgcacactcttgctgaaggcagaataaagtcatcatcagtacangctaattcttggaattgggttgagttaataatcattataaactgattataaggtaaacttc

SEQ ID NO: 108527 - DNA, 344 bp, Glycine max
  unsure (1)..(344): unsure at all n locations
tttacttaactaaccttattatctaactgaatangaaatggaaactatctaaaatcacctaacattggaaattctagaatgatattgatcttgaatcttttcttattctcaaaaacatttggtgcacgctataatttcatttatagtagcttctgttaatccctagataatgtcaacaatatcgaggtggatatttggttccatggtcatgtgtcaatagaacatataattctaagactatgtcaatctctgctaatgggttgtaagtactcagaataaagatctgcctattatttcatgaatgcatgaatgagagcattaatcaagatatctcataatatatg

SEQ ID NO: 108528 - DNA, 231 bp, Glycine max
  unsure (1)..(231): unsure at all n locations
agcacctgggctgcagctgatacatgaactcctactagcnagctaatatcatttctattgctcaagttccttcgctagtaactgacagcgtacacacttatcgttttgctcagaaaatctctttttttaacaatcttaacacaaacatcttcaggctttatataaacttcaaagcttcaagccattgaggaatcccagctagccgatgtataatatgcttggcgcttgaca

SEQ ID NO: 108529 - DNA, 238 bp, Glycine max
ctattactatacattcagtcattaagacactatgtcatttgttccataattacatctagtacctcaaagctcattagtataatttacctctaaccactacacagacgattttctgggatgcccatcttttcattacacactactttaccttactgactcatcctggaaattttcacaccaattattctatttcatgttcccatacacacactgactactacatacttggtcctggtat

SEQ ID NO: 108530 - DNA, 412 bp, Glycine max
  unsure (1)..(412): unsure at all n locations
ttctaaggaagctccttgctataatagaacatgtgaacacttgcggaactntgataatgcagtcttgtggacacaactcaacatcaacttctctcctctttactcctcaattcgagctcccctcctcttctctctcttatcttctctcattgaacatctctacagcttttatcaaggacattttggggtaagctctctacaggctattcctaaggtggggccgccttcctttattcttatcttcctgctctcatgggagaatcccttgagacctatgagctaaaatccccttatgaacttcaacaactcatcatgactgattgcttgactgcctataactgacttacacatatgccacactcactctcattatttactatactcacaccacagtagctattactctattttt

SEQ ID NO: 108531 - DNA, 162 bp, Glycine max
  unsure (1)..(162): unsure at all n locations
tacacacacctctctaataagctagctcacctnctcgagatgagaagctagaacgtagctacacacgccctattatagctaagctcacccccatgacagaatacatgataatacattaaaaagtccctactacanagactactcataatgcctcgaaataca

SEQ ID NO: 108532 - DNA, 205 bp, Glycine max
  unsure (1)..(205): unsure at all n locations
tatatatgaataacaactatttatcaacatacttaatggacaaattattatgaattgtgctggtcttaatattataatatcgtcacctgtacaatagtattacggacactcctagatcctgtagcttctgtgctcctgcaaatntgagtcttcgatggtactcgctacatctctgttctgtttccttatcaacccacgagcttat

SEQ ID NO: 108533 - DNA, 229 bp, Glycine max
atctcctaaaagcagatactcgacattccagagttctgtttaaaagcccgacacaacaactgctatatccatgacaaagctaacacatttacaactccgccgattaacaatgtgtgttggaggagaaagactgttgcttttccggtctgcctgggtgaacacgtcgctcaaaggctacagtgtaatatgaagcgccccgcctcccgtgatgatacagacgggtttaagg

SEQ ID NO: 108534 - DNA, 201 bp, Glycine max
caacacatacctttctcggtgatgtgagccgaattatcaacctgaatgatgtgattttactatcaacacttacttttctcgagttatgagccgaattcaacgctcaatgatgttattctggccattaacacatacttttctcgtgttgatggtccgatattcagacctcaatgaagtgaacttacaataacacatactttc

SEQ ID NO: 108535 - DNA, 387 bp, Glycine max
  unsure (1)..(387): unsure at all n locations
agcaccgngctgcgcttaaaataaatcatatacatatgtaactaatagacttaatagatttattaaatatttcatctacctgctatatttctatgcatatataatggcttaagtcgaacatacacgtcaaataaaagttaaatanttttatacgatagatttattattttcattttgttacctaaaggtgtattggctaggtgatcatttctgttaaccttttgtgaaacctttaacttctgtaaacaacctttagacacattttatggcaaagaaacgtaatcnggcccaatttagctaaaaatagtttataacaaagattctctaacacgaactttttacaatacactcaaaaaaagtttttttaataccttttacatgctctat

SEQ ID NO: 108536 - DNA, 279 bp, Glycine max
  unsure (1)..(279): unsure at all n locations
agttcatcatttntcttgaagggagtaaacttgagaagcgcttatgtctggcatcatcaaaacttcatataacatatgcttctacaagccaatntatgcgtaatccacgtgaataacatatggatgcagtagatcgaatactctgctatntanaatcctcaccaggaaaaagggtgatcttctctaagaataatcacttgagtgttgaacgggacaccggcgcacattgtgcagagaatgttctatacagaagaatcacatcaagatacttcacattta

SEQ ID NO: 108537 - DNA, 435 bp, Glycine max
  unsure (1)..(435): unsure at all n locations
agcacctgngctgcagctaactatccaacatggaagctcaatgcttcacaatttttacattattatatgaacaaacctacaaactccatcatattcgaactcatcccacatataaggaaaagagttaccacctaattgagtcccctaaatccttacatcaaatcttctttcattgacaaatggccnagtgacttagggttatggagagaaaaaagatggacggagaagaacagacttttgaatttcttggtgatgagaaaaaacaacttttgtaaaagaaactntcttttcttattatttagatgccagcacattaggagcaaggcattttttggtatatgtaccctgaagaaactacttgaagcaaactgccgtgatgttcttgtcaaccttgttttgccgcggcagttaaggcatttttttttctctattttt

SEQ ID NO: 108538 - DNA, 255 bp, Glycine max
  unsure (1)..(255): unsure at all n locations
tatgattaatgaatccatcccttctataatggatgtcatctatctacggataagtgtgaatgtctctgcaagtgtgatacgtgcattcgaatgtcacaaaagttcattgctgcanactgctaccgcaatatgctcattgtgtatgntaatagctcatatgcttctccctacggatgtgaacagatataatgttacttgatggctcgaagctatggaagtgcagaactctctcatattaaagtgatactgtcttgc

SEQ ID NO: 108539 - DNA, 165 bp, Glycine max
  unsure (1)..(165): unsure at all n locations
tatggatttcttccacccatattngtgctacctttgaagatgtacaccaaggaaaagtgtacaatntatccacaggagagtcattgtatgtgtacattcattagttactactaaactttatgtgcttctctctctaagtgttcttttatgaaatttcgtcaaatc

SEQ ID NO: 108540 - DNA, 428 bp, Glycine max
  unsure (1)..(428): unsure at all n locations
ttaactagcctcacttgtgacgcttatcattaaacatcatatattcatacaaaatcaggtttttactatgtcaagattttataaaaatttttttctctgaatggtgtccagagataccacatatggcgacaaatctccaattacacaatataaaatgtaatttaaatatattctatttatgatttaataagaaaaatgactaactgctgacctcccaatgaattcaatgctgcgatgcataaatcaaatgctgtacatttttaatacttgtgctatataaaatatggaataatagtataagtattggatattatgtttatagtaaacctcctgatactatatttcgacactcaacatattataaatcnatgtcttattatcttctatggttgaccagcatatacttttatataaactgtcttaaatat

SEQ ID NO: 108541 - DNA, 472 bp, Glycine max
  unsure (1)..(472): unsure at all n locations
tcattctcaaacactcatttcataccanacaatccactgtatatcattttcaatcaactcactggttaaacaagcaaacaactcaaagtgctgaaaatttaaataactaannattaaaataactggaaaataaaaactgaaattaanataactgaacatatatcataaaataactaanaatagactaaaatggttaagatgcacaaatttaanatgtnctgctcatgatggatggcaagccaaccccaacaggctgtcatgaaatgactgcccctgtgatgcttgaaaccagcctaaaagtatgctacatatagatttgactgaataaataccagtcaatcattttgatgatcaaatacccgcctattatgtaatacaatgtgaagaggaccagtaaaagagacctcatctgatacaagcaatctactagacttatgcgcatacatactaatccttagatgtatactgaatc

SEQ ID NO: 108542 - DNA, 239 bp, Glycine max
  unsure (1)..(239): unsure at all n locations
tctcaggggccacttgaattccatttctaccaactaccaatcctaataaaactatattatctacacanaaggtacacttctctatattggcatanagagtgtntttctaagaactgaaagaactngccttanatgtcctaagtgatcatctanggctctactgtacactaaaatatgataaanataaacaactataaatatacctatganatccttaagacatgatgcataagcctcat

SEQ ID NO: 108543 - DNA, 212 bp, Glycine max
  unsure (1)..(212): unsure at all n locations
tcttaattagtcactatattgttcctttcttcaactgagaactccatnntgtggtccatatanacattctnnctctaatcttcattaagaaagacagngtttacatccatctgatgtagctcccagtcataatgggctactaatgccataataatccttaaaaaatctttttgtgagaccagtgaanacgtctctttataatcaatgtcatc

SEQ ID NO: 108544 - DNA, 350 bp, Glycine max
  unsure (1)..(350): unsure at all n locations
ttacacagngcagatttgaattcaaatttaatagctgntgtaaatcggntttggccactggtaatcgatacatcctctggntgatcgataccagagagtgaatctgttgaataaaactntntaacttaaatttcttggccaaacctcttgctacttcaattggaattctcttcctatntaatataccctctctaagactctagagactgtcttgatcatccatcttgaatatctataatttctctgtcttgaataaagctctgagacgcatgtgaacctcttgcatcatcacaacattcagcttgatcatntgnctacatatatatgtatatatatatgtgngtgcgtga

SEQ ID NO: 108545 - DNA, 184 bp, Glycine max
  unsure (1)..(184): unsure at all n locations
tcaatggngcataacacaccanatgattatgatgatggatggctcanattctcacataggtaaactcatcacttttcaattgagctctcaaaactatcatgacatgtagaggagaatcaaggatntcaattcacaaaatgtcaagaactcttatttcaaaacaattacccatttcttgaacata

SEQ ID NO: 108546 - DNA, 155 bp, Glycine max
  unsure (1)..(155): unsure at all n locations
gagaaatgtccgtgatttacgcttatttactaanaggatatttctcgtattatattattactttatctcttcttgatttgcaatgtggttacagcacgaccgaacggtccgattttattttaactcaagtctacggatcatacaattcacacgtt

SEQ ID NO: 108547 - DNA, 354 bp, Glycine max
attaaaatgtcttaactgcagaccaatgatgcacatataatagatagggagagagatgcaaccagttcatctggtcgaaactcatcctcgtcagactcagcatcactgaatttcactccttgtaaacccttcaagctgaccaccaggcacccttccttggtcacatcttcactagaacctggccttaaaatttttaggaagaagaaagttctttgagaaggttcaatgtgcatgaacttttggtgcgggtgccaattttgaaacttcatgaatttgattttatttttacggaaattgaccaactttcattgcagaccttttgctgtgctcaacagtgaggcgggatctgatttt

SEQ ID NO: 108548 - DNA, 177 bp, Glycine max
tactatgattaactgcctttctcccacaaacttcaagctatggtggagcagtgatggaactactccgaccgtgtgaatgcactgtcggcctataatgcatctatatgccagattgatatccttcacttggaaagtgatcagacagatgtgcgatcgcatccgaatcaagagatcaat

SEQ ID NO: 108549 - DNA, 322 bp, Glycine max
  unsure (1)..(322): unsure at all n locations
tatttagatgaaaaatctatttagctagaaacataacaaatcagataagataacactccacttataaaagaaaaaaatcatgaatgaatgtaattaatanactatgtaactaaaaataactggttcgtattaatattntaatatatgtatgggtangcatgtaaaaaaaaacagttcttttccttcacttacaaggtgatggtggccaattgatctacttacaaaacaaacaactatgntaggaggtcaagtatctccataaacctatacaatggattacttactacctaaaagctatataaagattatagttagccttttt

SEQ ID NO: 108550 - DNA, 194 bp, Glycine max
  unsure (1)..(194): unsure at all n locations
ctgccccatcatttgctataagatctaatatgtttctttttaataataatggtctgcgatcttctgaaacattacggtcaatctcctntctgagtcaaggacacaatgcatgcttctcacctacatagtaatgactacttgcttcgtcagaaacgctatatttatcgagctgtgtaatccaacacatctctgta

SEQ ID NO: 108551 - DNA, 226 bp, Glycine max
actagggggtcttttaagtttccatgtctctatgctctggaacaatgcaatacaattatttgattgggacactctgtcctttttctcccatgattttttataaaaccatcatttgcccgtcggggtgatttttccaacgggcgctaaagacaataaaggcgcacagggttgtccctccaaattattgctccacatctcttcacacttcgctgaggtattcgggaaa

SEQ ID NO: 108552 - DNA, 262 bp, Glycine max
ctcactgacaggagtgaataggtaaataataatttatgtaacgaccaacaggaacaataattggaacattcgttttgaaacgtgtaacaacaccatggtttgaaacatgtacacataatactggtttttaacatgtaaatgacacacatgtttaaaaccagctcactatgttttcaatccaccgcttgtacttagttgtaacatgtagagcagtacactatctatgtggatcctcaatgagaacctgcaaataacttaaatt

SEQ ID NO: 108553 - DNA, 165 bp, Glycine max
gcaccgagctgcagctgagatatggacaatacagggtctagggctgggcatggcacacagttcaatccaaagcgctaaccacatcctgtgccactcactgactacgactcccgtacccaatctcgttattaacacgagtctctcaacctccaagcttttcacatc

SEQ ID NO: 108554 - DNA, 108 bp, Glycine max
  unsure (1)..(108): unsure at all n locations
cacattcttcattcgttcttcatcgntcctcagtcttcaacaggtaggtgcgctcgaccatgcttgtcgatacattctatgtacccgtcgtgtgcctcattgtgtctc

SEQ ID NO: 108555 - DNA, 253 bp, Glycine max
  unsure (1)..(253): unsure at all n locations
ttaaagcatcacacttttgcactcatatcactacattctcactntgtaacccctaagtaactctacccttcatctctatcagatgtccatcagcaatctcagcacacaaacatcacagaagcatcatcataaaccctataacagaatgggtaagctggactcacaccaaacatgaacaagttagcatggctttaacaaattccttcacanataactaccataaggcataaacctagtcaaactacccatcata

SEQ ID NO: 108556 - DNA, 207 bp, Glycine max
attctcaagctcgtgtaattcacattcattatagtccgatcgctgcatgaagtagacatcaatttcggagttcaggtaatacagcgctgaatttttccgatggctcgggaaactataccttattgtagagtcgtgtattcacgttatagattcccaacaatctggatgagacatcatttcgacttctgtcattagcgttaaattgcc

SEQ ID NO: 108557 - DNA, 231 bp, Glycine max
gactactatatgtaaataatcaccgacttgtcgaattactttcgtgtaaataataaacggcttgtgataatcttcatatgaaaaaagttaacgctttctcacagttcttatgatgggagacaggaacaagtaattaactatagcttgcaaaattgtgatcgcagtcacctaaggcgttattatgtaagaccttaagtaatactttctctttgttaaatatagtgattttgt

SEQ ID NO: 108558 - DNA, 59 bp, Glycine max
tttaaatgctttgtgatacatattttttcaaatggaacgggagccccacatgagcgcct

SEQ ID NO: 108559 - DNA, 326 bp, Glycine max
ctgagtctttgtaatatgagtgtaccaattttctttatttattgtaactgcgatatccgactctatatgccttgttatctgcactaaatatgaattggactctattacagattctaattatggtggtggtgtttcctcattaacgaaaatatgcccacccctcctttttatttaacttgttcagaagcttaattgaagtatatggtttagtaatgatagttactatcgctctgttgcatatatatggattctattccacttagataaagttcctgagggcgattttaagcccatcaaatgacatggataccttaggataatcatga

SEQ ID NO: 108560 - DNA, 173 bp, Glycine max
  unsure (1)..(173): unsure at all n locations
actagtactctcgtttctagccgtgtctgtggctatattatgacattngaacacatctagatcttctctatttgcatggtatgatcgaacaatcatgaattaatgtatatgactatgtcgctgtcatatattcgatctattcatgattcctgcgtcatgaaagggtcatattc

SEQ ID NO: 108561 - DNA, 280 bp, Glycine max
cttggaaatcttctcggtggatgagcatcaaattatctttaacacgaattttattcttgcatgaaaaggagctagatttttaccttgatgtaagcccacaaactatgttgtcatatgtgggtggctgaaattatactgttataatctggcaaccctctagtttagattaggatgtttgttttcttggagcaaaaacatgcacaataaggggaaaggccttccctttctatttctcctagttaagaagaccctttcaaagaaggggctttcttttatttta

SEQ ID NO: 108562 - DNA, 151 bp, Glycine max
ctctcaaaggctcactcttttccactctaacatacattctactttctaccctagttagtttaccttcgctctacagaattcatctgcattctgctataacatacaactcatccaaaacctaacagatggttgtaactcatcaactgaatca

SEQ ID NO: 108563 - DNA, 256 bp, Glycine max
  unsure (1)..(256): unsure at all n locations
ttgggcttaccgaccacgatcaacanagtactttcgacacctactatatgttgatttcaccaacgctgctatcggtatgtngcgacaatnccttaataccttcattacacattctgagaggttggttgtcatgtgaccatatctacgtccttcttatcataagccatgggcgcattttnctttgaaatgcantcaatccatgnttgtatggctggactcaattgacgaaaattttctaatntngatcanatgtatg

SEQ ID NO: 108564 - DNA, 290 bp, Glycine max
agaatgctgtgacaccttctgaaggcatattcttcctatgcttgcacaattgacactttacagaacattcatgaagtaaaagatatgacttactacccgtattaacttttttccttaagtcccccacaactaggtaggatgatgtgctttcttgcatatcggagtgcctatagtccagactagtcttctcatcagaaatcatagatattatctagaccatcttggtctttcttgtactgcgatgaacctgaaacttatggttcttcagagtttgcttagtatacattcca

SEQ ID NO: 108565 - DNA, 277 bp, Glycine max
  unsure (1)..(277): unsure at all n locations
tcttaatcgaattctcttgaataaaatctgttattaattagtattaataaatcttctgctgaaagnagtanatggtacatatatatttgtttgatagatactgaactgagagaatcttgagagaattttgataaattatgataccattaaagatatgctgaaatgaattaggaatcttatactcttttatttattatttattattcggactctgcaatatatgcatctttagtgggtgctcattatgcacctcttttgtaactgttgtaataccaca

SEQ ID NO: 108566 - DNA, 230 bp, Glycine max
caatggtgcattgccacaaagttgtgaccttgctgtgagctgctagcaatggagccgatattaacgcatgggattcctctatgttaaaatctagcgactatgatctttcgccaaaccgaatatttttctcgctggggcagccttgacaaaagtgatactcggttctgcagaaaactcagcgcaaaaagcgagctgttcctgttggaacggaaccatttcaagttctgcaa

SEQ ID NO: 108567 - DNA, 321 bp, Glycine max
  unsure (1)..(321): unsure at all n locations
ttacttttcttgtcgtgattctggggaatacttaagctatgagtaagaccctctgaacccagtgctctagatgatacacaagtaagtggaaccagtgtctattagaantgtaggttgaaagtgacaccgctgcgttgattacacctaacatgaatttaattttatttattgaactcattattgtatacaagaagtaatttacgaatcttccaactccccttctaatgatctctactatttttatttttttattttcgtgactcgccccttcctaggaagaatatctactataaactggttctctatcaaaaaatgcccctc

SEQ ID NO: 108568 - DNA, 173 bp, Glycine max
gcgctgcactatccaatcattcggacagtctattttttttaacataaactccatatttaatgcttactccaaatatattctcactcaactaatgccatcatttcatcaatgttcacatcacacattcatagtattatgatgtgaaaccatactgtcgcaacctacccttcggc

SEQ ID NO: 108569 - DNA, 262 bp, Glycine max
  unsure (1)..(262): unsure at all n locations
cttctttaacacctgcatgcaacatctattgtagtcacatctgtctntttcgctaacatacatcttgtccactttgagagaacacaactccttacaattatgcattcaatccagaatcaattatatcaccaattttacaagagataaaggtttactgctaacatcaaagtaattaactgttctatgctcatacaagctaccactgtcacaaaagataagttattattgtaatggaaccaacatactcaaacaatgactgaac

SEQ ID NO: 108570 - DNA, 237 bp, Glycine max
  unsure (1)..(237): unsure at all n locations
tacttgtgtggataaggcctatgttatanagtatataacttcgatcatagggatcaatntccagtcgcatagcctcataataattctgtagagcttccgcataatttccttcatattgagctgacataccgtacggtcgtcattctgttcaaagaatcttcgctccagaacacgacgtgagaatttcatctcatacggctgctcccttatgtgtgtatgataagaatcatataatca

SEQ ID NO: 108571 - DNA, 272 bp, Glycine max
cgctcactgagggccccttttattactgtttttcctatggcactttccgcatgaggcctgacgccgcttcatttatgctatcttgaaaatcggccctcttgcacatgttgagttcatctatccgaaccctatcaaattgactgatctgctatgaggcaccattagccttcctgaaggctacgatggtcaagctgtgtccagtacactacccataaaattctggaagaggtacgcaatttcttcttgcgagccccactccataatcatttaat

SEQ ID NO: 108572 - DNA, 158 bp, Glycine max
ctaaagctcaggggatctacatccttgtttaactaagggaagatatgaccgtgcttctcgcgatcttgttttatgctaacaaatgatggtctgatgttgaaacatgataaatgagaactttgagaattttaaaatggaaattttcaaaatggttttta

SEQ ID NO: 108573 - DNA, 190 bp, Glycine max
tcaatttagcttcaaactactcctttttaacttgatgtgccctgttctgcatagttgtttttgacgactctttactagtcttggtgcgactctgaaacaagagatagtacaggcgtaatgcaaattataagtttcttcaaactatgatgttgaaaagctaaccctgtcatttgaatcttataaaaggcaa

SEQ ID NO: 108574 - DNA, 338 bp, Glycine max
caaaaatcagtctacctcaactgaaagttatactaagacgtcatatgcaccctgtccttgtacaaaacagacgccaaagagacacctccacagtcgagggctttagggcatatactcactcctaagtgaagatatctggtaaagcatactgagacactaggctacttagcaaaaattttccacgtaacatactaggattgtgcctctcatatcaaaaagctatcacttgctccacaagcttgagatcccaatttcaaaggaccggaaggttgcctttccaagcccttgtgacgttcttctgacgagcaactccatgtctacatgagcacctcccccaa

SEQ ID NO: 108575 - DNA, 78 bp, Glycine max
atacttgcgtactgtatgctgtcctgtggaatgtatcgccacattccacacatacatctgaactaaatgaatcctggg

SEQ ID NO: 108576 - DNA, 241 bp, Glycine max
tagcacgcgctcagctgctggctcaaatatattgtcctgcttgttcatcatatatcatctcatctcttgatctctttttcatcttttcaacatctcttcacatcttcatcaatcttcatatcttctcaaatttctgatcattctcttccttcacaatatttgacaccttctctcaaaaagtcttgtcaaactggcatcaattttattcttctcatgcaaagacaagacaccgcgatttttg

SEQ ID NO: 108577 - DNA, 242 bp, Glycine max
ctcagctatctggctcttggggactcttttactctttctctgagcgggtctctcttctcttcttctcctgctgttgcattctcctccagaagaaaagatccattgtgaaaatacctacgcctacatctcgaatgggcttacctatgtggatcaagaacatcttcctcatgcgtgttctttcgcttctctatcttttgctcggatgcttttattcctgccttatttttcccatttaccccatg

SEQ ID NO: 108578 - DNA, 286 bp, Glycine max
tagacactgtgatatgatgtcaagagaaaagaatgaatattatagctatctcaagccagctcactataaacagaggccccctcgtataagggatccacatgcacttgtaaaatgcattgctgaacttactcccctccacggaacacttacatgtatagattcactcaatatcatgaactcatgaaagttactacatgttaaacaagtaacaacccactgttttatacgtgcctttaattcaaatgatatgataccattttatgcaacagggtgcgacaccttctaa

SEQ ID NO: 108579 - DNA, 414 bp, Glycine max
gaatgcaagcttcgactatcacattaaacaagaggtgtgtgctagcgtttcctcctgtctaagaacgttgtgaggtataaactcattcgagggacttccattcaccaaaactgacattgacatagacttgaggctttcttcaatccatttgatccatcgggagctgaatccaaaccttctcagcatatacaacaagaattcccaagataccgaatcatatgccttctcaaaatctatgttaaagataacgcaaggcttgcgggtctttcttgcttcatctatgatctcattggagattagtacactttgcaacaagtgtctaccttcgatgaaagcaaatggagtgtcctcaactattgatggcatcacttttctgattctgagggcaagcaatttctccactatcttgtacat

SEQ ID NO: 108580 - DNA, 397 bp, Glycine max
gcttcggaagaaagtggtgagggacaatccctaaaggctaaacttgaaaaaacccgggtagtcaaagaaaaattcaagtccatatccctcaaagtcttgagagaatattatgaactaagggacgtcaatatggcccccgatgaagccttggaatgagaaaccaagaaggcccgaaaggaagaacacgacccaaacaagttttgaagggctttatagggcaacaatagtgagctcaagctcctaagaggtgaaaagaatcatcacgggtcaaaggcatgatctggaaagacgaactaaaagcttgccttatgtcgaaaaaaaatttgtcctaatatttaaagtgaaactgaagggaatatgtgggccatcatccatgagtgcaaagagaagcttaatt

SEQ ID NO: 108581 - DNA, 404 bp, Glycine max
  unsure (1)..(404): unsure at all n locations
ctctaaaacaataaaagatcttttgttggttgctcaatgacttacacacaatcatcttacaaaagaacatacaatcacaacatttagtctttttctctcaaaatattcaaggtgttttgagagtttttctaaactttacaggaatttacagagagctttttgtagaaagtattttgaatatgagcacttgngtttgtgttcatttcttcaaagcttctagtatatttaagccttcttcaatagttgtttgttgtctctaaatggatagatttcttcactttagcttacgtttgaaggatgtggtggttggagcatttaatgcttgcagtaaatgcatgtacttcttcatgatggaaaaacactattcttagctatcgtgatgaacacttcaatangaaatcatg

SEQ ID NO: 108582 - DNA, 381 bp, Glycine max
attatttgaaaacaatgattgaagaaagctaagagagatgagaaagacattgcagtctttatgacaatatcaaactcgaagtatatagaatattgatctacaaaagattaactacagtgaaacctctgttatttgaagaattaaaacaaccagtgtgatgatgctcatcaatatttaaattcagctggcttttctccttaatttatttaacttgccaagcccgaaagagaaatgaacaaaagaaagataggagatttgaatgttgtcatataaatagatcaggcaacaaatagttttatgataggttgtgttcctttcctgataaaatatcatcatatctatcatgtgaggataactaaaaactccctcatagtccattct

SEQ ID NO: 108583 - DNA, 348 bp, Glycine max
agcttacaaaaccatgctcatatgtcattgaggcatttcaccgagcacttggtgggcgcatgttaaggcatgaatagcaagagagtgggggcaatgtggcatgccccattgcttcaggatgcaccctatgcctaaggccatccctagatttgggcatattcacacaatttagagctccaaaagaagaccaagatacatcaatagaaagctagaaagctcaagaatgggatacttacttgatggagtgagtaacaacactaagaatggaagcaaaagcgcaaaaatggtggcgtaggggtgaaaaccccttaattcccgtgagcttttcttttttgaatgggggggggg

SEQ ID NO: 108584 - DNA, 464 bp, Glycine max
  unsure (1)..(464): unsure at all n locations
ctaagcttagctgaatccaactcgaattgattagggcttagcttaaccttggctagcttacggaaataatcaagctcagataccagtgttgtgcgctaagcacttgaaacttgtggcttagcgcatgaacgattatgcacttatcgagcagcaggcgcttagcgaaaggactaattgtaaaaaagatgttctaagtcttaaacttagtcctttcccaagatattgaagcccttaagtttaccattcaaagggaggttgatatgctctaatgtttagattatacaacaagttcccaatgatctaatgtttgaaacaaagataacagaatttaaaattgggttgcctcccaggaagcgcttctataacgtcattaacttgatgctcttatatcgctgggtgatcttacgttntggtcctcaccttcagaaccttttgaccttcttccattacctgtaagcaaacat

SEQ ID NO: 108585 - DNA, 349 bp, Glycine max
ttctatcaatagacctccaatctttaatggagagggttaccactactggaaaacccgaatggaaatttttatcgaggcaatagatctaaatatctgggaagccatagaaataaggccttatatacccaccacagtagaaagagtttcaatagatggtagttcatcaagtgaaagcataaccataaaaaaacctaaagatagatggtctgaagaggatagaaaacgagtacaatacaacctaaaagccaaaaacataataacatctgccctaggaatggatgaatacttcaggatttcaaattgtaagagtgctaaggaaatgtgggacactcttcgattaacacatgaa

SEQ ID NO: 108586 - DNA, 410 bp, Glycine max
  unsure (1)..(410): unsure at all n locations
gtcttcttctggcttcaattcatcagtgggctgtccttctgtgtccagcatcttgggatgttcccagcctttgatgacagctttccaggttctgctatccagcgatttgaggaaggccaccatccttgctttccagtattcatagttggttccatccacaattggtggtctgttcactggtcctccttctttctccatgttcatcagaatttatctccctagatctcactcagtgatttcgagtgcctgctctgataccaactgaaattctgatacagaggtcagatgtcgtaccagatgtcacgacatcacgcttcagaacatggagaattatattgactgtatgaacagataaaacaagtnaataacacaagagaattgtaacccagttcggtgcaacgtcacctaca

SEQ ID NO: 108587 - DNA, 388 bp, Glycine max
  unsure (1)..(388): unsure at all n locations
agcttattatgaagatccactcttttatttccattatcaaatataagctcaaccatcttcttgcccatgaggaagcatattggaagcaacgtccaaaagtgtnttggctaaaagatggggattttaattctcgttttttttttcatattcaagcttttgctaggaaaaaaattaattctatagtctctttgaagcatgatgatgatactggggctttttctcattttgggttgtgtgatgttgcaaaaaaatattttcatgatttttattgtaatgccaatgttgactctgatccaatattaatcatattcttgtttaccctctccctagatgataattgatctaagatagttcttttctgtgctgatgaatattgtaaagacctttt

SEQ ID NO: 108588 - DNA, 377 bp, Glycine max
  unsure (1)..(377): unsure at all n locations
tctttatcttgcggctgaagaatatggccattggaccactttatggttgcctttaatacacatacttcttcatactagaactcgactcttctttgatatcatgttgaacacctcagtangaaatcgcttcctttcgcgttaaagcagaattgcatagtatagtgcttccttttgatggaattaccgaatatgaagactcggaccttatttattcttcatatgatctgacagatcctacagaatatctctgtaaagcaatctcnnncncagcgtattaattaaggcttaaatatcattctntaatgttgtataggatcaaacttcagctgctaatctctgaacgtcggacacaaattgaaagcatgttttgatatcta

SEQ ID NO: 108589 - DNA, 397 bp, Glycine max
agcttagccacacagttggcaagtgtatcatctgcttcctgtgtggatgcctcagcatacacacgaacaacatcttcattgccagatggtcgcacaaagcatcgaccttgggggtccttatctgtaaatgcagaagaggaaagagtatcaagctgcaatattagtaaactgaaattctgcactttaatctttcacactaaaaggctttcatggatggatgaaactgacaaatatctcgcagtcagggaaattttgccaagccacttggacttgataacagtaatagtataatcccataaacaagacaccaacttttcagaaatataacattcaattttggtattatttaggcctccttgcctccctcactctgcccattcttggtggtttcacaaat

SEQ ID NO: 108590 - DNA, 273 bp, Glycine max
  unsure (1)..(273): unsure at all n locations
cgaaattctatagtcacaaatattccccaaattcttccaccccagtctctattaatgctcaaccaanaacacaaattaaatctagtttaccttcgcttttacctacttcaccaggccccctcattcggtcctcanatgtaaaaagcattacttctactgaaatgtagttgagaagggaaaaaaggatcgtgtatttttgtgattgtgaaatctcttttaatcataaatgtcctaatagacaatttctggtggtgcanatgaaagatgataatg

SEQ ID NO: 108591 - DNA, 393 bp, Glycine max
agcttattggttatcctctcttcaagtctttgtattccatcaaacaatttgtttgtgaaatccacgtgtggcttaatgaaaaaacaatactttgatgttcttggattcaaggggagtctaagaagtgtgcgagaaatggccttgagaatacttgtatagtcaggagtgatgagttagaatacttgttttagatcagtctgattagtggaaccctttacaatttatgaaggaaaattgaacgtaacttaatttgagtgaaccagtataaaccaagtgtttctacttctctcttaagctttaacttgtatttctttaagtcctttttgacgcacattatgaaacaagtgttcttcgaaaagctctatagaaactctatttatcactcattggacg

SEQ ID NO: 108592 - DNA, 450 bp, Glycine max
  unsure (1)..(450): unsure at all n locations
tcctagtatgttccgccgtcaagtctaacggccgcaaccttcttcttcgtaattgaaaacgtcaaacacattcctcactccgtcaacacgctccgtatatatgttgcatgtaataacggctcataaaaagaagcaacctctctctttctctcttccttctcttaggtttccaaaaaccctcatatttaacactttcatctaccttctcctcttccattcaacattgaaatctccaacattcccacatctctcgntataccctttgtctttcttcactaaggtatcttattgagagttcaagactagtcctttgatacgttgaatttctttcaagtattgagattcatttaaaaaatcaattttttgatatcttatacatacatctattgngatgtctagaaccgnggagatcacagntntgtcggcagagaacctccaaatgaacaaaaa

SEQ ID NO: 108593 - DNA, 275 bp, Glycine max
gatcttatcaccgcgctcactgataagtttgagctttatagtgcgatctactaccttaagttatcagtcaaaatgaaacagtagaggactctgcaattgataagaggagtgagagcttatcattatattagagtatattgcactataagtgtgattcatatgcgggttaaatatggactatgaatttgaatgcaaagttaattaaatatagtttttttacaacatctcatttttatcttacataagggtgatgcatatggagtgggaaacttttg

SEQ ID NO: 108594 - DNA, 222 bp, Glycine max
  unsure (1)..(222): unsure at all n locations
gcatgacatcacaanaggtagcttatagctacttttgatcgaccatcagaaaaagctggaatgaatatttggcagatagatgactacttaacagaatacatcaaagtctaaatacaatacttgtttgtccaatagaaaaaagaataataaacagctagctatatcttctaagatccaacaattatatgataaaatgttcgagaaaaatatagagagaaaaaa

SEQ ID NO: 108595 - DNA, 371 bp, Glycine max
cttaaactatttagctgaagacactattattggtcctatcattagactactttaggaggaatggtcgctatatttggaatcaatagaccttattataacgtaagaggacctatattgaaagaaatctcttactgtggatcaaaagactttgatccatcttaaataaaccatatgtctacggactgggcgtatgctaaatccatatctgatctcactatgctcaaaagttgcagacattcatctgggacagaatatatctgatatactacatgtattaagacacatgaatctttttaagtttcattaaaatttaactggggctataactaataaaaagctttcggaatctgaaataattttaccaaatttaa

SEQ ID NO: 108596 - DNA, 329 bp, Glycine max
aaatgttggacctgctgttaagtctccctcctgaaagtcttaaatacaaatcttaaaatatccctggccaattgtgctttttataaagaggcaaaatattacaataaaggagccacgaaaaaatgaactgaaagctacttatttgattgagcacgtattaaaacatggaaaaagaactgtacagagatacatcctacagaagataaccctacaatctgctgagaaagacaaacttttatctatagcacatacttatttccaaaaaacataaatctattcttattgtagcagccacagcatctacaatctattccatgactcatgattat

SEQ ID NO: 108597 - DNA, 402 bp, Glycine max
  unsure (1)..(402): unsure at all n locations
cttttatgccaattctccttgactgacatgtangtcatgggtctntattgacttgagagttgacactngaaagttggtataatccatctctaagtttcccttttaatagtgccttccctgtcagtgtgtccttcacataccagtagtttgcatcaaattcaacaagagcattattgtctgcagttaatttagatacactcaacaagtttttggttatttctgggacatacaagacattaggcaagttgaggttattcaattgagtcgagcctgaggccaatatgctcaatcttttaccattgccaactaacaaagaattcttaccattgctttcactgagatcttggagtttctcattttgatgagtcacatgattgctagctccactatcaaagtaccatt

SEQ ID NO: 108598 - DNA, 193 bp, Glycine max
  unsure (1)..(193): unsure at all n locations
tcttgacttgtatttagtaaaatnagaagatcnatggtagagagaaaaccaatgacactcttccacccctacccacccaagaagaataaaacaaaactatctcatcagtcttttataaatntgttaacaaatacaagtgtggtagctntagaaaactataatttggacatttcatcctagaaattatgcatga

SEQ ID NO: 108599 - DNA, 403 bp, Glycine max
agcttataatatatcgatacgctcgaaattaaacatcggaaactctcatgaaatttaaatgggcataaattttcacccggatgtccaattcgggcgcataatatgtcaagagtctcgaaattgaacaacggaagctcttgaaaaaatcaaatggttataacttttcacacggatgtccgattcatgcaaatcacgtatcgagacgctcataattgaacaacggaagctcttgagaaattcaaatggtcataacttttcacacggatgtccaatttaggcgcatcacatatagtgatattcgaaattgaacaacggaagctctcgtcaaatacaaatggtcataacttgtcacactgaggtccgattcagggttataatatatcgatacgctcgaaatttaaca

SEQ ID NO: 108600 - DNA, 345 bp, Glycine max
ctctcgacatattatgcgcccgaatcggacatccgtgtgaaaagtaatgaacatttgaatttctcgagagcttccgatgtttaatttcgagcgtatcaatatattataagcccgcaaaggaccttagtgtgaaaagttatggccattttaatttcccgagagcttccgttgttcattttcgagcggctttatatgtgatgcgccataatctaacatccttgtgagaactatgaccatatgatttctcagagcttcggtgtaatttcgagctctcgacatttatgcgccgaatggacctcgtggaaaagtttggcatttgaattctcgaacgtccgatgttaattc

SEQ ID NO: 108601 - DNA, 401 bp, Glycine max
tgtgcagcttcaatggaggctggatctttgagcttcaatgaggtcctttaatggtgattttccaccatggagatgcagcggaagacaaaggagaagaggtaaaaggcggcgccatccactaaggaataagccttggaagaaagagcttcaccaccaaaatgagccttggataaaaagcttggagaagatgcttcaatggaggaaaagaaagagggagagaaagagagaggggggagcacgaaattgaaggaagaaaaagggagagaagttgaactttgagttgtgtctcacaagactctcattcatcaaagttacaacaagtgttacacatgcttctatttatagactaggtagcttccttgagaagatttcttgagaaaacttccttgagaatcttcatt

SEQ ID NO: 108602 - DNA, 425 bp, Glycine max
  unsure (1)..(425): unsure at all n locations
tgatctaccaccaccgccaccaccatcattntagttnttctcttattgtaatattagtagtactttgatttccagccgtgtatttcgctatattattatgacatttgaacaatntagtaactctttatttgcatggtgtgtttgaacaattatgaattatgttatatgactatgcgattnttctatatatttgatctagtcatgtttcttgcttcatgattagtttatatntctccatgaatgttgtgtgaatgattanngtgatttgtatgtttcatacttgttacgcactttggctntntgttgatgccaaagggggagagaaatagggattaaatcaagaactcacatgagttataaacttaattttaagtgaatcataaattcaaaaacaaacgtggagaatggaaatttatgtgagtgat

SEQ ID NO: 108603 - DNA, 402 bp, Glycine max
  unsure (1)..(402): unsure at all n locations
agcttgtatgcatttcttgatttcaggttcgtcatcatctaataaggggagatngtagaagcaagcttcatgatgatgaaccaagcaattttgatgatgccaaaagcccaagtgattgattcaagacttcaagatcaagaatcatgaatccagtccaagattcaagattcaagagaagacatcaagatgcgacaaatcaagacttcataaaggataagtattaaaagaatttttcaaaaaccaaatagcacagttttgttttacaaaagaattttctcaaattttctaagttaccagagtgattactctctggtgatcgattaccagttatcaataatcaattaccagtgatcagtgtggttttcaaaatgttttcaaatggtttgcaacgttccaaaatga

SEQ ID NO: 108604 - DNA, 391 bp, Glycine max
  unsure (1)..(391): unsure at all n locations
ctcgtggtgatagattatntcaccaaatgggttgaagcgacttcttataccaatgtcacgaggagtgtggaggtcagattcataaagaaggaactgatttgtcgataccgacttcctatgaagatcattactgaccatggcaccaatctgaataacaaaatgatgtacgaaaagtgccgggatttcaaaatccagcatcataactccaccccctatcggccaaagatgaaaggggctgtagaggctacaaataaaaatattaagaagaatattcagaagatgacggtgtcatacaaagattggcatgagatgctgcctttttcctacatggatatcgaacctcagtacgaacttctactggagcaatgccgtattccttggtttatgggat

SEQ ID NO: 108605 - DNA, 394 bp, Glycine max
  unsure (1)..(394): unsure at all n locations
agctngtgcaaatcattatactcctacatctcatctctagcatgcattatctttctttacccactcctcacgtttggttttttttagggaaaaacaccataactaaactcgccgcaagggatccctatcgcaccaaatccaaatctataacgatgggtgatccataggagacgccngaacagatgaaagccgacatgtcggctctgaaagaacaaatggcctccatgatggaggccatgttaggtatgaaacatctcatggagaagaacgccgccactgccgccgttttcagttcggctgccgaagcagacccgactctcttggtaactacgcaccatcctccctcaaacatattatgacggggaagggacacacttgggcactatggctaccc

SEQ ID NO: 108606 - DNA, 383 bp, Glycine max
  unsure (1)..(383): unsure at all n locations
cacanaccacaaacccttgcgacaggtacagatttctgattcaaggccagctgggttaccaagttaaccaatgcatccagtttgccttcaagcttcttattttcagatgatgcagatgggtttgtagctacctcatgcactcctctaatgactatggcatcatttctggcgctaaactgctgggagttggaggccatcttctcaattaaatntctggcttcagcaggagtcatgtctccaaaggctccaccactggcagcatctatcatacttctctccatattactgagtccttcataaaaatattggagaagaagctgttctgaaatctgatggtgggggcaactggcacatagtttcttaaatctctcccagtactcata

SEQ ID NO: 108607 - DNA, 389 bp, Glycine max
  unsure (1)..(389): unsure at all n locations
agcttaatgacccagtgagttnttcattttcttgtgtcattggtaacttgtcctttgatatatcattgtttgacttacgtactatcattaatttgatgtcttactctgtttatagaagtgaggttacaaaacctcaacctactaacatttatatttaatttgtagataagactctcacctacccacgaaggatagtggaagacttactggtcagggttgacaagttcattttacttatagacttgattctggatattgaggaggatgaagacgtaccaattgttttgggatgacccttcctcaacaaaggaggagcattcattgatgtttaagaaaggaaaatgacttggcggctaagtgataaggaggaagtatttatggtgtttggt

SEQ ID NO: 108608 - DNA, 279 bp, Glycine max
agcgatgaccgactcaccgtgaagtgtaaaatgttctggcagcgacaacgtttgtcttctacatcatagagaagaaagaagggaagaaaatgagagagaatttgaggaaaatggtaactggggaaagacaagaagaacaggattaaaagaaagataaaatagccatccgagattagaatataataaatccaacgggttaaaaaaactcttctatgatggaaaacatgtttaacttttccaccctagaaatattaattggtcttcaaaattatcaagaac

SEQ ID NO: 108609 - DNA, 343 bp, Glycine max
  unsure (1)..(343): unsure at all n locations
ttacagtccactgcngcatgaagcttttatccaggctcatcttggtggtgaagctccttcttccatggcttattccctaagggatggggccttctctcaccttttctcctttgtcttccgctgcatctccatgggggaaaatcaccattaaaggacctcattgaagctcaaaaaatcaacctccataaaagccccacaagcaagcttccatcacttaatatggaagtaagggacaaggttgaacctcttccatattaggacctagatgagctaatccaactttgtataagagtggagcaacaacttanaaaaaaatcttcttcaaatcttatggctttcactc

SEQ ID NO: 108610 - DNA, 403 bp, Glycine max
  unsure (1)..(403): unsure at all n locations
tcacctgcggcatgccgcttatagaacaaaattgcctcaattatttncaaatatgcatgtgaattaggatgcatcaacaagaatcaagccaaggctattgtgcaagcaatcaatggggcaaaacacgccaaatgattatgatgatggatggctcaaattctcacaaaagtaaactcatcactttcaaattgagctttcaaaactatcatgacatgtagaggagaatcaaggatttcaagtcacaaaatgtcaaaaacttttattttcaaaacaattacccatttcttgaacatatcctataattcaaagaaaaacatgcaaagtcgtacatgcacacaaaattgacccaaaatattaaactaacaatccgacgaaactaacaacattaacaaattaacaaaac

SEQ ID NO: 108611 - DNA, 335 bp, Glycine max
ctcttagtctcagatgatgcagcctgatgttgtagctacctcattcactcctctaatgactaccgcagtatttctggcgctaaactgctgagagatggaagccatcttcttattaaatttctggcttaacatgaatcatgtctccaaaggctccaccactggcatcatctatcatacttctcttcatattactgagtacttcataaaaatattggagaagaagctgctccgaaatctgatggtgagggcaactggcacatagttttttaaatcgctcccagtactcatacaggctctcttcactgagttgtcaaaacctgagatatatttctaat

SEQ ID NO: 108612 - DNA, 399 bp, Glycine max
agcttgtatccaacggctgaaaattatttcgcaccgtaccacacctaattaactgacgcgtgcatgctaaaagccgtctatcttatattaacaactcatttccaatctttcttaagaataaaaaaataatttttgttcaaaaattccaagaaaaaagagagaaacataacaagtgaaaataaaaaattataagaatgtgagttgtttgatatttttctattggaacaaaattgtatgagtattttaaatgtgttatgacattgtgaggattattaaaattaatttaatatgttctaaaatatctaaagtgactatttatagttaatctctcgcttttcatttttggtttgctaatctctctctctctctcttttatctacaattgattgcatgaaaatg

SEQ ID NO: 108613 - DNA, 489 bp, Glycine max
  unsure (1)..(489): unsure at all n locations
ctatttatgctacatatgcctaccactgtttccaaaacccttgtttccatcaaccatatagccttatcaaaataactcgtttagatatcccttgcattgacttatcatcgcagcaagcagcacagcaccttgttcgttcctgacattgccttatggagcttcccaaatctatcctcccttcgtcaaaaacagaaccgagtaatcaagcgaaccagaaaagaaatcactaagcacacaactgataaattttacaaatcacggagtaatcaactgataaatntacaaatttgataaaaatgaatccaacatctaatttctgcttggcttatgatccttagttattagcactacttgggccacttgaatcagaataatntcgattggtgttataaaaatggtgaatgaatgttatataatcatcgattctncgataatcacaattgccaatgcattctataaagagatcgagaatcggtactagaaaagaac

SEQ ID NO: 108614 - DNA, 371 bp, Glycine max
  unsure (1)..(371): unsure at all n locations
atctntgaatgctctattcaatggagttgacaagaatatcttcagactgatcaacacatgtacagtggccaaggatgcttgggagatcctgaaaaccactcatgaaggaacctccacagtgaagatgtccagattgcaactattggccacaaaattcgaaaatctgaagatgaaggaggaagaatgtattcatgacttccacatgaacattcttgaaattgccaatgcttgcactgccttgggagagagaatgacagatgaaaagctggtgagaaagatcctcagatccttgcctaagagatttgacatgaaagtcactgcaatagaggaagcccaagacatttgcaacatgaaagtagatgaactcattg

SEQ ID NO: 108615 - DNA, 366 bp, Glycine max
  unsure (1)..(366): unsure at all n locations
ctaagctttcatggtttaatgagtngtaacatcttgtgagatcatttagagatccattcaaactagatttggntcttgcatntgaacaaccgagttgtgtctctacttgacttaattttcatatgttgttacagagttacaacatatacatgagtttctaaagcatgcaagaataggggtgtctagttttacctatgggtaggtgtctcttaggaaaaattcacaaaggaccctacggttgggtgcctcggtctctttttccgagtaggaactgtgattgatngcgattgcttgtaagaactcanagtgcataatggagatctatttcaggtcgaaatataataattggagtggcttttttggaaa

SEQ ID NO: 108616 - DNA, 80 bp, Glycine max
agctttactaaattaatgacacacactttctacacacacacacacacacacacgcacacgccccccccccattaatttaa

SEQ ID NO: 108617 - DNA, 394 bp, Glycine max
acttgatcatatctaccgagtacaaacgttgaacactcaccaatataataatgcagctacaaaatagaatggcaattactttatctacttaaattttctctcagccaaaggtcctggtcataacaataatcttccatttactaaagggacaaccaaattttgtctgtaaaacatatacttgtgggccaaattgttggttaaaaagtctcatacaaagaagttaaaaaacaaatgttaatcaaatgttttttaaagtattggttaaaaaatttattttaaatttttttaattaaaaaataaaaaattatgttatttataaaaaaatttacactctcataatttatataataaatatttttattttaattctttaactaatattctaaaaatactg

SEQ ID NO: 108618 - DNA, 282 bp, Glycine max
taatttggggagaaaagtaaagaatgaaacaaaaggtagcttcacaccacacaattagtgtttgtaaaaaaaaagagaaataagtgtgctgtcataggtcaaagcacttagaaaggaatatgaaagcttttgtcacacagaaagatcatggatacctagactgtcttcttaattaactttgatctagaaacatgattttgtgccaactctcagctgaaaacctttgtttttatttttgctgtactgaagatgaaatgcctctgtatgttcatatactaacac

SEQ ID NO: 108619 - DNA, 410 bp, Glycine max
  unsure (1)..(410): unsure at all n locations
gcagctgaagcttggcatgaagacagctggaatgtcccactgcttatactngactgatttctctctaatggatgaacgatcctcgctcatgctcatggtcctttcactactacaggcagagttagcctctgagagataaggagtgcaatgtgcagatttaggcataataacatcttgtatagttggcttgacttctttgtgtccatgaacatcaccttggtcatctttgacactttcgcgaaaaagctctaacaatttctttttcttttctggggatgtttcagccatagagccatgaattctattcctagaaggggtcccaaaagtgtggtgaactggtgtggtccctctagatggtgtaaagtctgcataaaatgaagtagacaatacagctgaaggtggttggggag

SEQ ID NO: 108620 - DNA, 395 bp, Glycine max
agctttgaaagcagagctcgaaaagacatgagtggtgaattataagctaaagacggcagtcactatggtcaggaaaaagtgtgatgagctgaaaaatatcaacatgaccaaggttaaaacattagaaccggaaacaaaaagggcccaaaaggaaaaatggagcaagaacaaattctgaggggttctatggggcagcagtaacaagcttaagcttataaaggccgagagaaacaaatcaaggatgaaaaacatggtgttagaggataagttaaaggcttattaaaggttgaagagatgtttgacagaacagttgagcaaaacataagagaatatgttgataatcatttatcaatataaggagaaagtgaacctatctgttattcatgggcagattc

SEQ ID NO: 108621 - DNA, 303 bp, Glycine max
cgtactacgagcttgttctgatgtgggaatatccttcactttagtcgtccagtgatcaacacaaccatggccttggaatcacagctgaacaacatcaatccatgtgctattattggttgtcccaattaatgtttcgcacgagatcaacaatgcgttggtggaagtcacaacataggaagcggaagtatggtggaaggaaggcatgatatatgtttgagtcaaacaaggccaaacaacactcattggggccgaacaacaccaaatggtggtcaaacaacaccaaatggagcccaacagaagaag

SEQ ID NO: 108622 - DNA, 350 bp, Glycine max
atttgggggaccaaataatggtaatctttgggatgggtgaaaaaacttcacaagaaaggattgaaaagggagatgaaaggttcatatctttattccattccatcaggaagtggggcccctaaattaccctatgccataaactaatatgggtatgatgctttggtctttcccttaatgtctgggggttaaaaagattctttgaggagttgggggagcttggcatggtggtgaaaatggataacgatactgagaaatatggtaagttggagtatgtgcgtgttctaatgaaaaagaatgctcataaaatcctggatgtgtacaagaaagtcccaattagtgcggtggttcac

SEQ ID NO: 108623 - DNA, 495 bp, Glycine max
  unsure (1)..(495): unsure at all n locations
gactaactggantggtgacaggcctatgggagtcttgaatgtagtagcccatatagcatcatccagcttcaaagcctaatcctttcttgatgatgcgacaatcttctcaaggattcgctttagctctctatttgaaacttctgcttggccatttttctggggatgataaggtgttgctatcttatgtctgacattgtaatgctccagaaccttcttcagttgtgcattgcagaagtgtgttcccccatcactgattanggctcatggtactccgaaatgggaaaagatgtttttcttcaagaattttatcactaccctgacatcatttttaggagtggctattgcttccacccacttggacacgcaatcaacagctaccaggatatagatattcccatatgaagatgggaaaagccccacanagtctatcccccaacagtcaaagatttctacctccattatgttntgtagaggcgtctcgttccttctgaaatc

SEQ ID NO: 108624 - DNA, 373 bp, Glycine max
  unsure (1)..(373): unsure at all n locations
aaccttccacaccttttttcctattcagatgaaagcctggtcctttccaacccgccttttgggaacctacttgaccccactggggggttttctttttcctacaaaaatcacccctcttatgattcattcactcttcgngatgacatttttcccactaatgaaaaaaacaactactccatgtccaaacgccaaaggtctcctacgaggaaacaaatgtactcttactgcaagagtttactaaacacaaataccatccaatttcttacatgggtttggtgtgccttatgataattgttgttccttgcaagcagaggaactgcaacagccactcttctatgagattccacaaagtggtgataattgtgttgaagaa

SEQ ID NO: 108625 - DNA, 463 bp, Glycine max
  unsure (1)..(463): unsure at all n locations
tatgtgcagtctntgtgaaatggcctgtaagacctcgaatcacttngttgtgtttcccatttttgttgaagatttgataatggcttgaaagtcttttaaacatacgaatagataaatcctttatttcatttattctttctatttgttatgctaagtggtcacctcaagtctacgataccattcttgttgccattngtttcatcattggaactatntggcattgtagaaattgtaagagattctataattagaatattgaagtacaaaattctattccttcgattttagacaagaagaaccttgttccttatgaggtgctcttcacttggatcataaggagtgatcgggtggatgtgtctatgttggaatcgtctgtaggtgtcacacaactaaagggtgtgacctttattaagatggngataacagactacttcccanaatatactcagaagcatatcaagag

SEQ ID NO: 108626 - DNA, 367 bp, Glycine max
  unsure (1)..(367): unsure at all n locations
agcatcagcttggttctcatacgcttcttgtatactcacccaanatcgcgaagtgaaccttcgatccctgtcagatacaatactagaaggaattccatgcaaccttactacttccttgaagaacaacaccactagctgttccattctatacttcatattcaccggaataaaatgagcacatttggtgagtctaactactatgacccacacggtataatgcccacgactaatcttgggtagactatattcaaaattcatagatatgctctcccatttacattccggaatctccaatggcttggattctcccgatggtcgctggtgctcaaccttatccttttgacatgtcaaacatcttgctacatat

SEQ ID NO: 108627 - DNA, 375 bp, Glycine max
tctttgcttttaatcggtataacatggacgcggttcaaagcataaaatcaacacattactgtaccgcttttgaagaactacatacgtctgattttctcatcgcaatcgaggatacatacgagcataagccctgcttttgtcgaccaccccaagagatcgttaatggtgcaacgccttaacgtttctctccttttaaaaccaagagatcattaatggtccaacgccttaacgtttctctcctttcaaatcaaaagatcgtttaatggtccaacaccttacacgactcttgttcgattaaatcgaacttgggaagaagatcacaacaactaaccaacgtttagtttgaaagaactcatatgctgatttctcatcgca

SEQ ID NO: 108628 - DNA, 391 bp, Glycine max
agcttcttaatcaaatcaagctagttgattgtttcaaaaactattgattttttattctattaaacttatgtcataccttggttttctgctgcatagataaccaggaaattggttcaacaatatacttaaaattcatgtaacactagtataatatcatatctattacttggtaaaattaagcaagaaaagttaccatgtcaaactatttcccactagtttatgtcatttatcattgtgaggtaggcaggtatagttttttaaaatggaagttaatcaagctcagtctccaaagatctctgaggctcaccttttctgctcaaggttaatgatgagtctcagtttgattcagaaggatagagggaaatggagagatacttgcaaaggcacttta

SEQ ID NO: 108629 - DNA, 340 bp, Glycine max
  unsure (1)..(340): unsure at all n locations
agcacaccaatnttaatttcaatagaaaacattccttctgtttattatttttaaggacatatcattaaaataacgagcatgtctataatctacaattttgttgcaattgaagcagtgactaagaaaggcattaaaatggaaaattccctttagttagctaagatcatagttgttcatgtttccttaccgattgaagaatcaaatatttaaaatattcaggacaagtcaatatagggaagtagcatagaagctctcatgatagtcattgcaaaaagaagtttagtcctcatgggagacctttgattataacctttttnttcatgcacgttgactagtgatt

SEQ ID NO: 108630 - DNA, 381 bp, Glycine max
  unsure (1)..(381): unsure at all n locations
agcttgcctcaaagatgtccaggaatgtctttgagcanaaggaactaattccgctccggagtatgatagtcaccgctttaggaacgcggtacaccaacagcgcttcgaagccctcaaggggtggtcgtttctccgggagcgacgcgtccagctcaaggacgacgagtatactgatttccaagaggaaatagggcgccggcggtgggcaccactggttactcccatggccaagtttgatccaaaaatagtccttgagttttatgccaatgcttggccaacagaggagggcgtgcgtgacatgagatcctgggttaggggtcagtggatcccgttcgatgccgacgctatcggccagctcctgggatatccgttggtgttaga

SEQ ID NO: 108631 - DNA, 354 bp, Glycine max
  unsure (1)..(354): unsure at all n locations
cattcccacgaaatttaagagagaaagaagttcaccccaacctgaaatttggaaagtccactcgtagccacgcacttcacgacttcgaaaatgccctttcttttgcgattggggcagaaatgatggccaaaggttgaagctttgcttggagcttcaatggagaatgaagaagaagaaaatggcaacgtgagggagagagagagctgtctgaaaagtgcgggggctgagtgaagagagagaaaaagcttttgggttttaaataaaaaggttttctcttttttctatatattatntaagctatgccacatgtcttccgttgagtggagcanaaaaggcccactttcccttttgact

SEQ ID NO: 108632 - DNA, 416 bp, Glycine max
cttgagtcccggatcttaagtcaccgcggctgcagcttgtaatagctatacatgttgtgcttaaatttatccgccttggcttccttgtactcattcactgccttgtgggaagcataactgaaattcacatcatgtcccaactcggggacaataaagtggctggatcaatgcacataaatcaatcaggtcagtcatggcatcaccagtaattccttcgtttttaattataaaactccttttagaaaattattgatttccttttatatttttttttaatttttaaatatattatttatttattttcactatatatctttacttaattattttttttcgaaacattaataagaaacaattaagtggacagagagataagaaaaaaatgtaattttggcatgatagtataaataattgac

SEQ ID NO: 108633 - DNA, 385 bp, Glycine max
gccgaccaaaagcaacctgaaatgccagtctattgaataaatgttctttttttattcatttcagaattgtcggttgcctatgggatcagaaattgtcttctggaaaaaaatttagagggacgatattaacaccgttcattccgattctggggctattttcctctgacattctttattaagggacaataatacctctttaatgttttgatctatgaaataaagattgagagatttctgccatcaaagcataacggtgattcattcgcattttgacgtctgtatgttatctttaagagttatttaaataaattatcgtttaattgaaacatttaatattttaagatatttttttgtcaacattgcattactctactatggtgtgata

SEQ ID NO: 108634 - DNA, 385 bp, Glycine max
agctttagccttatgttgttccatgttgctgctctccttatctctaacaatctccccttttttagctttgatgatgccaaacatgaatgcgacattgagtgcatttggagagtcttgagattggattggaaacatgatcctttgccttatcctgaaaaattcttaacacttaataaaggattaattcatcatcatcgtcatagatgtcaaaatataactaatacacacacacacacacacacttacatatatacatatataaccatctttatatacaacaatgctcaacatatataaccatctttatataatacaatgctcaacatgctatgcaatgcaattgatatgcaatgtcttcttctccccctttcggcattaacaagga

SEQ ID NO: 108635 - DNA, 423 bp, Glycine max
ctcagctttagccatggctaccttgattaattctttgataccctttcgacccttgttcctttccttgtttgagctcactcagccttaagtgaaaaaccatgatatcaccatatccttaaagaattttggagctctggaattgctttgggaataagtgtggggggttctttgtttcaatggataactcgttttgttggctatacttcatgatgtattttgggccatacttgatgtacattgtatattggttaaatgaatgaaatgctgtttctcaaaggatatagagtataaaaaaaaatccaaatgaaaagaaagcaataagttgatgaataaacttaatggcatagatgagaactcttggtctatcttatgtttaatttatcttacttcttttatttcttattttcctatatgcactattcc

SEQ ID NO: 108636 - DNA, 259 bp, Glycine max
tatcttcttttcctacattaagaagcaccggggtgagtcttctcttgggctgtcttactgggttaactccattctctaaatttattcgatgcatacatgtggatgggctaataccaagaatgtccgctatggtccaaccctatacctttttatgcttcttgagaactggcgacaactttttctcttgctcattagcaagggaggcagatataatcactggaaaactcttgctatcatccaagaagccgttttaaatttg

SEQ ID NO: 108637 - DNA, 262 bp, Glycine max
  unsure (1)..(262): unsure at all n locations
tgatgcttgaatgtccacatgggtgcatgcatgaccaagtttgcataaaaattccaaatcatcattgntgtatgagtgtcatggaaataaatgtgggacatccccttttatcctgaaccgctggccaaaccaacaccctgacatacatcatgtccggcccgtctgcaagccttttgacccgagatctcaaaccaccatataccttgacccangatgagaaattcattcactattgaacttcttacaccctgacatacatcat

SEQ ID NO: 108638 - DNA, 391 bp, Glycine max
cactttaatttgacaaatgattcttatactttttttgacattggcctcacaaatcttacaaagtgggggttgtattaataatttctaaactgcttcccctaattaaaaaatctatttcactttttacctcaaattattaattcccttaatgacaatcttcttaaatattaattcaaatgaaacaatttgaatatgaatatatagcaataataaataaaggagattaacggaagagaaaatgcacactcaattttatactggttctggccacacccttgtgcctacgtccatttcccaaacatccccttagagaaattcactatcttgtatattccttttacaagctttaaacacacaaagaccaacctttctttgtgtttaaaaatccttt

SEQ ID NO: 108639 - DNA, 272 bp, Glycine max
tcatatgaggaaagtactccacgtatccatatcactttctctaacaccggtcccatagaacttcaagctttcacaatcaacaaaagattaaccgacactatatagcagcaacagacaaagaaaaattgtcaacaccacaatacacttttactaaaaccaaacaatcttcatcatcgtaacgtggacactcaattatggagtatgaaaaccaatggacgtggatattcaaatcaatattgctatttcaaacatccacactttttgatagcaat

SEQ ID NO: 108640 - DNA, 408 bp, Glycine max
tgctgcatgcaagcttggaaggctcaccctaaattccgttgtcatatgctttacttgatcccatatctacttgataatgcaatggtagccataaccctagccgaggttcatcaacctccatttctccgagaatacgactcgaacgcaacgtgtgcttgtcacggagaagccccggggcgttccattgagcattgtatggctctgaagtgtacggagcgaggtctaaatgatgctggctgaaattagaagagaatagcgtgttaatcctgacattgacaaaagatgccacacatggggcaattgagaaagctagcgttagatgtctctaatgactcaccaggatttttaactttcaccggaatgtgggtgtaagccattggtctgtttgctcaaacaacctgcgctcct

SEQ ID NO: 108641 - DNA, 420 bp, Glycine max
  unsure (1)..(420): unsure at all n locations
atatcttggatagatttgaaatctcttcgtanggttttattagtttttaagagaatcgatgagtgagataaaagctcatgataggctgtcctaagagactcaaggtcataaaaaattacctcattgtcctagtatgattcggatccattagaagttgtgtctgctatcaggcatatgtttgtttcttcatcgtcttcatcaaacgaggtgtcatccaggtcttcccacatgcacantaagcctttgttttctatagtcttaaggaatctcttcttatctttaaatttctccagattaggacattctgacttgaagtggcaagctttttgactcatagctgactatggagcttcgctatccttcttgtcccgggcattcttcttgagagcttctcacttagaccactattgttctcatatc

SEQ ID NO: 108642 - DNA, 339 bp, Glycine max
aactaattccgcccccgagtacgacagtcaccgctttaagagcgttgtacaccaacagcgcttcgaaaccatcgagggatggtcgtttctccgggagcgacccctccagctcaaggacgacgagtatactgattttcaggaggaaataaggcgccggcggggggcaccactggttactcctatggccaagtttgatccagaaatagtccttgaattttatgccaatgcttggccaacagaggagggcgtgcgtgacatgagatcctgggttaagggtcagtggatcccgttcgatgccgacgctatcagccagctcctgggatatcccatggtgttgga

SEQ ID NO: 108643 - DNA, 335 bp, Glycine max
  unsure (1)..(335): unsure at all n locations
ctcttattactagctattttgaattctttaattcctgaatatacaaccttcaaaatggtgctcgttcccctctttcttttcttgcaaaaagaaaatcaatatcaaagaaaacatggatgaaatcctaagaaaatcaatatcaaagaaaacatggatgaaatgacanataaaaagcacaactaccaatctttcagaagccctttggtgaatttgtcttgtctccttatgtggtggggtgttgttaataatattatacntttgccttcccaaaaaaacttatgactgatcgctctttcatantcctatnttgcatgttatggcataaaagatcatgg

SEQ ID NO: 108644 - DNA, 398 bp, Glycine max
  unsure (1)..(398): unsure at all n locations
agctngtgcattcaataccctgatgaggatgtcccatatgttcttaaaactggactgattcatttgcttcccaagtttcatggccttgcaggtgaaaacccgcacaaacatttgaaagaatttcacattgtctgctccaccatgaaacccccagatgtccaagaggatcacatatttctgaaagcttttcctcattcattaaatggagtggcaaaggactggctgtattaccttgctccaaggtccatcacgagctgggatgaccttaagagagtattcttagaaaaaattttccctgcttccaggaccacagccatcaggaaggatatctcaggtattagacaactcaatggagagagcctgtatgagtactgggagagatttaagaaactatgtgc

SEQ ID NO: 108645 - DNA, 496 bp, Glycine max
  unsure (1)..(496): unsure at all n locations
ctagagaaagctcatgaagctgccgcggtaaaaacgtgtcagccttcgtaaccgttggatcttctctaaatttgggttggaacttcacaagacaattttacatgatctaaccgttgggatctttgagaatatgtctggagtgtgctaaaagcttccgttcccgagagcatctcttatttaagcatttcagcctttgctttcatgtagcttaagaaaaacgtcatttcttcttctttctttcttccaaagccatttataaagttccaagaactttctccatcacccacagccaccattagccaccacaaaccatcattgttcttcattgaaaacccacaccgagaggaacccttcaaccgaagcggaatcttccaacttggcttgcggttccggtagaagaacgaaaccctaatctgaccattncgtttctttcganggaaccatgggtctatgnctgtttcttgggtagttcatcttgtctttgcatctttctgac

SEQ ID NO: 108646 - DNA, 311 bp, Glycine max
agctctggcttgcgcttgatacatactttgattggaaccataattgcagggatgttcactcgaaatcataaccacttctgcagctacatgctcctggatgatgcaagaacacatattggtttcaccagtttgttttatttttctgggaattccaataggaatcgtgcgccgttcatgggctcttatttatttggagagatggattttcgaatgatgctcaaaaaggaggtaaagaatgttttatgatccacattactcttacctatcggattaaccgttttgcttaaaaatgatgctacatggtcgttttg

SEQ ID NO: 108647 - DNA, 380 bp, Glycine max
  unsure (1)..(380): unsure at all n locations
tcactcgtttatgatataaacgcccatgactcatggcggccaaacgcttgccttctatgaaattaagctgatcgaaacgtgcttgggcccattctgattcctttaanttggattccgccaagattcttaatgacgggacttccacctcaaacggtagcacaacctccattccatataccaatgagaacggtgttgccccggttgacgtgtgtactgaggttcggtaaccgtgtaacgcgaatgggagcatctcgtgccaatctttgtatgacacggncatcttctggataatcttctggatattcttattggctgcctncacggctccgttcatctttggtcggtagggtgtgggaatggtgatgtggatctntaaattc

SEQ ID NO: 108648 - DNA, 397 bp, Glycine max
  unsure (1)..(397): unsure at all n locations
agctttagcaaggaattatacaaatnttccaaaattcaggatgttaattaacacaggagaaagaaacttgtaaagcatgatgaatttcccgttggcccatagaatcatatcagatatataaacatttgcattaactgagttgagttatttcacacaagaaacttttttgagaatttcctactctaatgtttcggaaccagttaatcattctgtacaactatgtgaaaatatcttaactcatttcttctagaatttcattagccgtctcaaaaagaggtgtgggagcttttaagcttggtgattttatctctgctacgatttctcttttgttataggatcagcagtcaaactgaacttctcattcttttccattcttaaaaattttcctattattgag

SEQ ID NO: 108649 - DNA, 382 bp, Glycine max
  unsure (1)..(382): unsure at all n locations
tgagatgaggaagtgtagaaaggtgaaactttctgcttntattcgttgaccacagagtggtacctggagatatgtcgcggnggtcaggagaccttggggacgtcaggtggggtgctattgcccaaaaccaagcttgaccaatctcgacccaacccgggcatagtcagtcaatgagaacctgtgatgtacctaaacaggcgagctcctggcagtcaacagataaaaggaattaagaccacaaagccaggaggcttgtggtggctggccagctatgaacttgattgatgtgtgagagatgggctcttgtaatcgattaccaagggtgggtaatcgattacaaggcttaaaaatgaagacaggagactaagatggtctctggtaa

SEQ ID NO: 108650 - DNA, 393 bp, Glycine max
  unsure (1)..(393): unsure at all n locations
agcttgaaccanaaccggtgagagtgtttatcttaactgtgagtgaacgactagctatgagtaataatctttgcatcaatctctgaattttagaatgaaatgtataaatgaggacatgatgaaggccatgattatgcataaacaagccttttgaccaaaaagcttaccttgaattataattctatcatttgcaccctttgtgagctgaatgattttgtcaataattgaaccctgaacctgaatgattatctctagataccttgtttagattctaggagagaatatggttaaaggcaaaatataccccaaatttgggggagtaaagtcagttagaatgcaaagaaaaaggtaaagcatcagcacacacaacaaataagttgtatgttaaaaaaa

SEQ ID NO: 108651 - DNA, 355 bp, Glycine max
  unsure (1)..(355): unsure at all n locations
gtttggtcaccaatcaagatattaaaaagagatcttagaggtattttaatatttttattagcattttgatgatggactgggaattgactttgtatagggaaggacttataatgtatgaggacanacagaaatttgcttaccaccgtagaattcaaaatggagtggtaaataggtcttagacgatgatggatggatagggtaaataaatggctaatggtattctattgagttggaagggtggaatctcagtaagatatttaagatctggatagactctatgacgttgaaggtgagaattcagtagaattttaaaatttgataaacactatgtctgagctatttatatataatataa

SEQ ID NO: 108652 - DNA, 241 bp, Glycine max
  unsure (1)..(241): unsure at all n locations
agcttgcttgcggggcttctattgatgtttgatatttgatcttcaatgggggcctttcatggtgagtctcccctctggtatgcagcggatgacaaaagaaaatacgtgagaagaggcgccgtccattgacgaatanaccttggtacaaagagcttcaccaccgaaatgaagccttggattagaacgctggtcaagatgcttcattggaggaaaaaaaatatggaaacaaagagaggtgggg

SEQ ID NO: 108653 - DNA, 286 bp, Glycine max
acaagatatgtcttgtcactttccccaccgagcctaccagaagataaatgtaatatgtctatccagactaccaattgtatcccgagatcgaaaatagctaatatggcatccactttgagacagactcagaccaatagattgtaacacgaggcaacctgcggggaatacacctcttcgtcctctttgggcttgtgactcaacactttccactgacactgcgacaaagccctattcctgtctggctgaatatatccaaagaataactctatattggacatttgacgag

SEQ ID NO: 108654 - DNA, 367 bp, Glycine max
cagctttatctgaagaactcgccaagtgttctttctatgcaaagcaagttcatcctttgaggatgaacattcatcctcttgctgaactaactgtgtctaaatgtgggtgaatcgcttagcccaggtaacttaaccatttttttttgtgatagtcgcgcgctaaaatgaacattcctgaaccaggcgcacttggttgaggcatccgttgagctaaacgagcttcactcactaagatcctataacttagtgaaatttctgctcagtttaatgccgctaagcgcaacttattcttggctaagctcaaatccatgcggctaaccttagggttaacgggctccttgctagctaagccaattttgaaaaacac

SEQ ID NO: 108655 - DNA, 481 bp, Glycine max
  unsure (1)..(481): unsure at all n locations
tgattacatggttgatttatcttggtttcacttatttactttcaatctgattaaaagacgacttgtgaggtaaatgatngggtgaaattttattttgcaaggattaaacgagattacaacacanatgatcggttgaaattcgctttacatgaacaaatgagatcacttatggtagaagaatgagatgaaagatgtgcaaagcaacaaggaggacaccgaagggtgcatagtgcgaatttaaaaccttaaaatgaatactaactggttgatgaacgaagaacaatgcgggaatcgatcacggttgcgaattatagcgcctcaacctcattttttcttcttctccttaatttcactaaatgccttcaatatatgaaggctgaaccccttcctttagccccctcacgcctatntataggaaatgaaggggatttggtgatctgtagctcgcccangcgagctgttgcttcaacctgaagtaacc

SEQ ID NO: 108656 - DNA, 332 bp, Glycine max
agcttgccttattaacctgaaattgatagaaaatgattatcaaacacacaaaacggaagtactaagtatttattacctatacttaacataaaatacttattacactacaaaataaccattaattggggaagattgatacaatttacataggttttatacacaaaagttagtcttattcatcgactaaaacccaacccttgcatctgaggctgatttggtccgctaagctggtcaaggctgatctaatccaacttcaattcgatctgaattcaactaaactacagcctgatcgctaaacccatcatacactttggctaagcgcgagtcgtttc

SEQ ID NO: 108657 - DNA, 340 bp, Glycine max
agcttattggattctggcatccaactcttccttttgtagctcctatttaggtgcaacttttacagctttaagcaccacttcatttctgagctccttttcccttgtcaaggacttaagaaattctgttataacttcttcagggatctcctttgaaccttggcctttaaggttaacaaccttctttgatgcttctgtagaagcaaagcttcatgacgaatcaaaagtgattcaaaggtgttttgatgaaaacaatgatgattacaaaagatgatgaccaaggtgatgacaaaaagctcaaaaatcaatcaaagaacaactcaagtgaatcaaagaacaattc

SEQ ID NO: 108658 - DNA, 254 bp, Glycine max
  unsure (1)..(254): unsure at all n locations
gtagtcactggatgctaccagactcttgagtctgacggatagcaaccaagacattttcgcagtctcggtcggaagacgctgacatctctgagaaagtgcagatgatgacgttagtcactgcatgctatcggactcttgattctgacggataacaaatgagactntttcgcagtctcggccggaagacgctgacatctctgtgaaggtgcagatgatgacattagtcactgcatgctactagactnttgagtctg

SEQ ID NO: 108659 - DNA, 307 bp, Glycine max
ccgatacaacacggatatggctcctgatcggaaccaacttcagagcatgaccaagcgggaacatgagtccataaaagaatatgctcaaaggtggagagacctgacagcccaagttgccccacctatgactgagagggaaatgatcaccattaaggtggatacgatgcctacgttctactacgagaaactgataggatatatgccggctaactttgcagacctcatcttcgccggagaaagaatcgagtccggactgaaagaaggaaagattgaatatgcctccaacgttgccccccacaaaaataaa

SEQ ID NO: 108660 - DNA, 242 bp, Glycine max
gcattttttccgtaaccagccactcttccgacgtgtgtacaccacttggactttcttggcagtttgctttctaatgctttgaagctggacttctctcctcttcgtgcttaaatttcttcgtgacacttaacttgcgagccattaacctgtatgcaacttaccatcgtgtaccaccatgatgcattcaacccttaactttgactttcttacggttcctgcctatgatcttgttatctggattg

SEQ ID NO: 108661 - DNA, 397 bp, Glycine max
  unsure (1)..(397): unsure at all n locations
ttattttcttcttccgggtatgtgactnttcatcatgaaatgcatatgtgcaggggttattaaataattgaattaactaaagctatttgaaggaattgattaaagctttattcacatttataattagacatttactggatgtccatggcttcgttgaaatatgtttaggatataggtatacatgttttccatgtaaatcaatataagtatataaattttggatttggtatatatgtatactatatatttatccaatgatgtgtttgatattattggtattaatttatatatttagccacacaaaaaaaataccaaaaggctgtcattgggtggagaattcccatccacttgctgtctcattcggtcataattatgctattggcccaattggagttct

SEQ ID NO: 108662 - DNA, 415 bp, Glycine max
  unsure (1)..(415): unsure at all n locations
gtaatgcaacattcaaacagcacatactatcacagccaagaaaacagagcataggcagaatactctgccaaaacaccaaccaaaatcacagcttttctcacttaaagaccccagtaacaattccttcgttccaattcgttaaccgttggatcgactccaacattttactggaagtctctagtacataagcctacgttttgaccgttgggatctactagcaaanatccaaaactcattctgcactgctctttccacaaccagcaaatgcctagtatttttctgcacttgtgcaaaatcctgctgcacaatttcacagcaaaaatctgcacaaaatgcagatntcgaataccacacttcctctcatccaatcttgcccaaatcagatcctacaagtcccaaatcatgtatcaatcat

SEQ ID NO: 108663 - DNA, 347 bp, Glycine max
gtagtcaaagagaagttcaagtccataaccctcaaagtctgaagaaaatattatgaactaaaggacgtcaatatggccaccgcttgaaccttggaacgagaaaccaagaaagtctgaaaggaagaacacgaccaaaacaagttttgaagggctttatagggcagcaatagtgagctcaaactccgaagaggtgaaaggaatcatcacgggtcaaaggcatgatctggaaggacgagctaaaggcttgccttatgtcgaaaagaaatttgtcccaacagttaaggtgagactgaaaggaatatgtgggccatcatcgataagtgcaaaaagaagctaaatctagcggc

SEQ ID NO: 108664 - DNA, 453 bp, Glycine max
  unsure (1)..(453): unsure at all n locations
cattcattagtccaatacacactcaacaaatagtcatcatccatccacaattccaatcattcatgctcaatatgatgcatgcacctgacctcaactctcatatgcaatgtggtaccatccccaaggaaatagcctaagcgtgtccacacgacactctcacttangaaaactatgcagtaagtgtcgaggtcaccctgccgtgcacagacaactcccccccccctcacgttgattagcctgagtctcaagagagttccaaaccgagtgacataccccctagtataagtattcctcatcacaagaaactacaagtacttactgacaaagtttatactatttccatgtcatatgaagtatgaaacatgggcaccatcaaatgcactgaccatggatgaataaagattcagagccatcctcctncagagatgcttaanactctntaaccactatatt

SEQ ID NO: 108665 - DNA, 130 bp, Glycine max
tggggtgatgatgccaacatgaattgacattgagtgcatttaagagtctgagatggattggaacatgatccttaatctttccttgaaaaatcttaacacttaataaaaggataattcctccatcctcatc

SEQ ID NO: 108666 - DNA, 504 bp, Glycine max
  unsure (1)..(504): unsure at all n locations
tgctagcgttatgcgagacagagaccaacatgttagctatcatcgccaagtacgattatatagtgggtctagccacggcccacgagcatagaatcgcggatgagtatgcccaagtatatgcggaaaaagacgctagaggaagggtgatcgactctttacaccaagaggcaaccatgtggatggatcggtttgctcttaccttgaacgggagtcaagaacttccccgattgttagccaaggccaatgcgatggcagacacctactccgcccccgaagagatccacggacttctcggctattgtcagcatatgatagacttaatggcccacataattagaaatcggtaggaaacttgtatggtctctaagaccttgactagatacgacttcctttntgaaataaaatgagttggtcccatgtntctactncaganagcttgtgcaaatcanatcactcccgcattttatctctagcatgcattgtatgtgggtctcagtctttgca

SEQ ID NO: 108667 - DNA, 384 bp, Glycine max
  unsure (1)..(384): unsure at all n locations
cagcttaacaaaaggctttcttagtgggttgaattcccanagccactcccttatgttatcaaacataaaatggaaaaggaaatattgtagccgatgctcttcctcggcgtcatgcattgctttctatgcttgaaacaaaatagattggtcttgaatgtttgaaaagcatgtttgaaaatgatgaaacttttggagaaatttttaaaaattgtgaaattttttcacaaaatggtttctttagacatgaaggctttctttttaaagaaaacaaaatgtgtgtgcctaaatgttctactaaaaatttgcttggttgtgaagcacatgaaggaggtttaatggggcattttgggtccaaaagactttttaaacactccaagaacattt

SEQ ID NO: 108668 - DNA, 402 bp, Glycine max
ttcatcctatttttgccaaatagcataatactagctagaatgtttaattgagcgaatctgaaaaagaagaagaaagaacacattatatgcatacatttagactacccacatgtctcaaaccttttccatgactcattggtctggagcctttcaataagtcaacatcacataccatgatccacatataattaaagcaagataccttaaacacaacaatccagaacccaaatgcccaccaaatagagtcccaattactttagtcgtgacacctttgttttcaatctgcttcagcgaataactctcacatcaccatataagtaatcaaagcctccaaccgctgctccgtaaccacaccatacaccggtgttatgttaagaacactataacaaccttggattttga

SEQ ID NO: 108669 - DNA, 378 bp, Glycine max
  unsure (1)..(378): unsure at all n locations
ttaagcactgagctgcaagctggnggcttgacagcgtgttattgaagattgataatgaagctgctgagatgaacaaaaggtctttcaaatatgcctgggtgcttgataagcttaaggctgagcgtgaaaaaggaatcacaattgatattgccttgtggaaatttgaaaccaccaagtactattgcacaatcattgatgcccctggacacagggatttcatcaagaacatgatcactgggacattccaagctgactgggctgttcttatcattgattccactactggtggttntgaagctggaatttcaaaggatggacagactcgtgaacatgctctgctttcattcacccttggtgtgaaacagatgatttggtgct

SEQ ID NO: 108670 - DNA, 456 bp, Glycine max
  unsure (1)..(456): unsure at all n locations
ctatcaatagaccttcaatctttaatggagagggttaccattactggaaaacccaaatgcaaatntgtattgaggcaatagacctaaatatttgggaagccatagaaatagggccttatatacccaccacagtggaaagaattacaatagatggcagttcatcaagtgaaagtataactttagaanaacctagagatagatggtctgaagaggatagaanacgagtacaatacaatttataagccaaaaacataataacatctgccctgngaatggatgaatatttcanggtttcaaattgtaagagtgctaaggaaatgtgggacactcttcgataacacatgaaggaactacagatgttaaaagatctaggataaatgcactaactcatgagtatgannatattagaatgaatgcanatgaaaatattcaaagcatgcaaaagaagattacaca

SEQ ID NO: 108671 - DNA, 391 bp, Glycine max
  unsure (1)..(391): unsure at all n locations
agcttggatgtngtctccctaagtgttattgcttcaccatcttccctttccagcttatgctagccagtgtctgacttataaatatgattcaaatntgacatacaagagaagaaaacaaaattcaaatttgttaaacgttgaatgttaaaatatttgtcatggattagtataaatatttattatattatcttttagtatcatcaatcggcaatttgagataaaataattatcatatatatattacatatattttgaataggattaagataagattgatcctcggatggatttagtcaatcatttagtaaatagttcattgagaggtccataactattgctaggggattaaaaatttgttatcttattaattaagcaaatntacttgttatta

SEQ ID NO: 108672 - DNA, 394 bp, Glycine max
  unsure (1)..(394): unsure at all n locations
cgctttnctttctcaatctatctgtcctctgactaacatttctaattgtgatcctactttcttgttgattctcatctacatacatgctcattcaaaactcatgacttcaacacatgcttcaccctttcatgcaaccaattcacaacaccaatttcacaaaaaataattatgtttgcactgcatactaagataatcaagtcaaactggttcagatgcttcaagacatgcatactactattcacaatcaaaagtaacccaatataatcacaaaaaagaaaagtgtactaaagacataagtataataattataattggcataaaaacaaaagcaggaatttaaaattcctgtgacatgtcctgtgattgagtgtcttcatcctgagtgccctcctca

SEQ ID NO: 108673 - DNA, 445 bp, Glycine max
  unsure (1)..(445): unsure at all n locations
attactaatgctaccatcttatatactggaatcaaaagatcaagaaagcacgtcatgcattngaacgcagtctgcagacgctacccctgtggtggccgagaacccaatactaacccgggcattctccaagttcactgtcttggaaaggatatatcttgttctttgtgaagggtagtgatgtagctccttgtggagcttgtacgccttggatcttctttatcaatggagttctttggttctttaatatcaatggtagtggaatggagaaggaagaaagattatcatagacgccacttctatgagaagatgagtcaagaacaaactcaccaccttatgaagccatcgataatagcttgaaagtagagaagatgagtggcagagcgggagagaaggagcacgaatttgtgcctaatgaggctaacttgaagttaatctcaatgatcaa

SEQ ID NO: 108674 - DNA, 379 bp, Glycine max
agcttcggctctagatacgagttctatcttatcctatgtttttctttgtaattggtccaagttcgcgttttgtccttgttctgttatttgttttcttaggaacgtcttgatgcattctttgttgagtctttatttcgttcttgttcttgctcttgtcacatacttgttcttgtgcttgctacttgtgtctttcaaactttgtgtcaaaaaaaaaaaatactggtgagttttgtttgtgcctgccggatagtattctgccttctgatcatacctttttttccgcctattctaattctgtatgggtcaaagttgcctaattgccgaattggttaattgtcacatttccctaatgatgattgcctattgaacgaattctaat

SEQ ID NO: 108675 - DNA, 352 bp, Glycine max
acatcatgtggggtgctattgcccaaaaccaaacttgcccatccttgcccaacccgggcatagtctgtcagtgagaacctgtgatgtacctaagcaagcgagctactggcagtcaacagattaaaggaacatagaccactaagcaaggaggcttgtggtggctggccaactgtgaaacttgattgatatgtgagatatggtctctggtaatcgattaccaatggtgggtaatcgattacaaggcttaaaaatgaagacaggaggctaagatggtctctggtaatcgattaccacggcgtgtagtcattaccatgcttgaatacgacgtcatgaagctattgaagcctcttgt

SEQ ID NO: 108676 - DNA, 385 bp, Glycine max
  unsure (1)..(385): unsure at all n locations
agcttataaaaagtcatgtaatattttttagtatataaattnggatagattnttggtaagaataattttaataaactttataaatctttataataaaaaatataaataacaaccttattaaacaatcccacccaaactccaaaaatgtgctaggatttctttttcttttttgttcttctatcggctaaattttttccttctcccatcacatatgagagtgggggtggaggacgatacttttctttttaattggtttgccattggtatactttttttgtccagcaatgcaacctaatcaagagtcattaattggaatacaaaagtgtaacattaaccgctctccctcagcacagcccactaactccacaaaaagctaaaactccta

SEQ ID NO: 108677 - DNA, 487 bp, Glycine max
  unsure (1)..(487): unsure at all n locations
cgcttgtggtgcttctatggaaggtggatctctgagcctctatgatgtcctttaatggtgagtttccaacatggagatgcagcggaagacaaacgagaagagatgagaggaggcgccatccactatggaataagccatggaagaaggagcttcaccaccaagatgagccttggataataagcttggagagggtgcttcaatggaggaaaagaaagagggagagaaagagagaggggggagcacgatattgaaggaataaaagaggtagagaagtggaactttgaagtatgtctcacaagactctcattcatcaaagttacaacaagtgttacacatgcttctatntatagactangtagtttccttgagaagctttcataagaaaacttccttgaaaagcttctttgagaaaacttccttgagaagctagagcttagctacacacacccatctaaaaactaagctcacctgctttgataaatacatg

SEQ ID NO: 108678 - DNA, 367 bp, Glycine max
  unsure (1)..(367): unsure at all n locations
agcttgagttagaggccacctagtgattatagatgcagacaacctcagcacatttttagagacacctgtagtcctagaggagggggagtcattacccacctactctaagtactgcaggttgcccacaaactacagagagattgaggctgctcttttcataccagggagggggttcatcttgaacgctgagggccatcctgngaggattctcaagaaagatttgactacattagcccaggtgtggagtgttctcttatactccaacctggcccccacatctcacacctctgacctgatagtggatagagctaggctgatctttggcttaatctctcacatggagatgaacataggagcgcttatttct

SEQ ID NO: 108679 - DNA, 322 bp, Glycine max
  unsure (1)..(322): unsure at all n locations
tcttgactcaccatataccttgacccactgtgtaatgccnatccttaccctcggaagcaaaaaaaagaagagaaggaaaatttcccatccaaggaaaaaggagaaggaaaatttccaatccaagaggaagcaaaaaaggagagaaggaaaatttcccatcaaaggaaaaaagagaggaaaggaaattcccaatcaaagagtgggagaaagcaaaaagaacagaaagaaaattcccaatcaaagaatgggagaaagaaanaagagaagttaataagaagaaagttcctgatcaaagaaactagaagaaatgtgcagaaaggtc

SEQ ID NO: 108680 - DNA, 235 bp, Glycine max
taaaattaaaagtttttatttaatgaaaatatatagcttttgcaaaatgtgatctttttcacatttgactttttctataaaaaagaaattttttttaataactaagttaactttttcttaaacagaattaaatgaaccttgagtgactaaattctattagtgaatgtaaaaattgtgctataacataaaaaatctatttaaaaaattgcttgatctccttggatcccaataaata

SEQ ID NO: 108681 - DNA, 211 bp, Glycine max
  unsure (1)..(211): unsure at all n locations
tgcacaattctatcaaattgaaatttaactttttttattaatctcttcatcagcagtataaaaaaaatacattatatattagctaaataatattaaaaatattttaagattttaaatattttatatataaataccatattatggtatctcngtaacatggagatattttggaatgttgctctaaatgataataatccatattcattttatg

SEQ ID NO: 108682 - DNA, 386 bp, Glycine max
  unsure (1)..(386): unsure at all n locations
taccaggtttttttttctgnnctaccccnnnggaaccaaagtatcttgtttatttattaaaagttctcaacccttaagatgaagaatgagtaagtggggggaatctcgtaggtcacagtaccataaaattcttccataacccaatgaagttggggtagataagatatgatcctagtacgtagaacaagtggggagagaagatgatatttactgggatgagcacaacgaagctcaattatgggagaattcacacataaatgccaccanagtgtggttcttgcccatttgttttggtccctacccctcccgcgtgaaactcagtgccttaaaaaatacattttctaatgtcccgctggaaatctttgtttgtcaagacttaaagggat

SEQ ID NO: 108683 - DNA, 391 bp, Glycine max
tatgtgacaagatgtgactcttcatatttaaatttgaatttcaacgttcaaaggcactggtaatcgattaccaaaacattgtaatcgatttcagctttttgaaatcaattggaacgttgtaaattcagttgaaaactttttgaaaaccattttgcttactggtaatcgattacaacaatctggtaatcgattaccagagagtaaaaactctttggtaaacatgttttgagaaaaatccatgtgctactcagtttttgaaaaaaccttttcgtacttatcttgattaagtcttctcttgattcttgaatcttgagtcttgaatcttgatcttgattcttgaagcttgatccttgaatttaactttcctctttattcttgaagtgttcttcaa

SEQ ID NO: 108684 - DNA, 470 bp, Glycine max
  unsure (1)..(470): unsure at all n locations
ttattttctgcctttaatctggtaagggtaaaaaatattcgaaatggttgttgtgagctcaatctttcttaatcgatagttgattaaaatagaaaantttagtagactccgctgactacaacgagggctgttagctataaaagcccaatgttgtatgatgatattttcattatatgttgacaaattcggatatcttgaagctaaagcaaaatctggttaactaactctctctatcgtattcatcaattatctttcacttctagaaccaaatcaatactactttaatgcattacgtgataatccaatgtcaagtagtataaacaagtgagtttcagaaaattgaattcaaatggctgcataaataaatggctggtattttgacatgaagagcctcatntgttctgctttctttgcagactcctgaatggaaatgaactaataggtgatctaccagaagagcttggctatct

SEQ ID NO: 108685 - DNA, 354 bp, Glycine max
acatccgagtaaatagttattgtcatttgaatttactacgagcttctgttttcaataacgagcgtctcgatatactacgagacacaatcggacatccaagtaaaaagttattcctgtttgaatttgctacaagctttcattttcaatttcaagcgtctagatatattacgggacacaatcggacatccgagtaaaaagttattgtcgtttaaattttctaagagcttatgttttcaatttcgagcgtcacgatatattacgggacttaatcggacatccgagttaaaagttattgtggtttgcatttgctacaacctttcgtttcaattttgagcgtctcgatatattacggga

SEQ ID NO: 108686 - DNA, 470 bp, Glycine max
  unsure (1)..(470): unsure at all n locations
aagctcgctctaaattacatngatgtttgatttatgggaggaggttatatgccatctttgctttaagagtaacgtcccactggtaaaactaactttccaaatgtttgccttctcaagaatggccccgaggaagcttgcctcaaagaggtccaggaatgacaaagcggccgaatgaactagttccgccccggagtacgacagtcaccgctttatgagcgttgtacaccagcagcgcttcgaagccatcaagggatggtcgtttctccgggagcgacgcgttcagctcatggacgacgagtatactgatttccaggatgaaatatggcgccggcggtgggcaccactggttacttccatggccaagttngatccagaaatagtcctttgagtttatgccaatgcttggccaacagagganggcgtgcgtgacatgagatcctgtgttangggtcagtggatcccgttcgatg

SEQ ID NO: 108687 - DNA, 404 bp, Glycine max
  unsure (1)..(404): unsure at all n locations
agcttncatcatggctggagttgtgaatcataataagtcttaagctctcttgaattgtgttattcaagataattaagcataagcaaacacaaattgtaactatccaagccttaagcaacataaacactactcttgatttctaggttgaaatcgctggggctggcagcttgaacatacgaacttgtataaattactgggaattggtcactacgttttttgagttgaaagttttactgaattttctagacatctggaccaaaattataaaaaaataaccaagcgatttggattaaaggaaaaaataataaaaattgcacaagttggaagaaaaatcagtgtccaggaaaaaaaaagtgaaaggaaagtgtgcttgttgttttaactcaaaaattgttctataattg

SEQ ID NO: 108688 - DNA, 437 bp, Glycine max
agatccctctcgttggactcggcccaattgagacagccctcttaggtttagtctaacttaaactgagttttgtctatagatccctcttgtaagactagactcagcttaagcagcttacgaaagtttagcctaatttatcctaagcttcatatgcaaatccctcttgtaagactaagtttcgatcctgcttcaatcaagttctaaggcaatagtacatttcccaatgctaaagtcacctaactatgcacacaaatggatgatcagaccaaaagcttacaaacattaagcattgaaggaagcactgaacacaaataacataatcaattagatattaggtatttacatcagttgttcattagaaatccccaattagggtgtttagctagccattacagaagataccctaacaataataagcttacaaaacctatgtatct

SEQ ID NO: 108689 - DNA, 411 bp, Glycine max
  unsure (1)..(411): unsure at all n locations
cacctgangcatgcaagcttgctagggccatggcatctntgtgtagaactgcactttttctacaagctttgctttctatttacactacacttgtcattggtgcaaagtgcaaattgactaatgatgaagtttattgggtggccagccataataatcccacttaattagctcagttgcacactcttgcttgaagtgcagaataaagttcatcacaagtaaaaagctaattcttcggaatttgggtttgagtttaataaatcaattataaaaactgatttataaagtgtaaatactctcttatttttatataatattttggtcatattattaattaatgtgtgatttctaatatatttttcttacgttgaacatgagatattttaagcgtgaggtttataatattttgatcga

SEQ ID NO: 108690 - DNA, 435 bp, Glycine max
gttgctatacatattatcattatagatataccgaagggtttaactttaactaaacccatatttatgcttaacttgagataaggaagatgggaaacttatcctaagagatcacctaagacattgtgaaatattctaaagaaattgataatttgattctatgagatgcttttcctatattctcaagaaacattttggtgacaggtctatagatttcaatttatagaagctttttgattaatcccgctaagtataaatgtccaacaaatgattggaggtgggtattttgctttcagtgtgccatggtgttcaatggatactatataaatttttaaagaattatggttacaatcttctgtctaattgggttagaaagtaactcagtaatgaaaagactgacactattattatattgaatgctataaaatgaaaatcatt

SEQ ID NO: 108691 - DNA, 394 bp, Glycine max
  unsure (1)..(394): unsure at all n locations
agctngaatacaatgaaactcgctaacttatcaaagctattattcattcaatttgctcaagtttccttcgtctagtggactgacagcgttacaacacttattcgttttgtctcaaaataatctcttttttttaacaatcttaacacaaacatcttcaggctttatataaacttcaaagcttcaagccattgaggaatcccagctagccgatgtataatagctttggcgcttgacacgaggttgctattgtgtaaagagagagtggggaccacaaatgctttctgcaccatttcctcataaaagtatagtttgtcggtgtggcctagtactcaaagctgactttcaacatatagattgaaagaaacattaacaacataagacaaaaggaattaag

SEQ ID NO: 108692 - DNA, 396 bp, Glycine max
agcttgccaaatacagatatacttaaattaaaactacaacttataacaattaactaatctattgcctttgaaacctacatcttaatttcacataataacaattttcaagtcacatataaagaacatctcatgtacaattatcttgattcacaatagatattaacatcataagtcaaccattcaaatagtcatcattataagtttataaatcattaccactactcaaaccaatcataacaccaaagacagactctattccatggtgatttgacaccaatcataattctcaattatcatcaacaacatactttcatcaccacttatcaccatgaatcatcaattaccatgggtaaaatatattcatcaaccacccaaaattcttatcatacttaatca

SEQ ID NO: 108693 - DNA, 347 bp, Glycine max
  unsure (1)..(347): unsure at all n locations
tagagcttagctactctcacccgtctaataactaagctcacctgcttgagaagctctcttgaaaagattgctaaagaagctagagcttacatacacacacctctctaatagctaagctcacctccttgagatgagaagctagaacttagctacacaccccctataatagctaagctcacccccgtgacagaactcatgaatatacaataaanagtccctactacanagactactctaaatgcctcgaaatacaaggctgataacctatactactagaatggtcaatatacaaggcctatacgaaggagagaacctattctaatatttacaaagataagcgggctcat

SEQ ID NO: 108694 - DNA, 314 bp, Glycine max
ttttatgtatgaatgaccactttttatgaaggtgcttaatggacgaaactatttatgaatggtgttgttcttaatattataatattgtcacctgtacaatagttttacggacactcctagatccggccgcttctgtgctcctgcaaatttgagtcttcgatgttacttgctacatttctgttctgtttccttatcaacccagtagcttatgagggcctctaaattttccttccatggttttaaaaaacaaagtaacgtcactattatatttttgttctcacaattaagccctcgaacaataaagtaaaacaatc

SEQ ID NO: 108695 - DNA, 423 bp, Glycine max
  unsure (1)..(423): unsure at all n locations
cttcacggtacttttattcctttaatagaaaggaccagtactataacttcctaacttatatcccccanagacttgctcttctgtgcctatatataaaaagcatggaaccactgtaatacaaccaacaaacacaataaccaatgacatcatatttattacaacattatggtactaatagtagtactaattacatcaattttatcacacacagttaccaggcacgtcattntgaactatagttgttgttggttttggatgtggagaagacaanggagcttgttctgcatttctttcggggttcttgccttggtgtggaagcagcgtccggcttccagagtgcttaccagttgtcgaaaccatgtcattgcgtcgtcgcgtcgcgtcgccgaactgtggaatggaattaacaacgaccggcgtgtt

SEQ ID NO: 108696 - DNA, 387 bp, Glycine max
tgcagcttaacattcaatttcgagcgtcttatatattacgagactcaatcagacatcaaaaaaaacgttattgtccgttgaatttgctcagaacttcaacaatcaatttcgagcgtctcgatatgtacgggactcaatcagacaccgagaaaaagtattgtcgttggaattagctcagaagttcaacattcaatttcgagcgtctcgatatgttacgggactcaatcatacattcgagaaaaaagttattgtcgttgaatttgctcaaaggtcaacattcaatttcgagcgtctcgatatgttacggggcttaatcaaacatccgagtaaaaaattattgccgtttgaatttgctcaaagattaaacattcaattttcagcgtcttg

SEQ ID NO: 108697 - DNA, 196 bp, Glycine max
acattaacttttactcgatgtctgatgagtccgtatatatcatatctcgaaatgattgtgatcttgagccatcaacgacatacctttacttcgtgttgattgatccgtatatatcagacctcgaatgatgtgaacttgactaatcaacgacatactttactgatgttgttaatccgaaatacgaacctcaaatgat

SEQ ID NO: 108698 - DNA, 404 bp, Glycine max
  unsure (1)..(404): unsure at all n locations
gctntaaaaaatagagatacattattacgattatgttttaacttaaaaagttactttaaaataagtattttttatataaatattatttttactatcctcaacctgaactaataattttcttattgcaataatattaatggtcttaagttcgaaacataacacgttcaaaatataaaataggtttaaatatattttttttatttacagattagtattttttatttcattttttcaattttttttgttttagtccttatcaaatgtgtttgttttattttgtgttcttaaagtgtttgaaataacaattttttactgtttaaaacacttttttattgttaaaaatactatctaaaacatttcaatgataaaaaacaaaaacacattttgaaggacaaacgattttt

SEQ ID NO: 108699 - DNA, 352 bp, Glycine max
  unsure (1)..(352): unsure at all n locations
acttgagaagcgcttattgttggcatcatcaaaacttcatataacatatgcttctacaaagccaatntatgcggtaatccaaagtggaataacatatgtgatgcaagtagaaatcggaattactttgctagtttaaaaatccctcacccaggaaanagggttgatctttctctaagaaaataatcacttgagtgttgaatggtacaccggtgcagatggggcagagaatgttctagacagaaaatccacatcaagatacttcacatttaagtaaaaagcaaaaagtagtggccttatctaatgctaaagcggagtttagggacatggccaaaggactntgtgaactattatg

SEQ ID NO: 108700 - DNA, 70 bp, Glycine max
tgtatatcattggtcaatagcttgttttccttgttgtgaaaaattagttatcacgcctcacatatttcca

SEQ ID NO: 108701 - DNA, 406 bp, Glycine max
agcttagactatacaaacgtgggaagcctaacatgctttctatcaaattcttcactattaactatcatgaagcagaaacctaacaaaactacccatcatatcttcgaaaactctattcccacgaaaattaagggagaaagaaggctacccaaacctgaaattttgagggcccacacgtatagatgcgcttcacgactccgaaaatgccttcctttcgcgatttggagcagaaatgggcaccaaaggttgaagctttaatggagtttctatgggggatgaagaagaaaagaatggccacgtgagagagagaaaagagctttttgaaattctctttgggtgagtgaggagagagaaaacaactttttggttaaaaagaaaagcaccctctcttttctattattttatt

SEQ ID NO: 108702 - DNA, 390 bp, Glycine max
  unsure (1)..(390): unsure at all n locations
atgtctaaactgttatattaatattcctatgaataatgaatccatcccttctataatggaggtcagttatctaaggataaagtgtaatgtttctgtaagtttgttaagggcattccaatgtcacaaaatttcatacctgccagctgctaccgcaatatgctcattgtgtatttgaatagctcatatgctgactacctaacggatgtgaaacagatattaatgtttacttggatggccttgaagcttatggaatgtgcagtaactttctacattattaaagtgtatactgtacttgacaagaaacttgagcaagtngattctactgtggctttgtggtctcaggacagatttgaagctttttcatctatttntattntgaaagggagtgga

SEQ ID NO: 108703 - DNA, 276 bp, Glycine max
tctacaccctattggctgcctttgaagatgtacaccaaggagaaagcgacaaatctatccaccagagaggaattgtatgtgtacattcattaagtactactaaacattatttgcttctctttctaagtggtctttaatgatttttcacccaagatcggcggcaggtgttttaaaaatagactttaaagagtcgtccaaacattgggcctccttcttgtatgccccctttctatccaatggctttatatggggaggagtttaatcatagaatcgtat

SEQ ID NO: 108704 - DNA, 423 bp, Glycine max
taatatcttatttacaacaatattcaacgtgtatttcttagcataatgttaccagtcattttttattagtaatattttttctttcttctgaaatgtgtgttccaaaggataaccacatattggccgacgaaatctcccaatttacacaaatataaaaatgctaattttaaataatatttcttatttagtgattttaaataaagagaaaaatgactcacactgcctgtacctccccaatgaattccaaatgcctgccgatggcatcaaattcaaatgcatggtgcatttctttaattactttgtgcatcataataaacgatatatggaaattaatatgctatgacagtaattgggataatatagttttatagtaagagcctcactgataactatattttcatcactcgagacatactctgaata

SEQ ID NO: 108705 - DNA, 397 bp, Glycine max
  unsure (1)..(397): unsure at all n locations
agctngatcaaacaattctctaaccattccaatccattcaaatcatacaattgctcattcaaatcattctcaaacactcatttcataccaaacaatccactgtatatcattttcaatcaactcactgtttaaacaagcaaacaactcaaagtgctgaaattttaaataactaaaatttaaaataactgaaaaataaaaactgaaattaaaataactgaacataaatcataaaataactaaaaatagactaaaatgtttaagatgcacaaatttaaatgtcctgctcatgatggatggcaagcccaagcccagaaggctctgcatgataatggactgccccctgtggatgctctggaaacccaagcctagaagagtcatgctgagcaatcatagaatt

SEQ ID NO: 108706 - DNA, 421 bp, Glycine max
  unsure (1)..(421): unsure at all n locations
ctctaatatctnctacactttttggagtgggccattctcggatggcctcgatnttctcaaggtccacttgaattccatttctaccaactacaaatcctaataaaactatattatctacacaaaaggtacacttctctatattggcataaagagtggtttttctaagaactgaaagaacttgccttanatgtcctaagtgatcatctangctcctactgtacactaaaatatgataaaaataaacaactataaatatacctatganatcccttaagacatgatgcataagcctcatcaaggtccttgtgtatgtagtgagtccaaaaggcttcactagtcattcatacaaaccaaacttggtcttgaaagcgaatntccactcatcaccctctttcatcctcatttggtgataaaccacttt

SEQ ID NO: 108707 - DNA, 395 bp, Glycine max
agctagcttaagaccgtatattgatttctttatattgcacactatatgttcctttccttcaactgagaactccatttgttggtccatataaacattctcctctaaatcttcattaagaaagacagtttttacatccatctgatgtagctccaagtcataatgggctactaatgccataataatccttaaaaaatctttttgtgagaccagtgaaaacgtctctttataatcaatgtcatctttctaagtaaatcccttaacaacaagtctagcctcgttacattcaaggttgtcataagagtcacatttagtcttgaagacccacttacaaccaacttttttacatggaatttatctcttctttcatggcatttaaccaattctcaaaattatca

SEQ ID NO: 108708 - DNA, 191 bp, Glycine max
  unsure (1)..(191): unsure at all n locations
ntaannattgaattanaacgttcagaaattgctggtaatcgattaccatatatgtgtaatcgattacacagtgcaaattttgaattcaaattntaatagctgttgtaaatcggttttggccactggtaatcgattacatcctctggtaatcgattaccagagagtaaatctgttgaataaaactttntaac

SEQ ID NO: 108709 - DNA, 396 bp, Glycine max
agcttataagaacaatattgcctcaatcatttccaaatatgcatgtgaattaggaagcatcaacaagaatcaagccaaggctattgtgcaagcaatcaatggggcaaaacacaccaaatgattatgatgatggatggctcaaattctcacaaaggtaaactcatcactttcaaattgagctttcaaaactatcatgacatgtagaggagaatcaaggatttcaattcacaaaatgtcaagaacttttattttcaaaacaattacccatttcttgaacatatcctataattcaaagaaaaacatgcaaagtcgtacatgcacacaaaattgacccaaaatattaaactaaaaattacaagccttaaatgaaaaaccatgatatcaccatatctttaa

SEQ ID NO: 108710 - DNA, 455 bp, Glycine max
  unsure (1)..(455): unsure at all n locations
tgactaagcgagtngattntagccttagtttcaccttagttattagtcaattcggttaagaatgagaaatcccaaagagaaaatgtccggcttgatttccgctttaatttactaanaggcatattttcgctattatattattattctatctctttctgaattccaatgtggttactgcacgaccgaacggtcggattttattttaaccaaaggttaccgatcatacaattcaaacgttcggtggacatttattttatttttaagttaagcgaaaaatgacttaagtaaaatggcttaagcacgtctacatggggtataaaaagctaatgatatgagaattaaaatcacgaaacacactgtggaccaccacgggtacatagaatgaatcgaaaagcttggttcaaggtacttacccgttgaagatcgaagaacgatgaagaacgaatgaagaacgt

SEQ ID NO: 108711 - DNA, 380 bp, Glycine max
agcttaacccccttctaaagagattgctcaaaatgcagaagaagcaacaagcaatttaataatgttctttaaacatgcaagacacaattgattgccacataataaataagataagggaagagagaatgcaaacacagtttcatactggttcggaaaactccatgcctacgtccagtactcaagcaatccacttgagattttccactccctttgtaaaaaccctttacaaagtctgaaccacacagggacaacccttcccttgtgttcaacattccttacaacttaagagaccctcggtcccttaaacaatcttcttgaatgagaaaaaagaaaaaagtattctctcttgaagagaacgatatacaattgatgttcattga

SEQ ID NO: 108712 - DNA, 264 bp, Glycine max
aatcctggttgaatgatgacaaagtgctttaaatgtgataaccgtacagaagaatagaaaatctcggtgtatacttagtcactttacctgagctatgtctaagtctcctttacataaatagaaaaggggttcacgtattaaaacttgattacaagaatagtatgtttgcctaccactcctagctatacaagtattcttaataccactgttatcaatgtcttatacttccgcctgaatataataaaatcaagtgttgtttaacac

SEQ ID NO: 108713 - DNA, 374 bp, Glycine max
  unsure (1)..(374): unsure at all n locations
agctttgaatgcactattcaatggagttgacaagaacatttncagactgatcaacacttgcacagtggccaaagatgcatgggagatcctgaanaacactcatgaagaaccttcaagtgaagattccaaattgcaacttctcggctacaaaattctaaaatctgaagatgaaggaggaagagtgtattcatgacttccacatgaacattcttgaaattgccaatgcttgcactgccttgggagagaggataacagatgaaaagctggtgagaaagatcctcagatccttgcctaagagatttgacatgaaagtcactgcaataaaggaggcccaagacatttgcaacatgagagtagatgaactcattggttct

SEQ ID NO: 108714 - DNA, 378 bp, Glycine max
gatacatgtcagggcttgtcttggttcaatgataaaagggatgccccacattatttccatgacacatatgcaaaaatgatgaactggaaactttatgcaaaactggtcatgtatgcacctatgcggacactcaaggggcaaacttttatggtcatgtgatgctaaggctcacgattcatttcctgtattttaggcaacccaatggttccaaaatatggtcttctatcaatttgtgcattcatcctaaacgaagaactctacacggttccagaatttcaaacatcatcgatagtaatgatatataaacactaacgcaacaatcctaataaaaatgtatgcgctgtacaaatgacaatcgaaacaacaaaaacaaacatt

SEQ ID NO: 108715 - DNA, 359 bp, Glycine max
gacaatatttggctaatagaaataatgatttcaatgctaatagtaattttttatcttagatgaaaaaaatgctatattagccttagaaaacagtggtcaccatcaagataaggatcaaaactacaacttaaaaaagaaaaaaaaccatgaatgatttaatttaataaactatgttaactaaaaattaactggcttcgtatttaatattttaattatatgttatgggttaggtcatgttaaaaaaaaaaaacatgttacttttgacttatacattgatctaggttgattgggttgggtcaaatttgatctgaactttcaaaaaaatcaaaaccaaactaattgggttaggttaggttcac

SEQ ID NO: 108716 - DNA, 396 bp, Glycine max
agcttgccaaaaatagggtcagcaagctattccatatcgaaacatggggtatataatggggatggtcatgcattgaagactcacctcctacaacaagtgtgatggattcaagagaaaatgcacacctttgatggcattcacatgctattgaggaaaacccacttcatcaactttttcactaaatacaagatttctccacatcaaaaatgtcatcatcataaccaaggtgtcactttaacaatgataagccagataacgttcatctcaaacaacatttaacgactttaaatgaggataaatatgtgtgtgcatgtgtgtgtgtgtgtgtgtataaagaataaaaagaaatattgggggaactacccaatcgttaaacccactgtttttaggaaccac

SEQ ID NO: 108717 - DNA, 289 bp, Glycine max
caaccaccgctttaagagcgctgagcacctactacagcttcgatgccatccaaggatggtcatttcttctgtagcgacgcgtctagcttacggaagacgagtatacccacttccatgaggagataattcgccggctgtgggcatcactggttacccccatggccatgttcgacccacacatatcactcgagttatatgccaatgcttgtgctacagaagaaggcgtgcgatatatgcgatcctgggtgaggcgtcagtggaacccgttcgatgtgcatgctctcagtca

SEQ ID NO: 108718 - DNA, 409 bp, Glycine max
  unsure (1)..(409): unsure at all n locations
agctcatgatgattcaaggtgttttgatgataacaatgatgancacaaaagatgatgacaaaagtgatgaacaaaaagctcaagtgaatcaaagaacatccatctcaagggaatcaaagaacatccatctcaagagaatcaagaacaagtcaagagttcaagaatcaagaagaaagcctacacacaagaatcaagatcaagattcaagactcaagattcaagaatgaagaaaagactcaatcaagataagtattaaaaagttttttcaaaactttgaatagcacatgagtttttgacaaaacctttaccaaagagtttttactctctggtaatcgattaccatattgttgtaatcggttaccagtagcaaaataagtttaaaaatgttttcagactgaatntacaacgt

SEQ ID NO: 108719 - DNA, 424 bp, Glycine max
gtgaacaaagagccatttctatggcaaatttgggtgttgaagagtcaaattttgatttggtggaattttatgtgtaaatccaatttgggcaagtttagaatgatgttatggattggtgtgaggtgagagtttgcttcaaatttacctcattctaaacttcacctttcaaacctagaaaagccattgaattgaggggttttggacacctagaatttgtgttgctgtggtttgaagcttggctttggtttagacatgtctgatacatgaattgggacttgtaggaattgatttgagcaagattggatgacgggaagtgtgattttcgaaatctgcacttatgcacgaatttgctgtcaaaatatgtgcagcaagattttggcttgtgcagataatgcttgtgtgtggttgttgtggaaagagtata

SEQ ID NO: 108720 - DNA, 247 bp, Glycine max
catttatctcattattggttgggaaaaattctatctatatgctttcattccctcctcgacgcattattttttaaaaaaaacatgcgttgctctgatccgttagggggttagattttttcaccaaagcgggtttgcattttaacgaaaaatcttcacggaacttcaatggattctatccctacctttacaaagactttaatgtcttcaaaacttttcatttccaacacattaatgtgcttcaggttta

SEQ ID NO: 108721 - DNA, 387 bp, Glycine max
  unsure (1)..(387): unsure at all n locations
agcttgtangattattgtgtacccattatatgtgtgtctacgtggcgggcgggcgatggtgcacaacaaggtcttcacattccacaatcgggcatatacccaccattccctgttgcccaccttctactgagctcacgtactcccacgtaacccatatcctcctttatcttaacaccgggtgcccatcaatcctcccaagcttcttcaacatccaggtaaaacaacattcaaacagctcagactatcacagccaagaaaacagggcaaggcataaaactgtgcccagagcaccaaccaaaatgacagcttttctcacttaaagaccccagtaacattccttcgtccaaatcgataacacgtggattgactcaaaatatttactggaag

SEQ ID NO: 108722 - DNA, 386 bp, Glycine max
agcttctacttatgtggcagggcgggctttcttcactttcttgtctcaaccgcgagctttgactaccgctctttctttccgcgatgcttctctttatatcttcctgagtgggcttatagcctaaaccatacttcccacgatttcctttggcatttattatgccagttatgccgccgctgtctttgcctaaacccattccggattcgtaaccgttccccaacataactcgggccaccattactgctgcatcggacaagcaagctcgcccagagaagaagtccacggaggaaatgcttaccacctcaaaagactggaaagcggtttctaatgactcctctgcggcctccacataaggcatagaggatgggcagctcaccaagatgtct

SEQ ID NO: 108723 - DNA, 183 bp, Glycine max
gcctgaacaagctcctatctagaatttattgtactattacccaaccctaatcgattctttaactaaggcccttcatattaaaacttgtttacccagaattccatgttaaatttcacgcatttggccaactccaaactttttaacaaacaaggtagtgctccaacatcagtgctgcttaaaatt

SEQ ID NO: 108724 - DNA, 303 bp, Glycine max
accaatctctttcaacacataaatcacacattattcttttctctcaaatatctaagtgtttgagagttttctatacttacaagatttacatagagcttttttataaagtatctcgattataacacttgggtttgtgttcaattcctcaaagcctctaggattttaagcctcttccaacctggttgctgctctaatggataatccttacttatctacgctaaagatgtggggttgagcattaaagcttcacaaatcatgacttcttatatggaaaacctattttactctcggaagactcttata

SEQ ID NO: 108725 - DNA, 385 bp, Glycine max
agctggtatataaagcacatgtcattattcatagacaacaacattaaaaacattggtaacaataattagcatcaaacgtttatgaaaaactttcatacctatgatgatgatcactataatgtccaacaacaaatgtcatgatgatgatgcaaacaagaacacaaatactgcataaaaattaaatatttgaattagaattggaattgaatgagcaacaaaatatatgatggcacatttaacttatttcatgctattgcagaaaaggagaaagtctcaatctaatgcaccaaatgagtgatgagaagatgaatttgtgtagttagtgactgatttattattgttctacaatgaaattccgtttgcatgctaacaaatgttagtcaat

SEQ ID NO: 108726 - DNA, 375 bp, Glycine max
  unsure (1)..(375): unsure at all n locations
ccatgatctcagctataatgtgataaggaaagacatatantgtatcttaatataaattaatttccattctccatcgcatcatcgggtcttattcttttcctcgttttcttataagactattataagattttgatttttttcaaatgaatggttaatatgcaactatggtggtttattggaaacatatatttttgttctttgggtgccacatttgtactacttacaatatgtttactaaaaattttatagccctataatgcgtgtgtaattacgggactatgcttttttgtcctcgcagtaataatatatcagaacatactatattttgaaaagttgaataattattgcctacctgtcagaattactttctttcgc

SEQ ID NO: 108727 - DNA, 342 bp, Glycine max
  unsure (1)..(342): unsure at all n locations
gtcaccgcngctgcagcttgatttccttgtccggaaccttctgttctatgttcacncaaacccaatctctgggtgcgaagacaaccttctttctcactctgttggctgggttagcatagactttattnttcctctcaatttgatcgttgactctctcatgaagcttcttcacatagtccgcctttgcttgaccttctttatgcttaataacagaaacattatgcatacgcaaaagatcaaaaggagttagtgggttaaaaccattaacaactgcaaaagagaacaattagtgtgctatgaacagctctattgaagcaaatcaacatggggaaacaactttca

SEQ ID NO: 108728 - DNA, 410 bp, Glycine max
  unsure (1)..(410): unsure at all n locations
tcgatatattacgggactcaatcagacatccgagtnanatgttattgtcgtttgattttgctctgaccataaacattcaatttcaggcgtctcgatatattacaggactcaatcagacatcctagtaaagagttatcctcgttcgaatttggtcagagcttcaacattcaatttggagcgtctcgatatattacgggactcaatcagacatctgagtaaaacgttatcgtcgtctgaaaatcctcagagcttcggtattcaatttcgagcgtctcgatatattacgggactcaatcagacatccgagtaaaaagttattgtcgtttgaatattggtagagcttcaacattcaagtcggagcgtctcgatatattacgcgactcaatcagacatctgagtattaagctatt

SEQ ID NO: 108729 - DNA, 369 bp, Glycine max
  unsure (1)..(369): unsure at all n locations
ttccgagcatctcgacatattatgtgccctaatctgaccttcgtgtgaaaagttatgaccatttgaatntctcgagagcttccgatgtttaatntccagggtctcaatatattgtaagcctgaatcggagctcagtgtgaaaagttatgaccatttcaatttctcgagagcttccgttgttaaaatttcgtgcgtctctatatctaatgcgcctgaatcggacatccgagttaaaagttatgaccatctgaatttctcaagagcttccgttgttcaatttcgagcgccccgatatattataagcctgaatcgaacctctgtgtgaaaagttatgaccatttgaatttctcgaaagtcttcgttgatcat

SEQ ID NO: 108730 - DNA, 408 bp, Glycine max
  unsure (1)..(408): unsure at all n locations
ctatcccattctttcatctaccttgtccttggctccattacaaccttaaaagaccttntgatcctcatgtgcatgtgtttatgatgtggttgtcaattttagagtcttgccaagtctatgtgatgttcgttttcatgggtgctntgagagtaaacagtagcatagacactcgagagataaagtgcatatcttgtgaggctttatcacttttcattattgagactgatgactatcttgccatgtttgagatgcttggatgatntttatgacgacctttattctctaactctgtacgtgttggatattacccattcttttcattcctgacactcatcgagaaatatgtaatcgttgttgtgtctgtttgttctctctatggctctagattcgccctcgctgttgttttat

SEQ ID NO: 108731 - DNA, 120 bp, Glycine max
aaagacatctgtcctgacttgtttctactacaattgattcttgggacaaaacttagaactgggtgaggagacgatcggcatataacaagatttagtagcttttatgcgcatatttacaga

SEQ ID NO: 108732 - DNA, 358 bp, Glycine max
ataagcaggaccaatacatcacggatattgttcctgatcggaaccaacttcacagcatgaccaagcgggaacatgagttcatttaagatcatgctcaaaggtggagagacctagcagcccatagtgtcccacctatgactgaaagggaaatgatcacgattatggtggatacgtttgctacgttcgtactacgagaagctgatatgatatatgccggcttactttgcagacctcatcttcgccggagaaataatcaattcctgactgacacaaggatagtttgaatatgcctcctacgttgccccgacaataatagatgaacccagtgggggcacactgtaaatggatgagataccta

SEQ ID NO: 108733 - DNA, 452 bp, Glycine max
  unsure (1)..(452): unsure at all n locations
cagatctatgctatgtgctcgcgactggtccctatcttcccttcgcaacttgagttcattattgctaccccatagagctccgcganatttgttccagccatagtcttccttgcgagccctcttggtctcttgttcagggctcttgcggtaattgcattctcttcccgtaacccggcacactccttccgaacgtgtgtagcagccaacttggacttctccttggcgagttatgcctttcctaactcgcttttgagagctaggacttcctcgtcctcttcccgtgctatataaatctctccgctgacgacttttaactttgccagccaattaaaccttgtatgcgaactttacccattcgttgtacctaccaatgttgcattatcatgcctttaagctctggattttccttatggggtttccattcgttatggattcttgtatatctttgaatt

SEQ ID NO: 108734 - DNA, 374 bp, Glycine max
attataattatgcatctaggtctcagatacagacatgtctgaaatggtctcatgctctttctcaagtgatgggaactaccaaactgaacccacacatgccactatcaatatactttccttcctcaacttccgtggtcaaatatcaacctattccatacccattctaacctacatcagatgaagggtgatgtgctacccatctcaattcattctaattaattagcatgcttaattggctaaaattgacacaactatatactgttataggatcaatcgtacatggctttgggtcctaaaaacaaaacaatttacttctgatctgtacaatccattaatggaatggcgacccggatcatagtaatcaatttgtcttt

SEQ ID NO: 108735 - DNA, 276 bp, Glycine max
acccaatatgttctctgctacaaggtcatgacgaaagacaacgattggtacctcataaccttgcattgtggcaatgaagggcatcctgcatgagcctcaagtgaacatacgggcacatataagttctcactcgtcgatgtctgttaaacataagaaaggaggacgaatcctggaatttcatggattgttaaacatcatacgacctcattgttgtcactccaaaatggtcaagtgtgtaaatcaaacaaaacatacactctgatggagttcccggag

SEQ ID NO: 108736 - DNA, 359 bp, Glycine max
  unsure (1)..(359): unsure at all n locations
gtgtattcatccctcagatagattgaatactctcgatcntagtgttaagtcgcagttcaaccatagatgtaagagcttgtaaaacaaagagtntcaaccatagacttgataagaaatatccaggtgtacttggaaaaaaacatcaataaaggatacataatatntataaccagcatatgaagtcaaatgagaatgtccccacaaatatgtgaaaataagctccaaaggagagtaaacaaatacaaaagtgtgagatggtaatctatgagactttcccatacaactagaagaacaaagacctgagaaattgtatttgatggaaaatgtacaatgattgagactagtttattacatgacca

SEQ ID NO: 108737 - DNA, 297 bp, Glycine max
ggagaacgcgttgtataacagcactaaaagttacttccacaacaattctgtcactatggatgtaccggttcttattggttaacatatccttcaaaaatttggcatacatgggcatttgttgaagtgcttctccatatagcaaagtaatttccaatttcttgaagatatcaagatatctggccaaatgttgttctttatctttccgggagggtaccaatggataatgtacctccttgattcaatatgagtagcctctttcttctttctatgttaaccccactcttgcacttcttcttt

SEQ ID NO: 108738 - DNA, 357 bp, Glycine max
  unsure (1)..(357): unsure at all n locations
ggtcttcttcattggaagtgcggtagacaggctcntgtggtgatatacggatggcctttgtggataattgggtggtggggtaaggaggaggttngttataggctgagtaatgacattgttgggttggtgggaaacttggccgtataggaatgatagtcacagcatgggtttctccctctttctcaccctcttcatttgccccagttttctcagtcgtcctagtaggatgatcaaatatgcctcttttcggatccacttcgatctttntgctggcgaagaccaaatctgtaaaacttgaaggtgtgtaacccaccatttttttcatagtagaacaccgatcacgtgtctactatcatt

SEQ ID NO: 108739 - DNA, 221 bp, Glycine max
  unsure (1)..(221): unsure at all n locations
tatacattgtactcgtatgtggcgatcactcnctacttgtcatctatgtcgtgtgtgaagaccaccaatacctangaggctnggaggcatcgttgggtactattatgtgtctagtgtgatagtcagtggtgtctagtgtgattatcaatgatgtcaagtgtacgattcgactgtgtcaatggagatatgccatgtgattaagaattatagccatttatgtc

SEQ ID NO: 108740 - DNA, 273 bp, Glycine max
ccaggactgagttactaattcatcagataaaggtatcagttcaatagtcatgtataaattaaatcaaagtcttggttttgttggatactatacacacttaagttaagaaaagaaaatttggattacaaaatatggaataacgaatacggtatatggattcatgcgcggaatataaaatgcaaatgattaataatcaaaaaccagcatgattcatcatctacctattctatagatacagttaacattttacttcgagccactatatccttcatc

SEQ ID NO: 108741 - DNA, 299 bp, Glycine max
ttggcagaaaaactggcaatttgtgcacaaaaattggcttgtcacaaatgtgtgtttgtggtgtggaagggatacatttgggtttggactttctaccgaccccacgttaaatgattatatgactaggacctcagtaaattctagtgaccaccgttacaatcgaacaaaaaatgtacggggttttagtgagaaactgggattgaagtgtttggcaagttctaccctgccttttcttgtttgatagcatgagttgagtgatattgattgtgaactgaggatgatggaccggttaagacaga

SEQ ID NO: 108742 - DNA, 400 bp, Glycine max
  unsure (1)..(400): unsure at all n locations
taagtgtactctttgatccattaatagacttgatgttatctgtagcacgtgccataattctgcaacatcaacatgatcgattaactctgaatataaatgcacatgggagaatcaaagaaggtgcagcatggctgcaagacatatggcataaaacatatgcaagcgatcaatgtatctggctaaaatctaatggcaaaacgggaggggtcaaatatgcatttcaatggcctgcttttgttacttacacatccaataaatgatccatgaaatggccatgcatggccacgacaaaccgaatagttattgatcagtcagaaacaaaacatgaagttggatatgtggtacaatgaccaacatatgattaacaaacatgcttaataatgatgcaagctacngacac

SEQ ID NO: 108743 - DNA, 396 bp, Glycine max
  unsure (1)..(396): unsure at all n locations
cgcacaaatcactanaaaggggatttaaggggtcgatactctcatgttttctcactattgtaaaatgggtcatttaaggtccaacgccttaaaaggacctccttccaagtaaaaagaatcgcttacttcgccctttagaaagaactacataggtctgatttcctctttgatggagggtacgtatgagcaagagccctgcttttgttgacctcaaaaataaaaaagaaataaaagtttaggtacacaatntcacacaattctaaattaaggctgttgtcctttgggataaacgtcagagatgctaatacctaactcaaacgtaaataccaactccgaatctggaataatcttcatgaaaacggttctttggttttccgacgtttcaacaaataacgt

SEQ ID NO: 108744 - DNA, 290 bp, Glycine max
aggacagcggcggcaatgaattcaccataatcaattgtcccacttgtatcatatatgcgcctgccattgccaaataagaccttatgttaaaaagatagatgcaaagcttcatatatcatgaaaatgaacatattttaccaaatagataatgctaataacagacacttgtattaatactcttttgtgagatgaaattcatgagatccgtattggggtcaacccacatagatttcacctaatgatagtatgttgaggagtagtacactgttataacattcctaaaaaattta

SEQ ID NO: 108745 - DNA, 430 bp, Glycine max
  unsure (1)..(430): unsure at all n locations
agctcttgccatggttggttaagcattgtatttgttgttggcttctgccttgagtgattaggcattgttttgacttatgttcttgatggttaagccttgttgtttntgtcaagtgattaaattntgaggtataattcttgcttgatggttaagctctgatagtttcatggattgatgattgtagcttttgccaagtggccttgtgttgtggcttctacttggtggtcacagtttttatgattgatctggacttttagttccattggagcgagtgtcatggagatgccgaaagaagttctaaaggccttgtagttggttgaagacatctatgaattatgcacctcaatcgcaccatttctcaccttggtcgcacaattctctccattgtgtatctgcttatcaaccttcgattttctggtctcattatcat

SEQ ID NO: 108746 - DNA, 423 bp, Glycine max
  unsure (1)..(423): unsure at all n locations
gttcgcactatcctctagtaatagaaccttgagagaagatattttgataactaaaaaagaaagaagaaagaaattttagtttaattaacccaactaactcaagagtacagatctatgtatatataccaagttgttagttatgacagttgtaattagttgtcacgaactaactaaatattttagtgaactaactcactaagacttaaccaggcttaactaccagagactatngttcaataactgcagctctcttacaatactccaatagtaattatcctaaatcaaatatcctaaccatgtgtttggatggtgactgttaaccatgtaattcattttaacctgtaactgaaatacttcaaagtgaaatacactgttagaaaataattaaagagaaatgaatnttcatttaacacgaatttaatc

SEQ ID NO: 108747 - DNA, 476 bp, Glycine max
  unsure (1)..(476): unsure at all n locations
ggtatgtntacaagctcaagtaagtgtatatatactcatacttgccttgaagtatatntntatatttctcaaagagtggtgaagtaatttgtttcctagtattacatttaatgttaagtgctatatttatgtcttaagatctcgtgtctcttaaagcccttatatacctcgtcaaattaaatgtatcggttatagtgataggttgctttatttgaggagatatattatactaggttttcttgcagtgctgcaagaatttaataactagatgctaagatatcatatttttttttgattcgaaagaagaagattatatttgctgtggtggaaattgaacatagatcaacgacttataaaacttatcttaacttctacgagagttctactcaaaataaagtattctgagtctggggactataaatatgactctggagtgaatcttttattgaactggacatctgggccaattggaaatc

SEQ ID NO: 108748 - DNA, 396 bp, Glycine max
cgcaacaactcgatattttgagttaaactctgatatatacataaaaaatagcagagatgaatagagctaacttcttcgaattgtatcaatctatggcatgagtctatgctagctagatccactaatgaaaccaatacctttcctaatcattaaaggtttgatatataccactaggttaatagtgcaatacagaacagtacaaaatacatttgtgtaatatatccatatattctcgaatctcaatagcctaatgttgagtcttagatattgacactaacaactcttaacactccctcaagcttaagcatagattttaatgataccgatcttgttgacatcatagcatacccaactcaaagaccttgtgaataaatttgtaagttggtcaatgcttac

SEQ ID NO: 108749 - DNA, 97 bp, Glycine max
aacagaccggagaaaaaacacaatccacagccaacaaggcggaagaccaagaaacgcagaaacacggcggaaaccgacgaagccgcgaaaagaaagg

SEQ ID NO: 108750 - DNA, 479 bp, Glycine max
  unsure (1)..(479): unsure at all n locations
gatctctcagtcacctgcngcatgcacgctgtagaggtatgataagtgcaaaatttttgtttttcctaagaatccaagcctctggtgttgagtgcaagaaagcatgataatgagagcatgtgggctaggattccctctttatgccaacactnggtttgggctatactgtgacatcctggaaatttctacccggaattgtgtaagtgttacatctaaataattatatgtattattcagtgtatatatatattcttggtagaagtatgtacattgtgggaataatacgcgggttagactaattaacaaagagttatccatatctggacagntatagattaattcgcaattaattagtctaaanatgatcattgtgcgtgcgacttgataattaacataaccaacctctggaccacgctcanggtttcattctgacgctacgatatatatacatattgcctactttctaaacgggcctcgac

SEQ ID NO: 108751 - DNA, 432 bp, Glycine max
  unsure (1)..(432): unsure at all n locations
tctggtgactaggaagcacgctattctgtagttttccagatctgttccttcgccaagtatgtgtatatgtgtatatatgtattatattcgctgttctggctgttgtttgtattttggtttgtgcagaagacaaaaagaagaagaagtagagatgagagtcgtcatcacggaaagggcaagacggacgaaatcagtgtcctatcttttctttcctcttatctccgatgagaggtaagtaaagaggggcaactctcataccctaatttcgtccggggattatttcttgatgacatgcaataaatgaagtcccgagacgtctcataaatcgaaaggaagcaggcttgcgtgattcgtgacaatccgtaatgtggcggaaatcgaacagaggtgtttntgcgcaatccgcgagtttccgaacttctttcaaagcta

SEQ ID NO: 108752 - DNA, 428 bp, Glycine max
  unsure (1)..(428): unsure at all n locations
tcgtccttatatccctcttngtggactctgcccaatngagacagccctcttaggtttagactaacttaaactgagtgttgtctatagatccctcttgtaagactagactcagcttaagcagcttacgaaagtttagcctaatttatcctaagcttcatatgcaaatccctcttgtaagactaagtttcgatcctgcttcaatcaagttctaaggcaatagtacattttccaatgctaaagtcacctaactatgcacacaaatggatgatcagaccaaaagcttacaaacattaagcattgaaggaagcactgaacacaaataacataatcaattagatattaggtatttacatcagtttgtcattagaaatcctcaattagggtgtttagctacgcattacagaagaaaccctacaataataagctac

SEQ ID NO: 108753 - DNA, 330 bp, Glycine max
  unsure (1)..(330): unsure at all n locations
tgttagacgcggctatacaaaacagcttgtgtaactaagtcatgtgcacgataactcgcccgcgctttttcttccatgctatatgtacaaagtgattgatccaactattgtctgatcaagttggaataacgagagccgcganatatactagtgccatgctggatatgtattttcacacctgctcttctttgacatcaagatacacatgtatattgctctggtcagagaaataaatgttgtggtgtcgttattaaacggggagtacccgggtgagcgacacatgaagatcttaaaagggtgtacaaagactctatatcgtccggaatcatc

SEQ ID NO: 108754 - DNA, 335 bp, Glycine max
tcatgaaacctgactgtgagatgaagatcgaagatcaaagatcggatgggtcatgtctcgaatactttaacttaaattagattggtggagataaaatataatttggtctgatcttcatacaatggttgcgattagcccaatgcctgaatatgggaaaatccctgactgccgtgaatcccaatccctctaattaaataagctctagaatgcagcactgaactataaaattcttgggtcatttatatacaatctatttagtaatgcaccatagttccaatttcttgcatcaatgacagagctgattcacaaatactaatggctaaaaatacaccaat

SEQ ID NO: 108755 - DNA, 250 bp, Glycine max
  unsure (1)..(250): unsure at all n locations
ggcgcatatccaggaaagatcttangacactgaaaatggcatgtttctatgtttaccatgattcttatacatcaagtagatccttaggaaatagatgacaaaagatgtaacacattcatcctacataacttatggcacgaaatgcagaagatactatttgataattgttttaattgtagaattgagtttcaaatcatacctatatacaaacactactcatatgtttcgttcatcatcatcattatctctc

SEQ ID NO: 108756 - DNA, 202 bp, Glycine max
aaagaacaccttacatatgtcccaacctagatgtaagagtataaaaaacaaaacttgttaattttacgtgactattattatattgctaaaattaactgatattggcattttgattaaggaaaattctagtaaccaacttgtagttgtttgaataaaattatggccatttataatgtgcctgtttgagtaaaaaaatatgttt

SEQ ID NO: 108757 - DNA, 322 bp, Glycine max
cactcatgccttgtatcatggatctcctctggccatggtcttaaaagttcattgaggtatgtatccaactctaatattgcagatcacatagtatttattattaacataacattctacaagatgggaattattatcttattcacctaagaatttggacagcatacaaattaagtgttgactagtagtagaactgagtgggaagtagactagttatcttttcttgaagctgtctcattgcatgaagctgtctgtttggacaacatacagcacacttaagcttcactttgccttgaacctgctcatgtcatgctccatcaaccat

SEQ ID NO: 108758 - DNA, 285 bp, Glycine max
taactatcatgaagcagaaacctaacaaaactacccatcatatctccgataactcaatacccacgaaaatcaagagagaaataagtctacccaaacctgaaattttgtgtcccacacgttgagatgcgcttcacgactccgaaaatgccttcctttcgcgatttggagcagatatgggcaccaaatgttgaagcttattggagttcaatggacgatgaagaacaagagaatggccacgtgagagagagataagagacttttgaaattttcttcgctgaatgagga

SEQ ID NO: 108759 - DNA, 493 bp, Glycine max
  unsure (1)..(493): unsure at all n locations
agatatgaaagggacaattaaagcagtaaaatggttggatgtctaaatgtttattataatattcctatgattaatgaatccatcccttctataatggaggtcatttatctagggataagtgtaaatgtttctgtaagcttgttaggggcattcgaatgtcacaaaatttcatccctgcnagctgctaccgcaatatgctcattgtgtatttgaatagctcatatgcttcctccctaccggatgtgaaacagatattaatgtttacttggatggccttgaagcttatggaatgtgcagtaactctctacattattaaagtgtatactgtacttgacaagaaacttgagcaagctgattctactgtggctttttggtctcacgaaagattctgaagcttttcatctatcttttatttgaaagggagtggaagaacanattcattctttgtgccttatggactgctnttatgactgactacattttctgttttgac

SEQ ID NO: 108760 - DNA, 342 bp, Glycine max
atctctttatcttacagaaagtgctctcctgaattcttgagtgattcaagaacaccccgtctgtatcaaacgacttttcacaaccttgtgtgctgccctcgccggataaactgaatgtttacttgctttcattttaaccttgttctttaaacacaattccacatattgcctctgcccgaatattttgtggcgtaactccgttttatcactcaattagtgattctggacctaaattgatttcagacgagacctttacctctttcgaatcacctattggagcctgtagttcggttattgcattctatattttgcaccacacttaaccacgtttctatctcttat

SEQ ID NO: 108761 - DNA, 359 bp, Glycine max
  unsure (1)..(359): unsure at all n locations
tgcttgagaagctactatggaggcttatatctttgagctncatttgatgtccttcaatggtgattttcagccatggagttgtagcagaagataaaagagaataggtgagaggaggtgccattcactatggaataagtcatggaagaagaagcttcaccaccaagagagtgtcttggataagaagcttanagaggaagcttaaatggaggaagagaatgaaagagagagagacaaagtggcgtgggaatgaaggaaagataacgagagaatttaaactctgaagtatgtctcacaagactctcattcatcaaacttatttcaagtgttacccatgtttctatntatagcctagcacatgg

SEQ ID NO: 108762 - DNA, 336 bp, Glycine max
ctgcaagctttcagggcatatcgaaggatgatgtgttctcttttttatcactggaacagacatatcactttgtattcgatggaacaaatttaagagttcaacttgtgctaaattatatatttcttgtgtgtttagaaacattaattagatttaataccttgtaaataaataataacaactgatctgcaagaggcgatgtactcatatattgtagaggcagactaaatataattataatgctggattatatttgcattagcaatgttcctatgagactaaagctatgtctggatcaaagttggagaacttaagttcgaataaaattcattttgcaag

SEQ ID NO: 108763 - DNA, 394 bp, Glycine max
  unsure (1)..(394): unsure at all n locations
ntgcagaattcctactagtgaacagttactcttgttacgtgtatgcgttatgggtcgttgattgtgattagtgcaactttgaccactccttttctgacataacggacaaagctctacaggattcccaatgggtgaacaataactatgtttacatgaattgcgtatgggctgttgattgtcgtcngtgttatcgcaaccacttcttttctggcacagaggacaaagctgtataagattcctgacgggtgaaaactaaatgcctatatatgaatactcaatataaatataattcgcttaaatatttatcanaaatacatatatttaagcgatatctaagttggtgattttgtctatgggatctttctcggtgaacgtctttctccaatagtgatat

SEQ ID NO: 108764 - DNA, 227 bp, Glycine max
aataaaccgtaggacactggtaccttcaattcttcaaatgaaactttttgcgacgtaccaaggctgacgcataaaataaacgatgaccatgaaccaggacatcttcaactttaaatatcttgtgaaaataatggaagaaattatttcaagaaacaactacatatgaacagataactggttcttgcatagcataacccataaagttggcagtagtaaactactagctc

SEQ ID NO: 108765 - DNA, 436 bp, Glycine max
  unsure (1)..(436): unsure at all n locations
ctggttcgaggtacttacccgttgatgatcgaagaacgatgtttatcgaatgaagaacgtcgaagaacgggtganacctttgcgaaattcttcacggaaaacgttacagaaaccgttcggaagcgcctcggcttagattttcttcactgaaacaaattttccaagcaaattcgaaagagagagaagtgcctaaggggctgaacccttttcttcttcacttccttccctatntatagcaaaataggggaggtgcttgccggccaactcgcccaggcgagccatggtgcttcctccagaagcaacagccttctggaggaatcttctggagggcccaagtgggcctgtgtgctatttgcacccccatttttactaagtacaccgccctctgttnttcttgtgatnctttttcgaaagtacggaaactatgatttcgtac

SEQ ID NO: 108766 - DNA, 324 bp, Glycine max
ttgtgggaagcataactgaaattcacatcatgtcccatcttcggagacatataaagtggctggatcaatgcacatatatcaatcatgtcagtcatggcatcaccagcaattccttcgtctttattataaaactcctttataaattgatgatttcctttatattctgattaattttaaatatattattatgtattttcactatatatctttacttaattattctttttcgaaacattatataagatacaattaagtggacagagagataagaataaaatgtaatgttgcatgatagtataaataattgacagattgaatataatt

SEQ ID NO: 108767 - DNA, 396 bp, Glycine max
  unsure (1)..(396): unsure at all n locations
gcttatgtcattcacgcgtgaaagganatgaacattggagtatttctgtataacccacatcacctcagctagggcagacgaaaggcaacgtgaaatgcgagtctattgataaaatgtctttctttttattcattacaaaattgttggttgctatggtaataagatattgtctttcggacaaaatattagagggaggatattaacactgttcattccgattcgtgggctatatccatttgaaatttttattaaaggaaaataatacgtatttaatgttttgattcatgaaataaagaatgaaagaatttgcaaatctaagtataaggtgtatncatttgcattatgacgtctgtgtgtatttcttaagagtatatttaaaatgaaattattgtttta

SEQ ID NO: 108768 - DNA, 270 bp, Glycine max
aaaacgaattaacctgtctcatatcaatgtaatcatttacaaaaggttcaaatcgaattttacttaaaattattaagacactatgccactctacatctatgactagatctctaggcttaatcataagacatatatctacttatctatactagggtgggtatattgatttgccccggcccaatttaaagctcaacccctgaagcctacatattatattggttctgtgagcctgcgtcacaaaataaatggacttttttttttttatgtttc

SEQ ID NO: 108769 - DNA, 279 bp, Glycine max
ccccacattatcttcatgacacaaatgcaaataagatgaattggaaacgttatgctaaactggtcatgtatgcacacatgcggacactcaaaaggcaaacttttatcgtcatgtgatgctacggctcacgattactttctctattttaatcaacccgatggttccaaaatatgttcttctatcaatctgtgcagtcttcctaaacaataaactctacacggttctgaaattagacatcatgcattgtatgattataaacacttcgcgcagtcctaataa

SEQ ID NO: 108770 - DNA, 224 bp, Glycine max
ttctacatcaaatagatgactttgcaacggctttcccatcgcctaagcaattttgcttgagtgccagatattctattataacctgttcaaatggttttattggctcacaaaaaacttccgtcgaataacttcttttgtttacctcgccgccataagttcctgcaaaataaaaaaaactttttttccccatagtaaatttaaacttttggttcatttttccctca

SEQ ID NO: 108771 - DNA, 334 bp, Glycine max
  unsure (1)..(334): unsure at all n locations
acatctctacgattcttctgtagcttncacatatggtgtagaagaaagacatcttacaacgatgtcttcctncaccaatactatgattaactgcctttccaccacaaacttcaacctttggtggagcgttgaaggaactaccccgaccgagtgaatccaggtctgcctaaaatgcatctatangccagaatgatatccatcactcggaaagtgaattgacagatgtgcgatctaatctgaattaggagatcaatctccccctttacgtcccgatggctaccatcaaaatcccacaccaccatggagctcggcttcatgtgtgatgcattgaaag

SEQ ID NO: 108772 - DNA, 322 bp, Glycine max
  unsure (1)..(322): unsure at all n locations
ctgtcttgtccggattaaagtcggttgcagcaccggctctgcttccctaaccgtactggagggcggtgtcgtggctttgtcctctatggttntctggagttttaacatgacctccgagatggaagccatttgatcttttaaggctgatagatcggccttcatctgttcctgcacgcnctcttcattatccatttttctggatcgagtgttataggggtgccttggtgttttcttagttatgatgaatttcctaaagaaataaacaaaggtgagtatgccacccacacatgaatattcaaatgaatgatctgtgcacttggat

SEQ ID NO: 108773 - DNA, 362 bp, Glycine max
aatctaccacacctgaataattatgacctctccagcaacatgtacatatctggatggacgaatcatcccaaccttatatggtctaatagcagcaacaacaacaacaaccttatttcaaaatgctgctggcccaagcataccatacattcctccaccaatccaatcagcagcaacaacaatatccccataaacaactaatttttgaggccccttcgcaaccttcccttgaagaacttgtgaggcaaatgactatgcaaaacatgcagtttcaacaagagaccagatcctcgtgtcagagctataataatcatatatgacaattggcttcatagttaaatcaacaacagtccctaaattctgat

SEQ ID NO: 108774 - DNA, 309 bp, Glycine max
  unsure (1)..(309): unsure at all n locations
tacactgtattagaagaaagngaanagtacttgtgattctgtgtactaactgataagatgaagccaagcacatgacaacctatttacatttacgtctgcaggggctagcttgctctacacagtatatgggacctccctgcatatatgcatgttctgcattttcaaatttatgtttgccactttgtgcaattgaattgagttcaaacaaattacccatgtgagctcttggtctcttatgcttaatatttaggaccactttcatgtgccaacttgcagcgatggctcactctttttctatcttgagaatct

SEQ ID NO: 108775 - DNA, 184 bp, Glycine max
gctcaaagactctggatgaagcaacaacttgaagacttcggagtatatcttgatcacattactctgtaatgtgataacacaagtgctgttaatctaaccaaaaaccctctcatgcattctaggactaagcatatatatataaagcatcatgttttaatagatcatgtgtctaaaggtgactact

SEQ ID NO: 108776 - DNA, 503 bp, Glycine max
tgcctcaatcatttccaaatatgcatgtgaattatgacgcatcatcaagaatcaagccaaggctattgtgcaagcaatcaatggggcaaaacacaccaaatgattatgatgatggatggctcaaattctcacaaaggtaaactcatcactttcaaattgagctttcaaaactatcatgacatgtagagaagaatcaaggatttcaagtcacaaaatgtcaagaactgttattttcaaaacaattacccatttcttgaacatctctataattaaagaaaaacatgcaaagtcgtatgtgcacacaaaattgacccaaaatattatactaaaaatccgacgaaactaacaacattaacaaattaacacaactaacaaattaacaaaaccaactaaactagccaaaccaaagaacactcccgccccatacttaaacaacacattgttctcagtgtagcacaattaaagattaaaacaattaatcatataagaatcgacagtgtata

SEQ ID NO: 108777 - DNA, 359 bp, Glycine max
  unsure (1)..(359): unsure at all n locations
tctacttatgtggcagggcgggctaccttcaccttcttgtctattacgcgaactttgaccattgttcttccttctcacaatgcttcctttcatgtctgcctgagtgggcttataacctataccatacttcnacgatttcttgagtattattaagctacttatgccgccgctgtttttctctaacgaatcccgggttcaaaaccgtctcccaacataactctggccatcattaccgctgcatcggacagacaaggttgctcatagagggagtccacataagaaatgctgaccacctcaaaacactggaaagcagttcttactatatctttgcggcttccacataagcatggaggatgggc

SEQ ID NO: 108778 - DNA, 355 bp, Glycine max
  unsure (1)..(355): unsure at all n locations
gtctcacaattgttacgtgctcatgcaacatttgntagccgtgtctatacgagacatcttgccaaacaaagtcaggttagtcataactcgcatgtgctatttcttccatgctatatgtagcaaagtcattgatcctgtcaagtttgatgagctgganaatgaggccgcaattatactgtgctagttggaaatgtattttccccctgctttctttgacatcatgattcacttgattgtgcatctggtcagagaaatcaaatgttgtggtcctgtttatctatggtggatgtacctggttgagcgatacatgaagatcttaaaagggtatacaaaaaatctatatcgttcagaagca

SEQ ID NO: 108779 - DNA, 489 bp, Glycine max
  unsure (1)..(489): unsure at all n locations
tatcctntactntgtttagagcgtaccgctatntgaaaatttgttgatggatgaagtaatcggaatgacaaatgattacggttgcggaaaccagataaagtcgggaaccttttgaatcaaagtagcgccgagtacttctactacagggggagggaagcttcgtaggaagtccttngnttctgctcttctttttcttttaacttaatatgttgtttggttactttgttgtaatgctgtgtttagttgcgtggctgggttgtctatgtgtgcgtaagcttcataaaaggccgtcgactctttctagaagatataaataattaagtgtctgtagatgcaaagtagtgtgttttatgtatggtgttctcttgtnttcgtctccattcttgtcgacgatagaaatttatattcacctccctctttgttggcggcagatatattcatatattctcattcttgccactagaatgataccactttaaataatatatt

SEQ ID NO: 108780 - DNA, 356 bp, Glycine max
tcctctaatgactatggcatcatgtctggcactaaactgctgggagttggaggccatcttctcaattaaatttctggcttcagcaagaatcatgtctccaaaggctccaccactgtcagtatgtatcatacttctctacatattactgagtccttcataaaaatatctggagaagaagcttgtctgaaatctgatggtggcggcaactggcacatattttcttatatctctcccagtactcatacatgctctctccactgagttgtctaatacctgagatatccttcctgatggctgtggacctcgaagagggcatactattttattctacaaaattagatcttatcttatcttta

SEQ ID NO: 108781 - DNA, 434 bp, Glycine max
  unsure (1)..(434): unsure at all n locations
gcttggatccactatttctctcttttctttagtgntcttcattcttctttctcntttaacttttgttcttcaatcctcttgcacaaaataccatggcttttccactggtgatgatcatggaatgcgaagcacttcatcaatccaacaatccactccaagcaacgctgaaattgagttatgggttactatttctaatctttgtgaatgtgcatctttctcttcaatcccgttctctattttcatgattatgattatgcttatgattgaaaatggattangttttggattcatttcctaatttcaacatttaataacagattgtttgattactttcaacttaatttagatctcanacatttatggattgattcatttaactttctttatgcattgactgaacttcacattaacatcaattgagaactatatattca

SEQ ID NO: 108782 - DNA, 489 bp, Glycine max
  unsure (1)..(489): unsure at all n locations
ccacatcaacacanattctangtgtttctatccttctcaattaaaggaatttcaagggttgaaaagtgaaatctaaaaatgaggtaaattgaagcatactctcacctcacaccagtccataacatccatttatacttgttcaaactggattcacacctaaaatctcaccgaatcaaaatttgactcttcaacacccaaatttgccctataaaaggctctttgttcactttggtcatttatttntttctctctagcacagtccaagctttctcataagtcctaaatgacatttcaagctagtattaactcactttaacctccatttaccacagaattcatacttagccttcccactctcaaagcctcactctttttcactcataacaccacattctcactttaaccctaagttagtctacccttcgtcctaacagaattcatcagcaattcagcatataacatcacataatcatcacgaaaccctaaaca

SEQ ID NO: 108783 - DNA, 351 bp, Glycine max
  unsure (1)..(351): unsure at all n locations
tataatatatcgtgatgctcttatgatgtagatgaagcccatctcanatacaaacggccataacttttcctccggatcttcgaataaggaaagtaacctatcgggacgctcaaatattaacatggaagactcgggtgaattccgacgggctaaagttttgactcggatgtccgattgaggcccataatatatcatcgccctcgaaagtagaaatggactgaccacgcaaattcggacagccataatggttgactcagattcccgattgaagctcataatatatcgagatgctcttacgatataaatgaagcccatcgcaaatacaaacaggcataacgttttcttcggatc

SEQ ID NO: 108784 - DNA, 308 bp, Glycine max
catcgttggtctaactatcatacctaatttcgtccgggaccaatttgttggtatgatgcaaccttcgtttgatcgctttgaggtacttaacacccatcgttaggcaattcgtgaagttccgtgacatgccggaagtcgaaagccagcattgttgcgcaatccgtaaagtttcgtaacattccaaaagtcaaagaggggatgggtgcattatccatgaagtttcgcgacattacgaacagaaaacaagtattcgtacgtaatccgtaaaggtccgtaatgttaccgaaaaagaatcatcaaaaaaagca

SEQ ID NO: 108785 - DNA, 326 bp, Glycine max
  unsure (1)..(326): unsure at all n locations
attcaatgcgtgaatcttgtaagaatatccgtgaccaaatatcacttcttgtttatagtacatacatgaagacgatgaactattaattttaataacgcctaagttcaccaattttctatatgacctagtctncaccaattttcgcacttctacttcgtgtttgtcatgtgtgaagagacatacctatatgcacatgaactgatagactctacaaattcttttctttctttatctctgnttatcaanaccatatattnttccacgtaagagacatggagtatatagcactactatcaaatatagatttaacatagttagggtaacat

SEQ ID NO: 108786 - DNA, 297 bp, Glycine max
cgagcactcagttttttttccttattatagctgccttacataatctttgttctacaatctcgttgactggtctggttcttctttcccgagttactaaatatcatggtcgtggcgtaaatgaacaggttgctaaaaatatgcataggattattcttctataattaataagactgttcgcattgacatgactttattaattattttagacataaatcaacaaatatttgagctttatgttcttatcacatagttatcaccttaatacaatttgtgcccagattacactttgtttatctg

SEQ ID NO: 108787 - DNA, 367 bp, Glycine max
atgtgatcactgctatctctatggtatcactagagaagaagggaaagtcattccctcctcatggacatgaaagagatgtagctctctcgacaagtcaggaaaagctcatatctctcgttactgaatgataaagacaaaataatgcacaacaatcatggagtgaacccactgccagaagaatgccaatgccccatgacgagccagctaaatggagatcatcttgccaaccatcaagggccctagaggatgatgcactctcttttgccttaaacacagaactcaaacacaagaacagatgttcagcagtgaaagatattcatctgggctacaacgagtgatatgcaattaaaacgggtatcatcatcta

SEQ ID NO: 108788 - DNA, 78 bp, Glycine max
actagagcacgggggcaaaaacaagttttctttttggaaaagaagagtactaattagatcaaaaaacacgtgtcttaa

SEQ ID NO: 108789 - DNA, 354 bp, Glycine max
  unsure (1)..(354): unsure at all n locations
tatgtgcttcgagggagacatatgaatgatattgtttataaaaattgtccatgcaaacaaatnttgggaatttgttntctttctgtcgntttcttttttctctggtcggtccaataagaatgtaccgttttcttattttattctagctctatgttcttttataagaataattataagacatttggcataactgattctatatttttaccaacgtaaaaataataattgaantttaaaatgaacatcacataacaaatatttaactgaaaataatatcatggcgaccccaagataacgaaacctggaatccataattcttataacaatttactattattggtattatgtaatttt

SEQ ID NO: 108790 - DNA, 385 bp, Glycine max
  unsure (1)..(385): unsure at all n locations
ctgagtataattcatgttntgtgttatgatctctacgtcaatatttcttgatacaaatgtttcttacataatcaaacaatagttaacatctccacctgggtgtacactgnggtcatgtnttcgtttatagaattcattcagaatatttgttgttgattatcgtctcctaatcaattgagtgtgcattttgttattggctgctcattcttccatcatgtcttgtcaaactacttaataatctgtcatgttgttacttgtattatgaatagagagagactncgctcttgttaatcacgttaaggtgtttcgagaggaagatacttgagtaggcatgatccttgttacatatagatgaaagtcaacttagtaagtcatgtacctgtgt

SEQ ID NO: 108791 - DNA, 407 bp, Glycine max
  unsure (1)..(407): unsure at all n locations
actcagcttcaatgaattacaacgctctatctatggtanaatggtttattcgattacaatatatcggtcatcgattaccagtgtgtttgaacgttgaaacttcaaattaaatgtgaagagtcacatcctctcacaaaaatgccttgtgtaatcgattacaatgatctggtaattgattaccagtgatatgtttcgaatagataataaaagatgtaacttctccaatggttttcatgtttgtctaaacgatataactcttctcattcgcttcttgactagacttgaagagtctataaatgcagaccctgacttgcttcctataacctttgacaatcatacaatcgttacaccttgaattcttagaacttctctgtgatgcttctcttctccttgtagaagtgttaagt

SEQ ID NO: 108792 - DNA, 394 bp, Glycine max
  unsure (1)..(394): unsure at all n locations
gcagcagctgctacaaacttgtctggtgcctgcagcaattagatagccacanaacaatattctatggcaaacaaaagccaccagactgcaattcataaaatcagagtcttacactagaaaagcagcccttatcctttaagtagacattatattgaagccataccaattggtttaacatattcatatatgctacaattgtataaataagtacatccaacacttcattatatcttgtttcttctctcctattgtggcactatattaggcatgatatctaactataaggaacacaacacaagctctttttatcctctatgtaatttctctactaataagtaattcctcaatcaattaactcaactgctggcatattggaacaaagttcactgatgta

SEQ ID NO: 108793 - DNA, 430 bp, Glycine max
  unsure (1)..(430): unsure at all n locations
gatactctcagtcatctgangcatgcaagctctagcactagcttcatacttcacttgttgttatccacgttcatacttaacagcatatctagacaccaccaacggatcctcctctggagtgttctgtccacgcccccacctatgggcactgaacacattcacattgggactgcaaaatgtcataccatccatgtccacattatacattgctttatcctcggttgacacaacctgccacatcttttgccacaaacttgcattgaagcttgcagctgatagtttcactgacggcaccagcttcttgcaaataatgtccctggccataagtttgtgataccatgaagcgcttaagaattatataccacaacctcgagcctaatgtattgttctttattgtcgttatatgctaaaagttctcgctcgcgattga

SEQ ID NO: 108794 - DNA, 460 bp, Glycine max
  unsure (1)..(460): unsure at all n locations
tatatntanaagtgtgaaaagaataataatactntaatntatctaaatatgtcatatgttgattcttattttattaaagcatagtatttttaaattccgcatttatcagaaggtatgtaattttattagtctnttattaggaaattaagaatacgtgtttctattaatataaagactataaaaaacatgcaattttcataagtactagaatgaattttaaaacactttgaaagaataaaatattttcgtctttttaatataatagggtaaatttatataggtttaaaccttataatcttaccattttttttttctacagaataatgctatcggtcttaatcaattcttatccgcaccaacgcatatatagatacatagcgtgatttcaaactaaaaacacgttacatacgtgtatatcactagccttttttaaaaaagaaaaaaaattattaattatact

SEQ ID NO: 108795 - DNA, 412 bp, Glycine max
  unsure (1)..(412): unsure at all n locations
tcacaacgttcaattactgctggtaatcttttaccatccatgtgtaatcgattacacagnngtaaaattaaattcaaacttctaatggctgttataaatcactttggccactggtaatcgattacatcctctggtaatcgattaccagagagtaaatcttatgaaaaaaccatttaagcttatatccattggccaaacctcttgttgtttcaacttggaatntccttcctaaatcactagagatcttcttgatgatgtatctcgtatttcttggatctttgtcttgaattacacttgagaagtgcatgaccacatggcatcatcaaaacatccaagtcaaagtctttgctcttgnttctacaaatgcaaactcaattaataccagttcagccacttcccgtgcctacattca

SEQ ID NO: 108796 - DNA, 429 bp, Glycine max
  unsure (1)..(429): unsure at all n locations
caacctcagcacattgttagagacacctgtattcctagaggaagaggagtcattacccacctactctatgtactgcttgttgcccacaaactacatagagattgaagctgctctttgcataccatggagggggttattattgaacgctgatggccatcctgtgaggattctcaagaaagatgtgactacattagcccacgtgtggagtgttctcttatactccaacctgtcccccacatctcacacctatgacctgatagtggatagagctaggctgatcttctgcttaatctctcacatggagatgaacatatgagcgctcattgctggccagatgacttctatagcccattctaactctgtcacatgngtttactactctgatcaccgccctatgtcgaccatatgtgttgtctttgacaacctcac

SEQ ID NO: 108797 - DNA, 81 bp, Glycine max
ccatagatactcagcttgagccgaatctgactaccatattcttacccattgataatgccatcctaccctcgaagcaaaaaa

SEQ ID NO: 108798 - DNA, 216 bp, Glycine max
gataaattcttttttctgcatccttgtgatatttacacaatgagtcgtgtgtttatagtggcaagggctgagcgatttttttcgccaccgaaaccggtttgataacaaggtatttgatactaattccgtcatttaaattaaaaactgcagctaggttaatgccctttgatttatatgacataacttttaacgaatctcttttggtactagatccta

SEQ ID NO: 108799 - DNA, 314 bp, Glycine max
  unsure (1)..(314): unsure at all n locations
atgcagtgtgtnataaaagaaatacagaatacagntaatcactagttacagtaaggcatcaaccaaccagaataatgcaaatncagtctcccttaatgcagaaactattcagtgtctgctggccaatactaatattaaatataataatttatcaaatatttaaggactacataaataatcatattttcatgactttaagcatgcctatcaatctcagataatggtgtagtggcgggcccaaacaatgctatttttcatgtattgactccaaaggccaagctagcatatacaaggggtgggtatgactccatact

SEQ ID NO: 108800 - DNA, 278 bp, Glycine max
aaacactgggaattatatttgagatctgttggttataaatttattaatttactaataatcctactcggatttattgtatacctttacaatggacaatgatgaagtcaatcaatctaatcctaattattaaactattgatttgacaaattttaatattttattttaaaatactttttacttgaagcacaattttataataatacactagtataatagtattggtcaaaacgattatcaattatttatatgattaaatgcaacactatatattttcactg

SEQ ID NO: 108801 - DNA, 319 bp, Glycine max
  unsure (1)..(319): unsure at all n locations
cagtgctcaagtacctcagtaggtacaagatgcatcatctgaggccaccatccctgagccattcattnttgaagccggtgagacatatgtaaggcangagggtgctactacagagagatcaccacagatttcaccagatccaccctctccagtggtggatcaatcttctcttcaacagccagcagacccttctacactagtgcatgagattccagcagacccgtctacactattacttgatcttccagaggacccttctacaccagtcctgggattgactaccactccttcgggcactcctatgctatgtcttacaaat

SEQ ID NO: 108802 - DNA, 290 bp, Glycine max
  unsure (1)..(290): unsure at all n locations
caaattaaattatttataataatcgaacggttattcataataaaccctcttgttatttggtngttggtagacttcgatgtcacattaacaagcatcatgtgaatcacaacatcgatgtctttgacaaatgttaaggtgttctgtcatctttttcattaccaatctccccttttttctaccaaacccctcattcccaactctccattattattttactctgagtctctatcctttgaaaattgtgatgatgatgtttcacaattcaattgcatgctgcgtatgcatcatac

SEQ ID NO: 108803 - DNA, 320 bp, Glycine max
atatatcagatagacagattgagaaatattctaagaatcaatctaatattctaatagatagatagatctaatttgaaataaattgctgcctttaagtcaacccattggattcagccaagattcattattcttgaattaataaaacataaatactgatgggccaatataactgctattattgacatgaactatattctaaagggcaaaaggtaaaaatagaaaatatgccatacacttaacaaaatttgaatagctactactaaactatcaaggaccggctaagtgtgacaaaatatgctgattttaacttgcaaaagttt

SEQ ID NO: 108804 - DNA, 458 bp, Glycine max
  unsure (1)..(458): unsure at all n locations
cttctntgagaaaacttccttgagaagctagagcttagctacactctaccgctctaataattattctcacctccttgagaagcttccttgagaagattcctaaagaagctagagcttatctacacacacctctctaatagctaagctcacctccttgagatgagaagctagagcttagctacataacccctataatagctaagctcacccccattccagatatacatgagaatacagaaaagagttcctactacaaagactactcanaatgccctanaatacaaagctaaaaccctatactactagaatggcaaaaatacaatgcccacaagaaagattaacctattctaatattnacaaagaagagtggatccaccttgagccatggctcnaaaatctaccctagtgatgtaagctcattggagcttgaggcctaggatcttcttatgaatggatct

SEQ ID NO: 108805 - DNA, 289 bp, Glycine max
gatgggttctgcccgcacgaagcctcaattgtgagtctcgtgttctacacactcacttggacatccgtcgattgtgtaaacagcaatgtatactacttcaacccaaatgcgttagtattcccttgtacctgagcatagatctaaccacttacataactgtgcgatattttctgtcagacactccatcatgttgaggagaatatgcgactgttagtgatcaatcaatgccttcatcctcacagaatgtttcaaacttgcgagaggtgactcttttacgagatcacattct

SEQ ID NO: 108806 - DNA, 318 bp, Glycine max
gagctcgaaaaatgacagtggtcaaggagaattctatgacgacagtctctatggtcaagaaagagtgtgataagctgagagatgtcaacatgactacgatcgaagcgttagagcaggaaagaataatggtcgagagggacgagtcaaggatggaaaacatggtgttagaggataagttgaatgcttgtcatagggcgaagagaagtttgacgaaacagctgagcataacggacgagaatatgttgacaattattgatcaatataacaagaaggtgaacctatctgctagtcatgggcacaggctggaggatgaacatg

SEQ ID NO: 108807 - DNA, 391 bp, Glycine max
  unsure (1)..(391): unsure at all n locations
tgagaagtacgtgtttgtgggttacgactttatatccaaggggtacaagctctataatccanatagtagaaagatcgtcataagtcgcgacgtggagttcgacgaagaagattgttgggattggagtgttcaagaagataagtatgattttcttccttattttgaagaagatgatgaaattgaacaaccaatcatagaggaacatattacaccacctgcctcaccgacaccaaggctggatgaaacaagttcaagtgagaggacaccgcgactaaggagcattgaagagatntatgaggtaaccacaaacctaaacgacattaacttcttttgtctttntggtgatggtgagtctctaagctatcaagaagcagcgganaacataaagtgg

SEQ ID NO: 108808 - DNA, 144 bp, Glycine max
caccggtatgtcaagggaaagtatagaaccccccttataacaattggcaggtgaacgtaacctatcgaaccattaatcactataagagtggaaaaacataagtagaaactattactgggtacggtactaagatacaaaaagtcc

SEQ ID NO: 108809 - DNA, 119 bp, Glycine max
cgttgaccccctcacagcggcagatcattactgtctcgataccttgtacattggactaagttagcagctttgacatcctgctcttgataccggagtaggaactatactggatgatcaag

SEQ ID NO: 108810 - DNA, 433 bp, Glycine max
  unsure (1)..(433): unsure at all n locations
tctaacgttatacagaaatgaagctctgataccacttgttatacaagtggccttagatatctntaagaagagggggttgaattaagatatcaaagactattccccaatcaaaacttttaactctcttcttgaattaataatgtacccttaatataaattacttaaaagataattcaaagtagacttctttaaagcaaaagatgaatgacaataaataaaagaagtttaagggaagagagaatgcacactcaagttttatactggttcggccacgccctgtgcctatgtccagtccccaaccaacccgcttgagatgtccactatcttgtaaaatgtcttttacaaagtctgaaccacacagagataaccctttccttgcgttcagaattccttacaactcaagagacactcggtgccttaatcaatctctttg

SEQ ID NO: 108811 - DNA, 229 bp, Glycine max
gaaaaaaaaaaaaaaaaatgactgactgaaaccgaccgaaacaaaggaaaagagcagggggctttggaattcaaacaagggaagaaggaaggaaccaggaaaagccagcgggggggaaaaaggaagaaaaagagaaaagcgcgagggagcaaagagcgaggggaagaccaagagaaagggaagaaacaggagtcggggaaacggaagggaagcaaaaagcaaagagggg

SEQ ID NO: 108812 - DNA, 381 bp, Glycine max
  unsure (1)..(381): unsure at all n locations
gctcgagggaagagagagaccaatcactattacatttgctgtttcttatagangagnnagctgctcgctcaaggtccaaaagaaacttgtctcagcgtttatgcgagacagagaccnacatgctagctatcattagcaagtaccaagaagaactaaatctagccacggcccacgagcacaaagtggtggacgagtatgcacaagtgtacgcggacaaagaggctagaggaacggtgatcgactcgttacatcaagaggcaataatgtggatggaccaatttgctcttaccttgaacgggagtcaagaacttccccattactagccaacgccagagcaatggcggacacctactcctctcccgaggagattcacggacttct

SEQ ID NO: 108813 - DNA, 215 bp, Glycine max
attttcctttctacctgacgacgaaatgtagtctttatctcgctctttaagccattcgggatataactgacctaccttttttaaattacataaaaatacaatgacaggatcctgtggtaccataatacacctatttttatcatctgtgcttcttttggccatattttatcgttattgctgtacatggaatttaggaagggtcttttgcttcatgt

SEQ ID NO: 108814 - DNA, 282 bp, Glycine max
catgggaattgaacgacattacggagagaatttgaactttgaattgtgtctcacaagattcctattcatcagagttatgacaagtgttatacatgtttctatttatagcctatcacatgggaagcttccttgagaagcaaggaatgtagctttcttggaaagctagagaaagagctttcttgagaagctagagggggggctactcgcacctctccaatagctaagctcacctccatgccaaaatacatgaaaatacaataggaatcttctttaataagcaag

SEQ ID NO: 108815 - DNA, 324 bp, Glycine max
  unsure (1)..(324): unsure at all n locations
tgaaaaaaacgcacggcatagaattgttgaattgcaccggaaggaactaatattataatactctggacatgaaaatattttaaccccttcaaaaattttcttcattcaaaaccaatttaaatatttattccccctcacttgtgaaatttcattcctaaaattctctttgaatgctagaaccaaccctcaccttcaaccacacaagacattctgaacatggctctggcgtgaaccacngagtggagaaattccaaaaatcatcttcctctatgtggctaaaacctaaacctatataataattggcataacccatttggaatgatt

SEQ ID NO: 108816 - DNA, 418 bp, Glycine max
  unsure (1)..(418): unsure at all n locations
gctcgttccttctccaccaaattcggtccattgacagaacaatatgttgctctctcatatgtagcattgcttctgatattaattcccatccaatcatcaatgtcttgcttgaagaaaagggactgatcattaacctntagcaacttccagatcttttaattaattttaataagttcttgagttaaatcgacaatatcctttaatttgaaagacttgaaaatatcaatttactcatttttattatcagtaaaataatatcttattaattaatggtctctaaaacacatcttaagtttatagtttttcatatccgtacattctcaaaatactatagttctttcttaacttcactctaatgcttatctaatcttctgcgctctagcctctctatggaagcaatangtataatacatgttac

SEQ ID NO: 108817 - DNA, 262 bp, Glycine max
  unsure (1)..(262): unsure at all n locations
cataacacacctatccacactcttcttacgctaatacccgcttatacaattctctttggttcnatattgttcacacgttggatcgactcaaaaatttactggagggccctattgcatattttactttttacagacgggtctgctagaaatgtcctgaaccaattgaacaaccctttcacaaccaacatcatatgttttctgccaacacaaatgttgctgccattcaacgcaaattcggtaaattgggatttcaaatactttg

SEQ ID NO: 108818 - DNA, 290 bp, Glycine max
  unsure (1)..(290): unsure at all n locations
attaacctgttcacatattatagtgtaaagttgtaataactgcttcgttggcatctgagtaattgtctaataactccttgtaactntcttcaacgtcaccaaaagtgacctgtatgagtcccattgattgcgactttctaattaaggataaaaaatgaaaaagaatttcccacattccaaatctggccccttgaataaatcagccagtattccattgcttggtccaacattcttaaccatgaactttctaagattgtgtttcggaactcaatatgatcagtaaatgcatg

SEQ ID NO: 108819 - DNA, 505 bp, Glycine max
  unsure (1)..(505): unsure at all n locations
tagtgcctcttatactaagctccatgctgagatattgttgcnagaaagtcacatttttattatcattcacatgtgcctagtctntaacattattaagcagtggatgaaagagttctagaaaaactttctttntcgatacaactataaaaactaatttgacctaataaaagtggcttatagtgattatcttatatttaattataggttaacttagtaagttttattaaaaaaagttacaaacaattttgttaatttatctcagtaaatattattcataatagtctctcatatgaaagctcttatttaataaatatttaattaaatagtatatctaaatacactactcttaatcgaatgatggaatatgaccactcttaattgactgatgaaaatattattgaaggtacctgataccatggcctggtccgcagatatgtctgtggtagacatccttggatcactacaattgtatacatcatcacctgcaccggtgaaacaaaaatga

SEQ ID NO: 108820 - DNA, 340 bp, Glycine max
tttcctgttcttatgctctatagaatattgatttatatagcataagatgaccattagtgtattctctgattcagtgttgatgagctgctggaattaagttatcgggggaacaatatagcggtagatatgcttgttggagatatttatggtggaatggactattctaaggtatgactggtgaaaggttatgttcctcttcctgtttaaaattataagacagtctttctctgtgttaccacttgatgggtcttcgaatattgaatagctgttggtaaagtgattggtcaaatggagaataagttatctaattattcttatgattatttgctggaatacatca

SEQ ID NO: 108821 - DNA, 395 bp, Glycine max
  unsure (1)..(395): unsure at all n locations
tccgcttcacatcagaccacttccagggtgctggaactacttcacatggatgtgatggngcctatgcaagttgaaagccttggagganagaggtatgcctatgttgttgtggatgatttctccagatttacctgcgtaaactttatcagagagaaatcagaaacctttgaagtattcaaagagttgagtctaagacttcaaagagagaaagactgtgtcatcaagagaatcaggagtgaccatggtcagagaattgaaaacagcaggttcactgaattctgcacatctgaaggcatcactcatgagttctctgcagccattacaccacaacagaatgggatagttgagaggaataacaggaccttgctagaggctgctcgggtcatgcttcatgc

SEQ ID NO: 108822 - DNA, 189 bp, Glycine max
acctctagaacctcacaatgactcacaaactcatctcaagctctcttgactgcttcctcttcgaacactggtctctgtcaatcttcacttcgcagaatttcttcaaccctcttgaacttggaactttctctctctataagtctctagacatgcagaagcttcaagaaaaggccaaactcccatataaaa

SEQ ID NO: 108823 - DNA, 380 bp, Glycine max
  unsure (1)..(380): unsure at all n locations
tatgcgcatattatcctacgaacgttcactagcacaagacatcttattaactaagaaanangcacccatatacaatcaaggtagcttcattacctagattatctacatgtacttccaaggtgtatttgttatttacatcacacacgcctccttggctaaatttacatacatgcatactcaaagcatttcggggtaccaaaaattgcacatgcgctcatcttggtatttctaatacctatacatatacaaacttcatgatgaatcttgactacctacgcaataatgtgctacatttcatgcttcatttttatttttattttttctgtgtttgctacctaaagccacatgcaaattcaagcatattttccttggctgactaa

SEQ ID NO: 108824 - DNA, 366 bp, Glycine max
cgcgataaaagcgagacttctctaatgagatgtttctctaatcgatccgccatcattccggtttcgtcatcatccggtaccgtgataattttcacagcaacagcttgattcttatacatgccatggtaaagcctgctgtgagcaccatgggcaaacctatacaccaacaaagagcttggagaggtcaacattccattcctcagctgtttccacagcagtaacctttccccctccatggtcaaagtactttgtccatcccaaatccttgcggtgctgcttcgacttgtcacttatattcatcgaatcatccgcctaactggactgctgtaaggcgattcagtagtaattggactgctgtgattggat

SEQ ID NO: 108825 - DNA, 375 bp, Glycine max
catgaaagtgggtgtttaaaagagcttctaccaggtttatcttatcatataagcacttaagtagaagattgaaggtattcagttaagattatgaaagttatttatgaccctcctataagcttactgaatcacacacttatgacataagctttcatctcatattcatgcgataggctttgctgaaataaacaattaaattgtttatccaaacttgccccatcaaatgcacaaaactgatcttgagatgcgcagtagagactcagagcaaacagaaagataagtaaccttctaatacaatgttgacagtctgacagcatgaacatttgacatgcttggcacctcgtggatatgagagcaggcgacgacaagaaccgc

SEQ ID NO: 108826 - DNA, 424 bp, Glycine max
  unsure (1)..(424): unsure at all n locations
ntgcggatntggtcttcgccagcgaattgatcaaagngtgttcgtaaagaggtaaatctaaccatcctactttgatgaatacganaactanggcaaatgaagagggtgagaatgagggagaaactcatgctgtgactgccattcctatacagccaagtttcccaccaacccaacaatgtcattactcagccaataacatcccttctccttacccaccatccagttatccacaaaggtcatccctagatcaaccacaaaacccacctaccacacaaccaatgctaaacaccacctttagcacaaaccagaacaccaaccagaaatgaattttgcagcgaaaaagcctatagaattcacccccaattcggtgtcctatgctgactngctcccatattcacttgataattcatggtagccataaccc

SEQ ID NO: 108827 - DNA, 291 bp, Glycine max
actcatacgacctagaactaactacaaaaaagaaaagctacgtgcatcccttcaagctctccttggcagaggagctttgcacacaaatcaccaaaccccacctccattgatcctaacttatactttggtaattaccaactcctcgtctaaacactgcctttacttcctggcccgggaaaccgcagcgatcaatcagaaccttgctctccggcaaaatctcccagacgactcctatcgctaaaactttgattctctacacgccaacacggtcttatcggtctcttaatttaa

SEQ ID NO: 108828 - DNA, 314 bp, Glycine max
  unsure (1)..(314): unsure at all n locations
caacaagaatcaagccaagctatggtgcgagcatcaatgtggcaaaacacaccaaatgattataatgatggatggctcatattctcacaaaggtaaaatcatcactttttaattgagctttcaaaactatcatgacatgtagagaagaatcaaggatntcaagtcacaaaatgtcaagaaactttattttcaaaacaattacccatttcttgaacatatcctattattcaaagaaaaacatgcatagtcgtacgtgcacacataattgacccataatatttaactaaaaatccgacgaaactaacaacatttac

SEQ ID NO: 108829 - DNA, 384 bp, Glycine max
  unsure (1)..(384): unsure at all n locations
acatcttcttcgaccttcggtgatcttgaatccatctcattgtagcacatgtccacttgtaactccaaagtatcaaacctttcaccaacaaaggttagaagaccatcgaacctatccaaaaaattttgaagaagagaggaatcttctccaccatgtccttcttcatcaacaagtcaagcaccctttttcacccaagagccatcatgctctttntgatagccaaaggatgcaatgacaacaacacctattagaaaggatctcttgattggaacatagagttcataatcaagagggacgttaaagtgttgagggaagagggtgactacatgtggatattgcaatggagcatttaatcncaatgccttatgcatgcgatatccgact

SEQ ID NO: 108830 - DNA, 256 bp, Glycine max
  unsure (1)..(256): unsure at all n locations
catagatattgaaacattcaagcccgggcaacatttaaaatatgttgatgcttacgctcaacacgtccattttgttgaggagtatacacgcaactagtgtgaagtataattcctttgaagagaataaatctttgagaaaaaaatatgtgccatcgtttgaacggcgcctnttatgttggaatcatattgattttctattataacacagaagtctggacatgggtttatactctgattcatatttcacacgacaacc

SEQ ID NO: 108831 - DNA, 411 bp, Glycine max
  unsure (1)..(411): unsure at all n locations
atctactgtgagacaatgagacacttatgatgaagacctatatatactaganactctgaagaaataggacatgaaccttatatgcattcattcaaattctttctataaaaatctatttgaaaattcttgtaaagattagaatatctctcaaaacactctgattatcttgaaagaatgaactaagtgctaagattgtatattcgtctacaaaacgctcaaagagttagtcattgtgcaaacataaacaacaaatctttatgattctaaagatccaacaatgactctgtaaaacaaacaatattatgctgattagagcttggggtagagcttgatttgttaaagtcagaagtgatcatgacaaaatacttataacttgctataaattattgaaactcggtgatttgctaagaa

SEQ ID NO: 108832 - DNA, 57 bp, Glycine max
acaaggggggggaatacgctatcattcacattatttgatctcttccgaatcagttga

SEQ ID NO: 108833 - DNA, 398 bp, Glycine max
ctgagctgcagcgctggatgtccatagcttacttctttttttttatagaacaatgcagttgagtagtgcatcttcatattatacatgctctaatatatcacgataatttaaatttcagaatagaattcaaaataaattgagctagaataggatatctcaatattgtttatttataagaggggaatattataactatcagtgacgatttattttacaagtaaaataagttatttgatgaatgacttatcctaattactctataataaggggaatatgtgttattatctaaatgtaatcaaattctaaacactatatgatttaaatctattatttcacgcacacccgatcatgccatagttgtatatcatatatttatttaagccatatttgcctaaaac

SEQ ID NO: 108834 - DNA, 367 bp, Glycine max
  unsure (1)..(367): unsure at all n locations
tggattanaatntgagtntaaggtccttctccaattacaatcttgaatatctttagactaacataccaatccagataaattgcgatcctatcactgagaccagtttcgcccactactcttccttgctcctaaagttcacgaatcgtatattctctaactgtcccactcagctttgtccctgtcaatccctatcgntagctgccaacagccttttctcaccaattgggcttctgtttggccataaccccaatacatatgcttaatcagcattccaatatcgacacctccaatgctcttcgcaacctatcaatttattcaaatggactcatatctataatctgtacctttgctcagtaccgaatcttaa

SEQ ID NO: 108835 - DNA, 225 bp, Glycine max
atctcacatactttcactgcattctaagcacccacgggtgtgaattataatgcgccctacaccctgcgtttttggaattttatgaatggaggagaatatatcatcatgtgaaaccacctctagagctttctctatttataatgtgacgtccctggtattccataccaccacaatattattatcttgtgtgatgatacctctataccacacccgtgtgagttatga

SEQ ID NO: 108836 - DNA, 215 bp, Glycine max
caatgctgatatggctcctgaccgactctactgagaattgctcaataagagggaacctttaaaatatctcaccgttgatggatctagtggcactagtagcttctcccatggtggatagagagatgatcaaccatgacggtggacactctgccagtgtgctactatgagaagctagtgcggtacatgccgtgcagctttgcagatctggtgtttgt

SEQ ID NO: 108837 - DNA, 409 bp, Glycine max
  unsure (1)..(409): unsure at all n locations
ctatccaaggcactctcttagtggtgaagctccttcttctatggcttatnccctagtggatggtgcctcctctcacctcttctcctatatcttccactgcatctccatggtggaaaatcaccattgaaggacctcattgaagctcanagatccagcctccatataagcttcacaagcaagcttccatcatgacacctccggcagatgttccaaacccatcaaagagcttgtcaagttgcaacttggacctaaaccagcgcactgcatgtggctcagtanggacctctctagtcatgagcatcgacgcatcaccaacatgctatgtagaaatgcatantctattgcttggcagccatttgacatgctgggaattcatcctgacataatctgccataaacatgcctttatc

SEQ ID NO: 108838 - DNA, 397 bp, Glycine max
  unsure (1)..(397): unsure at all n locations
ctgttttggtttgtgtttttgtttgagtttgtgtttgaggtttgtgttttggaagacaaactcgaagaanaaggtttgagtttaggtgtatatttctcttcatagagtttggccaacgaaactgttctgaggagtgatgtangtgattgcgcaatgacatccattctgatattaggttttaatcctcccacaaagcaatccaatagagcttcttgtgtaattccttgtactcgattagctaaagccgtgaactgcacgtaatatgactgaactgaaccaatttgagtgagtttaaacaactgagatctatgacattcacaccgtgatgggccaaattctgtctctaaagctcgcataanagcaatccatgttttgaatgaatnttcacgagtcatca

SEQ ID NO: 108839 - DNA, 423 bp, Glycine max
  unsure (1)..(423): unsure at all n locations
acattacatgtcttggcataataatcgagttntgacagctaattctcatgcttgactcattcaggcaaataaataaaatagtgaacagccaaaattgatcccaagtcctaacacaatatttccaacagactataactccaatgggacaataattgacacagatacatgcttcaaagatattctaatagtaatctttgtgcagcagtgaatggtgtatgcattatgcatagattgctattccccctctacacagtgcctaaatgaaactacaatcgtattcatttgtattgaataatactcagaaatactataactatttttctattgttcagtagcaagaagcatattctaacctgtgaaatgtcttgtgagccacaacagcatcaccacaaagacgcaacctgcatagtgtccaccggacac

SEQ ID NO: 108840 - DNA, 460 bp, Glycine max
  unsure (1)..(460): unsure at all n locations
tagcacacagaagctcatggagaaacatgaacacacgcttatcttgaatctcgcactaagcgcatgatcaccgccatattcactaagcgcagctatcacgcctggcgcgagggtcgcatcaatttgtacancctgtaaaagaatangaagcataggagaaacacacagcaagacttataattctttattgaataaccttatagcctgagcttctcaaataggggaaaccctctctaaagtcatctctttccttccttctccatctctattcttctntcatcccctaaaagtgtaaaacctctcatgataatgaaagactaatccccattattgggagcctagcaatcaaactcttgtaatgtanattttttctactatctatttaaatgtaattcaattttattgctcattttcctgtgttcctggtattgattgnggnctgatcatccatatgcatgca

SEQ ID NO: 108841 - DNA, 463 bp, Glycine max
gcttctgtatcaattacgagcgtctcgatattttactgggctctatccgacaaccgagttaagagatattgtcgtttgattattctaagagcctcccttttaattacgagaatctcgatatattacgggacacaatcggacacccgagttaaaagatattggcgattgaattatctcagagcttctattttcaattacgagcggttcgatttattactggactcaatcggacatccgagtaaaaagttattgtcggttgaatgttctcagagcttgtgtttcaattacgagcgtgctgatatattacgggactcaataggacatgcgtagtcaaagttattggcgtttgatttgctaaggcttctgtttcaatacgagcgctcgattatacgggctcacggcacccgataaaagtatcgcgttgatttctagacttcctttcattacaacggtcgattattcg

SEQ ID NO: 108842 - DNA, 207 bp, Glycine max
gactcagatgttttattgagtcccgtgatatatccagacgctcgagatggacgattgaatctctaagaataatcagacgaccgtaactgtatactcagatgtttgactgactcccgcgatatattctgatgcttgtgatggacaacagaagctctgagcatattcagacgaccataactgattactcagatgttcgatagagtcccg

SEQ ID NO: 108843 - DNA, 365 bp, Glycine max
  unsure (1)..(365): unsure at all n locations
gtctcatnagatctagaagaaattntatactatgattaacttnctttaacctccattaccactatatccagatttagcttttctaacacttaaagcatcacacttctccactcatatcactacattctcactttttaaccctaggataactctacccctatcatctctatcagattttccatcagtcaatctcagcacacaaacatcacaaagcatcatcataataccctaaaacataatgtgtaagcttgactcacaccacacatgacaangtgtaacatgcatttaaccacataccttctccaataactaccatcaagcatatacctagtcaaactacccatcatatcttccaaacacccaat

SEQ ID NO: 108844 - DNA, 169 bp, Glycine max
  unsure (1)..(169): unsure at all n locations
catgangaatactatgcacctacgtagcatggaaaatacctttcaatggtatgcatatatgtgtgaatataggtagcatggaaaatacctttcaatggtatgtatatatgtgaatatatgtggcgcggaaatacctcgcagagtgtgtgatatatggcataataatacc

SEQ ID NO: 108845 - DNA, 406 bp, Glycine max
ctaaaaagagagtgccctaatgtcagatgacgacttatgaagcactacaagacacagtgccctcacttgggatacctcactatataaatacactttcacatcgttattatgcatttacatcaatctaaaccggtgttaagtgccgggtgatgttatcgtacagcgttgaaatgagtacaaatcatacatggtctaataccatgtaaccacgactctaccaaaaggttgcggatgaagtgactcgtctgtgtgaaccactgtatgttatatacatggtctatactaacatgtatgaatttacattgtgtttaccgaacgtggattatacatactcgtttatgataccacgcacgtgtatgcctctatagtgctcttgtttaatcggatatgaaaaatgtattcaacg

SEQ ID NO: 108846 - DNA, 139 bp, Glycine max
tctgggaatgtatcgtacaatccacacatcgaccgagctaagtgaagctggggctataggactactcattatgcgggctactgccttcagcggaaactgcgtgcactgataatgaatcgcaccgacccttgggcgccgg

SEQ ID NO: 108847 - DNA, 224 bp, Glycine max
  unsure (1)..(224): unsure at all n locations
agcactgcgctgcgctgattatggcactaactgcgatatgtttctgtctgggaatgtatcgtccattccacactacaccgagcataggtaagctggggctatgaggactactcattatggtgcctatgcccttcatcggaactgcggcactgttatgatcgcaaccaccctgcgcgtcngcgtnacattttatgtaagctattcatttgcctttcctttttttt

SEQ ID NO: 108848 - DNA, 240 bp, Glycine max
gccattctagttcataattaattactactttgttctccggtttggttcttatacttgacattatattctcattgctggtgatacatatgatagtattacttggatttattttgacaccggtctgtctgatggtatatctcagatgctggaagatatggatgttgttatctgtcacctagccttgtgtgcaaggggagatggttatcaaaccttagtatattattcagagctactcaacaa

SEQ ID NO: 108849 - DNA, 284 bp, Glycine max
atgattggactaagttgaaattccaatgatttacgccaacatatatgctggtgtgaccataacactatcttcgggtatttgtatactgctcaactactctctattatgcatcaactggggctcctcagcagtttacttccttagatcaatacagctcattatgagtcatctgctttgtcaactatcttttgtgtgaaccggtcttctatcggattttctagcgtggtcatgtttatgatgacattatctgaacttgggaaataacgtgatgcttgtagtatcta

SEQ ID NO: 108850 - DNA, 175 bp, Glycine max
  unsure (1)..(175): unsure at all n locations
ctatcacctcacacaagtctattacatcaatctaaacttgctcanactgganttacacctaanatctcaccgaatcannaattgactcctcgacacccaattntgccctagaaatggctcttggttcactttggtcatttgtttttctctctagcacagtccaagctttctcata

SEQ ID NO: 108851 - DNA, 101 bp, Glycine max
gcaccgagctgcagcttacaagatagcgaataatgcacaactatttatgtggcatgtacgtgcacatatatttactcgaatataatgtctctactgatact

SEQ ID NO: 108852 - DNA, 487 bp, Glycine max
  unsure (1)..(487): unsure at all n locations
ctttcttcttcttctgctctcttaccacctcgctggctaccaaagcgctgtggagcagagatctacctgacaataatgtgctgttgattctatctatcacattatagttgaccttcttcaattggntagaactatatccanacnnctttgacatacaacctacaagagaaaatggtctaaagtcacccaattgattggacacttccactntagggatgggagatatgaaccacaagttacattccctacgaatatcccattcttatggaactatcacaatacttaagaaatctgcttcagatattccaaactctttataatttaaaattaagcatcctatcaacatcgcatacatgtaatcatttaatgaatataaatacttatatatcatcataattatgatttttaaagaatacctcctgctatatttatttatatttaaacactcttctattacttcaatgtggaggcttatctactacactcc

SEQ ID NO: 108853 - DNA, 360 bp, Glycine max
  unsure (1)..(360): unsure at all n locations
caagcaatcaatgtggggaaacacaccanatgattatgatgatggatggctcatattctcacaaaggtgaactcatcactttcgaattgagctgtcaaaactatcatgacatgtagaggagaatcaaagaattcaagtcacaaaatgtcaaaaacctttattttcaagacaattacccatntcttgaacatatcctataattcaaagagnaacatgccaagtcgtacatgcacacagaattgacccanaatattaaactagatatccgacgaaactaacaacattaacaaattatcacaactaacatattaacataaccgaccaaacaagcaataccaaagaacacttcctcctcatact

SEQ ID NO: 108854 - DNA, 352 bp, Glycine max
  unsure (1)..(352): unsure at all n locations
cataactagcgaaaaaccacggtcgcgagatacctaactaactatggtgctcaactactccctccgtcaacattaaccaccctacttcagngcactcctctatccgatatcctgcaaaacataaaaatccgtagccttactgcctagatccgcccatgatgcccacacatatcgctgtcattcccccccgtaaattgtcttgaaaatgaaatgttactaaagtgggcggagcccacaccttgatgcgactggtgcctctcctctccatcacaattgtaacagcacgcaagcttcgtgtcagatggtttcgtaacggtctttaaatacgccagtgtcatgacttgcgtgaatg

SEQ ID NO: 108855 - DNA, 134 bp, Glycine max
  unsure (1)..(134): unsure at all n locations
gaaactctgcccaanactcgttcacatattacagctntccttactcanataccccagtaacattctcttcgtccgattcgtaaccgctggatcgacttgaactttactgganggttctagtacataagtctaca

SEQ ID NO: 108856 - DNA, 118 bp, Glycine max
  unsure (1)..(118): unsure at all n locations
tatttactcaaatgatgactctactgatactaaatggctggccaagatattctacaatatggcttgttttgacatcaacacgttantggttgatgtatatcgactgctattattataa

SEQ ID NO: 108857 - DNA, 215 bp, Glycine max
tatattaatatagaggagcaggcggtactgcaactaatgtcaaccccaatgttggtggtatttttgttggcaaccaactgacataaactgtagttggtggtagggttatcttaaagtactgtgatgccatgccatattgatagtattatatatatttgctttaatttttaattagaacatcttgcattgtcttacttactatgtagctacctcta

SEQ ID NO: 108858 - DNA, 389 bp, Glycine max
cacgtagtcttgcggctattatctttttctacaatagcaaagttatcgataccctcggtattcgccgcacgtgctaaagtagatgacaatctggaggcgagatgagaatctccatgcaacgcttgcggaccattgacaaggccgaaacacatagctcttcggcataggcttcgctacagcacaaagttatctgtaccctcggtttctgccgcacggactaaagcatatacgacttgtaccggcatacgaattctcttcacggctgtagccgatgcaagcgaaaacactagcttgcctatagcttcttacgctcaagtatcgtacctcgtttcgctcactgataagaattgaattggaccgaaatgattcattacgctggcgatataggc

SEQ ID NO: 108859 - DNA, 123 bp, Glycine max
aatgagatttaaacatcaaagtacatgacactcacttagtttgccctaaatcgctgtaataacaagccattcttaacacaatactactagtgaacatctaccttggctggctgaagttacttt

SEQ ID NO: 108860 - DNA, 203 bp, Glycine max
tcatcctgagaggttgtccgagttgtcatcatatgctatgccatatatccaccgcaacacataatggctttcttactagatggctaactgaattatcatggtaattcgttattctcatgcataacaatattatcaatccactttcagccgtaactcaatttacgctttttattgaattatcactcaatatttggtcgaacact

SEQ ID NO: 108861 - DNA, 74 bp, Glycine max
ctgggggcaaacagccaggctgcgggtagtgtggatggccactctatgagagggtaaaaaaaatcttcttcaat

SEQ ID NO: 108862 - DNA, 165 bp, Glycine max
  unsure (1)..(165): unsure at all n locations
tagctntgcctgtctccatcacanagcaataatactaatgggcgagactgtcgacaacgatctctatataattgtatgccatggcataatcaacagattgcacatcataaagttggattggactgatcatggataaagaagaagataatataatgcattgatgtc

SEQ ID NO: 108863 - DNA, 408 bp, Glycine max
  unsure (1)..(408): unsure at all n locations
cttaacatggaccttactgagatgggctataaagagcttgtatgacagttaaacataactcatagtaagctcttccatacatcaccttattcatatatgatgaagattgtgcgcacaatattaatctaacacttaacaataattgtgcaccaactcatatactgctatagacatagcatacgttttagaataacgtctgaatgaggatangtctataacaatcaacaagtcatactggaagctattagaataagtgatagctnntcttgtacattgtgcttcgctcactgcacaatgatgatgtntggcatctcttacgatatacttgcacataaatggagttctgcttgcgtagtcatgtaaatccaagttggaatattactacatacctatatacattgatgttat

SEQ ID NO: 108864 - DNA, 247 bp, Glycine max
  unsure (1)..(247): unsure at all n locations
tgaaagtatcgagctatcttatngaactataagcttttgactaaattatatattatagtagcatataaatataanataagtaaaatgaacatgttataagatatctttgtataaaatttaattgtatgttatgcatggttaaatataaactttgacgtataatatttttttgtgtcatggagggtctaaaaggccaaactaattaatgtgctctacaaaatgaaacatgagcaacatctgcaagaag

SEQ ID NO: 108865 - DNA, 347 bp, Glycine max
  unsure (1)..(347): unsure at all n locations
ctacttgctcaagtttgtaaaactctttttattcatcagagctcgtatttctaagggagtattaactattgtgctgaacnaacctttccttttataaccattcattacactttgacctattgtgtatacttcagtgtaactgttgatgaagcctctttgatcccgcttaaacatacacaaattgtggtatctacctaggtaaattgttttagacattgcttcattatcctgattagcataaattgccacaacatacattgtagagtaaaagaagtacaaaagtactgttgcatgagaaatcatagatagacacttgccattctaaattttaattactactacttttt

SEQ ID NO: 108866 - DNA, 256 bp, Glycine max
  unsure (1)..(256): unsure at all n locations
acacaaacatggcatataaacaaatatatgaccaatccctacaagacaacaataacaacaacaacaacaacaacaacacggagctttgagataaagccgtctaacactttacaaaatgctgactaaacagaaagaatgtgagtctgagagtgtaatcatttagacatattaacaagcactttgcatacttatgaacttgatatntcaataaggcagacgacaacgtacccgtcaaataatactcatataatggtaa

SEQ ID NO: 108867 - DNA, 366 bp, Glycine max
  unsure (1)..(366): unsure at all n locations
tcactcagaatagtcttagttgagtagacatcaggcaagtagtgtaatgtcgtgtgacgtcaaatcnggacatgggagatgtctgtaactgacaagcacagccggcattcaacacttcacatgaagtatctgtgccataaggtcacaatatttgattgttgctgatatctattaagccatctattactgacgctgttagaacactaatcttgaaattgatcttttaagcattaaaactgcaaaatatattcttaattcttactaatgcatggtcatacttgtatgacatcaatgactgattctttattcaatacatcttcattgattcgtgcttggtgtggatcttgggaaaaaaattaatctttt

SEQ ID NO: 108868 - DNA, 75 bp, Glycine max
gccacaaaaacggcgaagactgcttcccacaccaagcaaagaggtgaaacatcacgcgcgagcggaaacaaaaaa

SEQ ID NO: 108869 - DNA, 275 bp, Glycine max
tgatcacaacaaaatttgtcaatataaagagagtttattgttaatattaacaaagctccaatgagttcattcttaggatgtagttactcatgcaagtaatataataattgattctcaattgtataaccatcatataagaatggagaagcattgtcaatgaaatttaccttaatacatagctttaaataagatttacatgaatctgaggatttgttaaattattattttatgtgaactttagaaaagttttcaaatatattgtaagagaattattt

SEQ ID NO: 108870 - DNA, 354 bp, Glycine max
tatttctgatttagactataataatacgataattatgatgagtaatggagtattttacagatacttctatggataaaatagtgatattaaggataatatccttactaatctctaaaaatgtctcttaaaaaatcccaagactataattatatacaaattattactttatatatgggttgcataataaaatataaactattatggtaacgtgacttatgaatatatgtggaggattaaggtattcccaaagcttctataatatttaaaacaaactataattctgacaattttatttaatggaaataatacgactaccacctaaactactgtaaacacgacaaatgcttcctgagt

SEQ ID NO: 108871 - DNA, 176 bp, Glycine max
tacgtacaagacaagtatagttgttgtttgaatacctcactcactcaagtgtatcacacaattatggctgttctctaatgagacactcttgccgtttaccactctaatgtctcttgagttcttatgcgattcaagagattatggccacaacaaagaacaattcaccaatatgtgtc

SEQ ID NO: 108872 - DNA, 222 bp, Glycine max
ctattttttgctgccgattagtgttacaaaacaaactttaaaatgaaatgtgtggataaggtaatgtatccgatcattcaccataactgtggcataggctggattatgggtctgtgatggtggttgaacaaacgattgcttcttcaaattcttgtctctcataatttttttaaaattttaagtttaagagtcatgatatttccttacatcgaaatatgaaaa

SEQ ID NO: 108873 - DNA, 52 bp, Glycine max
atcctcagatccctcttgttggactagactcggcttagatagcttatgaatg

SEQ ID NO: 108874 - DNA, 81 bp, Glycine max
  unsure (1)..(81): unsure at all n locations
acttctttccgacatgtgctnttattacatattaaataattctaacttctaaagatgcatgtattatactggtccattatt

SEQ ID NO: 108875 - DNA, 248 bp, Glycine max
  unsure (1)..(248): unsure at all n locations
tgatgaatgagtgattgaatgtgagatctntttcttgacaagcttgcactatagaaagataaactgtgatagaatatgacagaaatgttattagttcgtagattgttgtaaggaatgcttaccactccgagaaggtatcttaatttgaagcacactttattatactgatttgctgattttgattaacgtgctgatgagtagaagcctgtgatggaactcttaccaagagactggctgatgatatcctt

SEQ ID NO: 108876 - DNA, 199 bp, Glycine max
  unsure (1)..(199): unsure at all n locations
atctgcggacgaaaactcagttaagttagtctaaacctaagagggccgtctatattgagcctagtccaacaagaaagatctgangatgaagctcggattgattcggtctgacgagggatcgaggtntcgtaatttatgctacaacatanaacatacaagcatgaatgatgagagaaatatatgtatatgcatcagcttg

SEQ ID NO: 108877 - DNA, 357 bp, Glycine max
atgataattaagataactattatcgaagactcaatgttgacatgctattgtccaaacattcgtacctaatctattatacatgtgaggacactatttgctatcattgagatttaatggtagctccaataaaataaataggaagtagtattacaaaacacgagattctttaaatatgaagagtctttgacatacttttaccctactgggatagctttatctagaaactgatcttaagagaatactccatagagaaagcttcatcgctatatgtgcactttacccaacatagttttaatcaaaaaaagaacaattcttttaaaaacttttttctcaacatattaagcctcactgaatccc

SEQ ID NO: 108878 - DNA, 322 bp, Glycine max
ctagcaccccaacttacgtgtctactcacattccatgtcatttgtcaatgcatgtatgttatgatcattcaaatcaatatcatatgtcatcacaaattcattcaccaatcccaacatcataagatgttgttacactatagattcaccattcatatattcatcacacttatgaacccacctattaatcaataagcacaacaagacattccaacaccttgaattcttgcagacaactcaccaaaaactcatggatgagaatctcatgatctatcataattcaactcttatatataatacatcatctacccatctatatcatcat

SEQ ID NO: 108879 - DNA, 112 bp, Glycine max
  unsure (1)..(112): unsure at all n locations
atctctaataaattctgctcacangatatgttcaaggctcacactggcacattatatactctctcatatactgagtcctcataaaatattgagaaaagctgtctgaatctat

SEQ ID NO: 108880 - DNA, 305 bp, Glycine max
  unsure (1)..(305): unsure at all n locations
ctaattaacagttaaatgacagatgtcacannattaatgtgtgggtcactttcttggctaagcccttgtctgttattagcattttcaaactaataaaatgataaaagaacatccttctactacaactaatttattatatngatgagagacaataatattattaatattagattcacaactaaattaatatataatggttgcgtaattgagtcaaagtggatgacttactttcctgtttaaccatttgagtattnnttgtatactaaaacttttacatgtgatgtacagaaaacaaaatcaaatat

SEQ ID NO: 108881 - DNA, 448 bp, Glycine max
ggatcttaagcactgggctgcagctaaaaaagatgctccaactctattcagacgattttcataacctcatcttatggaaggtacatactgaaaccgatgcaattttttgagcataactaatattggagcataaaaggctattccaccagaaaaatacataaggcgtctcaggaagatactttaaaactgaatgaggctgaaggttaacagtcatcatttaaccaaactatacattgctgaatgagatattaggttcaatgagatgctagaaggacctttatacctgagactcgagtaagacagaaagccactctattgatatatatatgaagaatttaactgcaaaataccttatatattcactagagatcaagagattacaggtaagtagaaatgaccagacgctctataaatgtacgctcctatgagtcgaccagattgatcccta

SEQ ID NO: 108882 - DNA, 193 bp, Glycine max
caacatggtccatacatctcaccgacacatgtagagccttgttgtgtcctctcacctcaacgggaatctcttcttccgcagacgcgatatagttactggtggttatatgaataacgatgccttctacaccctccactgagatatcgtgggctacatgggcatcgttgaggacttttatcaacagcgcacgatg

SEQ ID NO: 108883 - DNA, 345 bp, Glycine max
gataatctcctttagcatctatcgttgctttcaattctgatacttctcctttgagagcaccactgggtagacacacacaaaaattattgattatactccctggttcatgatgttttgaacatgagatatatttcttgtacaatgctaaagaaaaatttctacatttcttactcttcccttgtactcaaacaactgattgagaaaatgtcctgtgatcaatattacttattgtatgagttgaatacgtccaagttaacacttattacactaacgcaaccatataccacatcatactcacttcatatatatacatactctgcattttttaaatatcattatacatat

SEQ ID NO: 108884 - DNA, 309 bp, Glycine max
  unsure (1)..(309): unsure at all n locations
tcactctctcagtctattgtcctttgctgagcattatactttctcatacatcgcagcctgtcataaccagaaaagaagnaaaaatgctgtttattatttctattcttcanacgacaaatcttataatgattagntttatacatttgtgacgagagtcgtactaagatactaatatgagtgatgttatgaaacattcccgtgttacattcagcanataanaacatatgcaacgactttctgattaaataacacttgatatcatntaagtgagagttggatattggatgatacccttgtctagatggatca

SEQ ID NO: 108885 - DNA, 435 bp, Glycine max
  unsure (1)..(435): unsure at all n locations
acgggagagaagttgaactttgagttgtctcacaagactcttcattcatcagagtacaacaagtgttacacatgcttctatntatagactaggtagcttncttgagaagctntcttaagaanacttccttgagagacttctgtgagaaaacttccatttctcttaagaaaactcccatggaagtatgagaatttaatgttagcctcttgaggctntctttccttttctcttctatgggagtgagggctaagatgtgacctatgccttccttcgtaatagtcacgaagatcttcacttaggcttntgcacgaagtatgactactatatgaagcatgtgttctctttcatttcttcattatttctcttcctctctctatttcttcttcactgactattcttcaccttttgtctttcttttctctgtttcttcctact

SEQ ID NO: 108886 - DNA, 221 bp, Glycine max
  unsure (1)..(221): unsure at all n locations
gtgttcattaatgtatgatatgagatgaaatgcanaggttgggactcgtgttagttgtntatgatggaatgagcctaaacacttgagcttgagtgaaacaatgactgtgagggtntggtgatgatccttccttgattctgctaccttactagcttatntcagtgtggtctaatgtgtatagatctatctttgaaaagttcatgnttgtgaaaagcaattga

SEQ ID NO: 108887 - DNA, 345 bp, Glycine max
  unsure (1)..(345): unsure at all n locations
gcttactgattgcacgtccatgatttaaggtgtatcatacattatggtatcgatccaggatctgaacgtgaatcanatcattggaaagcacattcttcataaatgcttgcgatcgataccgtgacagtttgaataaaatcaaaaaaactctccaaggttcatcttctaagtataccttcaaggttcttccaaataaagttataacaaacctgactgctttacttacactttattatcttacaccttgattttgacactctgactttctctttcttctgcaaactttatgtttggtcaactgtcttcaaacaaaggtattttatctctccttcaaaatccagctac

SEQ ID NO: 108888 - DNA, 175 bp, Glycine max
  unsure (1)..(175): unsure at all n locations
agtcactgngctgcagctgcacaataacagcatacatttctcgatttgatttttcgcatatcaacctcaataaatgaaccacaataaccagatttcctgtgctgaggcttctttgaaccaataaagactctgaatcaccatattatctgatgatgtcctatttcaagtcaatgac

SEQ ID NO: 108889 - DNA, 295 bp, Glycine max
tcgcggaatacccgtgtatttaccacatacattttttaaacttgcgaatatgtctttacgaagagttttgtttggtgcataaatacatgagtcgtagttttggcactcccacctttgtggccactgctgtccattatcgcagaacttacctctccaaaattatcccatttgtcaaaatactcactcgctgaactacgtgagctaaaagactacaatagcatcacttcaacgctataattgtctgatgatgaactatccctcgctaatctcactgtttaccctgcattttaacttc

SEQ ID NO: 108890 - DNA, 323 bp, Glycine max
  unsure (1)..(323): unsure at all n locations
cactggtaatgtgtctactatcattgtatcatnntcttctctcgcactgaggggccactngagctaccaagtctctccacctttgggtgtattctttgaaagatccgtacccctatttgcacatgttctgtagttgcattctatctggaaccatatcataactgtactaatactgcctaacgaaggcaaccattatgtccttccaagaatggactctggaaagttcaagttatcgtaccatgtaacagctaccccattaagactgtcttggaaagatgtatcacagttctcatctttgcgatgccccatttcacacacatttt

SEQ ID NO: 108891 - DNA, 337 bp, Glycine max
  unsure (1)..(337): unsure at all n locations
ctattatacatcatgttatatctataataaatgattttcataaattcaaggcttttctctattttaatctgagactttattatacatcatnttactgctattaaaaaatcttcaaataacacattactagttgtaattaatactgcataaaataagctcttacctaaacaaacatatgaatcgcactgactatgctaaaacacctaattataaaaatatacaaaaatgacgacagctaaactcaccgtttttatatctattaacaaagctcttgaatcatacgcgcacccaaatatctcagatatttcaacttgctcaactaaacttagtcatttat

SEQ ID NO: 108892 - DNA, 198 bp, Glycine max
  unsure (1)..(198): unsure at all n locations
tattacatgacttcaagtgatttgtattacatacacacgactcttgcttgattacatcatgcatctcaaacaatttggggtaccaaanactgcncatgcgctcatcttggtattttctatacccatacatatacaaacttcacgatgaatctngactacctacacantanngtgctacatttcatgcctttttttttt

SEQ ID NO: 108893 - DNA, 126 bp, Glycine max
atttcacttcctttctcattatgtctcatttcccagatctctcacatgctaggctgatgtgtacataattttaaattccaaataaactgcttaaactgattgatttcttggtcaattctgtctgtc

SEQ ID NO: 108894 - DNA, 309 bp, Glycine max
  unsure (1)..(309): unsure at all n locations
cactggtagctgcaactagtgttatggcaaccaccactttctgtttgcaagtatangtngaccatctgtggtgaggctcatgaaacaagccaatgtattcccactgataaaaacactcaagaaattcattatatgggaaatcaacagcgacaaggctatactcaacgaggagtttcaggcttccagtanggtccctataatcaacaaggacagtggaggacacacctctgtcgaccaattaacaaataccagagtgtgccttcatacaggacaatccaacattggcctaacatattccagaggactact

SEQ ID NO: 108895 - DNA, 188 bp, Glycine max
ctgtccattacttgatgctgacattttattcatttttaggacgagtcaggctagctgatttctttcacaaagatgttaactgtactgaacatgatgctggtgaaccatgatcttgtaaacatacacagatttcattgtctatgcaccagtgagatgaggagattctagactagtggaaactaattact

SEQ ID NO: 108896 - DNA, 393 bp, Glycine max
  unsure (1)..(393): unsure at all n locations
tcttaatatgcttaaatanntgttgtttttccagtaaaatagtggttttcatttttgtctcttatgtcattttctaatttaagcttttaagttgggtatttcaatttcatccctatagatatttgcttattttagtcctatanatttgttttccttccaatttgtctgtagcgtaactatgagactatatgaaaatagatctgcaggccgattgataacacacttcaaactaaatacagattctacgaataaatgaanatgcactatagctacataaaatactaaggccagatgaaatctatacaggcagaaattaccttatatctctatgcnttcacaactatgcttcccactatacatgctaacgctcctaaccatatcaccatcacccac

SEQ ID NO: 108897 - DNA, 265 bp, Glycine max
  unsure (1)..(265): unsure at all n locations
gcttgagttccagtgccaatcgtctctcttagtcagcttctttggcttcattatcagnggctgtcttctgtggcagcatcttgagaatgtcccagcactttgatgacagctttccaagntctgctatccagtgatntgaggaaagcaccattcttgcttccaatatcatagtcgctccatcaagattggtggctgtcactggcctcctcttttcatgtcatcaaattatctcccagatctactctggattcagtgttgctctata

SEQ ID NO: 108898 - DNA, 192 bp, Glycine max
  unsure (1)..(192): unsure at all n locations
tcttatgatntacatcacnctctatttcctcctcattatatgattgatgcaagacacttaaactgccacctaacgaaataaaaaccattggttcatttgtgattgctaactaactttgtcttctgtctcaaacacataacaaatattatgccaagtttcaataacattcatttatgctatgaaaaaaaacac

SEQ ID NO: 108899 - DNA, 154 bp, Glycine max
aactcctactttatttcccaaacccttaatttctttcttcctcgatcgactatatagaataataaaaccgatgagtttgtgttactatcagctactctcagtactgctgaaaaaagtaaccctccactagttgacactttaatgtaatcgtaca

SEQ ID NO: 108900 - DNA, 391 bp, Glycine max
  unsure (1)..(391): unsure at all n locations
taagctcttgaaaacttcttggaagctgagctagctgacacacccctctcatatctaagctcacctncttgagaagcttccttaagaagaatcctaaagaagctaggagctagctacacatacctctctagtagctaagctcacccctctgagatgagaagctagaacttagctacacacccnctataatagctaagctcacccncatgacagagaaacatgagaatacaaaaaaaagtccttactacaaagactactcataatgccccganatacaagggctaaaccctatactactanaattgggcgaaattcaggccccaacgaagggaaacctatctaatattacaaagataagtggctcatactagcccatggctcgaatctacct

SEQ ID NO: 108901 - DNA, 323 bp, Glycine max
tcagcttatagcatccttctttctatatctctatgtgatcaaccatcatttattatgttcctgtacttcaacaagtgcagagactgtaataatctcggattagtatggagtacctaggttgcattcctactagcattcaaacttatgatacatatattggaatatttccaagatcagatataatattgtggaacttttgcatgctgttctccattggatcatcaaatattcatttatgatcatgattatctaatctttcattgtgtcctatggtctgaggatccactttttgcttacaatgtcctaatctatctctaacaaga

SEQ ID NO: 108902 - DNA, 419 bp, Glycine max
atacgagcgcacttagagtttaaacttcagactctatttattagctttacactgtatactgagaagaagttggaaccaactaagtacttttccttttttctcttaattatgcccgcctttctttctcataacatcttcaactctatcaagctatatggggaactcttttctgctatcctaggataccctcttacccttcttgttcctgattcatgggaatacctaagactattagccagactattcattacccaaacagctactaatgaataacacaactaagagctctaaccctaattttgtactcatcatgtgttatttctcagatccccagctgcgaaggtaacattatatcccatactttgatgatattttgtaatctgtgtcaactatggtatagtgtattgtgattgcgaaca

SEQ ID NO: 108903 - DNA, 148 bp, Glycine max
actcttagaccgatattctttaatatactctacagacaacaagttctattataaaatatcttattctaacacagctaaagaagaaatatcttttaatctaatatatttagagatgaaaatataagttaattatttctgccgtatacag

SEQ ID NO: 108904 - DNA, 320 bp, Glycine max
agcctggatctgaagcacatgaagagttatgttttcttaacaaatggttactccctaaacaacatatgaattaacagctatcccattctacaagtcttgccaaattacaaaagcccttcataagcgtctactaatatacctacctcaggattgtatactaaccttctgtaataaactgtactacttgggacaaatgcagcccctgattaaacactccactatagactgcattccataggtctttgcctttaattgtcaacgtgcacacattctgtgaaagtcataagtatttgaagttataagcaatttattgaaattca

SEQ ID NO: 108905 - DNA, 308 bp, Glycine max
  unsure (1)..(308): unsure at all n locations
gtccttttattaatacatgtaaaagcatgtacatcagtgctgaatgcatgattgatacgcaaatcaatatagtctactgtggtagntnggctactgagtgaaagtatctagataagtttgtccttcacctaagtatagcctttagccactagcctggctntatacctctctattgaaccatcagaattgtgcttaatcttatacacncatntacatncaattgtagtattgtgcttangaagaatctgtaagaatccaagtatcattaagttctagtgctttaatctctgcattcatggcctcaatcc

SEQ ID NO: 108906 - DNA, 422 bp, Glycine max
  unsure (1)..(422): unsure at all n locations
tgcctctaacagcaccttngtcaatgaatttcttcatgcctcttaagtgcagatgtccaaatcttntgatgccatatttgacttcatcttctttggagaatagacatgtggaggagtaactgggttcttgaggtgtccatangtaacnagtgtcctttgatctgctgcccttcattangacttcactcttctcatttgtcaccaagcattctgactttgtgaagttacattgaatcctcatcacacaactgactgatgctgatcaagttcgcagtcagtcccttcaccagcagtactnntgtcagactangaaagtcatcatggactagctntccccatctagtgatctntccttagaagccatctcaatgtacatactagtggacaagttcaatgtcacangaanntcttactctgcatgt

SEQ ID NO: 108907 - DNA, 424 bp, Glycine max
ctagcttggatgaacatttaatatctaaactgtctgtctaagttactactccagtcagtattaattattactgcttatagctttcctactgctaattcgcaaatgctacgggagtctgactaatatgaaaaaaataataacatgaatgatgtaatgaatgcagttcatttaaaatacaattgtaacttttagaagacaattgtagtaactgttttataatttaaaattaaatctgttataatagaaaaccttactgtactgaagatttagaacgaataattgacagaataaagagacaaatatccaagttatttgaataaatgtcttattgttacttttctctcacatcggcttagatagaaaacactagtggccgtgtctctatacagaatacttgagagataataaatcttgtgttacttat

SEQ ID NO: 108908 - DNA, 201 bp, Glycine max
  unsure (1)..(201): unsure at all n locations
tgcctctaacagcacctttgtcaatgaatttcttcatgcctcttaagtgcagatgtccaaatctttgatgccatagtttgacttcatcttctttggagaatagacatgtggaggagtaactggtttcttgaagtgccatangtaacagtgtccttgatctgctgccttcattagacttactcttctatttgtaccagcatc

SEQ ID NO: 108909 - DNA, 126 bp, Glycine max
  unsure (1)..(126): unsure at all n locations
accaggggtctttctcttactcggggngagtgtcctttttaccatggttaaatcagtattaggcgagtattgaaaaggtgagaaatctggtgatgagctgtgctaaacatcaaatcatttattcct

SEQ ID NO: 108910 - DNA, 169 bp, Glycine max
atggacttggaatgttttcaaacagcctggatcataccataaggtatcataccatcacagagtactcttattaaatttgaaataaacgttagaactctgtaatcgatatcaagttaaatcttaaactgttaacataagtatactcttgaagttgaatctaacatttaaa

SEQ ID NO: 108911 - DNA, 190 bp, Glycine max
  unsure (1)..(190): unsure at all n locations
ttccgttacctgctgtcgacggcattgtcacngctagccancagcttcaaatctgtccagttcaaagtgctatcttgcagtgttgttgggagaacaaaagcggtngtggtcccgatcatacgtgatcagcctcattcaagatctttgtatcagctgggaagagttggattgacatcctccggggctacaa

SEQ ID NO: 108912 - DNA, 140 bp, Glycine max
taaataagttatttttatctaggagaggatctctaattttgaggatagaaccctggtgatcaagacttcacttgggtgcctctggaaaggatttttcaatttcctgtttaacatcaaaccttcaaattggctatccttcc

SEQ ID NO: 108913 - DNA, 315 bp, Glycine max
tactcactgcacatactctctattactctctctttccacttcgggataggacactatacccccagctcttgaccatcattaacatgggatcaagaccagacgtaagcctgcgttaaacaatgtctatgagctgtgtagtctatgaacggccgtctgcttgtcacacatttgcacccttctactagagagactgcccgaccttgtcacacgtccttgtgcgcatctcccgcgaatatcgctctgttctctaaacttaccccagccaactaactcagtgatttccaccagcgccgctctacactaccatttctagcc

SEQ ID NO: 108914 - DNA, 279 bp, Glycine max
  unsure (1)..(279): unsure at all n locations
catccaagttcacttcttcgtatcatacttatanaaatgtttgctgtttcaagctatccatctgatttagtgacacacaatgcttttccagctctagtctttaacgggattcttgtcttttaagagtaatgaattcataaagggatcaaaactggatgtgaataactcatctgatacatcatcatttttaacatctgattattgcatgatgtaaatactcgaagcaatttataatggctgttggcattaacactatatgcctagaactctttatacaac

SEQ ID NO: 108915 - DNA, 87 bp, Glycine max
aaggacaatacagcaaataaagtatagtgctctagacgctcttacatcttgactgaccctatactgtcgcacgcctaacttgtactt

SEQ ID NO: 108916 - DNA, 224 bp, Glycine max
ctcgatgtaagataaatgtttgatgccttacccttaaagtttggattattttgtggtgtaatacatctatgtcaatctgtttagtaaaagactagaatagcaatctctaacattgaacggcctagtactgcggtatctgtggtattcatactcattatgcttcctggaaatatccttaacggaccatcaagccagtgttttaacagttaaatgtttttatttga

SEQ ID NO: 108917 - DNA, 123 bp, Glycine max
tcatcttcaagaagcaaacgactccattgatgaagaagatccaatgccaacaggctctacatggagctacattactatactaaggagctatccttgccccgatacacccaatatccatgttat

SEQ ID NO: 108918 - DNA, 261 bp, Glycine max
  unsure (1)..(261): unsure at all n locations
tcctcgcncagtattatgaccagccgttgatgtgcttcacctttgaggacttctagctatcacccatggtggatgaatatgaagagatcctacgatgtcctctacgggaaagganaccatacctcttcttatgattctatccctctttagctagaatttcttagatagtctaaatctctgcgcaggaattagaccacagaaagcaagtctgaaatatggtgggtggagtaccgagacactgtttggaggcaaaagcaagaa

SEQ ID NO: 108919 - DNA, 209 bp, Glycine max
tttctaagatctttcatctttctagctgctgatgttgcactgccacggaattactagtgaatggagaagagcctgattgtatgcatataactcacataactggatggattgactagatggatactgatctaacattgatgatatactctaggacaggttactgggagctcgtcattaaagcatttcaagctgtgcaactggaagtcttg

SEQ ID NO: 108920 - DNA, 168 bp, Glycine max
  unsure (1)..(168): unsure at all n locations
ctgttctacatgcaagacttattactgcatgcactgaaacaatggcttacctgaaggatgtgaattcacgtaccttattattgattacagatatgacaacgttatgagaagatatcgctgtatgtgtcngtcctttaagtatgttttcataaaactctagtctgtagt

SEQ ID NO: 108921 - DNA, 339 bp, Glycine max
  unsure (1)..(339): unsure at all n locations
tattaaatcattatgtcatatgagtattaaatcgtcaaaatataagtttaaaacaatttgtttaagtgactctatattcgtgatacgcaaaccgtattgcaggtcgtatatattgttggaagtataaattattacctcatagaatntactatacaaaatgacttattgagtaaggcaaacagccatcagaaaactaatattattcataagaatttacttcaccaacgtctttagagggacaaaagaaatcaagctaaaacattcccgcattatttctactcttttaaacttatttattgtcaaatgactaaatttcaattcttccttattatactatgc

SEQ ID NO: 108922 - DNA, 413 bp, Glycine max
  unsure (1)..(413): unsure at all n locations
actcagctaacctgaagcatgggccttcttctgatcaagtttacttatcgtgaagaggggggcactgatctcacctattgatgaaaacaaaaattactcctggctccatgggagtgacacctatggagcaatagttttacacactctatctcttatactnactcctctctatcttaagcaatcccttcattttcataatcatcatgtgtgtgtgttattacatttaaagcatgtagactaggctcctagctatcaacacaaagttcttacagcttctagaaaccattcttttgtttccacactcatcttctgactagctttaactcacaggatagccttaatatgatataattgtgtgtgtagataatgtattttcctctaggccaatcttgtantctttaggtcatacactt

SEQ ID NO: 108923 - DNA, 189 bp, Glycine max
ttttttacgcacgataccggcacgagaacttatataatatagcgtgtggcaacgaattagatgctgttataaggtttaatatcagtaggtgaatcatgaacaagcccaataaacgatttgttgttaagtgaagaaaaaacaatgcttttctcagacagctggagactaattattttggcggatttctta

SEQ ID NO: 108924 - DNA, 199 bp, Glycine max
cttatgtacaaatatgcttagatgactcagatgagcaaacactcagattaaagaattgattcagatcagatcagatcagatatcagatcaatccgatcagaagactatcagatatttaaagtttcaacatgagtccaaaatttccaatcttctaaagttactttggatgatcccatatagatcatccagggttaacgta

SEQ ID NO: 108925 - DNA, 259 bp, Glycine max
tgccactcacgactagtctcacgaacctactttttctacacggtcccaaattctcaaattccacatcagtctcaattaacaccaacctccagctaaaaacgcaagcgaaatctccaacacaccaacacgttttactaatgccagacaatcttttcatcttaccgggacatcacttatgagcctaacaagctacttgacgggactaacactcaactattaatctttccaccacatcttattttgcctgcaagctcgcatt

SEQ ID NO: 108926 - DNA, 399 bp, Glycine max
actactaactgtctgtgtactgactaaatagctgcttgtttataaacataacttcaaagggtgaaggctttaaggttcatcgagagactctatgttagacctctgtttgagatacacttctaacatgtgttaactaaatgcagttgattgaacagccctggctggatgaaactactcttttttagaaatgttttcgagcaagtatctacttttaagagagtgaatgttcttaattaatttgtagaatatttgggtctagaacttggccgattttgttagaaatgatgaagactgtggaactattattggctctaaacagaacaagtttctctcttagtcataaacttgatatattgagcgacttgacttgcagtcatccgcaagatatacatactcacg

SEQ ID NO: 108927 - DNA, 161 bp, Glycine max
cagatgacaatcgcatccgagatatcccaatgatgatctcaaccacctcatctactagtggcagcatgagtctgcaccctcatcatgactccaataactctggtcaaactcacctgcatgtgcgttataccttatacagtctcacctgttggccggttcaa

SEQ ID NO: 108928 - DNA, 233 bp, Glycine max
  unsure (1)..(233): unsure at all n locations
cactaacanaaacttatcttcttcttcttggacaaagtatggcaggctgggggcaagtaaatattcttcccatcagaccttggatgcaactgtgatcttatacccatatcagctagatcttgacgggtattcaagccatccttcgtctttgccttgaatttaaggagcgtcccaatcacactgtcacaaacattattctccacatgcataacatcaatacaatgtctaacgtc

SEQ ID NO: 108929 - DNA, 432 bp, Glycine max
  unsure (1)..(432): unsure at all n locations
tatacaatcaaggcagctttcgtacctagaatatntacatgtacttncaaggtgtatnntgtacttacatcacacacatttcttttgctaaattcacatacatgcatactctaagcactttggctatcgaaaatngcatacgtgcacatncttgtatttctaatacctatacatacacaaacttttatgataacctttgactatctacacaataaggtgtacatttcatgcttttctttttacaagttttttttactactaaagccgcttcaaactcaatatatttctttgctcctaaattgattaaaaaaaggtattttgaatgtatcatcgcacaatttagattttggaactttataccaaatctatggcaactcagatttgcatatccaagggattgaaaggattcactattacctacttataaaaaat

SEQ ID NO: 108930 - DNA, 225 bp, Glycine max
gcttgcactctccctgtatctgaactgtgctgtttttttcttctggcgtcaacatgtatgtcgaccgctgccttgattacctctaatccagattcatgttaatgaacacgtcattgctagaaaataagaatttgtctcaatcaagccacaagacatcctaagcatgagttatttaattattattttatgcttactaaccatgaatggggagtctacccaaattca

SEQ ID NO: 108931 - DNA, 288 bp, Glycine max
tatttggattaccttagatatttgaacctgctttggcgtacatgctagaaaatgaaaatcaaacagtgtaccggctgtatacccttactgatcttctccctacagtgtgctgtcatgagtgatatatgttagtaattgtagagagttactacattctgtgcgatttatactgtgatgtagagggttaatctactacttgactgtatctcaattcatggttttatgtgtgaggtaatagaatataactattcaatatggttgaaggactgatatttttaaaattaaaaa

SEQ ID NO: 108932 - DNA, 389 bp, Glycine max
  unsure (1)..(389): unsure at all n locations
cattgttcttgacctctctggttggagagcataatatcccttctcgaaccattgaagggacttgtggcattatggtggattatgcgtagtgtcatactgagggatggtcgaggttgtatggggggtggagattctgattactatttcacaaggtaaagcgcttaaaaaccaccctattgtacccaatatttaggattgctgcggtgcctgtgaaatcaaaacaccttgctttaaaatttcgcaaaccaattctacatagtagatgtactaatgaaaaacaacacccatagatatagctacatgataacctggacagacatacactgttgatactatcctgcctgacanttcatacagacttgtggtatacatacagcattagatttaaa

SEQ ID NO: 108933 - DNA, 276 bp, Glycine max
  unsure (1)..(276): unsure at all n locations
atcagtaggagctntataagcgcgggtgtaagacacgaaagccaagttgttgcgatatgcgaagatgattcgctgagtgggtcgggatttgtacaaccatgaccntcctgattttgactatggaaatggcgagtagaggagcgccccgacatttatgcgacaagaataatgtaaccctctttggcttttaaactctacagttgggcctaggctttagagtttccttttgttaaggcttatgtcttntgttcctaattaataaaacaagattttctc

SEQ ID NO: 108934 - DNA, 379 bp, Glycine max
  unsure (1)..(379): unsure at all n locations
agcacactctcatctcacacaagtctataacattaatcttactcgctccactggttttacgatgaanactctatcgaatcataatttgactcctcaacacccaatttaccctagaaatggctcttgccctcactntggtcattcattntcctcctntgtacagcccaagcttttccacaatcctanatgacatttcaaactaggattaactcactctaaccntccantaccactaaaatccagatttggcttttaaatcctcaaagatcacacctttcactcatatactacattctacttttaacctangtaactctcccttatcttatcagtttcataccattcacacacagcatacancatcatatataacctaaac

SEQ ID NO: 108935 - DNA, 293 bp, Glycine max
  unsure (1)..(293): unsure at all n locations
gaacctggagcaatngagcaacctgaagcatatgctgctaatatntacaatagacctcctcaacctcagcagcaaaatcaccacancagagaaatatacctttcagcacagatcaacctgatgagaacacctacctaatggccacctcgaacacacagcagctgtccttcttcaaatgtgttgccacaacataatcctcacatcacacacacacccaaaacgcacagtgagcctcacacttctcagactggagcaagattcaaaatgcgttacaaacaagctcttcactacat

SEQ ID NO: 108936 - DNA, 373 bp, Glycine max
  unsure (1)..(373): unsure at all n locations
cacttatntatataaacaaacatgaacatataatattcatgtcaacaagctttgtacacaataacactaacacaaaattaaagactaaattaatctaaattaatacaaacataactaactaataactgacaaattactattcaagtcaagacagaaataaaatctgtcaatctctgcggtgatcttgatgccatagatcacaccgacactgagaccgataaggtgttgctcagcatcaaggtggatctcggaggtctggaagataacgaaatactctgatgtgtctatacactgaatctaaaaatgtcaagaagtatcttattgaagccttctgctaattgctgaagcacctcaagaagtgatcgcacactat

SEQ ID NO: 108937 - DNA, 139 bp, Glycine max
  unsure (1)..(139): unsure at all n locations
gaatcaatgacatgtcattgtaactcgtgaatctgacttccttgatcgtacaaccctttcaaaccaaacttctctgctntcctcactatatcatctgggacgataagattaaaacttcgaccatgaactcattatgtct

SEQ ID NO: 108938 - DNA, 99 bp, Glycine max
ttgaaaaagagtgacagttgctagtgcacgcttcatccatccgctagcgagaaaggacgcgctaagccaaaatcactaatgtgcgctaagcggtccata

SEQ ID NO: 108939 - DNA, 168 bp, Glycine max
tttaggctctctgtgcttaagacacccgtggaaacctctctctgtaaaagttttaagttttgcacttttaaagagggctttcttgcagctactctacttcatttccttttggcttcagaatcaatccagagctcttcaattctacattaaacagttgattcaattggt

SEQ ID NO: 108940 - DNA, 335 bp, Glycine max
cttcctactgcagacactctatacacaccacactctttgtatgtccacatctctagtctagaatcatatctgtgttctagtctttaacttggctcaaacacgcctcctacaggatcactagaaatgtactaaataatgtaattacccttatcaataaacaacaggatattgtattctgcttataccaatatacaacaccctttctcctctcactgtttactgactattaatatatcttgatttggggccctcatgaacatctatgatctttattctactgtgtgatctatcgatcactaaatattgtaacataattgagtttacaattcagcttt

SEQ ID NO: 108941 - DNA, 392 bp, Glycine max
  unsure (1)..(392): unsure at all n locations
tcttaaccctatgtcatatataagangaaaatttagacaatatttgttttatattcctgactaatattacaataacccatttatattctaaactattggagataattcaagtctcacatcgattaanagtaatcccacattataatatatgagtgangggaaccctcaccccttgagcttactattagaagtgaggtaggtctctcacattattcattctgatacngtatcatagcaaactctgatctggtaccacgcgattcttattgtgaatagaagaatatatatttctttcaacaatagtatattatcaatgtaangcctttacatatacaaattacacagtaacacaaatatatagagttcatgaaatttacttcctttcatatatt

SEQ ID NO: 108942 - DNA, 107 bp, Glycine max
ttgtaattgctgctctattggggttgttataagatctttctcaaaaactacaaacctttctaaccattgatgatgtaaaaaatgtttcacgctcatcctctcctcta

SEQ ID NO: 108943 - DNA, 289 bp, Glycine max
ggaaactggccttacatgcattttgtcacgctatattaggatatcactactgatgaaagtaatgtctgatcctgtttcactttactaatgattgttggaaggaacaccataactcatttcgaatatgttctgtgaaacattcagctggaggcggttacattcttcagctatttatattctagtggcacctgtttacaattgtaatctttggactctgaccatcaatctccttatttgcatcaattttatgtgatagtcgagaaatcacctcatttgcactttatatact

SEQ ID NO: 108944 - DNA, 109 bp, Glycine max
  unsure (1)..(109): unsure at all n locations
tgcaatcactctatgtctagcaatgattttattaagaatgctcctaccttngagttctactaacaaatatcctctctcgagcgactaattcctaanactgatgcatata

SEQ ID NO: 108945 - DNA, 262 bp, Glycine max
  unsure (1)..(262): unsure at all n locations
ctccctangagtcctctcacgaggtggatgtttattcatgttctcagtataaaaaatagtagtggaatgctcaaaatcagaatattcagaatcaccctcaacagaattctcataatgcacagaatgaccaagatgcacactatccctaactaatctatgaaaggttctatctatttcacgatcaaagggttgtaaatcactttgattgctcctagtcatgcactatatgcagaaaataatgtgtttctcaacagcacctaac

SEQ ID NO: 108946 - DNA, 235 bp, Glycine max
cgtccgccatccctttgttcttcatcacgcgcgttacagcggacggaacctgcgtccactaatgctgccacatccttcccctgctatacaaagcccccatcccttcaacgtgccccgatggaaggcctgagcgttttctacgctttcgattcacgattggccttatcactgctatccatttacacccaccccacacctaccatctttgtgtttataactttaattttcaagtttt

SEQ ID NO: 108947 - DNA, 344 bp, Glycine max
  unsure (1)..(344): unsure at all n locations
caacagataaaatgactctccttgggtctatttggaactctgcacataagcaaacactgaacattatatcatgcctatacgctgtaaggtataacaatgatccaatcattgctctatatngcgttctgtacaactgattatattctacgtccagccctatgtatgtggtcggatgtataggtgcttcatattttatgctcatcatggtgaactattagagatattcattacttggttgtgaatgcagtttgtgcttgtgattactgtaatcaggaaaactaagtttccatccgctattcaattatttgactcctagacaatctccatacattcttagtacacaa

SEQ ID NO: 108948 - DNA, 152 bp, Glycine max
atatctgatatatgttgctctcacctcagatttcctccctttaatctgatgagtaaaacgtggaagccgcagctctatctctaactagcaactcttgacctcccgcctaagatatttcttaagtgatgacttagcagggctgcgtccttctc

SEQ ID NO: 108949 - DNA, 151 bp, Glycine max
atgggtgtaacccactaactcctcttgatcttttgcctatgcctacatgttctggttttaagcatatagaaggtcaagcaaaggcggactatgtgaagaagcttcatgagagagtcacagatcatattgagaggaaaaaataaagctatgc

SEQ ID NO: 108950 - DNA, 176 bp, Glycine max
ttgacaccagcctgaaaataactgttacttttcacgagctccgtaattcttgtataacttccacgaggtcgattagtatatatatcatccctcaattactcgaacttttaagtcaatgcttacgtccaggtgtcattggcctttattcaagccgaattaaacgagctcttaattaa

SEQ ID NO: 108951 - DNA, 144 bp, Glycine max
ctgcgtagatagtcacgtaggcattatttaacatttattagcagtctatcgatttcgcgcgcaaatattattcaatccttatcactcaaagacccaccgcatagagatacgagtacacaacgagaatgtatgtttgtgaaccat

SEQ ID NO: 108952 - DNA, 171 bp, Glycine max
cttacaatatattacaatataacataggtatccaacatcaatcatcatccacacacaattcattactgatatgcataaaattggatggtcccacaccataatacatataattcaatacatcttggttgtatgaatacactccaaggaaaagcagataacacgtcattaaca

SEQ ID NO: 108953 - DNA, 249 bp, Glycine max
caattaaccactttgcttactttataacgaacaccaacatcggcgaaataacaaaaggatactctatacgcttctcaaagctacattatccactgcaacaaaaaaatataataaagctactcattattcttttcaacctagacaacagataaaattttttaaactatgaaaaataaatataactaatgtaattgtaattcaaccatgctcctaaaataagctttatatcgctaccaaaaaccctacttt

SEQ ID NO: 108954 - DNA, 123 bp, Glycine max
cttctctgcactgaggggcacttgactaccagtctctccctttggtgtattttgaaagatcgtacccttttgacatgtctgtgttgcatctatctggaaccatatcaaatgactaatactgct

SEQ ID NO: 108955 - DNA, 147 bp, Glycine max
  unsure (1)..(147): unsure at all n locations
aagaaagacgcctcacttaaatatatgtngaacgctctgcatcacggagaanggttccttatcgactatcaccacattctaacagagatagattggaacgatacaattctgccagaatatanaatgtgctacatgatatccccctcc

SEQ ID NO: 108956 - DNA, 331 bp, Glycine max
tgacaacttattaacagtttacataattaacttctaactggttacacaaactcacaataaatgacctacaccattacctaaagggtctgcttacttggcactcatttttattgctagccagcttccacagtctaatgacatttaactgatactacttagcttaatacactacccaattacctcaatctaaactacacttcataatatatatttattacctagtactgcctatttacattctaccattacccactcaacatattaacctacatgttatgtaatactaagtaagctaaatctcaaaactagtacttgaacttttcaacatcca

SEQ ID NO: 108957 - DNA, 187 bp, Glycine max
  unsure (1)..(187): unsure at all n locations
aatttctttggacaatagcttctcccgaatgaaatgacagtcaatntctatgtgnttgtgtctctcatgaaagactggatttaancaatatggagagcggctcggntatcacaatataacttcatctgcccaacttcacagaatctcaattctttgaagtagtgtttgatccacataagttcacatg

SEQ ID NO: 108958 - DNA, 152 bp, Glycine max
  unsure (1)..(152): unsure at all n locations
acacactctctgctattgttcttaactattctcttagtccataagaaattcataatactggtgtatctnagttctttaaactttggcatcaaagactaagccatcctaacaaggatgcactagaanatgtactaaataaatgtaatataccc

SEQ ID NO: 108959 - DNA, 57 bp, Glycine max
gatatatttgtagcattatcacatagctactgcatatgatgttgagagccactgaaa

SEQ ID NO: 108960 - DNA, 171 bp, Glycine max
  unsure (1)..(171): unsure at all n locations
ctggagtcagatagttgggactggacaaatgataagaggtctgagtctcaggacgagaatgaagatgtngatgatgaacacatcataggaaccagatcactttcagacatctaccanacgtgtaatgttgctgtgatggagcctgacggatatcaagaagctacagctgat

SEQ ID NO: 108961 - DNA, 315 bp, Glycine max
  unsure (1)..(315): unsure at all n locations
atgacagaccataanttatttcacgcagactagaaagacatcatgcaactagaaacataatagatacanattacttctttcatattgatgcatatgaagatttcttacatacaatgtatatagccatatcttcatttacaattacaaacaatgctacagaatatggacaacatanaactaagttcctgaccaaagggcctaagccaatggcaataataaacttatcaatatgcatattcaacctgcacgtgctattctctatcgcngatatgactcacatatacaacatactggtcagatgacatgatataacca

SEQ ID NO: 108962 - DNA, 366 bp, Glycine max
aggcttaactactgcctgcttttgttaaccataattcttttatttgaatcttccccgtacagtatttgactccactgtaccaagcggccaagaaaaaatgagagccaataaaatcggtgatgatactggaactttgactaaaatcatcttgcgcgtcaccatgatgctgatactaggatggttatcattcgatttgacactccacagattggcgtcgtaaccctatactgccctgatggaaggaaccttttatgaggctactatcaggctaaccctgaatgatatgggtacacctcatggactgtgataggaaagggaggatttgtgataccaagaacgttagttatgctaattatgctgtagatt

SEQ ID NO: 108963 - DNA, 288 bp, Glycine max
tccgtcagctcaatggagctgctttacaactagtgacattgtgaatgaaccatgaacgttaccaaaggtagagactttctacacacaccttctactgcactttctgcactcattgtagaaaatcacgagtgcttaagctctctcaaacttaactcggagggctcttccgacatttaactaaccttccattattaacagattactttataccaaactgattttttaaaatccagatcaaagatatgaaatagactgtgtcatgaggctatgcaaactcagatactcaaa

SEQ ID NO: 108964 - DNA, 269 bp, Glycine max
gtcctgcactaactctggacttgttatgttgtcagttatcatgacaactgatgctcgtgaatccactcacttgaaccaaaatggatattagtaagacttaccttaacatttgagtgagtacaacccatctaattgtaaccttgaggtcgtgtggcttatctagttaaccattaacccacattagctcatagagagtgaatctgtctttgagcaatagaaatattatacattgtgaattaatgccatttaataacattaccctaacttac

SEQ ID NO: 108965 - DNA, 255 bp, Glycine max
attccgggttcgtaacccgtccccaacataactcggccatcttactgctgatcggacggcagcttgccgagaagagtccggagaatgtccactcaaacggaagctttgtcttcgtcctagctagagggtaccaagctccctgtcaaccaaccttctcattacttggggtgtgaggcactctatgtggtcacgccccacaaagtgaggggtattcaattgaagactgccgggagcattgttggaacacttcctact

SEQ ID NO: 108966 - DNA, 317 bp, Glycine max
catttataatgccccttcattattaatttttcgacgttaacttcaattcaacaactattcttccaggtacaatctacgatatgattactttttacttcaagatacgactacgagccaaaacttttatcgccatcaattagacccacccttcttatttaacttcgactattatgattataaatacccgcaatagttaagtccctttactacttatcgaatagagaaacaaatgacctattcgtgcctgcttcgtagacatctctttactctattttctctccgacaaactacacaacgacacattatacttccttcct

SEQ ID NO: 108967 - DNA, 223 bp, Glycine max
  unsure (1)..(223): unsure at all n locations
attgggggtagaacctgggacgtaggggggctatgcccaaaccaacttgacatccgaccacccggcatattngtcagtgagaacctgtgatgtacctaaacaggcgagctcctggcagtcaacagataaaaggaacacagaccacaaagccaggatgctcgtggtggctggccaactgcgaatttcgtgtgatatgtggattatggcccctggtaatcgatta

SEQ ID NO: 108968 - DNA, 159 bp, Glycine max
atgaattacgagatttcaagaaaacatggatagaaacaaagagggaacacaaattcccactttcttcttaagttctggttactcatcttcctctaaattctttccaatacaactcctagaagaaaagaaaccggatagagaggaagaattttgatcact

SEQ ID NO: 108969 - DNA, 422 bp, Glycine max
  unsure (1)..(422): unsure at all n locations
ggcaatgctgccttntctccgggatcaccttttccctttccaatgcctacagcagcagggcccactgcacctgctagttctgcaactactcaatctcgagcaccttcagcatctagtgcatctcaatccactatcacagtagatttacctgcagcaaaagtagaagctgctccaactactaatgttaaagatgaagtcgaactaaagaatgaacccaaaaaaattggtaacttaaacttagaatctctgcttagcaatcctatntctttcttgttagatgagacttactacttgtgaaatttattaatgatgacgtaatgtgttctgttcgttaagagatgtatgtggtttcaggttaattaaatcaatattattaattaaataattaataacacttattaattcatctcctctattaaata

SEQ ID NO: 108970 - DNA, 432 bp, Glycine max
  unsure (1)..(432): unsure at all n locations
ctcgcacgaacaaactntggtccacttgcatataagtcctagtgtcttccatatncttatgctcaaaacccgtaacaagaaagttcactgcaagctcgaaccaattgactattcgaagttgagctaagaacaacgtagatccataagtatagttcacttattggacacatttatacgatattaaatatattacctggtagttaactacacctcgcgaccgagagataaaanaaataatataaaaaggtacaagtcaacaactagaatatataaagcttcaaactcgagactaataaacagaaagacatagtatagaaagatacaagtaaactcggtagccaataaatggttacatctttttctagtaattagagcagcttctactatgcctcatctgtaaagagtaaagtaattaattatgtacgaattata

SEQ ID NO: 108971 - DNA, 453 bp, Glycine max
gcaccgccgctgcagctgagtagtaatcttcacatctcttctttattgggttttctgggcgcatgatgaactaatgctaaatatgctaaattattttaattgaagtctttgtttggttggtacggaaaatgatatgcacgtgctttgggattatatttattttccatgagaaatgaagccattgatactttgattctctgcacatatcaatgtatattagataatgattacaacattgctattatttgcaggttcttcccagacaaagccacaattcttgctgttgatattcttaacgaacttgttgaggtaaattttactgtgatctcaattttgtaggtcagtcagcatgacttctagttagttgaatacctcctttaacttcttaattaattctgaagtggtctacatttctatgatcttgattaagattgctacaaaatgagtgtggat

SEQ ID NO: 108972 - DNA, 390 bp, Glycine max
  unsure (1)..(390): unsure at all n locations
agaatgacgactgacggacaatacaaaatacagaatgatagagtggataaatattccaaaacttgtaacttaatacaactttttgtattgtgtctaacaaaagtaaaaatacaatattattcattattttgtacctttcattatctcacacttgttagttataacatatgataaattattattagtttaattatgtatttcgttaatctattttgattctttaatctatatatgatcttatacgattagttaaaatatatancataattaataattgtaattttctatacaatagtataaaaatgcttaaatatatcacagctaataatataatgttataacatgatataatctgtaatataaatattataagttaaatctattattatt

SEQ ID NO: 108973 - DNA, 331 bp, Glycine max
  unsure (1)..(331): unsure at all n locations
tactccgcctagtgctngatcactacgcgtggctccatactcattggtggactttgcatgaacgacaatcaatccatgcggctccgaataaaagtggagaatgcggaatcgcactangcaatcactacgcgtggctccagactcattggtggacgttgcctgaaccacaatcaattcatggcgctccgaataatagtggagaatggagaattgtcctatgcaatcacttcgcgtggctccagactcattggtggaggatgcatgaacgacaatcacctcatggtgctccgaataaaagcggagaatggacaatagcactatgcaatcacta

SEQ ID NO: 108974 - DNA, 343 bp, Glycine max
  unsure (1)..(343): unsure at all n locations
gctggaggcacgttacatctgacttgacttggaaatgggcacttgcagtcgacaaggacggtgcgaacgacattgtctgtgaataatatggcattagcaaggagaaatggactcatttatgtcagactcgcagagacccctcgtgagaggtatgtactttgtcattctagttgtcttccacaaccaaatcacttcttataattgattgtaataatcattttcattaatgttatactcttgcacgatgtacggaaaaaggcatatgcctcccagaagcaatacactgcccnccacctattgtctcgtgggggttatgaatatttataagaaaagctcatggctg

SEQ ID NO: 108975 - DNA, 457 bp, Glycine max
  unsure (1)..(457): unsure at all n locations
tgtaggattatggggtacccatcacatgtggtactaggtggcggtctggcgatggtgcacaacaagtttccacatccacaaagcgtgcataaacccaccatnccctgttgcccacctccaactgagctcacgtacnttcacgtagcccatatcctcgtttctctcaacaccgggtccccatcaatcctcccaagcttcctcaacatccaagtaattcaacaatcaaacaacacaaaccatcacagccaagaaaacatggcaaaggcagaaaactctgcccaaaacaccaaccaaaatcacagcttctctcacttaaagaccctagtaacaattccctcgttccagttcgttaacccgtggatcgactcgaanatcttactggaagtctctagtacataaacctacattttgaccgttgggatctactnaaatacattcagaactcattctgaactac

SEQ ID NO: 108976 - DNA, 442 bp, Glycine max
  unsure (1)..(442): unsure at all n locations
cttgaagctcttggcaacccatgttcgatggagagtaattaattcctctattatggagagggtattntgatctcagtttcacatctcctgaagatataagatatgtttgaatggcaaacacctggaatttctagcctggcatattacaactgtctcaatggagccatganttttaccccaacaggattaagcaagcacatgcgcaaacatgggttcacatctaccacttactactagaataccggagaatgaaaatcctgtttgaaatagtggcagcgggtaggactcctattacnttggatgaatccactangaataaagtgtttgggaattatgcgctggagaagaagctctttcaaacactcacaaatatgaacaagagaataagtttcaatgaaaacttgtatattttgctcactcttcatntacacatatgcacctc

SEQ ID NO: 108977 - DNA, 209 bp, Glycine max
  unsure (1)..(209): unsure at all n locations
cttgacaaatccacactttgccttagattggtgtgcctgatttttgcatgacttncacgcacgggatgcagcaacgtggtcgtcgaccctatctctaaagacaaagcttcagtgtcgggtcccactaactaattctaacaacttaagtccgcggattctagtcttcctatgtaaatgccaccttctgctttcacatcccacactttttt

SEQ ID NO: 108978 - DNA, 301 bp, Glycine max
  unsure (1)..(301): unsure at all n locations
ggagcttattacttttcgttttagatcgacaagcattctttttgaaccttacttgtctatttggttattaacgaagtggtagagaaatagaaaagagacagataacgaaggttgctagctngatgacatagctttacaaaacgcgtacgtgtataacaatatattctctcgcagttaattaacacagatagaaatgtatataatgaataaaattcatcaatctttaaacaattgatggttactatcaacaacgaattactatcttggggatttttntcctaatntctcttcttatttcttc

SEQ ID NO: 108979 - DNA, 287 bp, Glycine max
  unsure (1)..(287): unsure at all n locations
cttgaacacttttgcgaacactttcaagaatgatgtaatcgattactatatcctcgcaatcgattaaaccagaaactcgaaaaacaatcatgatctcaatttgagttgtgtgattgactatgaatatatgataatcgattaactagagacatgattctctacagttatcaagaactatgtatcnattatcgcatgtgggatcgataaaccaagagttatatagacatatgattttcttatttagaactatttcctattctatatgatgatgatgatgcgcacacaat

SEQ ID NO: 108980 - DNA, 264 bp, Glycine max
  unsure (1)..(264): unsure at all n locations
tacaccttaccctaatattttataagaataaaatcatataattaaaacatttctaacatnttaaatacagccttccaatgggtcaaacgactcacattcacttttcttctacctcatattcaaactcgtccaaataaataataaagtcatctctggtcacagaaggtcatctaagtttcatacaattaatatagaacctatactctaattgtacatcttatcatagcgtgctgttcccgtgttctctaacatgaagttcttcat

SEQ ID NO: 108981 - DNA, 431 bp, Glycine max
  unsure (1)..(431): unsure at all n locations
ctaggggtttttcgacccacgacaatgtgggttctgtggcgttcgagcgacaacaatatgggtattcccgccaccgatggggttctgtgggttccagcgactacaatgtgggttttcctgcagtgtacgggggtctgtgggttccaccaatgacaatgtgngtgtcgacggagccgttatctacagatcttcggccgtaggagaaagaaacaacaatttcatgcacgaggatgacacacagaagaagtaacgcaacgttgtctaacacaccgtggctctgaaatctctatttnttttaagctatcaacacaataacatcggtttttatgattaccgatgtaactaaaatactaacatcggtttgtaacaacgatataacatcaatgcttactctatttttaacaaccgatgttaaataacccttacatcgt

SEQ ID NO: 108982 - DNA, 380 bp, Glycine max
acactccagacatcttctcaaagatcccaacggtcagatcatggaaaagtgttttgtgaagttgcagaccaaatttcgagaagatccaacggttaatgaaggctggacaagcgttttaccgaggcagcttcatgtagctttctctagaagcttcctcgtggcttctttgagaagctttctcaaaaagcttctttgagaagctttctcaagaggcttctttgacaagctagatccttatctatccacccctctattacactaaataactttcttacaaataattacggatgaaaataacgcaacatataatccaacaccaaacataattactaataatatatagatatatatatatcagggtgttacaattcaagtcaata

SEQ ID NO: 108983 - DNA, 328 bp, Glycine max
  unsure (1)..(328): unsure at all n locations
cactggtattgtgtctactaatcatgggtatcattctttctctgtcactganggtgccacttgagctaccaaatctcttcacctttgggtgtattctttgaaagatccgtacccctttttgcacatgttctgtagttgcatcctattttgaaccatatcaaaattgtactaatactgcctaacgaaggcaaccattatgtccttctcagaatggactctggaaggtccaagttagcgtaccangtaacagctaccccagtaagactttcttggaagaaatgtatcaacagttcctcatcttttgcgtatgcccccatctttcacaaca

SEQ ID NO: 108984 - DNA, 430 bp, Glycine max
  unsure (1)..(430): unsure at all n locations
tgcagctaacngagtctgccttcttatctgcatcttatatatacttataaacagtttccaacatttccaatgaatacaagaatcttcatgacttctctaaactaaacttagaagccggttctctatagaggaagcatctacataataatataatcatcgtttcatgtcaacatctaaaaaaaacagccaattgatattagctggctatttcagtatccaccagctaataaatagagaaatcgtttcttcatttatattattgacagctgacaatgaagcaaagatctgctgaaataatagaataaaagccaaaataatgcatataaaatatgttgtgatagttcatcgtgttcaattctcattgagatgtgctacaagtaagtatgtcggataatatcatgaccagaacaacaaacttatttatgtctat

SEQ ID NO: 108985 - DNA, 312 bp, Glycine max
  unsure (1)..(312): unsure at all n locations
gtaaatagatctcgngattaagtaatggatgttaccttgggttgccatctcctacttaagcatctcaaaactgtattgataacatcatcattnggaaatatgtttcccaaagatgcaagatgattaattatgtgtgtgaacatctcttgcatggcttgaatgctttcacttggattcattctaaataattcatatccatgagtcaatgttgttatcctagaccttttacatttgtgtgaccctcatgtgttactggaggggtatccacatattttttgcactttacaatttgataccctaagtactcatcca

SEQ ID NO: 108986 - DNA, 373 bp, Glycine max
  unsure (1)..(373): unsure at all n locations
ctgatgatactgacgcatagttcattactttcactcgatacagaattacttgatccttgattatttaatatattatgatgcatcttcgacgggccatgaatattntatctatcatgctagcagtcgtgctgcattcaatacattcatgttcatattttaaggattattgaggctcagtatcgatgattaaatatctactgtcaatctatcatcattttcaattcggcgcataataattcttcataatcatactctaatctatcacatgtgtgacgccagaagaaaaactacaacatctttcaatatatgtttatattaacaacgtatttcgacaaaaatccttactcatgaccacttaattatatgtcatgcc

SEQ ID NO: 108987 - DNA, 412 bp, Glycine max
  unsure (1)..(412): unsure at all n locations
acagactgantattataatacttacatgggctttgtacacgtgtgctgacatgagtcatgtatgatggaataagctctgcaagaccaaaatcacaaatcttgngtgtaatgttttggtcaacgagaatatcgcttgcttttatatctctgtgaacaatatgtggtattacttcttcatgaagataagcaagtccacgtgcaatcccaatgcagatcctagatcgtgttttccaatcaaaaacgatattactgtgacctgaacctgcaagtgaagagaaaataacttattcaanaagaataaccggtacgaaattaaattaatataacaactccatattttctacatgatacaatagatgtcttctcaaactttcccagacaaataactcacaacattataatgcatttacct

SEQ ID NO: 108988 - DNA, 296 bp, Glycine max
  unsure (1)..(296): unsure at all n locations
tgccattcatanataatattccggctaacaaatctgtactgtctcttgcacaataagagaaataggtagaaatgtgcaacaacatttgttgtattaaagaagattatgagaaataatactatatcaagtgtgttacctataatatacctcaaatgctagcatacaacatgttattctaagccctagatgcaatggcctaatataactagtattaaaatgctattcttccttctaagtcataataactgttatagctgtaattgttgaatgtttattcaaatggtagctgataatcc

SEQ ID NO: 108989 - DNA, 356 bp, Glycine max
  unsure (1)..(356): unsure at all n locations
cacctgcggcatgcaagctgncggannnnnctatgtcttacattctttaacaaacacgcgccttcataaatggtcttgtgctggcgaccacgatcaacaaagtactttctgcacctgctatattgttgacctgactaacgctggtttgggtatgctgagacaatccttcaacaccttattcacacattctgagaggttggttgtcatgtgaccatatcttcgttcagatgtatcataagccatgctccattgttgctttgaaatgcgatcaatccatgttgctatggctggactcaattgatgaaattttcctaagctttgatcaaacacatgcttgcaacgagtgtatgctgcat

SEQ ID NO: 108990 - DNA, 112 bp, Glycine max
cgacaaatcctgaaagaatgtcttgtgagacaatctctgccaaatgaacctcagacacaaagtactatatgaagatttaaacgccatttttgatattgtgtcagatcatgac

SEQ ID NO: 108991 - DNA, 424 bp, Glycine max
  unsure (1)..(424): unsure at all n locations
agttgacaggttgatgtctactgaaacaacagaaaagtactagagcataacacaggcgtattttgataatgttgagttattagtaaggccacaaaagagatacgtcaagataattcttataggaatgtccaagccaagaggacaatgccttgatgcaccatagaagtaatgcataaaagaagaccaaagagggattaaatgaatgaccagagcctcaacgataaatcgatagagcataatatcatcattcacaatattacactgtaatattaatggtgtcaaaaggaccatcancatcacgtgattatctatcacactccagaacataaataagcaactatactatctttaagtggttcaatttgcctgtgcacatgaactagtgttacttcttgactaacagtatccagaggtcacatgatat

SEQ ID NO: 108992 - DNA, 312 bp, Glycine max
  unsure (1)..(312): unsure at all n locations
acataatctcgcatagctcataggccttatatgttattgaacgaattatgatatgctcttttctcacaggttgtaagactgcatgctttgcataatctacatatactcaaacatctatntaattaatatttgattctgttatgaatttttagagttttacaatgtgatgtatttatattttacttaagggccatgtacggttctaagatgatgttatttgtcttgattgaacaatgacttccttccatttagatgtctcctctcacaaaattactcttctctatttgagctaatatcttatatcttgtttca

SEQ ID NO: 108993 - DNA, 329 bp, Glycine max
  unsure (1)..(329): unsure at all n locations
atttntgattaacttctatttattatnngcttctctcatcttttctgggttaattaattaattaccttttatgtttggttttctttcgctggttatttaattcaatttatgccaatttctttcactgttttcttcacaatactttaaaccattntaattattgcttgaacaattatatattcacctacttaagtccaaacaaagtctctgagaattctacattcggaatttcattntaactctattacttgggaaaatttggtacactcgctgatcgttcaactatgatgataacgttatatttcacataaactgtggtctaatacatc

SEQ ID NO: 108994 - DNA, 134 bp, Glycine max
aggcgaaataaaaaaaccaaaattaacaacaaactgtaacaaaagtatgcttgcaaaaaactaaccagtaaactctgccatatgggtgactcataaactaagtgagcgtagaacctgatagcgtctgctcagac

SEQ ID NO: 108995 - DNA, 326 bp, Glycine max
aacagcaccacttcttttacctcacacacaatttacaaggaacgcgactggtcctctgactgggttttaaatccatgaactgtcgagggcgcttccactacactgacaactgaggtgctgcagcctatgcctgccactcctgcaacccaagtgcaggtgctgaagtcgctggtcaaactagcgcttccatgcacctttggacgcgtcaataggagctgcgatatgcagtcctttgtcgccagtcgcagtggcgacatgccacgtagctcgtccctgtcgaaagcgccatcaacactggcgccatgcatggctggtacgtaaaaaac

SEQ ID NO: 108996 - DNA, 241 bp, Glycine max
  unsure (1)..(241): unsure at all n locations
attatatctaatcatctgaatcacactggtgtctataattaggttcanactagaatgtcgtagcatctagctgcattacagttgactcataacactgatttgggtctgtaatttctcaattctaattatttccctttgaacaaccaaagatgtattgtattgatcagggttagtgacttgagaacaatctattttcttattttaagaagcatcaaagtttgcatctctcctgattgaatct

SEQ ID NO: 108997 - DNA, 332 bp, Glycine max
  unsure (1)..(332): unsure at all n locations
attagagtttatctctnttatcttagtgagagtgattctcctaagttcttgagtaattcaagaacaccctggctatatcaaaggtctttcacatcctctgtgtgttgccctcgccggaaagagtgcttctttccttccaccatttcatcttcaaccttgttctttcaaaccacaattccagaaaattcaattctgccagaattatctcgtgaccataactctcngtttactcattcaaattaagtgattcttgatcctaaattgaaattcaagacgagagctntcacctcatttnggaatcacctcatctggagccctgtatctttgagtat

SEQ ID NO: 108998 - DNA, 424 bp, Glycine max
cttatacaagaatgaagctctgatacgacttgttggacaagtggcctcaaatatcttatgatagggggggggggttgaattaatatattacaaactatttccccaattaaaattctactctgatctcaatgcaagttccgagttcccttaaagatgagactctaaataatgattcacattaaacaatctaagtataaatgtaaaacaacagctaatacaagagtttaagggaagagaaagtgcacactcaaatttatactggttcggccacaccctcgtgcgtacgtccagtctccaagcaacccgcttgagagttccactatcttgtatattactcttacaagttctgaaccatacaagaacaacctttcctttgtgttagaatttttacatcagagacctcggctctaatcctcttgaaata

SEQ ID NO: 108999 - DNA, 221 bp, Glycine max
  unsure (1)..(221): unsure at all n locations
agcttgtctancgtctatgcgagacataaactttcatgttagctatcatcgccaataccaagaagaggtgggtctagccacggcccacgagcatataatcgcggatgagtatgcccaagtatatgcggaacaaaacgctagaggaagggtgatcgactctttacaccaagaggccaccatgtggatggatcggtttggtcttacctcgaacgggagtaaag

SEQ ID NO: 109000 - DNA, 355 bp, Glycine max
  unsure (1)..(355): unsure at all n locations
gcgctagcgcaatttgggttctggtgtggaattgggcatatcgagcctgctcactaagccaattctatagataattcttatttgtgtcaactcgctatgcgtgtggctgtcgcgctaagtgctctgagtaattttcataaggcgcactaagcgcaattttcgcgctcagcgcccaatcagaattncagtattaattttcagcttgtcatttcaaataaaacttgttctaacttggcttttgtggttcttttgtgcatatggcttctatgaaaaggaaagtcgcagcttccangccccagcctcactatgatactcacagattcacctctaaggacgcctggaactgctacactga

SEQ ID NO: 109001 - DNA, 389 bp, Glycine max
agagaatccctatgggtctataggtacgaagaatcacgagcgctaagatttctacccacagaagaagatgataggagaatgtactagcattcagcacttatcctctgctgtatgagaagtgactttgtcatattgcttttcgatcgagttgtgcttcttattgtggaaaatgtttgttatgaacactgtattttgcatagtgaaacagcgaatgctttagagccaggtggagtgaatggttctcctaagaatcaagcgactaacaacgaaacagtataattgaggaatcttctgatgatgtgttcacaatctgttatggcaatgacaaagagctgccgtgaattgctaagcagatttgcagcactcttcttcctttgggatgcattcaa

SEQ ID NO: 109002 - DNA, 137 bp, Glycine max
ctcagcttgatggcatgatccctcacatctcagggatcacattcttctgcctgataagcaataactaccaatgttcggatgaatattggctctctaagaaaaattgttgagtctcagatatctgcagcaatgccacc

SEQ ID NO: 109003 - DNA, 322 bp, Glycine max
  unsure (1)..(322): unsure at all n locations
gtgcaagctgtaatcgaatacacatatactgttatctattaccagagcagatnttcagaaaatattctcaacagtcacatctctttatgtggttcttaaatggctatcanatgcctatatatatgtgactggagacacaaaattgcttagagtntttcagaacaaaaaagtcttattctcttataaagcaagattgtgtcatcctcttacacattccttgtccaaattactcgtgattcaataaggaattcttgagtgctcacattgtacaatctattctctttcaagagagatatcttcttttcttcttcctcactctgaa

SEQ ID NO: 109004 - DNA, 224 bp, Glycine max
  unsure (1)..(224): unsure at all n locations
tcatgtgtccttcaccttcgagtttggagccccgcgaatgtcattgtctagcactgttcgccaattctccattctccacttttattcngagccccatgaatgacattgcctagcgctgttcatgtgttctccaccgtcgagtctggaggcccgcgaatgtcattgcgtagcgctggtcgccaattctccattcttcactctcattcggagccgcatgaatgtca

SEQ ID NO: 109005 - DNA, 361 bp, Glycine max
gactgttgacatttgtggtaacttaccataccatatacattttatattattaagactgataccatcatatccaagatgtgttctaatgtcattcaatgattgtcgttgccattcaacatttacacatggacacaaatatactcccccattttggtcattttgtgggcaaattgaagaattttcaccctatttcatactatactttcatcacttcatccatcttggtgactatcacacagagagatatccatatgcatgacaacctattttttcataaaagggtgaccctcccattcagaagaaaattttacttgattacacaacaagtaagaggtatgttatattgacaattcacacattt

SEQ ID NO: 109006 - DNA, 324 bp, Glycine max
  unsure (1)..(324): unsure at all n locations
tactatggttaatgaaattggatatagcttcctgagtcacaacaatcaatggttcagcctccacccattttagatgaaactatatcttttagatgaaactagantaatcttgtcgataacatccatagcctaccccctaaatggccaaggcttgaccactacatgcatttcttcgactggagtggtttgtaaagggccaaatctttgacattcttcacatcttttagcataacgatagcaagcagatgtaatcattggccaatagtattcatgcctaattatcaaccatttcattgtcagtccagtcctgtgagcaccacacaa

SEQ ID NO: 109007 - DNA, 392 bp, Glycine max
  unsure (1)..(392): unsure at all n locations
gattaattataagcattctgaatcatattggctcaatcatcaaacagagtgcaagaggactctctntagtattattaagtatcatcccctattgtgtcatttctttgaaagacttgcatacaacangggtggtgatgaaagaaatgttacaggttagtgccatttcctcatctctgtacaagttttcctctgtgccattctactaatcattaattgatgtagtagtacctagaatgaattctgtgctctatgttaattgctaagagaagaatatctatatctaactaatctatatatggacaattgttgagcaaaatgaaattttctgaagctntgatcaaaacattagcaaataacacaggaattcttacattatctcaaattctcaatca

SEQ ID NO: 109008 - DNA, 256 bp, Glycine max
  unsure (1)..(256): unsure at all n locations
tattcacttatacatgttctctcaacaatgctttcattttgaacttaattcaggctaacattagttccgtatgttcaatactcggattcttctgtttgagatttatatacttcacgatctggtgcgctcnntcggtaacacccattggaaattccttgagacatannatgaacaaaagtaactgccataggtaacaagcaaggagacatcnccactactgtaattcttcaatctttcactttctcttctctttgtg

SEQ ID NO: 109009 - DNA, 305 bp, Glycine max
  unsure (1)..(305): unsure at all n locations
gcctcgctggaaagagtgattctttccttcctatcatctncaccctttgttctttcanaccacaattccagaagatccaccctctgccaaaattatctcgtgaccataactcccatttcacacactcaaattaagtgattcttgatcctaaattgaatttcacaacgagatctttcacctcgttttggaatcacctcatttggagccctgtagcttccgttattgccatttctatatttctgtccagccaccacttaacctacgttgtaccatctcattcattccatttatgccagagaccacct

SEQ ID NO: 109010 - DNA, 246 bp, Glycine max
cggataagcctctctaacgcgggggtcaactcactcttctctaaattcttctcccctcaccctaaaatgggcgctcaaaatggctgctagctgcagattggtttctagcaatcaaataacacttcacaactgctaataactgaattgatgaatgatattaataccaatggatactaatttataccatattacaaaagattcacctcaaatacctaaggagagtaaacattacaaatctccaaagta

SEQ ID NO: 109011 - DNA, 167 bp, Glycine max
ttaatattattttgctgaattcaattcttcactagactttactacataaatagtgtgacagatattaatttacttttgaggttgaaaatttaatactagtattgatcttatctaaatagaattatgataaaacagtaatattattatctcttcccttgcatataata

SEQ ID NO: 109012 - DNA, 424 bp, Glycine max
  unsure (1)..(424): unsure at all n locations
gcaagctntacgcacatntggagaggtaacgatgtttctatatgatgtgctccatgagacggtggatcaaatggagaacagagatcataatgaagaagaaaggaggagaagatggaatgatggtgttcctagacaaaactgaattgatggtattaaactcaacattcctccctttaaaagaaagaatgatccgcacgcctacttggagtgggagatgataatagagcatgttttctcatgcaacaactatgaggaggaacaaaaggtgaagcttgccgccacggagttttccgactatgctcttgtgtggtggaacaagctgttaaaggagagagcaagacatgaatagcccatggttgatacatgggcggagatgaataagatcatgaagaagatgtgtgtgctggcttgtcactcatgggac

SEQ ID NO: 109013 - DNA, 443 bp, Glycine max
  unsure (1)..(443): unsure at all n locations
ctaagcttctctctgtacttnctaattggatctttgaaactntgacttgttngctatatatcaacttgatctctccattgtatactgtataggctatngctctctgacaaataactaattattactatgagaatgcaagaatggaattcgcaatatatatttacaatgtgaatataagcatgataactttactttctgtctttgattctcccctagagctgaaacatagaaattcgatgttgagaagatagctatcacagtttctcttgaatcatgactatctatgaataattagatgacctttatntattttgataaaatactaatcaaatatttaaagtgatattcaacacngaacaatcagatgatttcataanggtattcaacaatatcaaccaaccccttccaagcgcaacacantgttatacccaataataaatgat

SEQ ID NO: 109014 - DNA, 335 bp, Glycine max
  unsure (1)..(335): unsure at all n locations
ctgcagctgtcaaaaaccagcctgtctntatttggctccttccccaaaaatgaaccctgccaagtactataatgggtgctcaaaaccacttgttgatgatttaccacattgttttcatagaaaatctttaggatatgattgccttgattaaccattcatgttcaagataagcctattaaacaatatacctgagtggtcagcatggattgttgagatgctagtacatcattttgcataggttctatatttaaattgctgccactatgttgttgaagtggtggattttacttttgttgttgcactgacacaaaattttacacatatatgtaagagat

SEQ ID NO: 109015 - DNA, 332 bp, Glycine max
actttgtaagagctatgactgcttacttctatagcaatgggcaatttgcatctttttccaagcatcaaaggactctgctatttcatttgtcatgaattagaatataagctgatgccgccagtttctgatagatgtattgatcacaacatctctctcatatattgaacagactcactggtattgccatgtactcaaagaccaatgttattctttgtagtatccaccattatgctcagctattccgtgcatttatgtcatctgactggagatatacgagtaaagtgttctgggactctgactcttgtcaaaagccacgtcatcatggtttctgc

SEQ ID NO: 109016 - DNA, 319 bp, Glycine max
  unsure (1)..(319): unsure at all n locations
ttttctacgagagtgtccctcactctgaggatcaagacaccctggctgtctcaagtgactntcacaaccttggtgtgttcgcctcgctggaaagagtgatactttccttccaatcatctttacctctgtttctttcaaccacaataccatataatccagctgtgtccacaattatctctgtgacgtaacttctattttacgcactctaattatgtgattcttgagcgttgattgaatgttaaaacgagaactttcacctctattggaatcgcctcattcggagccctgtactctcagtagtggcatttctatatttctg

SEQ ID NO: 109017 - DNA, 481 bp, Glycine max
  unsure (1)..(481): unsure at all n locations
cttgaactagcttgtccccccctctatatgtttacagcgcattttatttcatntcattaaggctcatgttgttaataacttacactaaacattcaattaagtatagttaatttgattaattcttctaatgttgaaagaatgttaaggacttagttttagttgatgcatgtatatatatgacggcaactatgttcaaacaaactacgcatgcacgcgcgcatttgtctaataaaaaaggttgtaaaacatacttcttcagatttttcttaaanaaattaacaattaacaataaagaattgtcgataaaaagaaaaactaacaatgttaggaataatatactttcgagaaagatactaatacaataaggtaattctcttaagaacttggattcaaattatgaaagaagttgagctcttcaacattgactcagccatcacactaggtagtcatcatgtggtactctgtttgtattctatgagaa

SEQ ID NO: 109018 - DNA, 360 bp, Glycine max
  unsure (1)..(360): unsure at all n locations
agctatacattgtcatcagtatcaaccaccgggtttcncgtttgtgtatggcttttgacgagctacagacaaaaatgcattcgtcattgattagcccggctagttgtcgcttttgccgtgactgctcttaccaccttatttacctgcttcagatgcgcgctgcgggtcattcttgaaattacccccgctgtgctgtccaccttttttacctgcttctgatgctctttcgcggtcttctgcaaaattgccggaaccgcctcgatggtttgccattactgacctncgtctgggtatagacatcatattgcatagaattaacgcggcgtatggcggctgccatattttcgctacgtgggacta

SEQ ID NO: 109019 - DNA, 360 bp, Glycine max
  unsure (1)..(360): unsure at all n locations
ctagtcncacgtagcgaanatatggcagccgccatccgccgcgtttattctatgcaatatgatgtctatacccagaccgaggtcagtaatggcaaaccatcgaggcgcgttccgcaatttngcagaagaccgcgaaagagcatcataagcatgtaaaaaaggtggacagcacagcgggggtaatttcaagaatgacccgcagcgcgcatctgaagcatgtaaaaaaggtggtaagagcagtcacggcaaaagcgacaactagccgggctaatcaatgacgaaatgcattttgtctgtagctcgtcaaaaagccatcaccgccggttacccgcgtggtgatactgatgacacatggtagct

SEQ ID NO: 109020 - DNA, 297 bp, Glycine max
gctcacattaatcatttgattctcatgaagaacctctccatatttgtaatgatatctcccgctatagatcttctaaagttaattcaacaatggaatcagctagcgcatgtgcattaaaaaagacttgatgctctgaaacctctattgcccacaaaccatccttctccccaaatcaagtcggtgaagaatttgtcgaatggactaatcaattcacaccattatccggtgtgattggaaatatattctactgcgtcttgttgcattactaaagcataaataccttctctaatgatcttt

SEQ ID NO: 109021 - DNA, 307 bp, Glycine max
  unsure (1)..(307): unsure at all n locations
tatgcacttggagtgtataagaaaaggaaccagtgctcaaagactttctcattggacacactaatctttaaacataggccaaccataaggaaggtctatcccctagtgccaccatctagagaagcagggaagcaaaaccttttgagatgcccttctccactacattggagctccaacagcttctntggttgatgtacttaatgaatctagttcttccttgggacataaccaagatngaagaaaattttcagccaaaggacatcactttgaaggatcttgaatatagttaaaatgttcttagaatggg

SEQ ID NO: 109022 - DNA, 361 bp, Glycine max
  unsure (1)..(361): unsure at all n locations
ttgagttgtctcacaagactctcattcatcaaagttacaacaagtgttacacatgctnctatttatagactaagtagcgtccttgagaagctctcttaagaaaactttctttagagacttctttgagaaaactncatttctcttaagaaaactcccatggaagtatgagatttaatgtagcctcttgggctctctttctttttttctatggagtgaggctagatgtaccttccttcctcctaagtcacaattcttcctagctttgcagagtatactctatcgacgatgtnttcctttcattcttcatatattctctccttctcctatttcttcttctctgcgattctccaccttgattctt

SEQ ID NO: 109023 - DNA, 288 bp, Glycine max
atcctctatagttttctggagttgtaacatgacctccgagatggaagccatttgatcttttaaggccgatagatcggactttatatgttcctgcacgccctcttcattatccatttttctggatcgagtgttataggggtgccttggtgttttcttacttatgatgaaattcctaaagaaataaacaaaggtgagtatgccaccaaaacatgaatatgcaaatgaatgatcggagcacttcgatccacccacaggttttaggtaacgtgataagttcagaacttctca

SEQ ID NO: 109024 - DNA, 445 bp, Glycine max
  unsure (1)..(445): unsure at all n locations
agtcacctgcggcatgcagctngcttctacacaaagtctctcaggctcgcttatctctgttgttctctaagcgagagggtcaaatattgcttaacggagtgtaacatcaatcacactcacattttccaaagattctcaaagcatatcctgcgatttctctctcgcccaaatttgtgcaacctgcattcttgctttctttttgcatcttctacgcatctacaacacacaacaatccaagtaagttcctcattcctctttctttcttctttatattcgtgaaccttaggttagacaaccatagatttacattttgattgctatggtttgaagctcttagattagcgcaagatacgattcttgaatgaagtgctgtgagatagtataccggttgcatgttgaatgccttacaagctcaaaatggaaaatacaatgtgtttttgatttt

SEQ ID NO: 109025 - DNA, 362 bp, Glycine max
tggatcttcttcatcaattccctctgcttctcgattatcaatggcagaggaatgttgatcgatgaaaggtgattggagatgccacttctactataagatgagtcaagaacttaaaggtagaagaagatgagtggacggaaatggagagaacgcgcacaaaatttatgcctcatatgatgtctgaactctgaagtgtaatctctaaaatgatcaacgcttgaaaaatgcacacacaacgcctctatttaatcctaagtgtcacacaccactggagggaaattagaattcaattcaaatttccttgaatctaatttgaatggggagcccattagagccaaatttcctaattatgattactgatt

SEQ ID NO: 109026 - DNA, 429 bp, Glycine max
tcgtcttcttctttattccagtcttcttctggcttcaatccatcagtgggctttccttctgtgtccagcatcttgggatgttcccagcctttgatgacagctttccaggttctgctatccagtgatttgaggaaggccaccatccttgctttccagtattcatagttggttccatccagaataggtggtctgttcactggtcctccttctttctccatgttcatcagaatttatctccctagatctcactcagtgatttcgagtgcctgctctaataccaattgaaattctgataccaatgccagatgtcgtaccggatgtcacgacatcacgcttcagaacatgcagattatatttgagagtatgaacagactaaacaagttaataacacaagagaattggttacccagttcggtgcaacgtcaccta

SEQ ID NO: 109027 - DNA, 397 bp, Glycine max
  unsure (1)..(397): unsure at all n locations
attattatatatatatataataaataaaaaatattttgagccctgtgaagaaaaagatcattgtanacaggtgtagcatttggtgctagagaaatgaatatttggactcaccangttcactagagcagacttggctttaactttttcagacagcttcaaattaattccatntttcattatcaaatggatatgaagcacatgatcaaatctttcacagtttttattatagtacagagattagcttcacatgaatggatgttctttctaatataaccaatgatntttattagatatatgtttcacaagtttaattaanaaaatcaacatgtcattatntattagaagaatctgatgacaaaattgtgagaaacttatnctgatttttntcgttttctta

SEQ ID NO: 109028 - DNA, 393 bp, Glycine max
agctctataagcgcgggtctggaagacaaatgttatgtgttctcgatatgcgaagatgatgttccgagtactttggatttggtacaaccatgccctactgatttccggctgggaaattggcgagaggaataactccccggcttttacacaacgagcatattgcaaacctttacaggcttaaaagctctatagttgggcctacgacttatagtttatccttttgttaaggctttgtggcctttgtttttgaatttataaaacaaggatctatcttaatatgttcctgggctatacccaggctcattcatttgcatgttacttcttttttgaaacagcagatccgatgactactctcccgtagggaataattcctggacccgcctatctcttcca

SEQ ID NO: 109029 - DNA, 451 bp, Glycine max
  unsure (1)..(451): unsure at all n locations
gatcgctaagcgacagctaattcttggctcagcgtgttctattgtcaccaagcgcaatnccttaccgccataactgaggtgcatgaagcgtagcaccagtcatggcagctgtcataccctaatttcgtcgggaaccttgctcgatgacgtgcgacattctttggcctctgaggtgctcacacccatcattcgcaattggtgacattcacgacatgccgaaaaccaaaaaatattgatgccaatccgctagttccgtgaccaccggaatcaaatgaacatcgtgcctaattagtaagcgtcgaacattccgagtcaaaacggatgatatgaatctgcaagccgcacatacgaagaaacagttcctccaatctcagttccgtacttacacaagatcacaaaaacaccgggggactggaaaagggggcaaacacagccactggctcaaaatctc

SEQ ID NO: 109030 - DNA, 238 bp, Glycine max
aagcggcaagttgtacaattgtaagtcaaagattggcggaagaagtgataaacccctcagtggaataagtcatattccactggaacatgattaataagtggtgaagttggtaatgattgtactgctaagaggacggacaatcaaaacatcaacttctcctacagtcaataatatggctattcttgagatatggggagcattggtgtgatatataaaaagtggtgtgatatgaaggaat

SEQ ID NO: 109031 - DNA, 466 bp, Glycine max
  unsure (1)..(466): unsure at all n locations
agctggtgagagtgtcttgtatatagaacaatattatatagttgngcagatctaaaagagagaatttcttataacaatgcgccaataattnttcaaattgagagagacattgtctctctaaaccaagggaccttacctatgacagcatattgttccaacttgaagggattatgggatgaactcttatcatacaaagatttacctatttgtacgtgtggatcaagtaagaaaagtgaagaacaacgacaaagaggggaggtaatgcaatttcttgtggatttaaatgattcatatcatgctatacatgttcaaatccttctcattcagccactttccaccattgngaaaatncattctatgantttacaagaagaaaagcaatgtgactatgttatctctagcgaagtttttttggcagatacacaaaggaccaataaaggtagccactcgtcanatgaaagttaca

SEQ ID NO: 109032 - DNA, 384 bp, Glycine max
  unsure (1)..(384): unsure at all n locations
gctttgggcatattctttgaaagatctgtgccctctttttgcacatgttctgtagttgcatcctatctgaagccattatactgacactgcctaacgaaggcaaccattaggtccttccaagaatggactcgggaaggttcctagttagtgtaccangtaacagctacccagtaagactttcttggaaggaatgtatcagcaattcctcaatctttgcgtatgcccncatcttccgataatacatctttagatgggtcttggggcaagtagtccccttgtacttgtcaaagtctagcaccttgaacttgggaaaggtgatgatattgngtactangaacaactctttctagttagcanaggcataatcttcacctcttcaatggc

SEQ ID NO: 109033 - DNA, 95 bp, Glycine max
attcatccatttgtatatgattggtctggatggaattttacaaaatgggaaaaaaaacatgaacactatgacagccacctaaagacactatgaga

SEQ ID NO: 109034 - DNA, 394 bp, Glycine max
gctcctcagggaagtttctcaagaaaatctctcaatgaagctacctattctatatatagaagcatgtgtaacacttattgtaactctgatgaatgagagtcttgtgagacacaatctaaagttcaacttatctccctttttcttccatcaatattgtgctcccccctctctctttatctccctctttcttttcctccattgaagcatcctctccaagcttcttatccaaggctcatcttggtggtgaaggctcttcttccatggcttatatcctagtggatggcgcctcttctcacctcttctcctttgtcttccgctgcatctccatggtggaacatcaccactaaaggacctcattgaatctcaaagattcagccttcatagaagccccaca

SEQ ID NO: 109035 - DNA, 286 bp, Glycine max
aggcttacattaaatttccagagattgatcttctgtctactctacaccaaagaattatatgttgagtctttgtgtcaaccactcttctttgttttacaaataatcacaaatatctttttttatgagtctcaaattcgcgggctcttgttacgtacattttctgtcattgatagataaaatctattttccttttcttcaagatattcctgaagcttttgatttcaataattccctatatatatctccataactactccctgtttcagactttgaaaaactaataatt

SEQ ID NO: 109036 - DNA, 287 bp, Glycine max
ctgagcgcacaaagcattttgtgatgacagctccaatttatctttttcggaggggatatgtgtactgtcacgcaagagtgcatggtcactagcagccatattgtcaattatcatcatctgcttttcacgagtactctatctaattatacctcctacagaagcatctactaactaggttcgactgtggccttaatccatcaatgaagatgtctacatgtatacgctcagacaatccacatagtggggtcttccacagcaagctaccgaatcgctctaagccttactaa

SEQ ID NO: 109037 - DNA, 296 bp, Glycine max
  unsure (1)..(296): unsure at all n locations
tcgagcaattggtcagtctgaacagtggatcagatgtgctgctgatttcttgaactgtggaccactacaacttcctttttgctacctagggctgcttatatgtgttaatcccagaaagaaggtggtgtgggaacctattatcaataaattcgaggctagattgaacaaatggaggcagagaagtatatcaatggctggtagaatcaccctaactaatgttgtcttaacagctctgccctctgtttacatgtcttttttcagggccccttcangagtgattaacaagctcactacca

SEQ ID NO: 109038 - DNA, 244 bp, Glycine max
  unsure (1)..(244): unsure at all n locations
tgattttgttactacctaatgttgcacaatagaaatttcagagcaacagacaacttatgctctattaatcaatattatgtttattatgtttggttttntaatttttaagtgtttattgtaatgcaatggttgcaacgattaatanagagagaaatatgaagattaaattattatttggataaataaccattttcgtctctggatgtgtagagtgatgacanattcgttgctgaatgtatcacgt

SEQ ID NO: 109039 - DNA, 355 bp, Glycine max
  unsure (1)..(355): unsure at all n locations
cagtaccagtacaatacggatatggatcccgatcggaaccaccttcagtgtatgactaagcgagagcatgagtccattaggaatatgcccaaagatggagagatctcgcagcccaagtcgtatcgcccatgacgaagagggagatgatcacaattatggtagatacgttacccacgttctactatgaaaagctgataggctacatgccagttaactttgcggatctcgtcttcgccggagaaaggattgagtctggactacgaaaaggcaagttcgaatatgcttccaatgtggcccncaacaacaacagaagagccccagtagtgtgcgcgaggaaaaaggaaggagataccca

SEQ ID NO: 109040 - DNA, 363 bp, Glycine max
  unsure (1)..(363): unsure at all n locations
tactcagcttcgaagaagtgatanggtcaagctctaatgcagagcttgtatgagcctgngtagtcgaagagaagttcaagtccatagccatcanagtctganaagagtatgatgaactaatggatgtcaatatggccaccgatgaagccttggaatgagaaaccaagaaggcccganaggaagaacacgaccaaagcaaagttttgaggggctctatatggcagcaatagtgagctcaagctccgaagaggtgaaaggaatcatcacgggtcanaggcatgatcttgaaggacgagctaaaggtttgccttatgtcgaaaagaaatttgtnccaacagtttagcgagactgaanggaatatgt

SEQ ID NO: 109041 - DNA, 371 bp, Glycine max
  unsure (1)..(371): unsure at all n locations
agctganaaaaggtcatgtcgaacttagttttctttttatnaactaactattaaagagccgagtcaagctgaactaagntcggctcaactcgacttatttctagcccaagtggtagtgatagcaatgctgatagagattttggtggtgacaattatggtggtggtggtggctacaatattgtgggcgacgatggtgattataacaatgattatggtggtgatcacaatgctagtggtgttggtgataatggtggagacaatggctgtagtggtagtgatagtggtactacgcgtcgtggtggtgacagccaattatggtggtaacaacgataatggtgttgtggtgacgatgatataatagacattggttt

SEQ ID NO: 109042 - DNA, 323 bp, Glycine max
tcttaactacgcttgcacttttgatgcaccataaacaatgttttatagcatttaactggatacaataacaacactataaaaatgtcagttcaaggatgtcatatttttatggaatgactgaatcctaaaattagatttacgacaaattaaaattaatgaggataaaaaaagaaaatctcttgttagacaaaaatttgaataaaaatcaataattaaatggaatatttttttattatcacggatgctgatagatgaccacttattaacaaaaaaatgattatgacaatggtatgtagaaattacttacatattctgttatagta

SEQ ID NO: 109043 - DNA, 354 bp, Glycine max
  unsure (1)..(354): unsure at all n locations
agctttcgacgaaattggcgcacgcgcttatagttattattgatcccaatcaggttgaattctatacttcgggccgcacttccaatgaagctgcctttctttatcagctntttgcccgtgaatacgggagcaataactttcccgactgctccaacatgtgccatgaaccgacaagcgtgggtttggcagcgagtatcggtgtaggtaaagggaccgtgttgctggaagactntgagaagtgcgaattaatcatttgcattgggcataaccctggtacaaaccaccctctcatgctgacttcgttgcgcgctttagtgaaacggggagcgaaaatgatcgccatcaatcctctac

SEQ ID NO: 109044 - DNA, 359 bp, Glycine max
  unsure (1)..(359): unsure at all n locations
catcaactgcagattgaccaggtgctgtttgttctgtgtaccatgttcgtgctgagtgatccccattccgtaacagataatggtgcgatgcgccggggtatatgcgtcatccagaacagagattngtgtctgacttaatccacaaatacgttctgtatctttccactcggaattgagaacgtcacggcgtanctcgtcaaagccgaccgtgtgcgtttgaatgaactcgtcatcaagcaatgaaggccgatctgcagcgcttgagcatcatcgtgctaattaacatgcgcatcatctccttgatgtacgccatattgacaccaatgctgcacgtatagtaggcactggccgactgagtc

SEQ ID NO: 109045 - DNA, 397 bp, Glycine max
  unsure (1)..(397): unsure at all n locations
agctnggagtctccttggttttattctctgctttcttgagaganaactctnctgtcattaagataattatcatcagaaataataaatttatcatggctaataacatcgtattacataatacaattaacaatctggtcatagtgtattctaatacaatttattacgatagagctaaaaaaatatttattctaagtaaacgtagacaccatagaacaactgataaaagaggggagatagactactcctaaatatgtactagtataatatagtataagaatgtgacaaattaaattaataatattatgtggtatatcgcatatggaatattatatatcaacattcacactcaatcataaagctttcatctttattttccactntactggcaagattgcta

SEQ ID NO: 109046 - DNA, 307 bp, Glycine max
cgcgactggtctctttcttcccttcgccacttgagctcactattgctccccataaaccccgcgacattgttacggcatactcttccttgcgagccctcttggtctcttggtcaaaggctcttgcggtaattgcattctctttccgtaacccggcacactccttccgaacgtgtgtagcggccaacttgaacttctccttggcaagttttggccttcctaactcgcttttgagagcttggacttcttcgtcctctttcggtgcttcaaactctctttgctacgactcttaacttgcgagccatctaaa

SEQ ID NO: 109047 - DNA, 263 bp, Glycine max
tgagaatgacagatcttgtgagcgcgaaagatgacgtatatctccgcctgtcaactggcttgtcggccgctattgacgaaaggcgcaggacacgaccgtatgtcttgcgtgctatcaggcttatcgtcttactaacttcaaaaagagatgttatacggataaccactcgggtatttccgccagtcagcatgacttaaatgtcagtatcacagactctgtgagcgcggaagatgacgtaaatctccgcgtgtcaacgggcttgt

SEQ ID NO: 109048 - DNA, 285 bp, Glycine max
attattttatgcgcccatcaataaaagcccaccaagtaaaacatctattctgtgagcattaccacactggtgggcatgtagcacaatatagagatgggacatgggtgcccttacttaataacctagcatgcatcctacaccctatcacaaacaacacatctgagaaatctacgtttacaaccatcattaggcccaatatatggaagtaaagcaaaatagactactgtgaacaatataacaacgatcaaacaaaagggactaggtgaaatcgagtcctagcttttt

SEQ ID NO: 109049 - DNA, 135 bp, Glycine max
caaaattcaatggccttcttctgcggatgtaccctctcaacaatagactcttctggaccatatagaactctctgtataacctgtgaagatcttcatgtatacgtcacctggacatcaccgttataactcgaccca

SEQ ID NO: 109050 - DNA, 283 bp, Glycine max
  unsure (1)..(283): unsure at all n locations
gatacaaattacattaagtttatacacaaaaagttaaatcattaaaatcaccgactaacannactccctaaagtttacagttttgcttgtcctcaagcaaataaagaacagagcattggttcccaagtgacaaaaatatgcagtgattatgtacaaaggtgtatgcaacaaaagtcactaattgcatgatacaagaatgaagcanaatgctctcatcagttgtctttcacaaaatatgcagttattcaaagagaagaaataaatgtaacctgtacaattagat

SEQ ID NO: 109051 - DNA, 267 bp, Glycine max
gaccggcggtttgtggccgataaggggtttaacactcgttccaaatttgaggggggcaggttatcttatgttcggaattactgactcgaatgagcattatcttaggccaatacgcccattgttctgccccctatatcatttttgacaagcatagggcttgttataactatatgaatctaaaaatacacggagttgcccaactaatgcatgaacgacctgatccccagttaatagggatcgactcttttttaaatactattacaatat

SEQ ID NO: 109052 - DNA, 282 bp, Glycine max
aaataataacacctttcatctttatttccatctttaattcttttaatttattaattgcaaatttaaatcttttaaatctcacatgtatattcttatcattttaatttattaaattttatatgaaattttacaaaatggggtagttagatgtataggatcattgtttacgataaccacgacataatgcttgcataggatgattaaagaagctaattcaattggtgaaacatgaagtgtaataatgtgagttattataagctcttgacattaactctctgattc

SEQ ID NO: 109053 - DNA, 448 bp, Glycine max
  unsure (1)..(448): unsure at all n locations
acaaacttatctttaattatattagagtaaaaaatcaagaatatcttttaagtgcttaagagggacaaatatagcaaactagaagcaacaagtaacacatcacataccnttttctgacttgatcccggaggagtgcaaagcaatgtccgtgatgccggtgtctgaagagtggaggtggcatccataattgatggtnggagttagaatgttggaattaacattggaaagaacccaagtgcaagtagaagaagagtctcacaagtcaaaactcattaataaataaagcatcatcatctgatgatcatcgcatttgatggcctatatattgtgataactcatgctcatttatagcactttcagtttctgaaagcttacattacatacatatgtgactgcatcacgacaccacccataataaataaagcaactcaacaatttaatagtgact

SEQ ID NO: 109054 - DNA, 323 bp, Glycine max
  unsure (1)..(323): unsure at all n locations
agcactganaaatatatgtggaatttggatgttgatcagactgcgggaacatctccctctccttcccacatttccttccacatgcacctgtatacactcacataagagaaaaaaatacatacttctgttaagcatacttgtatcaatgtagttctcaagatgttctagctgtaaccaatgccttgctaagtaatattagcctgggctgctaagctgcttataatttgaggattattaatcgataaagaattaattgtggttgtgttatacaactatccctggcttaagttaacttcatgtttgtaaactgaacataaattttc

SEQ ID NO: 109055 - DNA, 480 bp, Glycine max
  unsure (1)..(480): unsure at all n locations
cacttaaactagctaaaaagcactgattcatgtggcggcttcgattgaattaaagaaataattgaatttgaactcaatntcaaaggtatggacggtttaaaacaacataaacaaaacaaataacaactagaagcagggatacttcacccatgtacaataagcgaaccagacttacatatttaaagtgttttcagtcaattgcacgacactactcatactaatattgcaacccaacgtgaatgcatgttctatactaaaacaaaagtgtattaagttggattaattgtataataatatatgatacacaagattaaagaatgaaatttctaaataatcttcgcaaaattattgtttagaatataaataacgtgcataacacgggtaccaactaatccttacaattagacataataaatattgaaacggnctacataaatgccttggtggttgataacatgggcatattataaagtaaatatg

SEQ ID NO: 109056 - DNA, 376 bp, Glycine max
  unsure (1)..(376): unsure at all n locations
tctttatgttaaacatcagagcaattgaagntcccgatgaattcactttatgtcgatgatcttttggtgacaggaaataatccagcgatgattcaggaattcacacaacaaatgatgaaggtttntgagatgacagatctcgggttaatgaccttctttcttggattggaaattaagcacgctgagtatgaagtcttcatctgccagaagaagtatgtcaaggaaattttgaagaagtttaagtttcaggaatgcaagaaagtaagcactcctatgaatcaaaacgaatagctgtgtaacgaagatggagctgatcaagctgatgacggatatttcagaagtttgattggttgctcgatgtatcttactgcaacat

SEQ ID NO: 109057 - DNA, 291 bp, Glycine max
tcatagcacttaactaactgcttagctgtcatgctacatgctctatgactttctatagctgagagaccatcatgtcacgcatgagctaatcttaatctcatacacaaccaatatcaattacgataagagcaagacttttccccacacatttcatattctcttacctcattggtacaaaccaccctgtgcaaatctaataatcaatcctatatcatatcaactttactaagttgagccaccatttacctatcacatttaggagttcaaactcatctcttgatggtgattaat

SEQ ID NO: 109058 - DNA, 419 bp, Glycine max
  unsure (1)..(419): unsure at all n locations
gcgtctatatatattacgggacacattctgacatccgcagtaaaagttattgtcgtctgaatttgctcagagcatctggtttctatttcgagcatctcgatatattaccggacataatgagacatccgagtaaaccagtattcctatttgaatttgctacacgcttccatttttaattacaagcgtctagatatatcacgggacacaatcngacatccgactcaaaagtattgtcgcttgaattggcttatagcatctgttttcatctccagcgtctcgatatattacgtgactcgatccgacatccgagataaaagttattgtccgttgaatttgcccagagcttctatcttcaatttcagcatctcgaaaattagagcactcattctgacatcttaattaacgttattgcggttgaa

SEQ ID NO: 109059 - DNA, 263 bp, Glycine max
gaacgaagaacggatgaagaacggtgaagaacggacgaaaaccttcacggatttgcttacggaaacatcttcgaagcgttacggaagcacctcggcttggattttctacacggaaacaacttttctcacccacaacagatgaaatacatatccagtgggctgagggatccttagaacagcccccttcagcctatttatatgaaaaaggaggaggagggtgccgcccagctcgcctaggcgaccttatctcgcccaatcgagct

SEQ ID NO: 109060 - DNA, 362 bp, Glycine max
atttggtacgaccatgccctcctgatctccagctgggaatatggcgagtggaggaacgcccccgcatttatgctacgagcataatgtgaacctttacggatttaaaagctctataattgggcctatgcgttagagtttctccttatgttaaagctttgtgtcttttgtctatgaatatataatacaacgatcgtttttgatgatgatctacgtctctacccattctcatgtcattgcatgttcacttcttgatctgagacggcagatccgatgatgagtccccctaaggtactaatacctgtgacactgctatctactttcatccataaatgaatcaaaccgaagatgattgaacgacgatg

SEQ ID NO: 109061 - DNA, 158 bp, Glycine max
cctcctcaacctcagcagcataatcaaccacagcagagcaatatgaccgttcctcttaagaacaaccctggatggaggagataccctaacctcaaatggtccagccctcaccaacaacaacagcagcctgctccttccttcaaaatgctgctggccca

SEQ ID NO: 109062 - DNA, 172 bp, Glycine max
tctattcactggaattgcagtgagaacccccgcctttccaacaacataatgtaaccttacgtttaaagcttatgttggcctagcttaagtttatttgtaagctttggctttgtttgaattatatcaggacttcttatctgtctagcttaccttctatattgctgttcttttt

SEQ ID NO: 109063 - DNA, 476 bp, Glycine max
  unsure (1)..(476): unsure at all n locations
cgctgcactgctctcatctcccctttatgtgtctattctgaacagaacacacccacaccactttnttcttatcgaacactcacatataattacattcttccccttttgttttgaatttgtgcttcacttaaaaataagtaattactcatgtgaggtatgcttcacttaaaaataagaaaattactcatgtgagtcttgattaattcctatttctcttcccctttggcatcaacaaaaagccaaagtgcgtaacaagtatgaaacatacaaatacaactcatcattcacacaacaatcatgggaaaatataaactaatcatgaagcaagaaacatgactagattaaatatatagaaaaatcacataggcctataacataattcataattgttcaaacacaccatgcaacataagaattactataattgtcaaatgtcataataaaatgtctgccagttgaattaatatctaccaaat

SEQ ID NO: 109064 - DNA, 258 bp, Glycine max
tggttacatgctcagctgcccggccagctgttttaagaatggacacattttcgtcgcaataccccctcttcgcatcatcgagatcccttcgaatgcgcccttgtcttataagtcatacttgaataggagaatgcgattgggcctgcataccctattcttcgggatattattgagaatacaccttgatggcgtttaaaactgggcctttgtgcaaatggaatccaacggcaaataaagaaccgtactaaccggaattcg

SEQ ID NO: 109065 - DNA, 457 bp, Glycine max
  unsure (1)..(457): unsure at all n locations
agctggattgttcgcctgacaatgttantttntattaatttanggctacacatagaacacaagagcatgattgattagagaaatatatttatatgcataagcatggttgttagaaagacacaatatttctacctactgctatcactnttacttactttgcattttatagttntagcataaaagttagtttaaattctatttgaaattatcaatcatacatgttgtctcaacgatgcttcatttctgaacttaattcaggctaacatttgttggatcaagtggcctctgaataattaagaagggggggatgaattaattattaatgtgtcttgactaattaaaaaatttatccttcttaatgttactagattcaactaggcttttactacacagttaagaatgtgaagaacagaaacacatagtttacccatagtaataacggcgattataagtacat

SEQ ID NO: 109066 - DNA, 229 bp, Glycine max
  unsure (1)..(229): unsure at all n locations
acactataaaaactcaagccttctagtntcagatgatgcagatgggtttgtagctacctcatgctctcctctaatgactatggcatcatttctggtgctaaactgctgggagatggaagccatcttctcaattaacattcttgcttcagcatgagtcattgtctcaagggctccaccactggcagcatctatcatacttcttttcatattactgatgtcttcacaaaaa

SEQ ID NO: 109067 - DNA, 284 bp, Glycine max
  unsure (1)..(284): unsure at all n locations
ctggcatgaatttcaacaatcaaatctttcaatctatctttcaatatcctctttcatctttttcaacagatctttctgagttgttttctcttcatctttctaaaagatgttgttcaaacactttctattccaaganaagttctttgttcaaaaacttgtgttattcatctttatcattctcttctccctttgccaaaagaaccaaggactaactgcctgaattcttttgtgtttctcttctcccttacaaaagattcaaaggactaaccgccagagaattcttt

SEQ ID NO: 109068 - DNA, 337 bp, Glycine max
  unsure (1)..(337): unsure at all n locations
gctntgataccaactgatatgtactctcattgcatataggctgacttatgatcgtctatgattaaaccttgatggaaaatacataaattaattaacgaaaggatcggaaatctacactatttaagggttgggcggtggctaatttcgtgggccttaataaggtggttcttggcataaatggaagaatgagatgataaaatgtacgttaagtggtggcaggacagaaatatagaaatggcaataactcaagctacacggctcccaatgacgtgattccaaaacgaggtgaaaggtctccgtttgaaattcaatttaagctcaagaatcacttactttg

SEQ ID NO: 109069 - DNA, 352 bp, Glycine max
  unsure (1)..(352): unsure at all n locations
atatatcgagacactatatattgaaaacagaggcactgagaaatatcaaacgacaataactttntacacaatcaagatgcttaatattcagaacagaagctctgacataaatcaaacgacaattacttntaactcggatgtccaattgagtcccgtaatatatctagactcgaaatttaaaacagaagctctgatcattctcaaacggcaataactttttacttcgatgttcgattgtgtcccgcggtatatcgagacgctcgtaattgaaaacagatgctcgtagcaaattcatacgacaataactcttaactctgatcttccgtcgagtcctataatatatcgagacact

SEQ ID NO: 109070 - DNA, 418 bp, Glycine max
  unsure (1)..(418): unsure at all n locations
ttctttaccttctcttacacttgctgttcttcatttttatccatgtatctcctcacatgtcttgttctaaatgttgttaacatgattctttagagtttccaccaattaaacttgctataaaaactagatttgattttctatggttcaaatttcttgttcttgttcttgaaccatgaattgtgttgagtttaggctcctttgagttttgtcttgctatttttggtggctgaaacctaaaccataaaattcttacaaagatattaaagtagaagaaaacctcaaaaaatctagagtgacttgttcacctattgtagctttgtcatagaagtcatgtctagtcatgaaacttcgcacataagaattcttatgttgcgctgaagtttattntcttgtttcttttgctaactcatttgctcat

SEQ ID NO: 109071 - DNA, 188 bp, Glycine max
  unsure (1)..(188): unsure at all n locations
gttctcagtatgaaaattagtagtggaatgcttcaaatcagaatattcaaaatcaccctcaacagaatgctcacaatgcacagaatgactaagntgcacactatgcctaactaatctacgaaagggtctatctatttcanngatcaaagggtgtanatcacctggattgccctagtcatgcattatat

SEQ ID NO: 109072 - DNA, 234 bp, Glycine max
ttagtcactgagctcagctacataattcagcgtatttacgacctataactcgaaaagtatgcgtgattctaagtcactcattcagcgtgatttcggactacaacatcagaaagtattgcgtgatggtcaacttaacatcattcagcgctgttttacggactcatcaactcgataaagatgcttgatggtgaatcactcattcacgttcttttacggataacaactccagaaaag

SEQ ID NO: 109073 - DNA, 64 bp, Glycine max
  unsure (1)..(64): unsure at all n locations
caagcactgcgctgcacttngaatatccgtgcgtgttgcccagctttacatcataaattcatca

SEQ ID NO: 109074 - DNA, 310 bp, Glycine max
  unsure (1)..(310): unsure at all n locations
tgcagctgtgatttagggatgcggctgtttggttatgttatgttgagttgtgttgacgttgtgtttggaagaaaactccaagaaaaaggtcgagttatgtgtatattctcttatagagttaggccacgacactgttctgaggagtgatgtatgtgattgcgcaatgacatncattctgatattatagtttaattcctccacacagcaatccaatagagcttcttgtgtaattccttgtactcgattagctcaagccgtgaactgcacgtaatatgactgaactgaaccaatttgagtgagttaaacaact

SEQ ID NO: 109075 - DNA, 154 bp, Glycine max
gagaatgatgttatattggagcaaactctcacctcacacaagtctataacatcaatctatactctctcagactggatttacacctaaaattccaccgaatcacaatttgactcctcaacacccaattttaccctagaaatggctctttgttcac

SEQ ID NO: 109076 - DNA, 103 bp, Glycine max
ctctagcactgcgctcactgtgcggccgtcgagggctgcgccgtgctctctgtgcctagggctatcacttactacgtggtacggtggaagcatgatgagagaa

SEQ ID NO: 109077 - DNA, 285 bp, Glycine max
  unsure (1)..(285): unsure at all n locations
gctttattcatgctggacatgctttgcttgaattaattgttgatgggaaggctgaatttangacatgctgnagggttntactataatttggcttgcccatgangaatactttgcacctacggagcatggaagatacttntcaatggtattatatatgtgtgaatataggtagcatggaaaacacctttcaatggtatgtatatatgtgaatataggtagcatcaaaaataccctttcatggtatgtatatatgtgtgaatataggagcatggaaatatctttcat

SEQ ID NO: 109078 - DNA, 423 bp, Glycine max
agatgcagctccgctaatacagcgttcatatatacgcctcatcactctgtataaagtatgcgtaaattgtcaactctgttgattgaagccgattctacgaccatcgacttcataaagtattgcgtgattgctagagctctgtcttaataccagagctcattatacggatcattcgcatcaaaaaaagtatggcgttgaattgtcaagcttcgtggcaatacagcgttacaaattactgatcattcgacctcatgaaagtatgctttattgccaactttgttcattcgacattgtttacagactcatcgcatcagcaagtatgcgtgattgttacttcgttcttcactctattgtcgaccatgactcaaaaagttgcgggacactcactagtgcatacacgtcatatccactttgctcaaagat

SEQ ID NO: 109079 - DNA, 334 bp, Glycine max
caagagatgaagttgcttaatcacgctatgctctatttttttgtacattctataaggaccccctatgctgatcagatgctctcattttccataacaatttctatgtgggggatcaaacgatatagggtattagcaaagaaacgaaagttccatcactgggaataatacaactcttaaaatttatgtcccaaaatcaagtcaatcggctcccatgagaataaactcaaccgttgctactacagttgttcgttatactacatcaccctctatattcaaacgcgattaaattcctctgtatctacggatttttttatctttgaaacacacttataac

SEQ ID NO: 109080 - DNA, 284 bp, Glycine max
  unsure (1)..(284): unsure at all n locations
agcactgagctgcagctcatctcaatacctctgtggacagactagatcgagaccattattgtacaacatatntaataccanaacgtaatccgcagatccctcattcaagactagatttcaatcctgcttcaatcaagttctaaggcaacaatacatttcccaatgctaaagtcacctaactatgctcacaaatgggtgatcagacaaagagcatacantgattaagcattgaaagaagcattgaacacaatatacacaaccaattagatattgaatgaattaca

SEQ ID NO: 109081 - DNA, 458 bp, Glycine max
  unsure (1)..(458): unsure at all n locations
tatgactatngaagaatcttttctgttccttgatgagacaatgctantctccaagaaggatatttagatgatgtgcacaatcttacaacaaatgctatcatggcaagatctaaagaaagggaaggaacaatgaaatcctcaaagaaccaatcaatgatgaacttccaaaaatggaagcttcaaagacatccttgacatatattgggatattcaaagggtacaacttacatttctaagaatatgcatatatgctttggttatgtcgactaaattaatgagcctataatgacatgatgtgcttcagaaaacaatatttgaaaacatgggggacataacacctaactacctctagacaatggattagatagtaatacatgtatattaatagctatatctatgtcatcaagtgatatataaacttctcctcaataagctaatcttacttctttatattacta

SEQ ID NO: 109082 - DNA, 250 bp, Glycine max
ctcacaaactcacattgaaaggattttttacttactgcttaggaatggcaacgcatgtatctgcattaactatacaacaaactcttggccatctcaatctattttatgatgatcatttgactaactacagaacctccttatttatagaatctatgataacgacagctcataaaggtaaaacgttcttctgcacgtctcatccgtataaagataatcacgctcatctactctatatggatctagtattaat

SEQ ID NO: 109083 - DNA, 363 bp, Glycine max
  unsure (1)..(363): unsure at all n locations
tctctaagcacctgangctgcagcttgncgtgcgagccaccattttatagagagaccgtaatgtgtctaccatacgatatcgctcctgttgccatgtctgagtgatctatcggaacctataaatatactgtctgctacaagcaccatagtcttcagttggactcaaagtcagtatgaccagtcactccccatagacttttgaaaagatacagtctatttgcagcctatttcacatcatttgatggttgggagagtcctgactgcaagcacactgactggaagtagaatagacagacactttagtagaagatactactcttatgccgagctctttcatcgctaagagtttacctggatgaggtg

SEQ ID NO: 109084 - DNA, 82 bp, Glycine max
gccagatctgtcgaagggtatggaaatcagcaggtagggttctgaaacgcaacccaatgcacgaaaagatcaatttctggcc

SEQ ID NO: 109085 - DNA, 110 bp, Glycine max
tctgccgcacttagcacgcgctcactctatcaacactcttgtgggaagctcttttcatggtatcctagggaggccctctctcaactctcttttatctccgctcatctcat

SEQ ID NO: 109086 - DNA, 76 bp, Glycine max
ctttcgtagtagaatactcgatatgtgtctaccatcacaatatcgtctcttttcatattggggtaccactggctgc

SEQ ID NO: 109087 - DNA, 169 bp, Glycine max
  unsure (1)..(169): unsure at all n locations
atgtgtgactcgtggaagtggtagagttgatttgcgccatcacccgatcgccacctagtaccacatatgacgggtgccccataantcaataagcttgatgcgaganagcgtggaagagtcagtcttcctacttttntgttgtgaccacagagtggtacctgagatatgt

SEQ ID NO: 109088 - DNA, 285 bp, Glycine max
tctctcaactacactgattatatacactgggttttgtaatccacggttttgatacaatatattataatgtattaatatttcatatgtaaattaattctaatgtattaaagtacttacttgtttttaatacgaattttttaatcttaatatttttttttcttttaattatttgtcaagtatatagccaattgcgctccactaataatctcaattagttggaagatgttaataccttgtacaaaactttttctagaattttacgtgtcaatattgtcacctagtaac

SEQ ID NO: 109089 - DNA, 198 bp, Glycine max
cactgcagctgcactagaaatacatgcttgctctaatatagacttattataataattgaaataataactgctgttatttggtgataatgctcgcactataatctcaatctaatacgatgagttttaccaccttctttgcttactgcttcacactggttattatataaacaagttagttgatggaatagaaaaaacaat

SEQ ID NO: 109090 - DNA, 250 bp, Glycine max
  unsure (1)..(250): unsure at all n locations
cttctcaagatccaacagtcatatcatggacaagtgtcttgtgaagttgcagaccannattcgagaagatccaacggttaatgaaggctgggtagcgttcttaccgaggcagcttcatgtagctttctctagaagcttcattaagaggcttcctccagaagctttctcgtggcttctttgagaagctttctcaagaggcttctntgagaagctggatccttatctgtccacacccctctattaactaaat

SEQ ID NO: 109091 - DNA, 182 bp, Glycine max
gcgataattatagtacacagcgaacattaaagattgtaaggaagaagaagacaaatacatagaattctatatctggtttgacaacaacccgtgcctacatccagtccctatacaacttgcgggtcttgagatttcattcaaccttgtaaaatcatttacaagtcaaagatccacaagggatg

SEQ ID NO: 109092 - DNA, 231 bp, Glycine max
  unsure (1)..(231): unsure at all n locations
ctactacgccatcatgacaattcataannagcgctgtgttaccctttgtcgattccttcaatttcttaagacanaaaccatgtaaagaanagcgaagaccacttatacctttcaccgaanagtgagtntacctttgattaagattataaagtatgtntcaagtcatattctccatccttangcctgcatggcttcatgtngactacacttcacttcaactttctagtgaca

SEQ ID NO: 109093 - DNA, 187 bp, Glycine max
tgctcatgtaaccacaagctgcaataatgtgtgaacatggatagtgaagcgcacaatactctccgcattgataataatggccattcaagttaactgcccactcttgtctgccacgtagcgttatagaattgaaggtcttctctacttcaaacattgtcgactggatatcatagacgcgaacgatgtg

SEQ ID NO: 109094 - DNA, 279 bp, Glycine max
tcgatttactctctatatatactccccttcatgcgactgttccccatcttcttaattaccctctaaatatgcccgtctctcgatatgctctttgaaacaaattggctatctccacactagtcttattatttgatcctgtgaactcataatttgataagattacatacacaccttgaatcaaatatcgctgaccaatatgttacactcatataatctcttctctccaccatggtgccactcacaccgtttaaaaactgaagattgcctctcggaagccga

SEQ ID NO: 109095 - DNA, 349 bp, Glycine max
  unsure (1)..(349): unsure at all n locations
agtcactgggctgcagctgaggcggtaccaccttttcgtgaaacaccgtatgtttcttatgtatatccttctcttcggcctctgactgcaatcctcccttagcgttttttgaagatcatgtccctttaccatgtatgtagtgattctatcgacctatcaaatgactaatctgctaagaggcaccattngttcttcagaatggctcggaggttcacatgggtccagtgacactacccaataagacttcttggagaaagcataacaattttaattttgagatgccccatttcttctgtcatcttaatgatcttgggcagtagctcttgtcttataaaatccgcccttgact

SEQ ID NO: 109096 - DNA, 331 bp, Glycine max
gctgattcttttgtgctctctttcttttcaaaaacaagactacgctaattcttgtgttcgtctccttgcaaattcaaagaccgctgaatctttgtctctttcctaacaagttaaggctactgctaaatctttgatccttccagataagttacgctaatctggcaccttgggtctcttgggcagtggtcctctggtgataacaatagactttggacactggaggctcctaggtaaaacagaggctctggattctgaagattagtgaaattagcggtgtggctgtgactgggcacaaaattggggtcttcttttctcgggtattcttctcgag

SEQ ID NO: 109097 - DNA, 161 bp, Glycine max
  unsure (1)..(161): unsure at all n locations
tcactcagttgcactccactatatttntttgtntagtagagaaactatgattagattaagaatcaatcagactatacttgatcttttctctcatattatcataatcaatttttctcttataataacaattgacacacactcatantgagaacataaaatga

SEQ ID NO: 109098 - DNA, 225 bp, Glycine max
  unsure (1)..(225): unsure at all n locations
ctgcagcttctaacttatcangaatgagctctgnaccacttgtagacaagtggctntagatatcttaagaagggggggtgaattaagatatcacatactattccctaataannaatctatttngattntaacccaaatcccaagaatccttttgaaatgaattcctaaataattattcacattaaacttattgaatagaagcaatacgcaattataaataaaata

SEQ ID NO: 109099 - DNA, 444 bp, Glycine max
  unsure (1)..(444): unsure at all n locations
cattgaacacatatagtaacttcaaatagatagtaatatatattacatcaagtactcagcaaaatttcccaaggattntatccctccattataagggagcacctctcaccaataggagaacggttcagagaanaactagatacaaagcagtgggatgtctatcacctctagaacctagnatcactcctaacctaaatcacctaaagtaggccttttcttccttgcgcactttctctatcttcttctgcacaactcacgagctattagacctctctttcatcttgcattangcttaaaagacttctgttccaagcacatgtagtgatatacactaacttggttaaacctggttatgatcaacttccattatggtgttgtatcaaaggctttgtaaataataaatatatcttgttgcttatatcatcttcattagtaatgcacttg

SEQ ID NO: 109100 - DNA, 569 bp, Glycine max
  unsure (1)..(569): unsure at all n locations
tcttaagtcactgggctgcagctctgaatcgctgagatgcttggaactacagctctatctctcatgaatacanaaatggatgatcttcttcatcgcatgtcgcaactngaagctaaccagcaaccttcacagacaccttcatcgttctcggtgagacctgtggcatcaccggcgtcggaactctatcatcgtatgaagcttgacgcgccttgattngatggctccgatccaaccggttggaccttcaagatcatgcaatntntcaagtatcactccacgcctaatcangaatgcttgacnatngcttcattctatatggaaggatcatctctcgcgtgggtccaatggatgcaccgtaatgcgcagctctctgcgtggtcagcgaatctctatgctatgcactctcgtctagcttcatctacatataatgatccacatgtcgttggtagctcaacatgtcatcgtagcgctattgtcgattgatcttgcaactgtagggacacacacattggtgatactattcggtggttgcatccgaggcagcacactatttgtagcatgttgtgtac

SEQ ID NO: 109101 - DNA, 146 bp, Glycine max
  unsure (1)..(146): unsure at all n locations
actgagagcaatggattttctcatacatgttaccaaagagtgttactctctggtaaatcgataccagaatgttgtaatctgataccagtaagcaaaatggttntctaataagtttcaactgaatgtacaacgttccaattgatttc

SEQ ID NO: 109102 - DNA, 172 bp, Glycine max
gcatctgactatccaagagccttctcaccattagcatatcaccctgcatagcttcctcctcaagctctatttccacttcttcttcctcactgatgtcagattcacaggtaatttctccatcatggtcctccaggatggacattcagaagcaataggtcctatgcctaagcat

SEQ ID NO: 109103 - DNA, 142 bp, Glycine max
  unsure (1)..(142): unsure at all n locations
gctcacagatcaatctaagaacaactcatgtgaatcaagaacaattcatgagttctagattagaatcatgaagaattcangactcaagaagaaagcctacaatctagaatcaagaatcaatgttcaagatctcatgaatcaa

SEQ ID NO: 109104 - DNA, 377 bp, Glycine max
  unsure (1)..(377): unsure at all n locations
gcagagcaattatgaccttttcagcaacagatacaaccctggatggaggaatcaccctaacctcagatgggtcagccctcagcagcaacaacagcagcctggctcttcctttcanaatgctgctggcccaagaagaccatacattcctccaccaatccaacaacagcaacaaccccagaaacagccaacagttganggcccctcacaaccttccccttcgagaactntgtgaggcannnatgactatgctgaacatgccagtttcagcaagaagaccagagcctccattcagagcttaaccaatcagatgggacanntagctactcaattgaatcaacaacagtcccagaattctgacangctgccttctcaagctg

SEQ ID NO: 109105 - DNA, 125 bp, Glycine max
ttcacatccaattgcataaccccatcctgttgccactccaattgactatgtctcctagtagccatatctcgatttatcaacaccggtgccataatccttcagcttccaaatccaggcacacatca

SEQ ID NO: 109106 - DNA, 223 bp, Glycine max
  unsure (1)..(223): unsure at all n locations
ctgcagcttgtctatagtatgggatgcccacaaagtatatgtactcctctgatagcatccattcgtgtatctgaactcaatactactcagtcagaatcatagaaggatacatgtnccgtgtccttatgcaagtgtctangtagtctcatgtatgctacgatatgcaccagatcagacctagcacaagagatcggtgtgtgagtaagtatatggataatcttgg

SEQ ID NO: 109107 - DNA, 246 bp, Glycine max
  unsure (1)..(246): unsure at all n locations
tgcagcttgagatagaacaaagtagtagcttgatatctatctacagtactgacgaggagtggagtggatgacaaggagtctctgtctactcttttcttgattcatctgaactaanaagaactcanaattncttagaccannaattgtcacagtaaacaacaacaataaagggctaaaataacaataggcgcttagcgggatatagctcgctcagcgcgccctgagaaacataacatgtcagcttaa

SEQ ID NO: 109108 - DNA, 162 bp, Glycine max
tctaaatgaagaaaccttgctatggtatagtttgaagcgatgaaagtactctcaatactatcattctttgagatacagatgctttgtgattgctaagagtcatccacttcaagttgttcatttctagaaacatttcaattagaaatgaaattcacaataaat

SEQ ID NO: 109109 - DNA, 175 bp, Glycine max
gctaaaacagaactatatggaatctggtgttcgctgcctgttgcattcaataacaactgtggccgtttctgctgccaggctccggtcacaaattacccgagatgtcatttgtgactcatgcccgtaacatgatacacgccactgaacctgtgaatatgccggctcccccaccccg

SEQ ID NO: 109110 - DNA, 433 bp, Glycine max
  unsure (1)..(433): unsure at all n locations
caaatcttcttatctcatctcttacaatccttcccaacacantttgctaaccgcttactcgggtcatcanatctcgattaccacctttggtggtcgggaggttcaatgaggccgtagtggcacattgagggcattctgtagcccgggtgggagaatgtatgtcagtgtgagggtagcataaatntggcacaatgtgtcgatngctttcattgttcgagtgtgactcattcacatgttcttgtgattccaacctaatacaaggactactgtaatctggacagcttgctattttttgcagaagctcctgcacattctatatatatcaaacctattaaaagtctgccattaatgattacatattttgtgactttggcctcactacaattgagttatttgtgagagaatgagttgtcatatagtgatatatcactct

SEQ ID NO: 109111 - DNA, 332 bp, Glycine max
  unsure (1)..(332): unsure at all n locations
cacctcactctgatatttattctcatactcattctacattaactaacattcattcattgtctatgtgggacctataatatgttntttgttcctgtgctcttgtgtgcaaaagaatgtctngcagagatctctcaatttgtgttgtgtatacaattgccttacattgggtatacaatctttattgtgactggttctagcataactaataagagattcaatctccttgtccttgaggaacatataagttagaacacatgacaagaatatagatangagccatgtaaataatggaaaacttggtcacgtcagcatttaaaatggcatgtataact

SEQ ID NO: 109112 - DNA, 492 bp, Glycine max
  unsure (1)..(492): unsure at all n locations
tggcttctaaatctgcaactggagcatatgtntcttcataatctatacattcttcttgattgtatcctttngcaactaatctagccttatttctaatgattatgccatgttcatctaacttattcctaaataccccatttgttcctatcatggngtagttntcagggttctctactagttcccacacattgcttctttcaaactgatgtagttcttcttgcatagcnaatatccaatgatcatctattatggctcaattatanntttagttcaatcatagacacaacatccatatattgataaatctttaagagatgtctagttgtatccctctgaatatcacaatnatgtgcaagggatatctttgaagcttcattctttgaagtcatcattgattgcgtctctgangactcattgtccttcctttcctagatctgctatatagcttatcaaatatcacatcttaattcttctaaaaacctaacttaagac

SEQ ID NO: 109113 - DNA, 222 bp, Glycine max
  unsure (1)..(222): unsure at all n locations
tctgtgaagtcaatgtcttcacaagacaaacctcctaaacattcatggacgaaggatgagangaattggagcagaattgagtcactcgaagcatatgctattgatgcatgtaaaaatgacgaacaaagganaatggctgggatggtaactttntccctcaaagcattgtttngatntaatgtagcattatagcaattggtgcttgtcttcaagtatgcaaat

SEQ ID NO: 109114 - DNA, 181 bp, Glycine max
  unsure (1)..(181): unsure at all n locations
aagcttctcaaggaagctacctagtctattaatagaagcatgtgtaacacttcgtgtaactntgatgaatgagagtcttgtgagacatacttcanagtccacttctatcctctttattccttaatttcgtgctccccctcttcttctctcctctttctttctcattgagcatctctcaagc

SEQ ID NO: 109115 - DNA, 362 bp, Glycine max
  unsure (1)..(362): unsure at all n locations
cttagcacgagctcagcttatggttaaattatattaatgacctattttcaatatactctataatagctgattagaattagatagatgtttcttagtcaagtatcaataactntatattgtgcaagatacttatagcacttgcataatactatcatctatttaagtagctatgacaanctatataatttgttcttcgctgatgaaaatattatgtntatctaaattcattgttgaagactatgaatggcctaattggattatatgacaacgcatcaagtcaaacgtgactcttgnaaatcatttgtctacggatgacgacagtcttggatcaagttaatctatataataatcatgctgtcttt

SEQ ID NO: 109116 - DNA, 205 bp, Glycine max
  unsure (1)..(205): unsure at all n locations
tgcagctctattagctgaccatttatcataacacaagtgatgtttattcataaattagaagttatctctnttatcttagtgagaagtgattctctanattcttgagtgattcaagaacaccctgactgtatcanaggacattcacnaaccgttgtgtgtngccctcgctggaaagagtgattctttccttccttttcatcttcac

SEQ ID NO: 109117 - DNA, 203 bp, Glycine max
  unsure (1)..(203): unsure at all n locations
tcatgctctcctctaatgactatagcatcatntctggcgctaagctgcctggtgttggaagccatcttctcaattaaatatctggcttcagcangagtcatgtctccaagggctccaccactggcagcatctatcatacttctctccatattactgagtccttcataacaatattggagaagaagctgctccgaaatctgatg

SEQ ID NO: 109118 - DNA, 437 bp, Glycine max
  unsure (1)..(437): unsure at all n locations
agcacaacaagaaatattattgatatagttactccccctnggtttacattgatggcttatatgagacaattgaagatttcatattcttcatatataaagagttgtctcatcaaaaaatagataatatatcttactatattatcttntatcttctatcattctcttccgctttgccacatcgagaacaaatcatgaatagagaggagatagatgttacccttcgtgcantgatgagaataagtgatccaacagcattaaacacttgatctatattatcatgagaacatgtcaatacacatcatcaacacatcaaacatcatcatcaatattaaataattatttatcagcagaaaagtcagtaccataataacacatcaatcatcatctcatattcaatcaatataatacatcactacttccatattcttttaaaaatc

SEQ ID NO: 109119 - DNA, 216 bp, Glycine max
  unsure (1)..(216): unsure at all n locations
atgctaatgcanatggtattgaaacaacattgacctgttaataattcccttaagaatgtngtctggcctgctatgtaaagaatacaaccaaacaactaaggtttccttaagctgaatgacgaccatttgccagtgtccgctgcagtagagacaaatatgggttattgtagtactataaattatttaaattcagttattgtgtttgacttacttatt

SEQ ID NO: 109120 - DNA, 234 bp, Glycine max
  unsure (1)..(234): unsure at all n locations
gcgcgagcttctctctgcatgcaactcctcaccaacggtacaaagtttaatcaatcatcatcatgggttcaccaaagaaacatatcanacgtaggtgatgatattccaaattncaatgaaccaattaaaacatggaatgtcctaaaccctaaaggttcatcaataccgcatgatgaagatattatatatacttgtatataaaaaaactcagatattcatcttttttttcttctg

SEQ ID NO: 109121 - DNA, 446 bp, Glycine max
  unsure (1)..(446): unsure at all n locations
tctgccgcactaagcactgagctcagcttgctccaatagcgcaatcgtggctgttatgatacccttaccacattgtgctccctaagcgacctttgataagacttacctctactgaaagatgccagtgactcngagcaaataacccatcatacgccttacgacatatcgggtgctgtctacccacacgaaggccgctgattaatattaccctggttctcagaccaagacaaattgtgctatatataaacacgcgagtgaggcgttcttatattgctactgcgacttgctttttcttggttaccgaaaagtacacacccattcaaattctgtttgcatcttagagcccgcatttatctttaactctacttaaaagatccatgcgcaaactaattctttgactaatctgcgactgctatgtctggatgatcctcatcccactcacgact

SEQ ID NO: 109122 - DNA, 166 bp, Glycine max
  unsure (1)..(166): unsure at all n locations
ctgtatatgcgtcgtatattcgcatacacttctctcgagcctctattataagtgttatacatcgatcatctctatattagttctcatctggcangttgcattgccaaaatggattttaagtcttgctcacaaacaccaagctgaactcaatggttaattgccatct

SEQ ID NO: 109123 - DNA, 357 bp, Glycine max
  unsure (1)..(357): unsure at all n locations
acattctatcacacagactatatctatgaactatactaaacatacaatctctcaatggctataaaantaattctatacttgtagcgcttgagattgtatgtttgtatgactatatgaatcatagctcacaactcagtgcatacaacctctcaatgcacatatatattacaagncaatacatactcaatttatatataaactcggctcaatcacatggtctactctcaatttaacatgtcatacacctcatgattatatcacttccattgactatgcatactctaacactaattgcttaaatcatctaactacgacctaaggatcaactgtggtcacaggatccatccatctgtgcct

SEQ ID NO: 109124 - DNA, 301 bp, Glycine max
tatgccatacttcctacaatgttctttgcacattacattctattaaccgagaaaatgcacccatattcgatcaaggcagctccgttacctaaaatatttacacgtactttcagcgtgtatttgttacttacatcccacacatctccttggctaaattcacatacatgcatacccaaagcattttggggtaccaaaaattgcacatgtacacctcttggtatttctaatacctatacatacacaaactttatgatgaatcttgactatctacacaataaggtgctacatttcatgctcttta

SEQ ID NO: 109125 - DNA, 378 bp, Glycine max
  unsure (1)..(378): unsure at all n locations
ggagaatggactncattcgttgatgttttagcactgttagtattcgggatcggcctctttccgaatgtagacgggctaatggatttatcagcaatcgacacttttcttgcttatcaccacaacaaggaaagtccggtcattgctgttttggttgatgcctatgacacttttgacctacatgtgaaaagagcagagctagaatcatctgttgtacacccattctttatgtatggctggtctcccacattttttgtcatgaaaatagacccgtctgtcccctacaaggtcatcacatgtgtgctgagaaagggaaagcaaattgggaggaactcttggtaggtatggtaggggagttcgataattggttcccccgatgga

SEQ ID NO: 109126 - DNA, 391 bp, Glycine max
  unsure (1)..(391): unsure at all n locations
ccaacccatggaagctcctaatatctnccacactttttggggtggttcattcttggatggccttaattatctcaaggtccacttggaccccatctctaccaactacaaaccctaagaaaactatattatctacacataaagtacacttctctatatctgcataaagggtgtctttcctaatgactgaaagaacttgcctgagatgtcctaagtgatcatctaggctcctactgtacactaaaatatcatcaaaataaacaactacaaatctacctatgaaatcccttaagacatgatgcataagccttataaaagtgcttggtgctttattgagcctaaaaggcatcactaaccattcatacaaaccaaacttggtcttgaaagcagtttt

SEQ ID NO: 109127 - DNA, 391 bp, Glycine max
  unsure (1)..(391): unsure at all n locations
ctgagctgctcaattgctccaggttgctgcatggaatggcaaaggtctgtatggnggtcagcagaggagcacaaaccacagacccttgtgacaggtacagatttctagttcaaggccagctgggttaccaagttaaccaatgcatccagtttgcctttaagcttcttagtttcagatgatgcagctgagtttgtagctacctcttgcactcctctaatgactatagcatcatttctggcgctaaactgatgggagttggaagccatcttctcaattagatttttggcttcagcaagagtcatgtctctaaaggctccaccactgggagcatctatcatacttctttccatattactgagtccttcataanaatattggagaacaaactgct

SEQ ID NO: 109128 - DNA, 397 bp, Glycine max
acactatgatactcagctatgcgctacttcttacaatgtttctgcacatacattctattaaccgagaaaatgcacccatatacgatcaaggcagcttcgttacctagataattacacgtacttccagggtgtatttgttacttacatcccacacatctccttggctaaattcacatacatgcatacccaaagcattttggggtaccaaaaattgcacatgtacacctcttggtatttctaatacctatacatacacaaactttatgatgaatcttgactatctacacaataaggtgctacatttcatgctcttttcaagtttttgctacctaaagccgcatgcaaattccagtatattttcctttgctaactaaaattgtattcaaattaaaaggta

SEQ ID NO: 109129 - DNA, 379 bp, Glycine max
  unsure (1)..(379): unsure at all n locations
tgcttctataggaaatacaactggtctttanggttcaataaccaaacttttagtccattattactactgtgtagagtaacttgtccttgtgcgagtagtatttttatgcctcaagtttcttgtgttattgttggggactaatcgtagaaattccagagtaaatttaatttattaaaccgaataatttttgtttatagaattttttttattatttatttaattttctattatttcttttttactttattcttttatttctcattgcacttgatctcctcctttatatttaagtgcatgcaaatcaagtcccaaaatccaccattgcaatatgaacctaatattaacctcctaatccaaagatttcgtgtagaactatgtg

SEQ ID NO: 109130 - DNA, 99 bp, Glycine max
taaagagtcgaacacccttcctcttgcctctttatctgcgtatacttgaacatactcgtccgcgatcctatgctcgtgggccgtggctagacctaactc

SEQ ID NO: 109131 - DNA, 389 bp, Glycine max
ttgaacaatatacttggccttcatttaactgtctttgggcttggcggccacgctcaacaaagtactttcgacacctactgtacgttgatttcaccaatgctgttatgggaatgttgcgacaatcctttaaaaccttattgatacattctgagaggttcgttgtcatgtggccatatcgacgtccttctctatcgtaagccatcgtccatttttcctttgagatgcgatcaatccatgttgctatggctagactcagctcacgaaatttttctaaattttgataaaaaatgtgcttgcatggagtgtaggctgcataaaattagttatgaataacaattttaagtataaatgaaagtaaaataaacgtgaccatcaaatatgaaatctta

SEQ ID NO: 109132 - DNA, 380 bp, Glycine max
gtgcggatgtggacttcgccagcgtgaagatcaaagtgggtctgaacagaggcaaatttggtcatcctgctttgataaaaactggggcaaatgaagaggatgaaaatgaaggagaaatccatgttgtggctgccattcctatattgccaagtttcccaccaacccaacaatgtcattactcagccaataacaaaccttctccttacccaccgcccagttatccacaaaggccatccctaaaatcaaccacaaagcctacctaccacacttccaatgacaaacaccacctttagcacaaaccagaaacatcaaccaagaaatgaattttgcagcgagaaagcctgtagaattcaccccaatttcggtatcctatgctgact

SEQ ID NO: 109133 - DNA, 393 bp, Glycine max
  unsure (1)..(393): unsure at all n locations
cttgggtgggatacccaatgtgagcatagtttctagacccttaaggaaagattggcaactgctccagtgctagttntgcctaacccgagataaccctttaaggtgtattgtgatgcatcaaagatgggtttaagcggagtgttgatgcaaaatggccaagtggtggcctatgcttctagacaacttaagactcataagaggaattgtcccacccatgatctggagttggctgctgtagttttttcccttaagatttggagacattatatgtttggctctaagttcgaggtatttagtgatcataagagccttaaatacttgtttagtcagaaggagctgaacatgagacaaaggagatggttagagtttcttaaggattatgattntgagctt

SEQ ID NO: 109134 - DNA, 394 bp, Glycine max
  unsure (1)..(394): unsure at all n locations
tgtaaatggtaatattcattagatagaaattagataacacattcatgagtgaatcccttntgaggtgaagatctacaatctgtgttgtaaaaaacatagataccttttaccgttgtaagtccaacagtggttgccaaagctgaaatccaatgttataactggtctaattctggttaggttggaagtccaatgttataactggtctagttctggacgtagcccaaggttggggtaaaccactccatactttgattttgaatagatctatcaaatgcttgcttaaacactacatgtcataccctaatttcgtccggggattattatttgttgatatacaacctttgattggccgcttcgagacacttggcgtcctttgttgcacaatgaatgaagt

SEQ ID NO: 109135 - DNA, 388 bp, Glycine max
ccaagttgctcaattgctttagataggtgcacataatgtgcaatgtcttgtgggcggtcggcaaaagagcattaaccacagagtctggcgataggtgcaaattttatattcatggccagttgggttacccagttaacccaagcatcttatttaactttccagctttcttaatctcagctgataaaatgaattgtgggtacttcatgccctcctttaatgaccaatagcatcatttctggcactaaattgctgggagtttgaagccatcttctcaattaaatttctggcttcagcaggggtcatgtctccaaggctccaccactggcagcatctatcatgcttctctccatgttactgaatctttcaaaaaatattggaaaaaagctgc

SEQ ID NO: 109136 - DNA, 393 bp, Glycine max
tgtgactcttggcaatttcttttaaaaaactagtcacttaaaaagttgtgacttttgaaaagatcttcagaaacaagtcacttgaagaattgtgacttttggaaatgtatttttcgaaatcagtcactggtaattgattaccattaaggtctaatcgattacacatcaataaatgtgacacttcattttgaattttgaaaatcttaacgttttaaaacactggtaatcgattactaccttatggtaatcgattaccagagagtaaaactctttggtaatgattttgtgacaacttcttgtgctactcaatgttttgaaaaacttctttaatacttattttgattgagtcttctcttgattcctgaatcttgatcttgaatattcttgaatctt

SEQ ID NO: 109137 - DNA, 416 bp, Glycine max
actatacaactactcaagcttatccaccccccatcagcagggctttcatagagaaatactgcatgtccaagtagacacaacaacaggaggagggccagtagtagccagccataggtgcaccgtcgtcgcctctacaagagacaccatccttagagtccatatccgctcacctgaagaggatggagctttatatgcacacttacatgcagcatgtgactagccagcaggcggctaatcacaggggtcaggtgcagctgaacgagagcttctaccggtacacccagcattagcagagccaggaccacagtcttttcccgtggcctacccccgagcagttcggagccacggttgcatggcctggggatgagcctgattttgagacaggggaaagacctgcaagggcccctatggacgat

SEQ ID NO: 109138 - DNA, 385 bp, Glycine max
tatccacagtagaatcagcttgatgcaccacatactgtaatgtatttgtcatgctatggtgaaagcttccttggctgatgtagagaactgcacatccaaacattcccccaactgagatcaagtttttgattagtatatttgatgatgcacatttggggtgttgcctaaggtaatctagtggggtcatgccatcaacatcacatgtattcacctttattgatggggcaactgaatgttgctaatgatggccatgtgaagagcagttcttccatcattgctcttaacattgatattgtctgccacatgaaagttcttccccctaagcatgtttctcaaaagttcaaaatgtttgttcaatcttctaaatgcctaagaattaaaacca

SEQ ID NO: 109139 - DNA, 392 bp, Glycine max
tctattatctttggttaatggcgttcgtcaaaacattaagcaaagaataacacaaagaacaaaaacagcacagaaagaaagcaaaagaaaagaaagaaaaaaagaaagagaaaaaatcaatcaatcaagatagaagaagagcaagggaaaatacaaaagaaaaacaagtcctttggaccagacaatgtctgaacaatgtgcagaattgtcgaaaggaagaaaaaaagagaagagcaatagtaacttggttaagacatggggggtgtgaaatgatcgcccatttaagttactaaccaaatctttgtgtctgctctcctattccacaccaaacacaaaaaggagaagagggaaaagaaggggaaaggccaaagcaaccaaaaccaatttcctac

SEQ ID NO: 109140 - DNA, 401 bp, Glycine max
  unsure (1)..(401): unsure at all n locations
tgacactataaaactcagcttaaggctaagtcttcatgttgctccccctatctttaataggctttgttccgaggtgtctttttttgaataatagactcaagttttgtccctagtttgcatgcattactaataaatgacacatgcttgaacaaactttagtgaatgtattttcgaatcatagctactgccttccgatttggagctcctactctttgtcaatgatcttttcctccaacttatccttttgagttattagctcatgcaaatctttacaatataaatggtcttccatcatcgacttccaataggagtaattttcagtagttaccttaaacatatctccatcatgagtgacaacaccttccatcttgaatcatgcangatgataggtcccccgatca

SEQ ID NO: 109141 - DNA, 386 bp, Glycine max
tgtactatagtggtccttttctagcagaatcattcagtaacgaaactcctctttctaaaataaatatagtaaaaacaattaaaaaataagatagggagagaacattacacctataaatctccatctaaatgccacccttttctccaagcacacagcaaaacaacatagaaaagagaaaacatatacaaaatgaaggtttctgcatcaatagcatcctttgttctgttgctcattctaatttgaacaaattgtttgtgttctgaagcccaatagtgtcgtcctagtggtagaatcaggacagaagcctcctcctggagaatgcaacaaagagaatgattcaaattgttgtgtacaaggaaagatgtacacaacatacaaatgttctc

SEQ ID NO: 109142 - DNA, 386 bp, Glycine max
  unsure (1)..(386): unsure at all n locations
ntggttataaatttcgagcgtctcgatatattactgtactcaatcggacttccgagtgaaaagttattgtcgttagaattagctgcgagcttcggttttaaatttcgagcgtctcgatatattacgggactcaatcggacttccgagtgaaatgttattgtcgttcgaatttgctacgagcttcggttttaaatttcgagcgtctcgatatgttacgggactcagtcggacttccgagtgaaatgttattgtcgttagcatttgctgcgagcttcggttttaaaattcgagcgtcacgatatattacgggactcaatcagactttcgagtgaaatgttattgtcgttagcatttgctgcgagcttcggttttaaattttgagcgtc

SEQ ID NO: 109143 - DNA, 104 bp, Glycine max
acagataaaatgaacaaaagaccacaaagcaaggaggcttgtggtggcttggccagctgtgaaacttgactgatatgtgaaatatgatctctggtaatcgatta

SEQ ID NO: 109144 - DNA, 127 bp, Glycine max
  unsure (1)..(127): unsure at all n locations
ccttgccgatagtgcctccatactatctcatgatanacggcccgtcaccgatgttgacatattgtctaatgatcggcgtcaaacgcctgtaaacgacgattctcagattgcttgccttcaaacgtat

SEQ ID NO: 109145 - DNA, 398 bp, Glycine max
  unsure (1)..(398): unsure at all n locations
tctntgagaaaacttccttgagaagctagagcttagctacacacactcctctaataactaagctcacctcctttgagaagcttcttgagacacttccttgagaagcttgcttgagaagattcctagagaagctagagcttagctacacacacctctctaatagctaagcgcacctccttaagatgagaagctagagcttagctacacaccccctataatagataagctcaccccatgacaaaatacatgaaaatacaaaaaaaagtccttactacaaggactactcaaaatgccctgaaatacaaggctaaatccctatactactagaatggccaaaatacaaggcccaaaagaaggaaaaacctattcaaatatttacaaagaagagtggatccaac

SEQ ID NO: 109146 - DNA, 405 bp, Glycine max
ccttaacactaagcttcttataagctgaaccattttatcaataaacacatgttgagttttattcagaaaattagagtttatctcttttatcttagtgagagtgattctcctaaattcttgagtgattcaagaacaccctggctgtaacaaaggactttcacaacctttgtgtgttgccctcgctggaaagagtgattctttccttcctttcatcttcacccttgttctttcaaaccacaattccagaaaatccacctctgcccagaattatctcgtggccataactcccattttacgcactcaaattaagtgattcttgagcctaaattgactttcaaaacgagacctttcacctcgttttgaaatcacctcatttggagccctgtagcttcagttatttccatt

SEQ ID NO: 109147 - DNA, 295 bp, Glycine max
gcacaacaagttttccacatacacaatggcgcccaaaactccccatcccctggtggcccacttcaacctgagttcacgtactcctccgtaagcccatatgtctcgtttgttctaaacaccggggtccccatgaatccctcccaagctttgcacaacattccaaactaagacatcttttcaaaccggcacagtctattacatctcaagccaatacagaaccaaacggagaaatactctgccataaacgctcacccaattcaaagctctttttcactttaagaccccagtaacaaat

SEQ ID NO: 109148 - DNA, 411 bp, Glycine max
actatacaacactcaagctctaagcttcaacttagcagaagaatgtagtcactctttatattataatttgaaacaagataaaatttataaatgactagcatccgattgctacaactattctccaaaaaatattacgaaaattaccatcaaataattattggtaaaaatatttcaaatttaggaacattaaccacttatctggttagtggttaataaacaactacctacagacctcattaggataatgattagtataaataattgttagtactcaaggtttgatgaatatcataatctcaaaatatttaacgcttatcctcttctttttcccccctttatatataaattcccacaatttcaacagaaaattttaatatccaagaatatattgactactatgaaagatgtgct

SEQ ID NO: 109149 - DNA, 386 bp, Glycine max
tgcctaggcgagctggagctcgcctaggtgagtttgtttcttcaccatgaagctatttggtggcccaggtgagccaaaggctagcctgggtaagctagggtccaggaaaaccaaggaaaagacctttttgccccctttttttgggtatttttcacattcttgatcaaaacactgaatgatcatctatttcgcactataactggcgttcaacactagcaaggatcaaaatatgaatgaatgatagtcctcagatgaaattagggtagacaaagtagttttagatagtactatattgcatactaaattcattgctgattttatttttgaacctgtttttttgcatctgattctgaaaaaattaatgttgatataatggctactaacaa

SEQ ID NO: 109150 - DNA, 375 bp, Glycine max
tttaaatgcaatacttggtttacgagatgctaagcttacaacatctagtagtgagaggttatcctctggcaagttgataaaactttccaaatttgggaaactaagtttattttaggatctaataagcattccacatatatatgaactaagctaaccattgggacttgtgtagaaacctctctaaataaaggtttcaatacacattcttgggcataattccagttacagttatagcaaaactgacttgtggactgaataaaaaatagaaattggtgcccaattgtggccaggagaattaatcaattagcactactagagaaatgattttcagtgtcaattctcaaacacatatcactatggttatcaaactgtttt

SEQ ID NO: 109151 - DNA, 391 bp, Glycine max
tgggggcttgtggaggtcctttcacagattgcctatgtgactttaagggtggtttttctcagtaggtaggggtctcgtatgcttttcatgcagaattaatagtgttatgactttccatttggcttgaaacagattcggcccttaatgtttatgcatttgggaactcaaggttagttccctggactcttcaaaataaatgatttttattcacaaggattaaatctatgtgtttctttgtctctcctatttttaggaatggaaatgggtgtgcagatagattgactaattaggggtctacccaagttggcttcaaatgatgggataaatggcctagatttattgttgatgattttcatagttgcaagctaggcttaccttttaccagttcttt

SEQ ID NO: 109152 - DNA, 375 bp, Glycine max
  unsure (1)..(375): unsure at all n locations
ntgatntcctctgttccggaaacctttcttttctcatgtgcacccaaacccaatctctgggttcgaagacaaccttctttcttcctttgttggcttgtttagcatagcttttatttttcctctcaatttgatctttgactctcccatgaagcttcttcacatagtccgcctttgcttgaacttctttatgcttaaaaacagaaacattacgcataggcaaaagatcaagaggagttagtgggttaaaaccataaacaacttcaaaatcatcaaaagtgttagtggtcaaaatctgatttttgcaaaacaagatatatagtgactgtttagcatgaaacaacctcttgacctcactttttgtggctaaatagctct

SEQ ID NO: 109153 - DNA, 373 bp, Glycine max
tcctttcatagtaggagggaatgtgcctcttcctatttacactcttaagatcattccaatactctattggaggatccccatgaatccttcgttccctaacaagggaagtccaccaatagagggcatacccttgaaagctaaaggtagccaatggaacttttctctcttcgctaatatgatggcaagcaaagagttgttcaaccttcatttcccaatctaaataggcctcaacattatcttttccatggaaatatgggaggctaatgttaacctcttgaggccttctatccttttctcttctttgggagtgatgtttagtatgtgaactatggcgccctctgtaacatcctggaaatttctacccggagtttac

SEQ ID NO: 109154 - DNA, 392 bp, Glycine max
gggatagagggcatttttccttcaatgcaacaacaaccattgcttctttttcttaagccttctttgcctgttgaacatcatggagctaagtcacatgagctatcatttgttcttcactcatcttaaagagatagtaagtccctttgaattgaatagtgggaagtcgtagtatacactaaatgaatgagtagttgtcgacatcatttgtaaagtagacacaatcatcatcaaagtgatacttcctaactaaacataaaacttggataatgttgtggtgaacaacattgttgcttccatcataactagaggtggaagtcttcaaagtgtatgtccacacgatctgattccaaaagattctcgtatcataagcatctagaacacgaacaagcttc

SEQ ID NO: 109155 - DNA, 271 bp, Glycine max
gcagagaaggcggattaagcgctggaccacttgttcacgttgtcagtgccggttacttaattgcataagagagctccactgaatctagtgactgccttgatcagttgatgcgggtcaaaatactcctctcaatacctagctatatatcgagaactgtctgggaggcgcattgcatccaacacctcgtgagacatgatagtggttattataacaaagagggttgtaattgctacagccaatgattacctctcacgcataaggtattgcttac

SEQ ID NO: 109156 - DNA, 384 bp, Glycine max
agcttctgggaatggacagatttgagatacatatttgaatatattttctactatatttcagaagaaactttgcttagggatagttcttttttaaatgtaatttgctattgcagacaaagtttgtgtgctttgttactattgtactttgctattgaagatagacttttatgtacttttgatgtagctccattggatcttgtaggccttggatcttattcatcaatggagttctttgctttttgaattttaatggcaacggaatggagaagaagagttgaaaggagacaccacttcaagaagaagatgagtctagaagaagctcaccaccataagaagacatggttaaaagcttgaaggtaggagaagatgaatggacggagaggg

SEQ ID NO: 109157 - DNA, 395 bp, Glycine max
cctacatagcaccaatcaggggatatcggtgttccaatcatcaatgcaagggtacaaactggattgattgcagcagctgctacaaacttgtctggtgcctgcagcaattagatagccacaaaacaatattctatggtaaacaaaagccaccagactgcaattcataaaatcagagtcttacacttgaaaagttgcccttatccttaaagtagacattattttgtaagccataccaattggtttaacatatccatatatgctacatttgtataaataattacatccaacacttcattatatctttttttttctctcctattttggcaataatattagtcatgatatctaactataaggaacacaacacaagcttttttttatcctttatgtaattt

SEQ ID NO: 109158 - DNA, 415 bp, Glycine max
  unsure (1)..(415): unsure at all n locations
gaccttaaacctaagctcttctttancaatcaattgtctattgactaacaattctactgtaagttcacactcttgttctttctttgttcaacatgcatattcattcaaattcatgaaaagaaacacatatctcatcttaagcatgcattcaatttaaaacaaggcatacatccatttcacaaaataaataaactatttcactgccataccaacaaaagttaagttaaactgttacagatgcctctggatgagcaactacactactcatgcacaaaactaataaaaagtaaataatgtactaaaaccataattataataatagatcaaaaagcacaaaaaatcaaaaggaatttaaatatcctgtgattggtcctgggtgtccagtgtctgaccctcctcctcttccgacaagtga

SEQ ID NO: 109159 - DNA, 379 bp, Glycine max
tctatagaaaactacatgaagctgtctcggtaaaatctcttcccagccttcgttaaccgttggatcttctcaaaatgtgttttgcaacttcacaagacaattttcatgatctgatcgttgggatatttcaaaagaatatctggagtgtgctagaagctttcgttcccgagagcatctcttatttaagcatttcagcctttgctttcttgtagcttaggaaaaacgtcattctttcttccaaagccatttctaaagttccaagaacttttttcatcacccacagccaccattagccaccacaaaccatcatttttcttcattgaaaacccacaccgagaggaacccttcaaccgaagcggaatcttccaactttgcttgc

SEQ ID NO: 109160 - DNA, 384 bp, Glycine max
  unsure (1)..(384): unsure at all n locations
tgccgcagctgctaatggcgatatatcctgaaccgtcattgtcatnggtgagggagctgcttacgtggacatgtcgtcattgttgttggcgagaccggctgaatctggtgacgtggagagagtcgccaatgcttctggtgatataggttgcaggagtggttctcgtcactggaaatggcgagactggtgtccgcggattctcttttcctttaaataggcagcctttgccttgaaaatttgtagtagtcttgataaaagaaagcacagaggagcgtgtttaatcaagaatttacaagccttactttcattatctctagatagcccagcttttgccttgaagtttctcattccatccttatttatttgaagtaacaatctatattg

SEQ ID NO: 109161 - DNA, 390 bp, Glycine max
tcctcggggccatttcctgcgaaggcaaacatttggtaagttagtcttaccagtgggacactactcttaaaacaaaaatggcatacaacctcctcccataaatacaaacatcaatgtaaatttagagcaagcttatgcgcatatttccttacgaacgttcacttgcacaagacatcctattaactaagaaaaatgcacccatatacaatcaaggtagcttcattacctagattatttacatgtacttccaaggtgtatttgttatttacatcacacacgcctccttggctgaatttacacacatgcatactcaaagcattttggggtaccaaaaattgcacatgcgctcaccttggtatttctaatacctatacatatacaaacttcacg

SEQ ID NO: 109162 - DNA, 375 bp, Glycine max
  unsure (1)..(375): unsure at all n locations
ngaagtttgagaatcctcatatttctcacgcactcttatgtttttctcatcctttcatccttagcagccattaatttgtcttgataattttcttggatcctggcaataggaacagtgaccgcgatggaaattattgtagcaatcagtgttgcaatagaagcaattccaacattcttatacaaaatcgcaagggcaagaacaatctgcagaggaagcatccacatgtcatgaagataccaagagtagtcccctaccctctgaacatcaatagccatgtagttaacaacctccccgctcgtgtgactttgcttggccaagcttgatatccttagccccttttgatataccattgcagttagagccgacctaacatgc

SEQ ID NO: 109163 - DNA, 371 bp, Glycine max
  unsure (1)..(371): unsure at all n locations
tgcagcagatgcctctttactctaaatttttgaattatatgtttacaaggaaacacaaataccttcatcaaggaaacatcataatggaagggaattgccgtgctgtgatctaaaagatccttccacccaagccttaagatcctgggagtggtacgattccttgttcaattggagaagtcaatgtgggaaaagcttttattaacctgggagccagnttcaatttgatgccactctccatgtgcaaaagattgggagagttggaaataatgcccactcgaatgactttacaattagttgaccgctccattaccaggccatatggagtaattgaagatgtttggtcagagtaaaacattttatcttcccggcag

SEQ ID NO: 109164 - DNA, 395 bp, Glycine max
  unsure (1)..(395): unsure at all n locations
cgtanggtattgggaagtatgttgtatgactcatcccaattaccgtatacttgctcgagggcccattggttttctagccatgctttacgatatgtgatgatgtatccgaactcttgtctaacaaatgcgatgaatgttggaaaggttagttgctcattttcttcaactatcgcaaggatatttttgcctacaagttttgaatccatcttattgtgatcttgtgaaatggttggcatgacgcatgtgtgaggcccttctatcattctaatttcccaaacttttagattttttctttcggacactctaagtctccattggcacacatcagttgggcaacataagacccatgtatccttcacacacctcttgtgtttgaaagtgacatggttcttaac

SEQ ID NO: 109165 - DNA, 281 bp, Glycine max
gatcattgttgtatcttatgctaaataaacccacaaaatccttttttccctaattgcatgttttgtatttgatgtttgagaaaatgtgtaatttgaatcatgttaggaagttttttttaaggttgaaaatcttacctgactttttgaggtcttgattggttggccggctttagaagaaaatgggtccttaccggtttttgtaacccttttcaaattttaaccaccttttccaccaaaaaaggaaatagttgttgaacattaaaatgggatttttggggcaa

SEQ ID NO: 109166 - DNA, 343 bp, Glycine max
gacaacagtcacgttgtactcggatgtctgattgagtaccgtgacatatcgtgacgcttcgaagagaatgatgaatctctgagccaattaaaacgacaatgacgtttgtctccgatctgtgattgagtcccgtaatatgtcgaaatgctccaatcttatgttgaacttctgagctcattataatgacattaacttttttctcagatgtctgattgagaacccgcacatatctagacggtccgaatctaaagttgactctctgaccgactgctgaccaccataaatttttactccgatgtctgattgagccccctaccatctcgggacgctctttattgaatgg

SEQ ID NO: 109167 - DNA, 394 bp, Glycine max
taatggtgcaatcccaatcgaaattggccaacttcataagttgtcaatactgaatttgagctggaattctctgggtggatcaattccatttgagattacaaagttgagcaatattactttcctgaacttgcaaaccaacaatctaagtggttccataccaacatccattgacaacttgaaatttctctttgaactccaactcagggaaaacaaactaagtggtgtgataccaagcatgccggggagtttgcaggtgtcactgaatcttactagcaaccactttagtggtaatactcccaacaattttggtaatttggatagcctgcaagtcttggatctctcaaataacaaatttcctggtccaattcccaaccaactaactggaatgtcagct

SEQ ID NO: 109168 - DNA, 401 bp, Glycine max
  unsure (1)..(401): unsure at all n locations
tgaaaagcggcaacacccataacccanaaccttccaccattctcttcagtcccattcacaagcttcccaatctccccaaccatgtgatccacaggacaataacaccctctgccttgtgatccgctagccctaaaatctaacacccacttgagatcccccaaatacaaaacataccctttgctatgttcacttgccttcacaagacccctaagctcctccaccttttgctccacctccactcttgaaacattcccaaaagaagaaagagaaagagagataaacttgacacccctgagagtacactcatcaccaacatcccctttatcaatcttttccatcactcccctaactacaccttcaaggctagtaacacactctcccacaatcacaacacttctctt

SEQ ID NO: 109169 - DNA, 385 bp, Glycine max
  unsure (1)..(385): unsure at all n locations
ntgctaaaatagcttacatcatctttgtaaaaatcaatttttgaagaggataagtcataagtgactggctaatcagctttacacatatacatgtatatataacacgtagtaacaatgtgctttacctggactttatataatgaaacagcttccacaacaacaccaatggacaaaccaagttcaactacaacaaactaattcagcttcacctgaagttgatataataggtaatggcattagaagaactcaaagccaaaccaagttcaagtacaacaaactaattcagctttttctcaaccaaagtatgtcaaactacttgttggctattaaaagtgttagttattcatgtgacaggaaaagagagttgtaagacgataattcttat

SEQ ID NO: 109170 - DNA, 385 bp, Glycine max
  unsure (1)..(385): unsure at all n locations
tatcaaaaactcaaggtctgcccttggtactcatatttgcatacaccaaagtccacccttagcacatattcttgctgaacccaaagttcgcccttggaacatacctctacagaactcgaggtaccccctcaggtcgcttacatgtagcaactacaatgaccatcgccaagggtgcaaaantaaccaaacgaactaccaccccactattttgcaagacatataaatatgtcaaaaccacacctactactcataaccatcagagatctaaaagttgatcaactctaatatgtcattgcgattcgattacgaatttggtattgagccctatgtccgaattctaatgaacaatatgatcagttcacttgcattgtcattaaacccacat

SEQ ID NO: 109171 - DNA, 400 bp, Glycine max
gacactatacaaactcagcttagatgtgtccccaaagcttaatgtatactcgtctataatcgcgaagtgaacctcggacccctgtcagatacaatactagaaggaattccatgcaaccttactacttccttgatgtataactccactagcttgtccattctatacttcatattaaccggaataaaatgagcagatttggggagtcgatctactatgacccacacagcatcatgttcacgactagtcttgatgttaactacattcaaaatacataaatgtgctctaccatttccattccagaatttccaatggcttcaattaccctgatggtcgctggtgcttagccttaaccctttgacatgtgaaaaatcttgctacagatacaactcatttttcttca

SEQ ID NO: 109172 - DNA, 189 bp, Glycine max
gcatgtgctctagactattaacatatgtagagtatccatttggtatccttacccgcagaaggcacgtgcagaatatgatgctggcccaactggtacaagcatgacaagcaggcgagcgataaaatgtcttaccatcgcgccttgaatgcaactgagaccatctccacgtatttcctgaatcttgactgg

SEQ ID NO: 109173 - DNA, 389 bp, Glycine max
ctgagcaagttcaaaccacaataacttttgactcggatgtccgactgtgtcccgtaatatatcgagacgctcgaaattgaaaattgaatctctaagaaaaatcaaacgacaataactttttactcggatgtctgattgactcccgcaatatatccagatgctcgtaattgaaaacagaagctctgagcaaattcaaacgacaataactttatactcggatgttcgattgagtcccgcaatatgtccagacgctcgtaattgaaaacagaaactctgagcaaattcaaacgacaataactgttgactcgaatgttcgattgagtcccctaatatatcgagacgctcgaaatggaaaactgaagctctgagcatattcagacgaccataac

SEQ ID NO: 109174 - DNA, 366 bp, Glycine max
  unsure (1)..(366): unsure at all n locations
tcanaccacagcatcacaaaatctatgtgtccacaacccctcagtttaggggatcttcaaggcttgaaaagtgaaattgataatggggtaaatctgaaacaaactctcacctcacacaagtctataacatcaatttaaacgtgctcatactggatttacacgctaaatttcaccgaatcaaaatttgactcctcaacacccaattgtaccctacaaatggctcttggcctcactttggncattagtttttctctcttgcacagcccaagctttctcataagtcctaaatgacatttcgaactacgattaactcattttaacctctatttaccactgaatccagatttagccttccaactctcaaag

SEQ ID NO: 109175 - DNA, 282 bp, Glycine max
ctctatggaatgctccttatgacacacacagacttgcctctggacaattgacattgacaactgagcttatgctgaacgtctacatatactccctaagctgagagaaaaatccgtcacaacaaaacaattatgacctctccagcaacaagtacaatccccggtggaggaatcagaccaaccttaaatggtcgaattcttcacaacaacagctacgacaacaatagccttattttcaaaatgctgctggcccaagcagacatacgtttcttcaacaatccagca

SEQ ID NO: 109176 - DNA, 413 bp, Glycine max
  unsure (1)..(413): unsure at all n locations
acacttcaaactaagcttgacaaactntccctgagttcaacaactttaatgcatgataaaagagattattataaaggatgatcatgcggacacacacacacacacacgcatatgtaatagtggaaataaagacacataaagtagctctaanaaacactttttgaattaatgaagaggtgtgtcgcaacctacccttcggcgggagggcgaggcgaaacaaaatggcgcgccttagaaaagaagaaaatgcatggagtcgccaccaatgtttattcaaggaaaacattagaaaaaccaaaaagacgaaggtctaagaattttgagaataagggttcgggagttgtttacgcatggggaagacattagcaccctacgcgctcgtcacaagggacgacagcctttaatcgagtgtg

SEQ ID NO: 109177 - DNA, 400 bp, Glycine max
  unsure (1)..(400): unsure at all n locations
ntgaatctcnttgaacttcttcttcttctttgtaccaaaagctttctgaagttttttggttttctaaaccttgaaaacttgtgctattcatcttttcattctcttctccctttgccaaaaagaactcgccaaggactaaccgcctgaattctttttgtgtctcccttctccctttgccaaaaagaattcgccaaggactaaccacctgaattctttttgtgtctctcttctcccttttccgaaagaacaaaggactaaccgcctgaattcttttgtgtctcccttgtcaaagaattcaaaacgacacagtctgagaatttttttattcttccctttccctaatacaaaattgttcaaaggactaaccgcctgagaattcttttgtatccccattcacaaa

SEQ ID NO: 109178 - DNA, 403 bp, Glycine max
tgacactatgaaactcagcttcttatccaggcacattcttggtggcgaagctccttcttccatggcttattccctagtggatggcgcctactctcacctcttctcctttatcttccgttgtatctccatggtggaaaatcaccattgaaggacctcattgaagctcaaacatccaacctctatagaagctccacaagcaagctttcatcagccaacaaccctaatctgatcatgcacatggttctcaacccatggaggagacacatgaagcacctcgagaccacaatctagccgacttcaaacctcacctcggatatgccattgaggggaaagcagttggtggtgtacccctgccaaacactttggggggacctcagtatcgcccacaaccataacccttgca

SEQ ID NO: 109179 - DNA, 385 bp, Glycine max
tctgggtgggatacccaatgtgagcatagtttctatatccttacagatatattggcaactgctccactgctagttttgcctaacccgagataaccctttaaggtgtattgtgatgcatcaaagatgggtttacgcggagtgttgatgcaaaatggacaagaggtggcctatgcttctagacaacttatgactcataagaggaattgtcccacccatgatctggagttggctgctgtagttctttcccttaagatttggagacattatatgtttggctctaagttcgaggtatttagtgatcataagagccttaaatacttgtttagtcataaagagctgaacatgagacaaaggagatggttagagtttcttaacgattatgatt

SEQ ID NO: 109180 - DNA, 386 bp, Glycine max
  unsure (1)..(386): unsure at all n locations
tctatccaaatggacttaccttgaattaatccctttgatagccctttttgagccttgtttccctttccttgttttgaagctcactacaagccttaagtgaaaaaccatgatatcactatatccttaaggaattntggagctttggaattgttttgggaataagtgtggggggtttttgtttcattggacaacttgttttgttggctatgcttcatgatgtattctgggccatacttgatgtacattgtatattggttaaatgttggacatgctgaatgaaatgttgtttctcaaaggctatagggttcaaaaaaaaaatcgaaaaaaaaaaaattcgaaaaaagaaaaagaaaagcaataaagttgagtgaataagatcttaaatg

SEQ ID NO: 109181 - DNA, 402 bp, Glycine max
ctataccatactcaagctttacccttcagttgttcactatattgcttatgttgtcctcctatctctaacaactttggcacaaagacttggaaaactcatattctttgggaagcatgtcaacaagggaaacaaatcaaaacgtctttcaaatccaactagaacattgaatctggaaggaaagaggtatgactttatcatagttgatgactattctagatatacttgggtatacttccttgctcataagcatgagtctttcaagatctttgaaatattttgtaaaatggttccaaataagaaagaattatgtatctcttttatcaaaagtgaccatggaactgagtttgaaaatgctgagttgagatcattctttgaaaagaatggtattttccacaacttctc

SEQ ID NO: 109182 - DNA, 391 bp, Glycine max
  unsure (1)..(391): unsure at all n locations
tatgtgatcttataaaaacaaaaatgtttaattntaattaatgatgtatgtgaaaacaaagaaacatgtgtatttttaataaggtgatgatatttggacatccacaacttacaaacactccatcaaaatctataatttctctctatctctctctttcctttcttcctatctctctcaagatgtagacacttaagaggtgctcaaaaatcatttttctttttaatgatgggatcctgagaaaacaattgatgcatgatatttgttttgtctcttggtcatggttaaagattaaattaaagtagcatcttttcaatactcttttgtgcaatcacccatcagcttgcatgtgcagacctaaatctttttgaggtgtaactttggctcaccttta

SEQ ID NO: 109183 - DNA, 372 bp, Glycine max
  unsure (1)..(372): unsure at all n locations
tcgagcaaaatcaaacgaacaataatnttttttcggttgcccgattgagncccgtaatatatcgagactcacgaaattgaaaacagaagttctgagcaaattcaaacgacgataaattttactcgtatgtccgattgtctcctgtagtatatcaagtcgcttganattcagaacagaagctctgagcaaaatcaaacaacaattactttttacttggatgtacgaaggaatcccgaaatatatcaagacactcgcaattgaaaatggaagctctgagaaaattctaacgataataacttgttactaagatgtctgattgagtcccgtaatatatcgagacgctcgaaattgaaaatagatgctcgtagaaaa

SEQ ID NO: 109184 - DNA, 377 bp, Glycine max
  unsure (1)..(377): unsure at all n locations
ngcaccaacacaggtatttcgatggacccctntattcttttccacaacgaatgtagccatattggttgcgaatggcacctaaggggagttcaaaccaataacaagtcataatcaaaagtggcggcatatgataaatgttctgcacttgcaaatacaaaaaacccattgaatgcaacatggtctacctgcaaagaatgttgtgtcccagcatcgtccttcgtccgaaccgatgtttgcgcctcatcatgcgcattccttgtacacatgcaacaacgttgactaatgtcagacacacaacaaagaaagccagtataaggacctcagtgtttgcgatatttaatagcgacactcaccgtgtatcatgtctccccaacttg

SEQ ID NO: 109185 - DNA, 392 bp, Glycine max
  unsure (1)..(392): unsure at all n locations
ntaacctcatcgnctctcacagtctttagatttgggagcccatccaatccttgtgttcttactctcagccacttatgaatacccgcgatgatcccattactgcttcccctaagctctctggcctttcttcacgccgcatcccatgccttgcgaacatccttggagtaccctcgccgttgtgggcactgaaaccccatgcgatgaaagcgtgaagctctcgtctgatggcacttgtctcatggggtagccaaacttgcttatggcgaggatgggattataattaatacaaccccttgttcccatcaagaaaacatttggacatccttcgcatgaagatagaaacctgattcttcctttcttctagcgagggaaccaattaacagacgcccctc

SEQ ID NO: 109186 - DNA, 395 bp, Glycine max
tctcttacaaagatgaaaaagagaaaatgaaagattaggaagtacatgtggtgaggatgtctccttcacctctagaaacctcacaatcaccccaactctcatccaatactccacatgataacttcctctttaatctctattgtccctcaagatcttcacaccagaagttctctccaccactcaaccactcagatgaatgcttccaagaacagagaaaacaccaaaaattgagaactctcttccatttctgatttcagactttaaatagtgttgctgatttttggtcgttcgctcagccacattctggttcgcttagccaaattaagtgacatttggcttagcgcgcctcttctccgctcagcctggaggtgcaagcggtgcgcttagcaagtttg

SEQ ID NO: 109187 - DNA, 394 bp, Glycine max
  unsure (1)..(394): unsure at all n locations
ccacatgaggaagtggagaacggtgagacttcctacttntattcgttgaccacacagtggtacctggagatatgtcgcgggggtcaagagaccttggggacgtcaggtggggtgctattgcccaaaaccaagcttgaccaatcccgacccaacccgggcatagtcagtcagtgagaacctgtgatgtacctaaacaagcgagctcctggcagtcaaccgataaaagaacaaagaccacaaagcaagggggcttgtgtggtggctggccaactgcgaatcttgtgtgatatatgggatatggcctctggtaatcgattaccaagggtgggtaatctattacaaggcttaaaagtgaagacaggaagctaagatggcctctggtaatcgattacca

SEQ ID NO: 109188 - DNA, 395 bp, Glycine max
  unsure (1)..(395): unsure at all n locations
ntgtttggaaactataaactaccaagtcaaaataatggggaccatgcatgaccaatctctcctcgaagagaactaagataaggtaactcagtgtcaccctacctttacattctttgcatagaggggtgctcctctctccttaaaaaagctaagcataagggagatattcatggtatgaaggtgtgcaaagggacccctttcctctcacaccttttatttgtgtgacgcttgttttctattttgcatggcatcagagaaataagcaactacactcacttaaatccttgatacccatggaagggcttttgaccaaatgatttatttagacaagtcataaatttttttcaacaccaacactcaatgtaacgactcgccttgtcgctacagtatccaca

SEQ ID NO: 109189 - DNA, 385 bp, Glycine max
  unsure (1)..(385): unsure at all n locations
tggttcgaggtacttacccgttgaagatcgaagaactatgaagaacgaatgaagaacgtcgaagaacggtcanaacctttgcgaaattcctcacagaatacgttacggaaacatttcggaagcgccctgggttagatcttcttcacggaaacaatttttccaagcaaattcgaaagagagagaagtgcctaaggggctgaacccttttccttctcacttcctcccctatttatagcaaaatatgggagatgcttgccgcccagctcgcccaggcgagccaggttgcttcctccagaagcaacagccttctggaggaatcatctggagggcccaagtgggcctggttgctatttgcacccccgtttntactaagtacacccccctg

SEQ ID NO: 109190 - DNA, 383 bp, Glycine max
tcacaaaaaactaactggtcgaagatcgaagaacgatgaagaacagacaaagaaggacgaagaacggtcacgaaattgatcacagaaatgttacagaagcgttacgaaagcaccttagccatgatttttcttctcctttctccttcttctcactaattttagtgaaagcttcttataaatgatgctgaaccccttcccctcagcccctcacgcctatttataggaaaatgaggggaggaggttgcacaatagctcacccaggtgttcgctggttccggcaagtgcaccggatcacacaagtagtataaaatggtaagaaccgagtatcgaacacttggggaacttgtgttatttggtaagctatttcaacaaataggtgtctg

SEQ ID NO: 109191 - DNA, 385 bp, Glycine max
tggttcatatgacatatatgctccagcttgagggggcatgtcaatgttgtctcgatgaacaaccaaaagaacgtccttattcaaataagcgttgaatattacatgtactattattcttctactacctaactaatatatactacaactttttttttgtcatgccatggttacctcagggttagtgactaatctcgttcgcagtactgtcgcacttgctgactcgaaggttttcatatatggtggggattgaacacgaaattttctactaaataaattgtccccacaatgtgtgagtgcaggatgcctaaactacaacttgtttatttcattattagttcactctttactaataataatttggacaatgaatcatataattagtaac

SEQ ID NO: 109192 - DNA, 377 bp, Glycine max
  unsure (1)..(377): unsure at all n locations
nttaatttcaatacaaggaagcatgacttacgcctatgaatctaagttctggttttgaatgtaaaaaggcatgaatattatgacatgtttgagaggtttttttaaaatttaaatatggctgccccacgaggaatacctggcacctatgtagcatggaaaatacctttcaacggtatgtatatatgtgaatatatgtagcacgaaaataccttgcaaagtgtgtgaatatatggcataaacatacattacgcatatgcacgttcataaatgttttacattaaggaaatgtgtgcacatgtttgttctaaatcgaaaggattagcatgccatttttgttttaaaataatttttcttgtaaactaactttccaaatgttt

SEQ ID NO: 109193 - DNA, 351 bp, Glycine max
acctatacaaactcaagctgaaactgagctgtatatccaggcacgtgtttacgagaacgacggatggccttttacctaatggcctagaggagattatcaaaaaatatcatataagatcattactggtactgaagtataatgaaaagccgatctctaatccaccttaggggagagggggtacaagtactctattaaaccagaccatgtatgcctaagcgacaacatattcaagaaatatagtttttagataatattaacagtgtccctttgttttatcactatctaaaatcacactaaaatgttgactaacgttattctaaaacaatatctacatgtttaataatttgggtc

SEQ ID NO: 109194 - DNA, 374 bp, Glycine max
ttggaaaggctgtttcaccttctcgctaagccaatctactggcttagcgagcatccactaagcgcaacactcttgggctaagtgcaaggaagaatccacaagaagatgagttgtacaggttcgctaagcgcaccgcttcagttcgtccgctaagcgagaaaggcgcgctaagccaaaaatcactaacgttcactaagtggtccatacgtgcactaagcacacgagcacaaacaaggcaacctattcaagaccttaattgctttgttaaattttgttgtaatagaacaattgagtgctcaattttttctattgcaattccttgtatttggacattcttcaggggtgtattgggagtcttgttagtcgtcttatac

SEQ ID NO: 109195 - DNA, 392 bp, Glycine max
tctgtttcaatttcgagcgtcttgatatattatgggactcaatcggacatccgagtaataattattgtcatttgaatttgctacgatcttccgttttaattacgagcgtctcgatatactacgggccacaatcggacatcttagtaaaaagttattgtcgttgtaatttgctcagagcttctggtttcaatttcgagcctctcaatatattacgggactcaatcggatatcggagttaaaagttattgtggtttgaattcccaacgagcttctgttttcaatttcgagcatctcgatatattacgggactcaatcgaacatccgagttaaaagttattggcgtttgcatttgctaagagcctcttttttgaatttcgagagtctcgatatac

SEQ ID NO: 109196 - DNA, 391 bp, Glycine max
  unsure (1)..(391): unsure at all n locations
tctnttctggaaaattccttccctagttggtgctctggttcgtgtttaaagtggtgtttggtatcggatgtgcggcaaatgggttttggttctgatttaagggtttctttgtggatgattaagtgttcttggctgataagatgatgggtaatgagaaaagctgatattggctgagtgttgacattgctaagctggtgggaaatttggtcatgaaaggacagcagtcacaacatgggatccttcctccatcttattctctccattttccctatgcttcatgttcatcaaagcaggataatcaaatttgcctctttttaaacccactttgatccttttgccggaaaaaactaaatcggcaaagcttgaaggcgtgtaacccaccatcttctca

SEQ ID NO: 109197 - DNA, 395 bp, Glycine max
tgtatatttcttgcgaataacaataatggaagctacgaattcaatccttcacgaactttagccttcagttgggttaaaataaattaagagcataaatagtattagcagatatatcttttagtatatcaagagtactgcagtgagctttgccaaagtgacattttaggacatatgttggcatcatgaatatattcgtatgctatcaatctcatgaaacgaatcacacacggcatatgtgattattcaaaattctcgcagaaaggaaaacgacgtatgttcaaacacctacataaaagaaaaaattagagaaaatgagaaataccccatgaaacccttaattaaaaaagaaaagaagaaaggtttgtatatcttttcctcctaagtttttttttttt

SEQ ID NO: 109198 - DNA, 396 bp, Glycine max
  unsure (1)..(396): unsure at all n locations
taccagaagcgccaattagtggactntgttgctggcgattttgtctgatctatcatgagtaaagatcgtttacccactcattaatacaactagcttattgctagcaaaatcgagtcatattcatagttctgatgctttcaatgttaatttccttattatggtaatgcttcttctgatgatgagatggcttttgatctgaggatgaatcttctccaccccaaaaaggatcttgcagtgcaagattgagcaaagttgaccaaaaaaagtcatccgtgtccatttttttaacaaaggagtacactttttccaatggaaatgaccttctaaggagactgcattccctactagcaatgtgttgattgatattttagccaaattatattgtgaaagggtaaa

SEQ ID NO: 109199 - DNA, 378 bp, Glycine max
tgtgtattgctgcattctactaatatatggaattgtccactactttgcttgagaataacaattgcttgaccacaacagcgctggaggcggcaagggacaatggtctttcaaataaacctgttgtacatgaacaaacattatatcatgcgctgaccgtgccaaatgaaccagtgaagtcattgcataattgttatactaactatattcaatgtacctgaacaaaatgatttccaaacacgtgaccgacacatatgatgcggtggccagaagaatgaggtggtggttgacttctaagagggaaaaatgtcatgctttgttgttgggacaacgatacaaggattacgttatacagtgaagcaatcacatatcccatgtccg

SEQ ID NO: 109200 - DNA, 386 bp, Glycine max
  unsure (1)..(386): unsure at all n locations
tgttcttaatntgttcaaagttctttaacaaccttataacaataaacttgtccttcatttaattgtctttgggcttgccgacctcgatcaacaaagtactttcgacacctactatatgttgatttcactaatgctgttatgggtatgttgcgacaatccttcaataccttatttacacattctgaaaggttggttgtcatgtggccatatctacgtccttctgtatcataagccatggtccatttttcctttgaaatgtgatcaatccatgttgctatggctggactcagttgacgaaatttttctaaattttgatcaaatatatgcttgcaaggagtgtagcctgcataaaattagttagcaacaacaattttaagtatatatgg

SEQ ID NO: 109201 - DNA, 125 bp, Glycine max
  unsure (1)..(125): unsure at all n locations
ntctaaagttntctggttttctaaaccttgaaaacttatgctattcatcttttcattctcttctccctttgccaaaaagaatttcgccacgactatccgcctgaacttttttcgtgtctcttttt

SEQ ID NO: 109202 - DNA, 381 bp, Glycine max
  unsure (1)..(381): unsure at all n locations
tccactctgacacatcattatgaaagttntaatatggaggaaggagaatccgtggatgatatgtgtcataccctaatttcatccggggattattacttgatgacatgcaacctttggttagccgctttgagatacttggcgtcctttgttgcacaataaatgaagtcccgagacgtctcagaaatcaaaaggaagcaggcttgcacgatccgtgaaattccgtaaggtggcggaagtcgaaaaaaggtgtttttgcgcaatccgtgagttttgtaacttcttcgaaagctaaaaaagagtaaatacataatctgtaaggattcgtaaccttgaggaagggaaataagtattcgtacgaaatccgtgaagtttcgaaacgtt

SEQ ID NO: 109203 - DNA, 388 bp, Glycine max
tgctgaaatacaaatgacattgcatattttttggtctttggtactagtggctagaacttttaatgtgattgattttaagcgtaaattttatgaatagcaacaaatttagatggagtaaaatacaccacatacgttatttttggctttggtgaagggtatgaacggaagccctgatatctctgctgtaagagaagtactagcagactctaacattctattatatattagttataaaatttattgaaaactttaaaatcatcaatgaaactcattaaataagacataagtgtaatattttgaatttctaatgaatttccatcgaggctactgatacatttctgaagacactcgttatgaatcgattggattcccataaccacacagaaag

SEQ ID NO: 109204 - DNA, 379 bp, Glycine max
  unsure (1)..(379): unsure at all n locations
ctttcgaatattctctnttatttgttaaaattattgagaaacacaattttttaagtctcatatctttttaataattttattttgtgattttttaatttttaataaactttaatcaataaaaaagcatgttgataatatttgtctctgttatgtctataaatgtatattagcatttttgcctatctggcttgaagctgaatgatcatgtattcctccacaatttagcatccaagaataacctttggatattagtctctttgtctttttttactaaagactgaaggattatttatgtatcgatccttaatttaagcaccttggtcgaacttaaatgaaattaaggcttattcgatctatgaccagtgtggttatatatcat

SEQ ID NO: 109205 - DNA, 278 bp, Glycine max
  unsure (1)..(278): unsure at all n locations
gatcagcaactttcattatcagagtaatccagcacagccgtatctgtattggcgacagcaaaattctgcaagttgcaagtcctttcccggatgtcaagacatttcacgtgacatcagctttctgctccacctgtctccatgctcttactgctgtgaagcagntcactgcagcatcttctatcagctactagtcttttccaggatgtcaagacatctcatgtgacatcagctatttgctccccctgtctccatgctcgtactgcatcttctatcaacta

SEQ ID NO: 109206 - DNA, 378 bp, Glycine max
  unsure (1)..(378): unsure at all n locations
ngngcctcatattgatcactacatgggttgagaagaacatccttgacttctccaaactgattttctgactggaactcctgcaaaacaaatttaagatgttttgaatagaacaaacttgtactactgaagcctcaacaaataaaataaggacatccataaacgccaagtgggggaataaggggccatgtctactcaaccagatagtttccaaactccttgatccaccatcatagatatcaactgaaagagacgttcaatacacatcacaaagagatagagagatagaatccccctgtgagattcccctagtaggagtgaattcctgaagcgtttctccattccaaagtaatctcattgaagttgtagaaatacaacttc

SEQ ID NO: 109207 - DNA, 423 bp, Glycine max
  unsure (1)..(423): unsure at all n locations
cctataaaactcaagctatgttnntttgggaggcctttctggtctttcttcttatgtgtaagggaaaaaatcctatcctgggtcaaggattatggccgaagggttaaagttttggctcaaaaaagcttgcggaaggcaaaacataacgtatgtcaaggtatttgctccgcaagcggttcanggataagggaatgccccatattatttccatgacacgcatataacaatgatgatttaaaaatttatgcaaaactgatcatgcatgcacccatgtggacactcaagcatcaagttntgtggacatgtaacactaaggcttagggttcatttttcctatttaaatcaacccagtgttttcaaaagatgctcttttatcaatttatgcacacatccgagtccatttaggcattcgggaaaactttc

SEQ ID NO: 109208 - DNA, 375 bp, Glycine max
taagatatgcatatgataagagatgtactgagatatagataactgatgctatgtggtataataatggtagcagattaaagataatgatctatggctatatcggatgagattaagagatatgataggctatttactaagaaaagtatgaaaacttttatcattaactagtgaggaatatatctctaaagacttagattagagttgtgatcaaactgttacctgtggttactagctcatcttttagtatctatatatactcacagtctttgagacaatgaaaataaagagaaatacactgattttcagttatgttctttaatctcaacactagttataatcaatatcatccacatacacaatgaggtaaatgcatca

SEQ ID NO: 109209 - DNA, 406 bp, Glycine max
atctcagcttgcactctaaaatttgatccagttcgtatcaactggtgttttaactctgatcttagagctatgtgggtaaattggtgagaaaaatgagtagttgataggtaagatcattttcttttaaaagttcaaagacacaggccctagttggggttggctacatgcagctacatggattcacttttaatcatattatcttccatttcatctataaattatcttccatcacatagccaaattaattatgctagaccattttttgatacctctcctcaataggggctactgcatgtctctattgtcgtacaatgtacatttgttactaaactctctaatcatgcagctatactttcattcaagtttgacggccacttcacaattacaagacaaaagtatgaatctg

SEQ ID NO: 109210 - DNA, 301 bp, Glycine max
caccccatcccaaaacgacgcccacaagcgatgagacgctgactaacgaacgacgcccgacgaagctagagcggagcgacccatacaccacctaacagcgaagaccaccgccgcgagaagagaagctagagcccatgccacacaccccctcaagaagcgaagcccacccccgtgacacaaaaacatgaaacaacaaaaacaagccgcaacacaaagacaacccaaaatgccccggaagacaaggccaaaaccccaggctaccagactggccaacacacaacgcccagacgaaagaaaaacc

SEQ ID NO: 109211 - DNA, 405 bp, Glycine max
  unsure (1)..(405): unsure at all n locations
tattctaggagaagataataagaagaatttatgttatgagattttccataagttaaaattagcttatgcataaatttaatttatagaagttttctcatatagcttctttaaagacgagagagcttatacaaataattctgtgcaaaagttagtttaaatagagaagtttatttaatttttttctcttaactttttctcttagaagtgtttttggttaaacttacccaaacagacccttaattcattaatccaagttcaaaagcactagaaaatttcatttatgtatcttttaacctaaatattccgtgtgccatactgattgatggtcattattattggcaattagtctgaatcattaattatggcaggagagctagctntcagcatttgccaccaaatcgaaga

SEQ ID NO: 109212 - DNA, 301 bp, Glycine max
tgagatgtcacaagacttgctgattcacttatttcttatttctctgccttcacacgttagtcaatatatatatcgcttctatcactgtcacaaggcggaacggtctcttaatgagctcgtttgatactgtgtgcgataacaggaaatgttttagcaagagatgactgacaatgcatatgtagtgagtacctctaaagacaacggctatatgaaaagaactgatgagcccatcactgaaatgctacaggtccatcgcacattaaacataatcaacgtgacaattgtttctttagtaaaagac

SEQ ID NO: 109213 - DNA, 392 bp, Glycine max
tgccgcccagctcgcccaggcgagcaaggttgcttccttcataagcaacagccttctggagggaggatcaggaaggcccaagtgggtcagattgctatttacacccccctttttactaaatgcacctcccttctatttttttggtaattctttttccgtaacgttacgaaactttacgaatttcgtaacgatacttattttacttccgcaaggttacgaatccttacggattatgtatttactcttttttagctttcgaagaaattacggaaactcacggattgcgcaaaaacatctcttttcgacttccgccacattatggaatttcacggatcgcgcaagcctgcttccttttgatttccgagacatctcgggacttcatctattgtgca

SEQ ID NO: 109214 - DNA, 391 bp, Glycine max
tgtgtggctagagggatggctcggaatatcttttcttgaggaggcccaaggatctgaaagctatgggggacaatagctgatgcttattatattgagatagggatgaacatgaactataatgagatatcagacacacgcccactatggcgctatatacatggctcgactcatgtattatgttaatcaatgccattcatatggattagacaactattaggacgttaatacgcgactttattatacttatatatagattgatactaaaccatactagtagtgaaagatgtgtggaactgacactaatagtgaaaagttacatacaattcctatcccgtcattatacaccaaacctacccttaaggaactacatctaccacgtctagtccaggtg

SEQ ID NO: 109215 - DNA, 367 bp, Glycine max
tgtacttcacggtgaatatccgggtcgatatttttttaaaatagctcaacaagacggaaggggagagaccgacgatgctgtttgctaacctctcaaactccgtgaggtactcagtgacagaacctcgttgaaccagcttgaataatgtgccgcggggatcatcataaaatgatggagccaaacgagtctctatagcttgaaggagagctgaccacgatgtgatgaaaccattggtgaacatccattggaaccagttgagtgcaactccgtcaaggtcgaatgaggcgactgtgatccggtcttcttacggcgttccctggtaatcgaaaaactggtaaattccgaagatccaacctaatggatcgtg

SEQ ID NO: 109216 - DNA, 373 bp, Glycine max
tccgttgttcatcttcgagcggctcttatgttatgtgccttaatctaacatccgtgtgaaaagttatgaccgtttgaaattctccagagcttcctttgttcaacttcaagcggcctgatatgtgatatgccatgatcagacatacgtgtgaaaagctatcaccatttgaatttcaccagagcttcctgtgatcaatctcaagctgctctacgtatgatgcgccctgatcggacatccttgtgaaaagttatcaccatttgaattccgggagagctatctatgtttaacttcgagcgtacccctttgtgaaaagcctgaacctgacattctgttgaagagttatcagcgttcgaatttcaccataacttctttg

SEQ ID NO: 109217 - DNA, 367 bp, Glycine max
atagaaagcccgcgtggtaatggatacaaaaaaaaaattttggacaaaccaccgaacgcgagagggaccacgaaacaccctgcgagcagtgaagcgtgaggcaacataatacaggcttagtgggcaagtacaaacgggatgggtgaatgctctcctataacctacgcgacagaagcctgagaaaaaccatgatgacctcgatagcccagacaccatacaagccgtaacaaaacacacgccatagcgacccatactgagagcacgctatcgcctcacaacgagcagacagacgcgagcaaaaactgctactgcaaaaggttggactgaaatacccatcaccgaaacacacgcgtgctcgaaagaaaca

SEQ ID NO: 109218 - DNA, 382 bp, Glycine max
agacgatgcttcaatgtgaggaaaagaaaaattgtttgatttatgagagataggggagcacgaaattgaaggaagaaaaacggagagaagttgaactttgagttgtgtctcacaagactctcattcatcaaagttacaataagtgttacacatgcttctatttatagacttggtagctttcttgagaagctttcttaagaaaacttccttgagaagcttctttgagaaaactttcttgagaagcttgagcttagcttcacacaccctgaaattctgatactgaggacagatgtcgtacatgatgtcacgacatcgcgcttcagaacatgcagattatatatgacagtctgaacagattaaccaagttaattacacaagagaa

SEQ ID NO: 109219 - DNA, 378 bp, Glycine max
  unsure (1)..(378): unsure at all n locations
cagcacaaagatcagagagagngaaangaatggattcttcttcttacaatggtaatgcctcttctgctgctgatgatttctttctgaattcaattcctgatgtgaagctaacatcataattgggaatatctgtagtttgtaaggatttagtcactaatagcgatgttatttatacaagtttactgttgacatcatttaattaattgcttcatgcaaccttcttaatttacgactattgggttcaaatttgctaatatcatgtaataattactgatgggttcaaactttaccattgttttttatataaaaaaaatgtgtttatttgtctaataagtgacgagtctttataagaagcatgtcgcatattttgaatttcca

SEQ ID NO: 109220 - DNA, 402 bp, Glycine max
tctttgagaaaactttcttgagaagctagagcttatctacacacacccctctcataactaagctcaccttcttgaaaagcttccttaagaagattcctaaagaagctagagcttagatacacatacctctctaatagctaagctcaccttcttgagatgagaagctagaacttagctacacaccccctataatggctaagctcacccccatgacaaaaaacatgaaaatacaaaaaaaaaagtccttactacaaagattactcaaaatgccccgaaatacaaggctaaaaccctatactactagaatggccaaaatacaaggcccaaacgaaggaaaaacctattctaatatttacaaagataagcgagcttatacttagcccatgggctcgaaatctatcc

SEQ ID NO: 109221 - DNA, 380 bp, Glycine max
ccgcttgccaggtgtttttcttgactctttactgattttttttttcttgattcctttataatgcatgaatctcaacgaaagtttttcattccattttaatttattcatttggtctttgcccggtactatccaaacgcatccattcggttactgtgtatgaatacgttttgcttcttgaacaataatagtccttttcatttttggagtttcttttcttctgaaaacgacttgatttgttttctaagaatttaacattctaggttctacacggatggtaaaaagcataagcaatcgttttggggagcaagagcaactgagcctccagcacttaaacctagcaatttgctaccactatggaaaaatagaattgctgaaacatt

SEQ ID NO: 109222 - DNA, 394 bp, Glycine max
tgtaggtcaaaccaaatttttattgtaagccgttcttagtctttgaaaaaaaccccatgaaaaaagcatatgacatgaaattagtcaagtcttacatattcaactcaagccgaactcaaacttaggaaaatttgagttgcctcggctaatttatggagtataggatgagactgattggatgcaagaaaaaaataacctttaaagaatcgtgccctttgaaatgctcatttccaaaaaagatgtgtaattaaaattaggagcccgtaattttaacatcggatgtcctcttccctttgttatccttcgattaaaaaaagttgtccttcatggccaaaaaaaaatgtttcccttcttttaggaaacgacatcacgtgtggcttgctctgcatatgct

SEQ ID NO: 109223 - DNA, 333 bp, Glycine max
aagcgaggccatcgcggtgctggatgcaatcaaatggcttctacacctgagtgtggagaaggtcatcctcgagtctaactgcatttacgtatccaacagcaatcttaaacgggccaatgatctctttgaatatggctgcaccatctgcttatgctgctggaacctcttgcactatagatctgacatcaaagtcaactacgtacgtcggggggcaaactccgtggctcacggattagcaacaacttttgatactttgctaacactcgttattcaatctgtcccaattgtagccttatcaaaatcccgcgataaatacatgagtatatctacatt

SEQ ID NO: 109224 - DNA, 397 bp, Glycine max
tcatttagaggcttcctccagaagcttcattattatacttctagcacactacaaacatcttctccaagatcccaacggtcagatcatggaaaggtgtcttttgaagttgcagaccaaatttagagaagatccaaccgttaaagaaagttgggcagcatttttaccgaggaagcttcatgtagctttctctagaagctccattaagaggcttcctccagaagcttcctcgtggcttctttgagaagctttctcaagaggcttctttgagaagcttgatccttatctatccacactcctctattaactaaattaacttccttaaaaataattacggatgaaaataactgaacaaataatcaaacatcaaacataattactaataatatatagatatata

SEQ ID NO: 109225 - DNA, 387 bp, Glycine max
tcagtccctgagaaactgattcccagaatacttcttggagtgaagattgctgaaaaccctagccctgcaacaagtcctatggaagtagacacggagatggacaagaaaatccgcagtattgtgagtagcattctgaaagatgtttctgtgcctgatgctgagaaagatgttccaacatcttccaccccgaatgtttctgtggctgatgttgagaaagatgttccaacatcttccgggccaaatgctgaagtactctcttcccccagcatagagagatcaacagaggaagatgatcaagcgtcagaggagactcctgcaccacgggcaccagaacctgctccaggtgacctcattgacttataagaagtcgaatctgatgaagaaccc

SEQ ID NO: 109226 - DNA, 364 bp, Glycine max
  unsure (1)..(364): unsure at all n locations
tggtgtagagcttgagttatggagccaaattatacttgataaatacttgtaactcgttagaattagtggaacttattggttggtcaagaattatacatagtcttggttgttgagacgaaccaatatatatttcttatgtcttattctttcttctattatttgaactgacttagggtttaaatttgatctttgcttttgaaaaactttgtttgctctatgaagatttgaaactatcgtttaatgtgtcctacgaaaatttgatatctggtttcttatattttacttcatcagatgatatctttgttgtattcgaaaaaggttntaagtttagttaaaatcaaaattcaacccccttgtgatatat

SEQ ID NO: 109227 - DNA, 396 bp, Glycine max
  unsure (1)..(396): unsure at all n locations
ntgatggtgtcgagaagaaatcacatgtttgttattttaaaaaaggggtagaatgtgaatgtatgtatacatgattttgttagtgcttaactttactgagctctaaaagattggctaaaattttgttaaaacataagcacttatacaatgatggaaagctggagttgctgcacatgatgtccaacgttatgtcaaggaatcagatcgggctgcacaatgcacaatgcaagatgtaatgtcaaatgaaaaatttaagctgtaagatccacgatgtctgatacaatgtccatgacatcctgcccgaaaatactggacacataaatatgttatatctttaacagatggatgtgcagttagcaacagattaggcgatctttcttttgaacgaataaaagg

SEQ ID NO: 109228 - DNA, 338 bp, Glycine max
gccattgacctatggaataaacaaacacacttaatgggtgactgctactgaaattctggtaacctaaagtcacccccaacagccaacaaggcagcccccattatgtctcccaaaaggctgatgcctatgttgccaattaggcccttattacaacttgaactaaacctaactaaagccctcttagatgattaacccaaaacatatttttggtcaatcaactttacaaggattggaccattatttagacacactatacactctaaaattgagacaaagtggtgacatttatccctcatccatttgaaccttgaacaactcacaactctggactttatatt

SEQ ID NO: 109229 - DNA, 390 bp, Glycine max
tgagatgaggaagtgttgaaaggtgaatcttttctgcttttattgtagaccacagagtggtacctgcagatatgtcgcgggggtcacgagaccttggggacgtcaggtggggtgctattgcccaaaaccaaacatgaccaatcccgacccaacccaggcatattcggtcagtgagaacctgtgatgtacctaaacaggcgagctcctggcagtcaacagataaaaggaacaaagaccacaaagcaagggggcttgtggtggctggccagctgagaattatgtgtgatatgtggattatggcctctggtaattgattaccacaggtgggcaatctattacaaggcttaaaattgaagacaggaggctaagatggtctctggtaaccgatta

SEQ ID NO: 109230 - DNA, 329 bp, Glycine max
tacatctagtgtggaaaatatttttttttggtgtcatacaatggcggcatatgacttcccaagagccttctcaccattagcgtatgacgctgcatagctttctccttaagctattgttccaccactattctttcactaatttcagatttactagagatatcgccatctgccaacatgagcaatggtgctcctggttggatagtcataagcaatatgtcctctacctaagcatttgaagcattgaatgtttctggtaccagcgtctgatgatgaagcagaattatgctaggatacagtactggacgttgctgacttcccagtggaaactg

SEQ ID NO: 109231 - DNA, 391 bp, Glycine max
gagatgaggaagtgttgaagggtgaaacttcctgcttttattgttgaccacagagtggtgcctggagatatgtcgcggtggtcacgataccttggggacgtcaggtggggtgctattgcccaaaaccaagcttgaccaatcccgacccaacccgggcataatcagtcagtgagaacctgtgatgtacctaagcatgcgagctcctggcagtcaacagatataaaggaaaacaagaccacaaagcaaggaggcttgcggtggctggccagctgtgaattttgtgtaatatgtgagatatggcctctggtaatcgattaccaagggtgggtaatcgaatacacagcttaaaaatgaagacaggaggctcagatggtctctggtcaatcatact

SEQ ID NO: 109232 - DNA, 399 bp, Glycine max
ctgagggtgcgtaccccatcatcttttcatagtttagtatcgataatgtgtctaccatcacgattatggtctccctttccatcattgggggtaccacttgggccgccagatccctccaccttatgggcgtgttctttgaaagatccgtccccctatttgcaaatgttctgtaggtgcatcctatccagaaccatatcaaaattgtactaatactgcttaacaaaggcaaccattaggtccttccaagaatggactcgggaaggttccaagttagagtaccaggtaacagctaccccagtaagactttcatggaaggaatgtatcaacaattcctcatctattgcgtattcccccatcttctgacaatacatctttagatggttcttgcgacaagtagtt

SEQ ID NO: 109233 - DNA, 373 bp, Glycine max
  unsure (1)..(373): unsure at all n locations
accttaaaactcagcttagcttctaaggatgttttctcaaagaagcttcttaggaagntttctcaagaaagcttctcaaggaagttacttagtctatcaatagaagcatgtgtaacacttgttgtaactttgatgaatgagagtcttgtgagacacaactcaaagttcaacttctctccctttttcttccttcaatttcgtgctcccccctctctctttctctccctctttcttttcctccattgaagcatcctctccaagcttcttatccaaggctcatcttggtggtgaagctccttcttccatggcttattccctagtgcatcgcgcctcctctcacctcttctcctttgtcttccgctgcatctccatg

SEQ ID NO: 109234 - DNA, 392 bp, Glycine max
tttcaggatacactttagaattttccccgtattttcttcatatgcaatggccaccttcacgatttgaaatcaaataaagattggttgggggtgctttctcttgtgtccagcaatttctttggaagaacatgaaaatcttagattttaaaatatataatatttaagtgacactttttgtgctcccttatatttacaaaaaaattatttattgattgaaattcaaagtgaggtctatttaataaccttctcatgtgtagagatattcatttcagtagacatgtatgtcacatgtgtttctacttgatcaatttataatatgtaatttctattttttaatgtgctgatcaataacaatgaaattttttttttatagtctttaattttaatatact

SEQ ID NO: 109235 - DNA, 362 bp, Glycine max
  unsure (1)..(362): unsure at all n locations
tgacactatanaaccctcgaagcttccgttttcaattacgaagcatgctcgatattctatgtggacacaaatcgaacatccgaggggaaaatgttattgtgcggttgaatttgcatcacaccttttgttttcaaattcaagcgtcttcatataatactagacttaatccgacatccgagtaaaaagttattgtggtttgcatttgccacatgcttctgttttgaatttcgagcatctcgatatggtacgggattcattcgaacattcaagtaaaaagttattgccgttgtgatttttctacgagcttttgtttttaatttcgagcgtctcgatatactacaccatttaatcgtacctccgaa

SEQ ID NO: 109236 - DNA, 375 bp, Glycine max
taccattaattgtacatcgagagtggaaaattatttctctttgggcgtcagacagtggctacataagactttccaagagccatgacaccattagcatatcaccctgcatagcttcctcctcaagctcttcttacacctcttgttcttcacttatttcagattgactagtgataactccatctgccttcatgatcatggtactcctggttggatagtcataagcaatatgtcctctacctaagcatatgaaacatttgatgtttctggtaccaatgttggatgatgaggcagaaataagctcggttacgaactggacggtggtgactttccatgtggaaactgtgtagatgaactagacgagttgcctgcctgctt

SEQ ID NO: 109237 - DNA, 402 bp, Glycine max
  unsure (1)..(402): unsure at all n locations
tctntgagaaaacttccttgagaagctattgtttatctacacatacccctctcataactaagctcacctccttgagaagcttccttaacaagattcctaacaaagctaaagcttagctacacacacctctctaatagctaagttcacctccttgagatgagaagctagagcttagctacacaccccctataatagctaagctcacccccatgacaaaaaacatgaaaatacaaaaaaaaagtccttactacaaagaatactcaaaatgccccgaaatacaaggctaaaaccctatactactagaatggccaaaatacaaggcccaaacgaaggaaaaagctattctaatatctacaaagaagagtagatccaaccttgacccatgggctcaaaaatctaccc

SEQ ID NO: 109238 - DNA, 394 bp, Glycine max
taatgcatttttggagacctcggtggttttggtgccaatggagcggtactccacttactccaggttctgccattcgcaaccagaccctcaagagctcgttgtcagattgtgtattccagggcgaggttttgtactgaatgttgagggagcaccctggaagctccagaggaaggatctcaccacattggtgcagacctagagtgtgttatcatattctaacctcgcccccacttctcacacttttgattagaacatggacaaggcaaggttggtatacggattggtgatgaagatggacatggacttggactccatcagctcaggctagatctcacagatggcccagtccaactcctctcggctcggattccctgcacttatcactgccttgtgc

SEQ ID NO: 109239 - DNA, 365 bp, Glycine max
cgatgcacgggacactatccaatactcagcttgatatgctgtgcctaataagaagcatattgttgaggatatgtgatatagcataacagagagtattcaaattcaaatcaccacattataagaggataaacaagggcattcccaatgcctcggattcccgttctaacaagatattcacaaaaagttcacttgaacaatgctcttctagcacatcttatcaaagcggcataggcaattcataatttaaattcctcattggagaacatttccagaatccagatcatggttaaaaatatgatattattatttttgatgccaaaaataatatgcaaagttgaccaagacctataaatatcaaacccaca

SEQ ID NO: 109240 - DNA, 383 bp, Glycine max
taaagaccaattgtctttgaatttcagtaaattttattcaggggatgattgcactattccatcaacttactggatgattataatatagggttattagctttggtactatattatttctaattttatattgagttagaagtattccactaattttcgtatatctaggtcttgggttgcacgtgggattggggtttatgttaatcaggtcttattggctcatattttaatccttaaattttacttattggtagtattaggagtctcaatccttgtgggattaggatttattttcatttcttggagaataagttaaattaggataatgacttagttgttattgctgtcctatataaatgtaatagaaccattaaaactaaatagat

SEQ ID NO: 109241 - DNA, 281 bp, Glycine max
tgcctatagaggtccgggaaggatatcgcagccgttttgttcttgatacgctgctgagtatgacagacagtgttttaagagcgcagtccactatcaacgctatgaggccagtgatggacggtcgcttctactagagcgacacattcattatacaaactacgagtttactcattctcatgtagcacattgtctcacagcggggacagcacttcatacttccatggcccattgtgaaacatatatagaaccccgatcttgtgccaaagcttgatcatcttatg

SEQ ID NO: 109242 - DNA, 402 bp, Glycine max
taactaaatggaatcactcagaacacagcgtaacattgattttcttaactaaatgggaaaaaggagcccctcaagatttatgtgccccaagttccaagataagcaaataagcaaatagcagcatgctataatttattaaactaataaaagaataatccttctagtctccgaagagaccataacaacagggtagaacaagatttcaaaaccttgaaacaaacaactaacagcaaaatgagtaggcctcaaactacagagcctacacagaatggtgttttcttgggcttaaaatgaatgaacttatgatggctactcaaaccccaacactccattcacttaagcaagcctaaggagcaggggaaggatattagtcaatagagaaattgagaatatgtaactcga

SEQ ID NO: 109243 - DNA, 399 bp, Glycine max
tctccttcttttcccaataaataggggaaggatggtataacaaaaatgttcaactctcctggtatctgagaatcacttaaaattagtgagaaaatttgtttccgtgaagaaaatccaagccgaggcgcttccgtaacgcttccgagatgtttccgtgggtgatttcgcgaagattttccgctgttctttgtcgttcttcgttcgttcttcgtcgttcttcggtcttcaaccgttaagttcccgaaatcgaacttttcaattcattctatgtacccttagaggtccccatttgtttcgcgtgcttttatttttatttgatttactatccgtacccccttttgacgtgctttagtcatttatttaagtcattttctcgcctaatcaaaaaataaaataaat

SEQ ID NO: 109244 - DNA, 398 bp, Glycine max
tgggcttggtttagacatgtttgatacatgatttgggacttgtaggattcgatttgagcaagattggatgaggggaagtgtgattttcgaaatctgcacttatgcagaattttgctgtcaaaataggtgcagcaggattttggctttgtgcagaaaaatgcttgtgtgtggttggctgtggaaagtctagtgcagaatgagttctggatgttttctagtagatcccaacggtcacaatgtaggcttatgcactatagacttccagtaaaattttggagtcgatccaacggttaacgaattggatcgaaggaattgttactggggtctttaagtgagaaaagctgtgacttggttggtgttttggcagagttttctgcctttgctctgtcttgcttggc

SEQ ID NO: 109245 - DNA, 398 bp, Glycine max
tatcggaagtgacctggcgggtatggtgtttgttttggtgaagggaggatggcaggtcggaccagttgatagggatctcgggtgccaaattaaagaagaaacgaaaataaattgagataagtttcagcctccttcattcattccacttattacatatttatactgaattttcactagattttgaatacaaatctttcataacagaattggttttggcgcctaaatgaattagttacttagtggagtggctacttagtggaatctatttcacgagctcatgtctcctaactcccttgttgatggctttggtgctttttagatgaagtcttgcaggtaattgggcttccttgcaatcgtctttggcctgttattgtttcctgtgttgttgagttgctctt

SEQ ID NO: 109246 - DNA, 395 bp, Glycine max
taaactcacgttcttggctgctgagctaaatgttttcctgtggctgatatctggattactagccttaattctttgtatttcttccctgcaaccagaatgatgtatatatccaaatggaataacacatgtattcagagaaaaattacaatgtcatgaaaacgcacataatgactttgatgacttattttttcttttagaaaaatatgttaaccaattatatctttaagtaatttaacaatttcaagtcataatttactaattaaaatattcattttggaaaatatgaagagtatattaataccttttgtattaatatatatttcttgcgaacaccttgtgttaatatgctttcaactttcttttaagaaaaaaatattctaataagctacaattct

SEQ ID NO: 109247 - DNA, 395 bp, Glycine max
tgaagtgagaaagtgtggaagagtcagtctttctacttttatttgttgaccatacagtggtacctggagatatgtcgcgggagtcaagagaccttggggacgtcaagtggggtgctattgcccaaaaccaagcttgatcaatcctgacccaacccgggcatagtcagtcagtgagaacctgtgacgtacctaaacaggcgagctcctggtagtcaaccaataaaagaacaaagaccacaaagcaaggaggcttgtgtggtggctggccagctatggatcttgagtgatatctagaatatggcctctggtaatcgattaccaagggtgtgtaatctattacaaggcttaaaaatgaagacagaaagttaatatggcctctggtaatcgattaccaa

SEQ ID NO: 109248 - DNA, 384 bp, Glycine max
tggaacatatggaggcttatttgcatactttgtttccttaaaacaaatactaaatatgaagttagccattacctgtggtagaacaaggagtaacagaaaaatcatagcaacaacattcttcaagtaatcagtataatcactgaaacctcgactagagctatctctctatataatgtgttgacgctagtattccataccgccgcaatattatcatcatgagtgatgatacctctagaaaacaggcatgtgagatatggatcgttgggagtagttattacagacccctacatattatcctataggtcccacaataaggggcatggagcaaacacgctctgtgccatttgtactcatgcattcttctgagaatagcacataaattat

SEQ ID NO: 109249 - DNA, 395 bp, Glycine max
tgccggtggagctgacccatcaactgttttatctctcttagactggtgatccctaggctcttgaccttgactggatagaacctctctttaagtgaaggcttttgacttgaacccatgttttactaaagtgaaacaaaacccagtgcgaatcaaaactccgacatctattatgggtggaaatggatgaatgcatgaagaaatgcatatgacacacatgcaatttatgaatacaggagcctgagaaattgtctcctttatagatacaacgtcttggggtagcaaagcgcccaacgtatgtattcaagaaggtgacacggaccctctcgtggtttgttaaagagaggggatctagacagaatccctgtgtgacgcatatgcgaaaggcgcaacatact

SEQ ID NO: 109250 - DNA, 418 bp, Glycine max
gacactatcaacaactcaagcgtgcatgagcattatatgcaccatgattttagttttacacaacaagcaagaccatggaaaccaagacaagtgaacacaagtgccgaagagcatcaggactaaatagagacaggctgcatggaacatccaaggtttacgatacagtacagcaacaaggggagatgctgacagagacttgagctaaaaaatattattcgctatctagtgtgacccgatgtgaacacaactacaggggataatgacaagaagatgaaatgatagaaacaccattcaaacacataatattaaatatcttgccgaatccaagagagcaaatgatgtggatcaagtttacaactcacgatttaaagaagataggtaacaaacatacatatatctgatacagctgttgaaaagg

SEQ ID NO: 109251 - DNA, 196 bp, Glycine max
  unsure (1)..(196): unsure at all n locations
ngtagaaaggctagacatgaaccatgtcatggctctgtttgtttcaagagacaaagggaggccccacattatacccatgacacaaaagccaaaatgatgattaggaaacttcatgcaaaacttgacatgcatgcatctatgcagacactcaaatgacaaataaatacggccatgagatgctatggctcaggattca

SEQ ID NO: 109252 - DNA, 373 bp, Glycine max
tgctacaatgcatgcaaagttctcaagctgtttatttcataacctagatggcaaagactcaagacagaattcatcccagtgaaggtacctcagtttataagacaatgagtcaagaccattatgaaggtatacattaaatatggtaaacttggaccaactatgtgatttaagaaacctcacgttagtcatctttgcaaggaaatcaaagctcaagtatagatcctcggttaatttagacaaatctaaaattacgccttcaacaacttcagttccctaacaaataaaaattagaataagcactaaataactaaaactgtcatattagctaattattaaaagatacatgtattatgaaatggaagcgatcgcgtat

SEQ ID NO: 109253 - DNA, 417 bp, Glycine max
gacctatgaaactcagcttaacctgatctctaagcaatagcttgtccttggctaagcgtgacctaatgtcgccaagcgcaattccttactgccataagtggggttcataaagctaagcaccagtcatggcagctaagctgaattccttgcggcaatatgagcgctaagggagaccttattagctaagcgcatgctcctctgtacttaagatgcatcattttagctaagccagccatagcctggcttagcgagagttgcagcttttcggatctgcaaacctcactaagcggttttatcctcgcgctaagccaagcctgtgttcaaaaaaaaaacttgaatttcaaagttggctaagcgcacggtacctctaagcgaccatcttcaaaaaaccaaacgtcactttgagaaagcaaaaca

SEQ ID NO: 109254 - DNA, 400 bp, Glycine max
ttctcccaagtcctaaatgacatttcaagctagtatttactcactttaacctccatttaccacagaattcagacttaaccttccaaccctcaaagcctcactctttttcctctcataacatcacattctcactttctaaccctaggttaactctaccattcatctctaacagttttccataagcaatttcagcatataaacatcacaaacatcatcacaaaaaccctaaaactgaatgggtatgtttaactcatccaaacatgacaatttcaacaagttttcagcaaatgtcttcacaaataatcatcatgaagcagaaaactaacaaaactacccatcatatctcccaaaaccccatacccactaaaatcaaaggagaaagaagtccacccaaacctga

SEQ ID NO: 109255 - DNA, 358 bp, Glycine max
  unsure (1)..(358): unsure at all n locations
ccgnatatattgattaaggctactccaatttgttcttcctctattacctgagacggagacatcccacacaaacgctctaaaacgccggtagtagcacctataaaaccaatcaaaaataagtatacctgtcattaaggacacacaacaatggaacacaaacgtcagcaatagctcaacttcaaatagaatcataaacttgattacaccccgatatacactcctccctcaacgaataatattcctcaaactacgatgccacacatgcagttctcgaacaaactcaaacctgccacgatacctcacgagcggaaaaataaaaatgagtatatctatattggaagaaggcaattaccataga

SEQ ID NO: 109256 - DNA, 398 bp, Glycine max
tcttcccttctccgccatcaatggcagaaatagatgtacatttatcatgcttacctccacggtcgatgctgactatgcaccctcgacggtggacggtggttcatggttcatggctcctcttcatggcaacaacaatcaaacgcaatacgaaaatggctcgtggtttatggccgaggaagaagaagaagaatcaaatcaggaagaagaagaaggtagcgcgagagagacaggtccaagaggtcaccaacacaatacgaaaatggctctgaggaagaagaagaatgaggtgctgtgtgaggaagaagaagaatcaaaggggctgtgaggaagaagaatgttgggtgcaacgaagagagagagtagcgggagaaagagattaagcttttttttaaaaaaat

SEQ ID NO: 109257 - DNA, 397 bp, Glycine max
tgaattgaatgatgacagtgttattcatgatctgtccgagattgaggctgaggatctgagattttataagagcttaatgggtgataaaacagaaaccatccaagctattgatattgtggcaatgagagcaggcacccaagtaaagccagagcaggatgacatgttgacatcgcaagttactgatcaagagatttttaaggccttaaatagcattggagacttggaatctcctgggatcgacgattacggtgcaaagttttttaaggctagttgaaatactataagaactgatgtgactgttgcagtaaaagaattttttgagcatgggaggatgtacatggtggtaagttgcacgctagtaacgctggttccaaaacatgacgagacaaaaacaatt

SEQ ID NO: 109258 - DNA, 397 bp, Glycine max
tgaagataagactatacgaggtatcttccttgtttatagcaatatctctcagggctaccatgtctacaacttgcaaactaagaaactcttcatcagtcgagatgttgaagttgatgagtatgcttcttggaattgggatgaagaaaaagtggagaagaatgttcttatacccgctcaactacctcaagaagaagttgaggaagaagacccaggtgaaccaccttcacctccaccacaacaacaagatcaagaactatcatcaccagagtctactccaagatgagtaagatctttggtggacatatatgaaaccagtagcttggccatacttgaacctggaagctttgaagaagcgtcaaagcaggaagtatgggtcaaggcaatggaagaagagata

SEQ ID NO: 109259 - DNA, 394 bp, Glycine max
ttataagcgcgggtctgggagacaaatgtcatgtgttcgcgatatgcgaagatgatgttccgagtactttggatttggtacgaccatgccctcctgatttccaactgggaaattggcgagtggaagaacgccccggcatttacgcaacgagcataatgtaaacctttacggttttaaaagctctatagttgggcctaggctttagagtttttccttttgttaaggctttgtgtcttttgtttttgaatttataatacaaggatctttcttcatctgttcctatgtctctacccattctcattcatttgcatgtttacttctttttctgaaacggcagatccgatgacgagtcccccgaaggtactaatacctgtgacccgcctgtcgacttcga

SEQ ID NO: 109260 - DNA, 397 bp, Glycine max
  unsure (1)..(397): unsure at all n locations
ctttcccaaaagaactaggcggcattcaacacagtttttcgattnacaagccncaactcttgatgtttctcaaggcaaggtatgccaataatctgtagaacacaaacatgaaaagcaacaccccaatgcatcctagggtgccaatttgccccaccacattctcttcaacaaagctgcaaccacccttatcacgttgatagcaacccaatagatatgatatcttcttgccatcctcatactggattctagtcagcagcctataacagtagaaggttgtggatatatatttgatccaagccatgcaagatggcaccttatggacatagtatccacctgtcaacacaaatgctagcattgtcactgctgccactgtggaagcctgtttggcatccattat

SEQ ID NO: 109261 - DNA, 372 bp, Glycine max
tagagaggaagcttcatggagaaattttgtataaagagagaggggggcgtggaaattgaatgaaaagaaagagagaagttgaactctgaagtgtgtctcacaagtttctcattcatcaaatttatgatgagtgttacacgtgcttctatttatagcctaacacatgagaagcttacttgagaagaaaggaaggtagcttccttgggaagatagaggaagaatgcttccttgagaagctagagggaggctactcacacccctccaatagctaatctcaccccattccaaaatacatgaaaatacaatgggatgcttccttgagaagcacggaaggtagcttccttgcgaagtaagaaagaaagcttccttgag

SEQ ID NO: 109262 - DNA, 390 bp, Glycine max
atactcaagcttctcccccaattttctataaatagggggagatgttgtttgttataaggttcagccccttaggcacttctctctctttcgaatttgcttggaaaaattgtttccgtgaagaaaatctaagccgaggcgcttccgaaacgtttccgtaaggaatttcgcgaaggttttgaccgttcttcgacgttcttcattcgttcttcatcgctcttcgatcttcaacgggtaagtacctcgaaccaagcttttcgattcattctatgtacccgtggtggtgcacattgcgtctagagtatttttattctcgtttcatttactttttatacccacttttgacgtgcttaagccattttatttaagtcatttctcgcttaacctaaaaat

SEQ ID NO: 109263 - DNA, 394 bp, Glycine max
  unsure (1)..(394): unsure at all n locations
tgtcaagagctntatgttcgtttatgcctattttattttttttctctggaaggggtgaaatataggatattctactttttcagtttttaggttctaataacgcataattaagtggtagactcagctttaaaattttgttctttcctttatatggagaattatctttcagattaatgtgacttgtaataaaaccttttgagcaaaactgacttgtttttataaatttcagatggatgtgcggactaattctctcgtcaggccatcagggacagttgacatagataaggaaaagctacggattgccaacaatggtgtcgctcagagtgaagaacgaaccttacctattggaggtgatggttgggaaaagtcaaaaatgaagaacaagcgttcctgt

SEQ ID NO: 109264 - DNA, 395 bp, Glycine max
tcttcagaaacatgacatttgtgtgtaaagcacaatgtctggtacaccacaacaaaatggtgtatcataaagacgtaatagaacactaatgaatatggttaggagtatattaatcaattcaactttactcgtatcattggggatgtataccttgaaaattaccatgtatttgttgaatagggtttttagtaaggcagttccaaagacaccttttgaactgtggatgaataggacacctagtataaaacacctgcaagtttggggttaccagacataaataaggatttataatccacaagaaagaaaattggatgcaagaacaattagtggatacttcattggttatccagaaaaaacaaagaaatatgttttattgtcttaatcataatatgaaa

SEQ ID NO: 109265 - DNA, 400 bp, Glycine max
tgaagatgcttatgttaaggttgttgaatcacttgatatttatctgagacaaaacgaacaaagtgttgtaatgctgtcagttttactggacgaaagcaacttgagcgaattgagtgaatcttagttttgctaagtcaaaaaatttcattgtacttgaacttattgtgtaaacactcattgagtggttagaatacactttttatcaaacatttgttgtttgttaaagccaggagtggcttagtgacagagaatacttgggttttaatcttagggggagatttagggtaatgccaggagtggcctagagagtactcgttgtaaccagaagtggcagagagaatacttggttgtaatcaaagaattgattagtggaaccctttaagttttgaaggagaattgg

SEQ ID NO: 109266 - DNA, 385 bp, Glycine max
gcttctaagaatgaccttacaacttggactttttttggaggcttctccaaaaaatatagtatcatcagcatattgaagaacatccacaggcaccttgttattccccaccaagaaacttctaaagcagttttttgagattgcttccctcatcacacctgtcatgccttcagccactaaattagctttttactgtatcccacaaaattcttttattgtgtatgtcacatggagaataaatagtaacaggggtgaccagttgagcttcttggacccattccccacacattataataaaaccactaccactgattttcctttacaatctaaatgaattatcattccacaaacatagtatgccacctgttgagttaatagctggcagcaa

SEQ ID NO: 109267 - DNA, 394 bp, Glycine max
tcaccttctggtcctcctcatagttgttgcttgataaaacatgctctattttcatctgccactccaagtaggcctccggatcattctttcctttaaatggaggaatgttgagtttaataccatcaattccgttttgtctaggaacaccatcattccctcttctcctcctttcttcttcattatgatctctattctccatttgatccaacctctcatggagcgcatcatcttgttgtttcattaacctctccaaatgttgcatcaaagcttgcatttggaattgcgaaagccccactccatcattaggattagtacctgacatctcaaacaaacaaatcaaacgtaacaagacaattatagttgttgcttgaatacctcacccactcaagtgtat

SEQ ID NO: 109268 - DNA, 398 bp, Glycine max
tgtactttggcacagacaaaaggagttaatggttctgattgagaccatcactccccacaagcccttttagaagaacttggttagaatcctgtgatttaactagacacaaagatgagtgaaactcaaagaagacattattatctttacaaaactgactgacactaatgagattcttagtaacagaaggaacaaacaatagattactaaggacaagagagaatttaggattaagaggaaaagaaaaagatgaaacacctgaagaattaatgttgagaccttgaccattgccaataatgatctgatcagggccctcaaaaggtgtcacttgctgtatattctgcaacattttttttatcaacaaaagtaatttgtattatgataataagattagtacaagt

SEQ ID NO: 109269 - DNA, 397 bp, Glycine max
  unsure (1)..(397): unsure at all n locations
ntacactaaggcatntggcatctcaacacactcacactcactgcatatgtatttggtaatcataatattatatcatttaaaactaaatcaagctgttacagataaaagaatgcaaatgttttagcataaattgcatttgaacaaattaataaatagagaaattaagtgtttcattagatttgtttcataatataaaacttcacaaccactccaatgaaagtaatttatccagccaatgtttcctcaaaaccatgtcatgaataaataacatcctctttacacgcaatacattgtaacatttaatcaaaaaccaaaaccagtttccatggccataaagcattccactgattccagtactgagacaagattcatcttgattagtgcttatgcaataatg

SEQ ID NO: 109270 - DNA, 389 bp, Glycine max
  unsure (1)..(389): unsure at all n locations
ataaccaatgagattgggtgatgtcttatcttttncttgatcttgattgctttgaccttgaattattcttgaagcaatgtttaacctttgaatgtttgttgaaacaaccttgtattaatcttaaagtaatgcttaacctttgaatgttttttgaaacaaccttattgtttgattctactttgacatcatcaaaactctgtattcatacattcacattttagtctaaatttatatcgattgagtatttcttaatctataagtcaatattttagaacaaatgtagtaataaaatataattttttttatattttttagtaggttgaaccatcaacatacaacccattttcatgtntttggtgtgcctatcatactaagcataaatggggcaa

SEQ ID NO: 109271 - DNA, 394 bp, Glycine max
tagcttagatatacccacagtgagactttcctgtggatcagtttctagttccatacctccaccacaaccaaaaagatcatactcttctaagtcctcaagagaaccaggcaaaccacttaagtcaaaatcatccattatgccagctaaaagctcctcctcatcatcaggaagggcaggtccaattgcatgagtatcaccgtcttcaagtgaaccattgccctcagcatcttgatggagcttcttaaagccggatgagatgtcgtcaatagattgataagcatttgcagtttcattcaagttcactgcaggttagcaaaaccaaatcaacagaatttataaaaaaatggacaatgcaaatgacagaactgtaaggaaataaccatcacatacattt

SEQ ID NO: 109272 - DNA, 408 bp, Glycine max
ccgctttcgacgaaattggcgcacgccttcaaagctattgttattccaatcaggttgaattctatacttcgggccgcacttccaatgaagctgcctttctttatcagctttttgcccgtgaatacgggagcaataactttcccgactgctccaacatgtgccatgaaccgacaagcgtgggtttggcagcgagtatcggtgtaggtaaagggaccgtgttgctggaagactttgagaagtgcgatttagtcatttgcattgggcataaccctggtacaaaccaccctcgcatgctgacttcgttgcgcgctttagtgaaacggggagcgaaaatgatcgccatcaatcctctacaggaacgtggcctggagcgatttaccgcaccgcaaaacccgtttgaaatgctga

SEQ ID NO: 109273 - DNA, 402 bp, Glycine max
tgaaggaaggagaagatgagtggtgggagagtattatattgagcacgaaattttgtgcctcaattgaggtttgaactttgaagtataattctcaaatgatcaaagttggaaaaaatgcacacacatggtctctatatatagcctaagtgtcacacaaaattggagagaaatttgaatttctattcaaatttcacttgaatttgaaattgaatttgtggagccaaattttggagccaaaatttcactaattatgattagtgaattttagttatggttcagcccactaatccaagatcaagtccaagattctccactaagtgtgcttaggtgtcatgaagcatgtaaagcatgaaggacattgacatagtgtgactatatgatgtgacaatggggtgtagtaag

SEQ ID NO: 109274 - DNA, 401 bp, Glycine max
ttcaacccatagtttccccaaatggggcaattttactttgatccaaaatctcctcttatgaatgatgctcacctacaacctaagacaaggtacaaggagatcaatagtataggctcaaggtttaatcaaacaatcatactttcagctcgaaatgggcgccagggataaatcaatcatgcacaaggtaagctttatagctatagtggctatcttcaatcaaaacatggccttcatcatcttcaatttcacgcattcattccatagtcagagattcatgccaaaaatcattactcaatattagttcgttctctcacaattaacgatcacactttcaccggggtgtggctaatgagtgccttcacaatcaaattgtcaaactgactaacatttccagccatgat

SEQ ID NO: 109275 - DNA, 415 bp, Glycine max
cgacctatgaaactcagcttttatccaggcaattcttggtggtgaagcttcttcttccttggcttattccctagtggatgttgcctcccctctcctcttctcctgtgccttccgctgcatctccatggtgaaaaatcaccattgaaggacctcattgaagctcaaagatccagcctccatagaagccccacaagcaagattccatcaagtggtaatcagatcacaagagcttcaagtaggtgctccttaaacctccattaatgtttttgctttaccttctcttccattgttgtttcttcattttttctcaatgtatctcctcacatgtcttgtgataaatgtttttaccatgattctttagagtttccaccgattaaacttgctatagaagctagatttgattttctttggttca

SEQ ID NO: 109276 - DNA, 398 bp, Glycine max
ggtgatatttttactatatatgtgtgtgtcttcttttatctctacctgtttaaaaatgtgataattcactcctcatgtgttgtttatgtttggatcatgtgatgatcttaaaccttgtgtttgtgagagcaaatggctaggtgaattactttaagaaaccttgtgatggaggactccgagacacaatattttgataggatgtaacattggaacaagagtttttattttatttgcatgacgtatcaaacatgtcattttactttatttgataaacttgaacagtcttgttttaagtcataaatatttctaagaaattttatttggtaacagtgaagcgaatgtgagcattacccacgtcgactgatttacgattttattgaataaaattgatttaatta

SEQ ID NO: 109277 - DNA, 399 bp, Glycine max
  unsure (1)..(399): unsure at all n locations
nttatgtgaaaggatgtgactcttcacttttgtattngaatttcaacgtgctactcaatttttgagaaaaccttttcatacttatcttgattcttgaaatcttgatctcttctttgattgaccttggagctttttgtcatcacctttgtcatcattttttgttatcatctttgttatcatcaaaacatctttgaatcactcttgattcatcatgaagctttgcttctacatatgtgttgcttaatcacataatgacagccttatgttaaatttcacttagtaatttaatttagggttggattaagtggttgaactgataaaggataaattctcgtaacctaggataagagacttgcttgtgaatcaaggggaaacaacgtgttttaattctgatatttt

SEQ ID NO: 109278 - DNA, 399 bp, Glycine max
ttcgacgaaattggtgcacgccttcaaagttatatttatcccaatcaggctgaattctatactttgggccacacttgcaatgaagctgcctttctttatcagctttctgcccgtgaatacgggagcaataactttcccgactgcttcaacatgtgccatgaaccgacaagcgtgggtttggcagcgagtctccgtgtaagtaaagggaccgtgttgctggaagactttgacacatgcgagatacttatttgcattgggcataaccctgggacaaaccaccctcgcatgctgacttcgctgcgcgctttagtgaaacggtgagcgaaaatgatcgccattcatcctatacaggaacgtggcctggagcgatataccgcaccgcacaacccgttcgaaatg

SEQ ID NO: 109279 - DNA, 386 bp, Glycine max
tgaagaggatgctctaatggaggaaaatatttatagaagggaggagcacgaaattgaaggaataaaagagggagagaagtggaacttggaagtgtgtctcataagactttcattcatcaaagttacaacaagtgttacacatgcttctatttatagactaggtagtttccatgagaagctttcttgagaaaacttccttaagaagcttctttgagaaaacttccttgagaagctagagcttagctacaccccccctataatagctaagttcacccccattccaaaaatacatgaaaatacaaaaaaaagtccctactacaaagactactcaaaatgccctgaaatacaatgctaaaaccctatactactagaatggccaaaataca

SEQ ID NO: 109280 - DNA, 394 bp, Glycine max
tggaagggaagagatagaccagtcacgagcacatagcatggtcttgaaagaggagttagctgcttgcttaaggtccaagacaagcttgtctccgcatttatgcgagacagagaccaacatgttagcgatcatcagcaagtaccaagaagaattaaatctaaccacggctcacaagcacaaagtggtggacgagtatgcccgagtgtacgcggaaaaagaggctagatgaagggtgattgactcgttacatcaagaggcaacaatgtggatggactgatttgctcttactttgaacgggagtcaagaactatcccgattgctagcaaaagccaaagcaatggcggacacttactccgcccccgaggagatccacggacttctcagctattgtcag

SEQ ID NO: 109281 - DNA, 398 bp, Glycine max
tatccttatggcttgcctccggacttcaccctccgtgccaccccggaagatttaagtcaagcccctactttcgaggggcaactcccaccttatgacgactatcccgggcaagacgatgaggaaggagatacccatcttggccccctgctccacctcaaagatccgtccccccatgaactaccccaaccgaacatagtccgccatatcccggcttcacccacacccgtaaaagaatttgttcccttcgcggaagataagggaaagattgaggcgcttgaagagaggttaagagcagtcgaaggccttggcaattacccattctcggatttagcggatttatgtctcgtgcccaatatcatcattcctcccaagttcaaagtaccggactttgataagta

SEQ ID NO: 109282 - DNA, 398 bp, Glycine max
  unsure (1)..(398): unsure at all n locations
ngcctaattaacctgaaatngagagagaatgattatttattactcaaactgaaaatactaagtatttattacctatacttaatagaaaatacttataacattacaaaataaccataaattgggagagttggataaaatttatactagttttatacacaaaagttagtcgccttcaccgagtaacactaagcgccattcatggcagctaaactgaattccttgcgacaatgtgagcgctaagcgagtccttatcagctaagcacatgctcctctgaacttatgatgcatcattttagctaagccgaccagagcctggcttagcgagagatgcagctatttttatctgcaaacttctctaagtggtcttatcctcgcgctaagccaagcctttgtgcaaa

SEQ ID NO: 109283 - DNA, 403 bp, Glycine max
tccatcacaatcatccatggctcatggcggccaatttcttaccttttataagattcaattgatcaaagcaagtttaggcccattctgattcctccaatcccgacttagctagaatcctcaatgaaggaacatctacttcaaacggaagcacaacctccatcccatttaccaaagagaatggggttgccccagtcaatgtgcataccgaggttcgataaccatgtagtgcaaaagggagcatcttgtgtcaatccttgtatgacacggtaatcttctaaactattttcttgatgttcttgttagcagcctcaactaccctattcatcttgggcccataaggagtagaattgtgatgttggatcctgaaatcctcacacatttctttcatcattttattattcag

SEQ ID NO: 109284 - DNA, 395 bp, Glycine max
tcaccggatgacgccgatcgaacatttcctaaccttttttatgcaaatatcgatcagggattgaattgaaaactcgttaggcgacatctgtcgtgaattatcgaccgatatttttcagccgacattgcacaattctttatagaaaagctcgctggtcgataatggcctttttacggcagagtaagatttcttgttctggcgtcgcataaaaaagttacaatgtacttccgctaggtttttcgtgcgagttcaaccgacatatagtttcggccaggaaaacattatcccacctctgcaaaaaaaatattagctaaccgtcttcatgcatattccattcaacgattgaatagaaaactcaatatccgacaaccgtcgtgaaatagtcccgactgata

SEQ ID NO: 109285 - DNA, 396 bp, Glycine max
  unsure (1)..(396): unsure at all n locations
tgatggtgattcaagaggtggagcagctntgagtgtctttaggtttgnttgcataatcttagctttcgtaatatgtttttattttttatttaattttcaaacatttctgcaaccctgcaatttgttcttgtcttaagaaaagtttaccattctatacagaatttttaacattaaaaacttttgaaagctagttcccttaatttacaagatatgattaatagatgcatgatgataagagatcctatcatctttgttgtttttgtctttctgtgatgtgttgtgtcaatgatgctgacacaaggctagagatcattaagaaccccatttgatggtgttaaaatcccacatcagctaggaatatagctataataattcttataagacctggaaaatctc

SEQ ID NO: 109286 - DNA, 391 bp, Glycine max
  unsure (1)..(391): unsure at all n locations
tctccccacttcttttgatgatctaaatttttgattctcgnaaaaacatcatcattcatgattgcatgcaagataatcatagctttggctcttttggaaacttgctcattgtgaaatataatatgagaaatagtgggatttcttccaaagctggtggtttaattgtttctagtacttgctagagatcataagcttccaaccgagctcttttcttcatgacccatattttgtagttctttcctatgaattcaagaggtaatggtagtgaaacattgttgaagactatctaataggatgggtattttgaaaatagtttttttttctcaaactatgtttttgatttctatatttccctccccacttaggttctctcactagtccctcaagatca

SEQ ID NO: 109287 - DNA, 166 bp, Glycine max
aaccacaaagagggcgaacacaacaccggacacaccacagaaaaaaacagagagaagcaaacaaagaaacgaccacaagagcaaacccaacagccgaagacgaaggagggacagcccctgacacgggcaaacaacaaacggaaaaacacatcaacaaaaacgaaac

SEQ ID NO: 109288 - DNA, 401 bp, Glycine max
tgtgctagaataaactgtcaggtgcaacgccattgttttacacaacagaagaaattgaaagcaagtttcacagtttataactcttagtctagagtagacttcacaaacaaagccaatgctttaaaaaaaattaagccaatgctttaaaaaaaattaagattcatagccacactttgttttgactggtcatagccacactcatcacttcctaagttaatacacaacatcaatttaaagatttaccattatagtaaatcacaaaacatgaagtacactgtattcaatttttcaaaataaaaaacttcacttcgtctctacaaacttttcaacatattaagcaaacctaacagttattacttaacaaactggggggacagattaaggcattggaattggatata

SEQ ID NO: 109289 - DNA, 398 bp, Glycine max
ttgacatcaaacttactcactattcttgggttattgtatacaagttgggcaagcgtggtcttacccaacccgcccatgcccacgatagaaagtattgatagcttttcatcagcgtcagaagtgatccagtcgaagatcaattttttgtcatcatctctgccataaatatcactttctaccaccgaagatgttgatggcaatttctctaacactttactacccgatcctgatccaaccccaacaccactagtccttgtcaaacctatataaccactttggctttcaagatcattcacgtcatgaaggatttgttccatccttgattcaatttccttgtcaaaagagctcaaagaagaaggttcgaagatattgctcaccttgttacgaatgggctgggt

SEQ ID NO: 109290 - DNA, 392 bp, Glycine max
tcgcctctagtattattagcgaaagaattctataattacaataatgaaaggtaaaatttaagtttttatttttattttttttcctatttgaatttaataatggcacactcaagttacgtttaaagttgcaaaatttccaaattcttcacatcataccatgactcaagaagaagaagaaggtacctatagtttcattttctttcaaatattaaattattttactatttccttttataggttatgaatttcttctatatatattcttaaattttcatatcataatggtggttttcttataaacttttttcggtgaaaaatgcaaaatgacgtacaaatacaacaaaagttggaaggggagtaacttatggtttaagtgatgcaaatataaaaag

SEQ ID NO: 109291 - DNA, 393 bp, Glycine max
ttgaccaaaccccagcagtagttgtttccttatagacttacctcaacaccttgtctccgagactgaggataattgcactgtgtgccttctacagtagtgttttcttatccccatcagccatcatcttttttgagtttggcttctccatcaagtgcttctaccaggccctgttgaacaagaagggctttcatcttcaattgccatagcccaaaatcattttgccctgtgaatttttcaacctcatacttggtcgagcccaaaatcatccacgctcaccgcaccagtttgttgtgccaagatcagatttactcacaagaaatatgagtttcttgtttgaacaataataagcaaaatgcagaaaagggatgaacaaaggagaactccatagaaata

SEQ ID NO: 109292 - DNA, 385 bp, Glycine max
  unsure (1)..(385): unsure at all n locations
tgaaggggngtgtgttnttctactaatttatttctttctgcgtatataggcattaacttgcgtttcgacactgnggatttttctttatctggtcaaaattatgggagccgacgtgataaatatattaattccatgatggatttgatgaaggattaggtaccacaacaattaagtgaataaggacatgacaatctctcattttttatactaaaacaatcatggaataattttgtcttgggtatcaactattaaaaagacatttttatttctatctctgtaattgtcaaaaaaaaaattaatctaccaaaattctttaaatgcgaaaacattggatttttttattattttcataaacatattagattcgacatatactgtattaaaa

SEQ ID NO: 109293 - DNA, 390 bp, Glycine max
tgaatcttgaaacttgatacttgactttgtgtatcatgaatcttgaaactcgatcggtgattcttgaaataaaatttcctttcaaaccttattcaatcttgaactcattctttgattcttgagatcatcatctttgatggcatgaagtatcattatgtgaagaaaacaagtatcattacgtaactcgtaaagatccgtaacgttacggaaaaagaatcataaaaaagggcagcgggggtgtatttagtaaataggggtgtgcaaatatcaatcaagcccacttgggccttcgaggatgttccaacagaaggcggtgccttctggtggaagcaacccagctcgcctgggcgagctggttgggcgagctgggcggcatccacctccatcgtt

SEQ ID NO: 109294 - DNA, 105 bp, Glycine max
ggcttcatctactgtattgcttggagtgtcacctcgcctcatgccgtatttattctctcattacggtctgagagattccttctttgcttaacatttgactgtgga

SEQ ID NO: 109295 - DNA, 149 bp, Glycine max
ggttggctacatgcagctacatggattcacttttaatcataatatcttccatttcatctataaaatatcttccatcacatagccaaattaattatgctagaccatctcttgatacctctcctcactaggggctactgcatgtctctatt

SEQ ID NO: 109296 - DNA, 164 bp, Glycine max
  unsure (1)..(164): unsure at all n locations
tccttcgcaactngagttcattattgctaccccatagaagctccacgaaattgntccggccatactcttccttgcgagccctcttggtctcttgttcaagggctcttgcggtaatngcattctcttcccgtaacccggcacactccttccgaacgtgtgtagca

SEQ ID NO: 109297 - DNA, 334 bp, Glycine max
ccgaactatctgtgttctagctgctcattttaacccagctacacgctctttctgcttctatgaccgaataaacaatttttacatatcaatttcatgcggaccaccatacttagaagccactctggtggaagcatcactacgtgctagcgggaccttaaatggtgaagatatattaaagttgtcgtggacctcctagactacagagttgagagatgatcacctctgagatgtaaatggagaaaatctaatgtacccatgaaaagataacactggtgactaaacattagacatgagggttttgacacggtaattacatcaagacgcattaagttaa

SEQ ID NO: 109298 - DNA, 267 bp, Glycine max
  unsure (1)..(267): unsure at all n locations
tgtttttttttacaataactcttcttagttccccagctcatttattttgatactttttgacaataaattaagctaagtgggcaaaatggttgctctcatcataaatgtttatgttgaccaatttatgaacaagtggatattatctatatcttatcacttaaagtgnaaaataacttgtatgtaaaacacccgctcgagaacctgattgatgtcagagaactcttgtatttgcctatgtaacctgataagggatgtatctcttattta

SEQ ID NO: 109299 - DNA, 281 bp, Glycine max
  unsure (1)..(281): unsure at all n locations
tatagaaggtgtctcatatagcttctttaaagacgagagagcttatacanattattctgtgcagaagtagtttaaatagagaaagttatntaatttttnttctcttaactgtntctcttagaagtgggtttgggtaaacttacccaaacagacccttaattcattaatccaagttcaaaagcactagaaaanttcatttatgtatcttttaacctaaatattccgtgtgccatactgattgatggtcnnatatatnggcaantagtctgaatcattaatta

SEQ ID NO: 109300 - DNA, 319 bp, Glycine max
  unsure (1)..(319): unsure at all n locations
gctcactcgttatttgctgagtctatgatttttctcgcgcaaccacctactaaccaatatatctatctgcgtatccanggcgaagtctccgttcttaatggcacataggccaactcnggactgcccaccatcactatggattcccgagcaaacattcacccgccagatagacacggcagctatctcttatgaacacagcattgcacgagccaatcctcgctggattcacgtccgatgctgtctctgactcactggacttgcatactgggtcactgcatcccaaaaggttgtttccgctgacatgcatcgtaatatgaca

SEQ ID NO: 109301 - DNA, 176 bp, Glycine max
  unsure (1)..(176): unsure at all n locations
acactgagcanagagtaccagcagtcgaccttttgccggcattttgtggaggtcggcgtgcatagcgcgacnggagaagatcaggtccggcgtatgctcgctgtgtgtgctgcaggacgcatnctgaatccgaaaactgcgcgcagccaggtcattggcgcaatgactatgggcat

SEQ ID NO: 109302 - DNA, 444 bp, Glycine max
  unsure (1)..(444): unsure at all n locations
tgaggctgcagctgtactntggattcgctggctcctatcagattcatttaatacatgatcctatgatggaagtgcactagaaatacatcacatttctaactaggatattttgatttcttcacgtggattctcaagtgactataattaattttgcatcagtgtggtatctactntgcattttctcatcatttgaaagtctcgcaatgcaagctatattngaaagtctcaaggatgtagcagcctctaatngcatctcattggcctcagtatgcaaattaatcgcctttccactcaaagagaataaaaattattctcggacatgaaacaacgcctcagcaaaagtcctatcaaatatttttagcttatctatgtattgggggatgtaccacattgaaagtaatgggctttcacttgagtaattngatctgtatgagaacgttggac

SEQ ID NO: 109303 - DNA, 201 bp, Glycine max
  unsure (1)..(201): unsure at all n locations
tatatggtagagataagatatgactntgttatatgggtgagaataagagatatgatggcttatttctaggaaagtagggaaactttatcttatctagtaggattatatctctaagaattagaatagagtttgattaatcttttcctttggttactagctcatctctntggatctatatatactcacacgctttgagacaat

SEQ ID NO: 109304 - DNA, 138 bp, Glycine max
  unsure (1)..(138): unsure at all n locations
attacttttcgaacggatgtccgactcatgcgcataatatatcaagaagcttggtanttgaacaacgaaagccttcgagaaattcaaatggtcataacttatcacacggatgtgccgattaggtgcataatatatcga

SEQ ID NO: 109305 - DNA, 165 bp, Glycine max
  unsure (1)..(165): unsure at all n locations
tcacagagagctagataaccctctagcacgttacaggattatgaatngatacatgattcagcaataggggaggaaggngnncnnncncactctcgctcttttgctgcatctgaatcaatgagctttgacgaagcattgaatgacacacagtgtactgatgctatg

SEQ ID NO: 109306 - DNA, 186 bp, Glycine max
aactaaagtatacatcaatataatagtatcatataatagatctatctatatgactccattactattatatatcttattgatttatattagtttttttacattatactaagttaatttatattcatattagttattttacaattactataaattttatttataattcatcttagttattttacaatt

SEQ ID NO: 109307 - DNA, 430 bp, Glycine max
  unsure (1)..(430): unsure at all n locations
acactaagatgggtctctcgctaaccccaaagataatccagaacacacaacacacaacaccggacaccaaacaaacgttgaggaagctgcttgtaaatattaagccacctgtcatcggtctaaaaaagttagcatttatgacatttccacagcccttggctctagttagccttcatcagaatctgatttgagaaattattatcatttggttgaaccatgcgaactcttgaatgntcaaattacatgtatgaagcttgaactaagtcatcacgtgtattcatagaatatttaactctacgacccaagaatgctatgatatagtatggtagaagttcanaactatngggaaatatatataatcacatanaaaatacaaatcaatatacactcacaaatcaatatttanacacatacacatgtgaaatgactg

SEQ ID NO: 109308 - DNA, 180 bp, Glycine max
  unsure (1)..(180): unsure at all n locations
taatctagttgcatcctttccctaacacttaattctatattattattcttttaccagttatctggattttctaaagttatgtangatctcggtacggttaatcaaatacatttctattcgagagttatgatttaattcaccccccccttctaaatattangcccttgttacaatataatc

SEQ ID NO: 109309 - DNA, 373 bp, Glycine max
  unsure (1)..(373): unsure at all n locations
tctggtttatcgaaaaaagatgagtgtggataatggcttacctcgattagttattcattcacattaacctctctaaggattgctccacncatctattatatatgcccattcgatgttngccaccacgacatccttagtactangttgagggcgctcctaaccccctcaacttatgtgcctacttacaaacaataactannaacttagattccnttganggtntcangggtatgacacaatncgtactcaccactctcactcatggggttgtctcaagggatcaagttcaccatcactaataattcatcccatatatactacaatgatcactaatcctctacggaagtagttcttacactctgacatgtcattc

SEQ ID NO: 109310 - DNA, 486 bp, Glycine max
  unsure (1)..(486): unsure at all n locations
tctgaaaagggaataagaatattaataaccaccgattcangttggctctaacaatttgctaaatataaaaaatatgttcttggtgtgagttgatcctcgaagatccatacttactttgattcgtttcatatgcatcttatcgtgcctatacaaatgaagtaatgcgaggcaacagtcatacaactagttatttctgccaaccacactgttaagcttgacgatgagattatgaattttctccaatctacaattttcagtgatatgaccaaaaaattctaatctcatcctcaaacatgcatgatatacaaacaagcnttacacaggtttgaaatgaattgcatctttgtattctttatcaaatataaattatctctctaatatattaatataattttatatatggacggtggaacaagctcatgtgaataacaatgatcaaggtgtntgtgatacatgatacacanagatgatgacaaagctagtgat

SEQ ID NO: 109311 - DNA, 86 bp, Glycine max
cttcatctagctccacccgcatttgttttaagcatggatatgatgcctggcctacttcaccttctatgtatgtgactcactatatg

SEQ ID NO: 109312 - DNA, 196 bp, Glycine max
agggggcttccctttttcatcaccaaattggcgatgaaatagagctcttgttgacaccacgattgctctatgaccaacttacaccaactgctggaaatatcaccttttatggcaacactgcatacatctgctccttaacttttgtatgagcgtggacaccttacatctaaaacaatagttcttttatacggtgagc

SEQ ID NO: 109313 - DNA, 117 bp, Glycine max
  unsure (1)..(117): unsure at all n locations
gtgtgtgggtggctgtggaaagtctantgcagaatgagttctgggatgttgctagtaaatcccaacggtcataatgtatgcttatgtactagagacttncagtaaaaatttggagtc

SEQ ID NO: 109314 - DNA, 378 bp, Glycine max
  unsure (1)..(378): unsure at all n locations
ctattactcanagctagtcgttcactcacagtntaagatcacactctcactggttatgggtcaagaatntctttctcaatcaacctatctattgcctaacaattctaattgcangttcacattcttgttctttctttgtcanagatacatactngctcanacttatcaaaagaaacacaaactccatcacaatcatgcattcaatccaaaatcaattcataacaccaactttcacaanaagataaaaatggttcactgcataatcatctaatttaagtaaattgtccacatgcttcaaacatgcatactactacccaaacaaaatagcgtgttataacattaccaaatcctaaaaccatatctaaactatatcatata

SEQ ID NO: 109315 - DNA, 299 bp, Glycine max
  unsure (1)..(299): unsure at all n locations
ataagatcttgccaatatgacatacaactcttagaagatcacagtcatcaaagaccagatcacatagaaataaaaagtgatatgtcaatatctcctattactcatatcatatatctacagaaaaacaaatgtctctgcgacgctcaggctaaaatgtgaatgatacatctcccaactcatggaaagtcctgatgcctaatctggctgactatataaaatggctctagacaagggccatggtganactctctctatcaatgaaatcactgaacataacttactgacacagcttatgatca

SEQ ID NO: 109316 - DNA, 444 bp, Glycine max
  unsure (1)..(444): unsure at all n locations
agcaaagtactagggcccgtgaccgataagtcatcacgcgtccggctcaagatgttaaagaagcgctactangaggtagcctattaccttttaaatatctggctgttatntgttcatctttgtttcttaagtcatagatggacacacctagttctcataatcctngcaatntaaataaacaagcacaaactgggaaggtagccaatacctcacanaaaatatatatttgtttaggtaaccaaaatacttggaatatgccattatatgttaggtaacaaattgcatcacaaaatatatatgtgctangtagcanaatacctcatggaaaaacaataaaaacacaaatatatatattttgataaaagccagacactttcgatagaataaatcctatgttctttggaagatcaccgattaaacacaagggttttttgaagaaatgtg

SEQ ID NO: 109317 - DNA, 395 bp, Glycine max
  unsure (1)..(395): unsure at all n locations
atagactangacgaagtgtaatcgattatatggattggtaatcgattacaggagcaataagccttctggtaatcgattacacgatngtgtaatcgattacaggctgcctgttcatgtgtaatcgattagactggatggtgatcgattaccagagcctatccaacgctagtgtcttaagagaatatctatgtntatgctaaaacacatccaatatgaataattctaactagctaatgcacttaatcaatcatttcactatgtaatacacacgaaattatagattctatcatatttaacatgaatttaaacaagatcaatcaaaataatctataaacaatcaatcatacaagtaaattaatcaatcaatcctttatttntctacaatactaacatct

SEQ ID NO: 109318 - DNA, 484 bp, Glycine max
agtactgagatgcacttgctgccgcactctattcggagattatattaatattcctgtatcgatacggattggaatcgatacggccaatacctttggtatcattacggagtgtatcgatacggctgctgttatgtgaatcgattcactggatggaatcgataccacagcctacctatgctagtttctagagaaatctatattatgctaaatcatcctatacactaattttactattatacactaaattcatcattcaattactatatcacaagaaaatcataattctatcataagaacatgagtcatacaagatcaacaagataatctacactcagaggtaaaaataaatcaccaatcaacaacccatcaatcctattttctaatctcttacattagagactaattctttctaatataaaaacactccttgggagagttagtgacatatcacagtgattttatataacaatctataccaactcct

SEQ ID NO: 109319 - DNA, 433 bp, Glycine max
  unsure (1)..(433): unsure at all n locations
gtatcatctgcttaattgaaaacatgatccgtacacatcattagctngaatggatgcagaatgaagttaanggtgtacatcanaaaccaaatctganacgattaccttgtaacatagtatataaaagctccacattctatcanaacttctaaatatatgccataatgtgcgtatttcaacaaaattaggtnttccactccacccgtctgaagcaagacctctgntttcctgttttccanaacaagcacaagtaattaggataaaatcatggacagaggtngcctcatttcatattctatcgtttacgaaacatgtggatttgtcgaaagaaactctaagaaggaaaactcagtngtattcatctccaataagtaccaagttcctatatatacagtcctatatacaagtgccagactganactctgtcacaaca

SEQ ID NO: 109320 - DNA, 384 bp, Glycine max
  unsure (1)..(384): unsure at all n locations
tcatacatgcctattgatactaaaacatcaaataactcttaagcaaatataatacgataataaagagttaaggaaagagatcaaactagatttatactgtagctaccctgtgctacccagcccagcacccgtgaattcactatctgaaagctttacaacttgaacaccaggaccctctctggtcaatatctacactaaagactcgctctaacaatatttgatagagaagattctctttagaangattacatgagacatcagatctatgattgcaggttggcacgatttgaaggaagaattggttgaagataaatgtgtaaaaattagattcatcagtccatatagcttatgcatcaactttgacatggacttgagtttcaaatc

SEQ ID NO: 109321 - DNA, 283 bp, Glycine max
  unsure (1)..(283): unsure at all n locations
ctattggcattgtgctctttcaacgttagcagaatatctcttgatgtcaccatttaacttcgtcatatcggcnactattatctctctatccttagttaattgaccaatgtatggatgtccaactaatgacttgaccgntncataattgtgactaccacacattaacttcaccatttcatcttngcctctaaccactggtgtggcacatagcttaaagagacacccacattctctttggcaatccgtatgatacttatggattgtcacatagttagtaacatac

SEQ ID NO: 109322 - DNA, 222 bp, Glycine max
  unsure (1)..(222): unsure at all n locations
gatgcatgggagatgctgattatcactcatgaaggaacctccacagtgaagatgtccagattgcaactgttggccacaatattcgaaaatctgaagatgaaggaggaagaatgcattcatgacttncacatgaacattcttganattgccaatgcttgcactgtcttgtgagagaagatgacagatgaaaagctggtgagaaagatcctcagatcctgccta

SEQ ID NO: 109323 - DNA, 53 bp, Glycine max
tcatctcagctgtagccttcagcaaatccaggatgtcctcctatctcttgaca

SEQ ID NO: 109324 - DNA, 82 bp, Glycine max
cacaccagatagacgtttttcttgtcacaactctcttgtaatgtttctttatctagtccgaacctatcaagcccagatatgg

SEQ ID NO: 109325 - DNA, 238 bp, Glycine max
  unsure (1)..(238): unsure at all n locations
atcacctaatgtacaatgtatataatcatttcactaaatatgtgtactgaataattctcagatgaactcatntncagaaaacaaaaattagagtgcaacaatatttcatttggtgaccttaatggtcttttttcttttctgttgaatgganggctcaagtttataacccaatatctcaatcataaaatatgtatttagcaaatcagctattaacttgagatctttagtgaaaacacac

SEQ ID NO: 109326 - DNA, 70 bp, Glycine max
ctataattctcgatcatgatatctgctctcatacactgtttaatagatgctgtttacgattattgtatga

SEQ ID NO: 109327 - DNA, 280 bp, Glycine max
ttcttaccgttgaacgttccgggtgatttgtgagatctctgcgtctaattcgtcttctagttctcgcctcatccgcagttccaaaataactttaatcatcatgatcttgggtcccctgttcctgcttatttattataattcgccccttgcagctacattttaaaattcaccaaaaaaataacaattccccacatcattctactcgtacgtacgttttactcattgtgatgtaacagatcatcaactactttgttacttatcaaaagcttcttatatttta

SEQ ID NO: 109328 - DNA, 135 bp, Glycine max
cccatctgtgctattcatttagcgttactgagttgaacgatcctcctacacataggtattactactgagattgcgactacaacatggaactttctttgagggtaaaacgctcatgggtgaaatcctactctactt

SEQ ID NO: 109329 - DNA, 455 bp, Glycine max
  unsure (1)..(455): unsure at all n locations
tatacgtgtattataaaatctaacctangtcaagaangcangaatagatggagagttcataactaagaaatatataatatcacataanaaatcaaatcatatatcaactcacaaatcaataattaaacacattacacatgtgaaatggaactgagaatatatttacgaaagcggcttgttagattagaaaatccctgacatgaatctaggcatgaataatgctgaagttaaatatgaatccacagctaagctcaactagaaatgaagaaataaagagtgaattctaaagctattgacattaaataatcaataaagacaaaaaggtggaatattatccatataaaaacaaangtcctttcactactcctatatacattcacattataatgacaatcgtgatttcagagacctttctaatactcaagcttatgtaagctaccaataagtacatgtca

SEQ ID NO: 109330 - DNA, 279 bp, Glycine max
  unsure (1)..(279): unsure at all n locations
acttgacaacctctgatgagtatgtcatgagtgatagatgccacactgcttcttggtattgcaatttctgcacattaacagatcaatagtaatactcgtgcacgtttgtttaaacctttccaacggactntgcatcatcctaacgtataagacgcataagacaccatcaaaagagtgaatattggttgcaacgtgctaacaaacatactctcatgcagtgtgagtgaggaatgcctttaatgagtacacatattntgcattagtactcgagattataat

SEQ ID NO: 109331 - DNA, 297 bp, Glycine max
  unsure (1)..(297): unsure at all n locations
ttccacccatgtttctggatctagcccatacttgaccatangatcaaatattngctgaccttcattctcagcanagaccaatatagaagtcaacgatgacttanattgcctccatcttgctacaactattgacatcgcctcnttctgcattctcaccttcanggatatcacacctgtgctgcaccaacaaatgttgtgatgtaacagtccgtagatgaatctttanaagtaactgaacaacaaaatcatgaatggaactatatttataatgacttaccanaatatctttccatatta

SEQ ID NO: 109332 - DNA, 273 bp, Glycine max
  unsure (1)..(273): unsure at all n locations
ctgcagcttcatagggtataangccacagagctcaagttgtctccttatcccnataagttatagcttaccttctcttcatcatgtacatcattatctccatggatctcgtacatgtcttgtgcaaatnttgtaacatgattctttaagtctcactccttaaacttgctatagaagctagatctgattctctatggttcaaatctctttatcctgttcttgaaccatgaactgtgtcgtagttangtacctcttgagcttcgccttgtcacttt

SEQ ID NO: 109333 - DNA, 208 bp, Glycine max
cctagctgtcacagtcagatagtccataagaccttaaatttattctttagctatacagaaattgataaataatatagctaagatcatacctcataaaatagttgacaagaacagaatataaattagcacacataagtatctatgtgaaagttcatgactagacatgactctatgacaaactcaatggtgaacaagcactctagatttt

SEQ ID NO: 109334 - DNA, 171 bp, Glycine max
  unsure (1)..(171): unsure at all n locations
gaacaattatgacctctctagcacagggtcaatcccgagtggatgaatcatnccaaccctagatgggtnattccttgcaaacagccgcagcagatacaacagccttattttcagaatgctgctggcccaagcagaccatacattacttcaccaattcaacaacagcaacag

SEQ ID NO: 109335 - DNA, 240 bp, Glycine max
  unsure (1)..(240): unsure at all n locations
ctaagctactcaccaccttctatgctagctacctctgaatagagctatattatctccactcccatactactagctagctcctgaatgaaagcagagctactccaccccataatctagctacccctgcgaatcataatnttatagaaaaaccctgctcaagacactcaaatccctgaatacaagctaacctatctctgaatggcaaatacaagccatagatgacaaccttctatttacaag

SEQ ID NO: 109336 - DNA, 135 bp, Glycine max
  unsure (1)..(135): unsure at all n locations
aaatcaattcataataattgtagctgaatctatttccatctngaagattcattntaaaataaaaaattgcaaactcgcaatcatctccacctgagaccttacagtttatgttgtccatctttctctcacttgata

SEQ ID NO: 109337 - DNA, 393 bp, Glycine max
ttggtatgatcagggcctttacttccttttctgttgttgactgagtgtaaacctctcttcctgattcatttattttctcataacactctgagagctctgaaacatttatttcaattttgatctttcatgacatttggcgagtgcatgatgagctgtgttgatgggaaagctatccttaatcaagctattcttctctcctcttacaagttttcttttgttcatagagtataatgaactaaatcctgtcttatgatggtattagcttgatgacaacactggttgaatattatgttggggcacttgaagcatgaggtttgaattgtaatgctcctatgctactgaatttggataccaaattgggttgctattttttggctaccttgttggactacc

SEQ ID NO: 109338 - DNA, 117 bp, Glycine max
caatgagacgtgagatgaggagagccatgcgtgctgcattctatcagccaggttccaccacccacaatgtattactcagcgataaacaacgctctcttaccaccgccagtatcgaca

SEQ ID NO: 109339 - DNA, 182 bp, Glycine max
  unsure (1)..(182): unsure at all n locations
cttcctctatactaactcctctgagagcttctagagatctaagactaactactccatactcttatactagttactctgaataacctaagctactcaccccctatatactagctaccctacngaaactganatacaaaagtctactcaaactatataaggcaatcagccgcaagaaactttat

SEQ ID NO: 109340 - DNA, 259 bp, Glycine max
  unsure (1)..(259): unsure at all n locations
gctagcctagtctcaanntttcaaaccgaaagggggtggagcttatcatatcatgctggcgcttagctcaacacacaggaaggacatagcgcacanacgcgcttagccttattacanagganaacttacagaagcanagtggagcttagtcgtacaggtttggcttagcgctgaacaaaaattctcaaaaccctaaatgtcagaacactggtcccgcttagcggaaaaatatgcctagtgggcttatcacttaagttca

SEQ ID NO: 109341 - DNA, 148 bp, Glycine max
atggctgaaagtaactcagcttatccatttatacaattgtgccaatgatctcagtaagcgctgtatcagacatgcaagcttgtgtgcagaggggttggcaatgtgcttttaaatgcgaattctgtacatgactcacattgaatgatgc

SEQ ID NO: 109342 - DNA, 72 bp, Glycine max
ctcgtagtgccaaattcccaatttttatgcaacacactatgtaattatttgctgatactcgtccaatcatca

SEQ ID NO: 109343 - DNA, 319 bp, Glycine max
aaagccagcgttgacatttaactccgtgatacaggatcaccccaggactgacttacggcttgctattggaacatgccgtttgttatcatgcggtgccggaccagtgaatgatggtctacatgatcacccaaaagcgtagaaaatctgaatctgtcactgaaggtggcggaagtaggcaaagaatatttactgataattggtgcctggatgcgcattaccacacggagcaaatgaaccgacacgtactgcacgacagaaacctatactggataagtacgcgcgggttgccgtttaccatattgagaagacccatgcgtgt

SEQ ID NO: 109344 - DNA, 360 bp, Glycine max
  unsure (1)..(360): unsure at all n locations
tacttacttactatggggtactttgtgacagcaattgcagcaatactggattaatatttccaatctaatgttgcgaatatgtgcttatctgcatgatgggtatgtgctgtatgcngttctgttatggatatgagattgaatgaatatacttaatttgatctatcatatgggtattcttggtcaataatataaatcggataaacacttgtttaagctgaatggagtttttataaaaaattagttattgaataacttatatcataacaatggtaaactgcagaagacaatgtcaaagtaaaaatgttgaaactaatataatttagtgtgatgatattaaatatgaagatcaatcactttatg

SEQ ID NO: 109345 - DNA, 295 bp, Glycine max
  unsure (1)..(295): unsure at all n locations
tctaagctgtcgccatcgtcgcgtgatgattcactcacaggtngagttagaatctcacctatacgcatgtggcggacaaagtggcagtaactgatgatcgtcatgcaatgcngaagtattctgcgcttcacnntatcatgtcacnacattattgcagnttgtggtacgtgagcatgaactactaccaatatatagatgttgttatacanatgagtacatcttanaagcttacnttcacacatagtggcctcttgggaatgaagcggctatttctcttctatgacgcatgacactt

SEQ ID NO: 109346 - DNA, 306 bp, Glycine max
aggcctcttacctatttcttgcttcgtctctctggggaaacacataggaccatgactaagacccctctaaaccccagcacttcatatacggactgacgccagctaaacattcccgcccatgtatatggaaaaaaacagtcccttctataggatgttcgggatacaaaagaggcccactggagaacattgacctaggacttgttaaggggctggctaaagtggacttacggaggggtgtctgtgactagaaaagtactagatatgcggtaacggaacctgactgtatgtgagtggaacactaatact

SEQ ID NO: 109347 - DNA, 215 bp, Glycine max
  unsure (1)..(215): unsure at all n locations
tcctcgcccagtattatgatcagccattgagatgctttcacctttgggacttccagctatcacccatggtagaagaatttgaagagatcttatgatgccctctaatgggaagganaccatacctcttctcangtttctatccctctntagctagaattgctaagatagtccanatctcggcacaggaattataccacagaaagcaagtcgaaaat

SEQ ID NO: 109348 - DNA, 176 bp, Glycine max
actagctgcgccgagttcgaagcctggggggacgctcattgatatacttattagaccatgggaacaggacggatacaaatatagaacattggccacactctcagactgataactcaaatactcggaaagggcgagagttaggaaggattctacatatacttaattgaaaatgaggg

SEQ ID NO: 109349 - DNA, 350 bp, Glycine max
  unsure (1)..(350): unsure at all n locations
aaggatgtcgaaagataaagagttaggtggtgatgatacgaatctacctgctctggtgacactggtattctcctatatgatgactcatgcgccaactgataacgaaaactgaaacggtcccaccctaacgacttagaatggctcaccatcaacactacagctacatgatctgtangggtcttcgtggtgtgtgaactgatattcaaagtgtgaggtatcggaatgtggagcacagatgggagactaacgatgatgggcgatctgtcgcaatcagctggcttagaactatgctactgcggagatcactctgtggagtcacgaaggcaaataatatgacaacgttcgctact

SEQ ID NO: 109350 - DNA, 278 bp, Glycine max
  unsure (1)..(278): unsure at all n locations
cttctaactctcagattatcatntcattgtgcttggctgatctatccctattaaaaatttgttactaggtcaagtggctaagcaggataatggtgagttatgtagatattctttttctcatgtctccctgtgaagggctgaaccgtctgtgtaataaagataaaaatggtaattattttgactacctcattaaattatctttttcctaactctcccaggatgaaccatccagtagtagtgcatctggaatatctactagtaacctgggactagcttgt

SEQ ID NO: 109351 - DNA, 272 bp, Glycine max
aatcttatatatagtgaagatacttcctctgagtgacaccgcgctagatcttgtgtgcgcgtttgactattgtacctctagctggattttgtacagtgaggactctgtatgcattacagcagactgcatcacagtcatctttgctatttctgctaccctgaaggctgtcagtctctattaaaatcttattgatttcaaacgaatttgctcaacttcacttacttcctcttatgcatgttcatgctcttaactagagatccactatcttaact

SEQ ID NO: 109352 - DNA, 495 bp, Glycine max
  unsure (1)..(495): unsure at all n locations
tctgaatntcttttctttggctgagtgaggagagagaacagctctttggttntaaataaaaagggttgtctctctttctattattntattataaactatgccacatgtctccatttgagtggagcaaaaagggcccactttccncttttgactgtgacccatactcagccacanaagtgagaaaaatctgacctttgaaacgctaaaatcctgcctcggnttgcgtgctggttttaaggtttaaatctctcgcgttctttggtccgtcggggccagttttcgaaagtaaccaatatatatatcataacgctcagaatataaccncgagcgtggttcagaggttgtgttcgtatattctaagtccacgcaaacgatgattttagactattaataagaataacccatacctccagtatgactttcttcttattagccaaccncgttcttgctccctattctacttctacagacatttngctatcactgatatactat

SEQ ID NO: 109353 - DNA, 225 bp, Glycine max
ttgatatgaggtgatcttttttggatttctgaaacattcaagttgctccagatgcccagaactgctaaagtcagagacagcgcagactttcctcgatatactcacgttagatctgacacaccctcagcatagatgcgtctcggacgacctcactcagacacagttctgatcagagaatatgcccacgtgacatatgtactcatgcagtcatcaaatatcttattt

SEQ ID NO: 109354 - DNA, 106 bp, Glycine max
tcttttctgtgaaaataactgcgtacaacgatgatgcccacacttgtatagcttagccactatgacttgtgaagtataaagcagaaatctgtaccacctagcaatg

SEQ ID NO: 109355 - DNA, 60 bp, Glycine max
cttcatctagctgtatgctgcagctccactgtccaaagccagatggtctgttttatacca

SEQ ID NO: 109356 - DNA, 77 bp, Glycine max
  unsure (1)..(77): unsure at all n locations
ctcgctgaatcacctcagatctctggttgcnatcttcggctcttgttcactgcaactagaactttctcggcgagagt

SEQ ID NO: 109357 - DNA, 73 bp, Glycine max
  unsure (1)..(73): unsure at all n locations
caatgtcctattctaatttactttcaacctaaaaccattgatgagngtttggacacctaattgtgttgctggg

SEQ ID NO: 109358 - DNA, 301 bp, Glycine max
  unsure (1)..(301): unsure at all n locations
tctactctatgatcacaacgcgtcgcactttgaaatctttagcttgcttgagcacccctcttcatatacatcttaatgatactgccacgactcactgtcttataaatangtacttgacttaaggaacacatgtcggcccgacacactcacctgttgcaatgggaataccaacctttcaccgccttattctcttgagagacagttctccttcttcactgtggaggagcccctactgaaatgtttggttcaatgacggtctangagccgtgcgcataagcagagatacactacatgcgtcttc

SEQ ID NO: 109359 - DNA, 203 bp, Glycine max
cttctgaatctctctctttcggctgagtgaggagagagaacagctatctggatatatataagaagggctgtctctctctctatctatttattataaactatgccacatgtatccattagagtggagcacatagggcccactttccactttagactgtgacccatactcatccacataagtgagataaatatgacctttgaaac

SEQ ID NO: 109360 - DNA, 202 bp, Glycine max
ttaactactgctataccgtttgtatgaggtgatccttgttaggacaattgaaatacttcaagttgcttcagatgcccagactgctaaagtcagacgacaggcaagacattcctcgatataagcacgttagatgtgcacacgcgtcagcataggatgcgtttcgacaccgcactaggcacattctattcagagaaaggccacg

SEQ ID NO: 109361 - DNA, 204 bp, Glycine max
actctcaaagcataacagaattggacactccgcttggttccaattgccactctcaaatgcaaaatcagaattggaacaccccctctggttccaattgccaccctcaatatcaaaatcagaactggaacatggcttctgtgtccaattgccaccctcaatagcaaaatcagaattggaacacccgtatggttccacatactcatg

SEQ ID NO: 109362 - DNA, 169 bp, Glycine max
  unsure (1)..(169): unsure at all n locations
ctgactcgttgattaaacttatgatttactttaacttnaggatctttcggaatgatcttttgaaactttttcataagaactgtaagctgttctattaccatccttattcattgtattgtcacaaacggattttgtgttcatccagggagactaccagggctctgacaac

SEQ ID NO: 109363 - DNA, 138 bp, Glycine max
  unsure (1)..(138): unsure at all n locations
gcaatgaagggtgaacctcacatatatataanacaatatctatgtacacacacttagacagaagtggaatctggtgtggtcacaaacgtgtatatgttcctcaacttgaaggtgactaacaacaataatattgcatgc

SEQ ID NO: 109364 - DNA, 155 bp, Glycine max
gtaaaacgctgtgtgctattcctccgggctgccattgaaatattttacttttcactttcactctgatgttcaaatgttaggactaatttagtcattatggataatttgacaacaactgtactactgctttaggaggtgaataaatgatcgatata

SEQ ID NO: 109365 - DNA, 236 bp, Glycine max
  unsure (1)..(236): unsure at all n locations
ttatagcgcgtctggaacaaggtcagtgttacatatgctatgatatgttccagacttggatttggacgaccatgccctctgattccagctgggaaattggcgagtggaggaacgccccggcatttacgcaacgagcataatgtaaacctttacngtttaaaagctctatagttgggcctacgctttagagttttccttttgtaaggctttgtgtcttttgttttgaattataatac

SEQ ID NO: 109366 - DNA, 249 bp, Glycine max
gtcttcgacgctcttcaattcgtcttcatcgttcttcgatctcaacgggtagacctcaaccaactttcattattcttgtccgggggccacatggttcggattttatctcgtcattctttatccccttgaggctagcattattaacatttgtaccaaaaaaaattcacgacgtgatgatatcgtactcgtaaatgaatcacgtcgcgtgcgacccgtggataaaaatgtgagaaatatattatatcaaac

SEQ ID NO: 109367 - DNA, 285 bp, Glycine max
ttgggtattttatgcacttctggtctaaaatgtcttcacaagtcattatattatggtcaagggaatgaataaccatgattcttggttatcttcataaaaaatacaccatagcttctgtgatgtttaaaaacgagctttgataaaactactttttcaggatctgcatccacaaagtatattgttccacaaatgacaatcttatttatatgaccggcattacttcttcatcctataataaagtatctcattgcactatatttagtgatcatctcaagataagatttc

SEQ ID NO: 109368 - DNA, 300 bp, Glycine max
  unsure (1)..(300): unsure at all n locations
ctgttctgtgtgaatgtatcgctcacatttccacacatacagccgaacataatgtaacctgcggctatgagtactactacatattgctgcctactgccgcttccatcggaacctgtctgcactgcttaatgatcggcaaccgaacccttgcgcgccggcgngacaattctatgttgacactatctcgaattttgccctcttccctattttcttatcaggctgcaccagcgttaggcacaatactgcctaaaaatacgcccgcctgcactctccatactggtgtatcgataagcattctgc

SEQ ID NO: 109369 - DNA, 188 bp, Glycine max
  unsure (1)..(188): unsure at all n locations
cttctaaagccagtggccgttgtttgccccatgtactgaatccccttgccttttttgtgattctctttccgtaacgntaaagaatcttacgaattacgtaacgatacttcgtgtcttttcgtattggtatgagaccttatggatcacgtaatcattccttttttggcttccgggatgttacggaactt

SEQ ID NO: 109370 - DNA, 138 bp, Glycine max
  unsure (1)..(138): unsure at all n locations
tctatttgcatactagttacttcccttctgctttacaatgatggcttatatgacgcaatngaagaatttatatttttcatatatcaacagtaatagaataattctttcttattattntaatctttatctttctctccc

SEQ ID NO: 109371 - DNA, 108 bp, Glycine max
atatttgacgacgcagttatgtaaaatgaactgtccctaatcaactaagacagatgacatctgctattcaatctggatgctataaaataacgcacatgcatttgttct

SEQ ID NO: 109372 - DNA, 150 bp, Glycine max
  unsure (1)..(150): unsure at all n locations
tgagtgaagaagagtgtgagggttgctgagaatangaatatttgtgaggtttatagtgnggatgtggcatgttcagatggaagttgttcatctagtgacgagcaaggagaggtttcggagaatgtgagtggtgcaagtgaagataatggg

SEQ ID NO: 109373 - DNA, 481 bp, Glycine max
  unsure (1)..(481): unsure at all n locations
caggatgatgagaatgccttactacagcaggcgctttgcatgtctatggatgatcctgccattagccatgatgtanaagatacagatatgtcagaagcttctgcaagtgatcctgacttggctctgggtgagttntatgttattaattcaatcctcatctaagacacagagatattgacatgggtcatgatgtaggcaatggacactgcattacagtacaatntaagtgtcccaactcccatgaggcatngaagcgtggtgtcttatgtgtccaacatggaatcacagacccctnntttaagtatcctgctctttatgcgtcatatttcttacattaagcatggacacantgttttgcaaattgcaagtcttcttttttaatccagtctttngtatgacanatgccttgtnttatatcttngatgattaagatgatntcttcatgtgtctccacttcagtgaagtagatagttcttattcc

SEQ ID NO: 109374 - DNA, 376 bp, Glycine max
  unsure (1)..(376): unsure at all n locations
gtcttcgggtttatgttctgattccccagtggaatgctacatacttcttcaactgagggggatttagtgatatagaattgtaccgtagtgaaaatagtagtcaatagcagtagtgcaggaatatcttgttgcctgttatagagacatcctcactatgtatcatcatataatcatgccttgatatctttcatatcttctctagtaacttgtcttattatctgtacatcacnttgtgaacataaaaaattgtcacttgaaataaagaaacaagatatacacttgaaatagagaaaatgtcatattttgaagactttatatgttaattagtgtgtaaagaaaaaaaaagattgcttttacaatcatattatgtaaaagt

SEQ ID NO: 109375 - DNA, 344 bp, Glycine max
  unsure (1)..(344): unsure at all n locations
actcattttttatatnanacaaatggggtttttgtatagctagtagaatctcctcttaaaagagatgtatgttgtcattatcataaactcttcgtgattcgatttgagaactataatattgtgatgatgttacattggcccttcctactgtttaatggaaataataaaccggatattaactttttcttaatcgagaatccgggaaaatacatcttactttccataactctaaactttgatcacaagcgtcattataaaaaacagttagcgcaacagtagaaaggctgtgacactcatataaaatctgttatgccatcataaatatctgatcctccagtctaaca

SEQ ID NO: 109376 - DNA, 325 bp, Glycine max
tcatgactgcttctttcctttgccggaacggacatacttccacgtcactggcatgacacagctggttgcacagttcgtgagtaaggacggtgctgagacttaagtcattatcttgctggctacctgacaacacctcctgtgctcgtgcccttatgaacggacgaagacgctcatcttcagactgctgacattacgacgaaccgtgatgtgcacttgactatgcatctcttactgccatgggattgctgtcaggtatcctgtatgaccagatctaccccagcgctatgtgtaagtataacctcccgttaactcccgacttatcatg

SEQ ID NO: 109377 - DNA, 315 bp, Glycine max
ttctgaaacacggaggcataatgtatcttcttcgatgaggcatgactcagctttacttagcgatttgaaatggcctttttgcactttgatgtcatcgagcttaaagctggcgactaccaaatttgaaaagtatgtctacttgcatgccatctcgcatcacttacgttggcaggcctgctgaagcgactactggatacactcgtctgaatttgtacagtattcctcgactctacttcttttaccattctttactaagagctctcacaagcagtgatggcaatagcttaagtgaagtaacgctctatctcggctgtg

SEQ ID NO: 109378 - DNA, 248 bp, Glycine max
tatatgtgtaactcaagacctacttaatgcttcacttctactgtagaacaattagtcaagtaaactttttaacataccttctacttcttataaaaactgcagctctcccaatgccaattaactaaatccaacacactacattccactcaatcaacccaactcaaacagacctccctctacaccagcttgtccataaataacatattatatgcatttaacagagatgaaaactcatctgggaatgtgga

SEQ ID NO: 109379 - DNA, 298 bp, Glycine max
ggtacgcatgctagctcatcatttttattaactgatcatgagcgccatgtgtcttattgacatttttgaaatgaccttcagataattacgtagtaggtgctatacgtcatatgtgacattgagttgatacatacattttgtatgaaaaaaattctttctaacctcgcttaaatatattcctacttaatattcatctccagaaaatacacttgacctatttttttcttataaagaactaacttccaactaacccacctctttattattaacatcacgaccctatgaacgattgcgaaca

SEQ ID NO: 109380 - DNA, 204 bp, Glycine max
  unsure (1)..(204): unsure at all n locations
ttatacatgtgtcactcggtgagagggcacgtcttatagatgtgtactagttagtgggatctttcattgcgcggtntatggtttggtcactccactantactnaatgaatgcttcattattaaatgggggtgtatgctagggtntggtcactgtcacacttgagtactccctcatttccctctgtattatttctctacaacttg

SEQ ID NO: 109381 - DNA, 312 bp, Glycine max
tgatatctctatggcgacctggatatgttcgttcagattcttggagatcactgtgatctaatgatgatcttcttgattaaatatcgctctaacatcaggtctttatatgctgcctctcatctgcagaaacgtgaatttctgtgtctcatcaaaaaaacctcctgcacactgtaattttaagaatctgtaactactgtctatacaagaactataactgctggtctggattctatccctatcaatgattatatggccatactgaccatcgggaatttgaagtgtgaactacatgaagttagtgtaagtatggac

SEQ ID NO: 109382 - DNA, 510 bp, Glycine max
  unsure (1)..(510): unsure at all n locations
tatgtattcagcagacactaaaaacatttattagagcatttgttntgcataggaccgtaatgaatcaaatcaactcatacagagttcaagactcaattcaataattgattcgttgaactntgttcatcaatcaaataagttgaacaaagctaanaactgaacttgtatggtaaacaagttgaagttgaattatgtataatntgatttaattggttcataaaccaactcaatgtataatcaaattgattgattgatgaatatatacacatttcttccacacgagtgtataaataatngattcatgatcattgangattngagttgaatttatcatactttaacatggtatcanaactctgangcagaatgtgtatggtgcttgtgaatatgttcactcatcgaatcaagtcttcactcttntattatatnnttttgtttacttaagtatacacacttagtgtcacataaatatcatggaatcatcaaatatgtagtttcttaggagtatat

SEQ ID NO: 109383 - DNA, 341 bp, Glycine max
  unsure (1)..(341): unsure at all n locations
gatcagagatcataagataacagatgagaatatatcgagaaggtctatggaccagacaatatcataacaatatanatatgtcacatgcaaacaggacatgataagaaaccatgactggaagtggtcatctccctttgattaccaaccaaaatcatgtgcggcagcgagattatttggcctgcctatactacaaaaacataaaaggtaaaaggccataacactcagagccaaattccccttcagaaacactattcctaagaaaaattcctatggatccatgatcacacatgtaatctgtgatttgataggaaatgacttgcanaatcaagtcatgacatatc

SEQ ID NO: 109384 - DNA, 352 bp, Glycine max
  unsure (1)..(352): unsure at all n locations
atggacacaagcaactagtccaatcaccgccagagtgggttagaggaaatggccttgatgaggtggtttgattggctgacatgctgcaactgcngtcacgagattggttttggtgttggtgagagatcttgaccctgatgggcactngcttgcaataatggcaaatagcggtatgctactcactgaaagtggatgattgcttgtgaatngatcaacaaatgaggaaccttgcgatcacagaacaatgacggtgagaaaaattatgatatctctaccacttgatcgcgcgtgactcctgtgatacatctcactagatcaacagaagactagccaagtgtaatagtctactact

SEQ ID NO: 109385 - DNA, 442 bp, Glycine max
  unsure (1)..(442): unsure at all n locations
atctatgacgtgtgggtcgcgtttgtcctagtaacctcttgcgtcatttntncagtaagagtatagtgatatgggagatgttctctttgcagcttttccacttaatccaagagcttctagtgcttaagcgagggagtttagttgcttaagtgagtgtggacttcctcttaagcagcattgtgcanaccggtgatgggtccctcgagacaatctttgctagtcctgagtcaatgcatatatanaacgatactctccttttatgtgaaaccacttgatttctctangactctcgtatctgtctgaactctccatctctctatatctctcttctctctatccatgattatctaagaggagctgatctttctggcaataatttccttcttctgagctggcacatcatgaaggacatttctcttatttcatcttggtatcatgtggt

SEQ ID NO: 109386 - DNA, 304 bp, Glycine max
tctggtgaatgtatcgtccattcaccacatacaccgagcataaggaagctggggctatgatgactactacattatgctgcctcactgccgttcatcggaactgcggcactgctaatgaatcgccaccgaacccttgcgcgccggccgcgacaatttatgttgacactatatcaattttgcttcatccgtatatacttattagcgacacagcgttaaggcccatactgctaaaaatacccccgcctgcctcatccatctgtgtattattacatctgcgcaggaaccaccaaacgatgtaactgat

SEQ ID NO: 109387 - DNA, 170 bp, Glycine max
actcaatcccttgtagtcattcatcatgcgcgttacacgtctgactggaaacctgcgtaccacttatgctgagacatcccttcgcactgcgtatacaaaagccgaccacgcttccacagtgccacctgatggcaatgccctgagcgattttcttaccattggcgattaca

SEQ ID NO: 109388 - DNA, 315 bp, Glycine max
  unsure (1)..(315): unsure at all n locations
tattttattaatntcaacattctgcacctgcattgtctgcttaaaagttacattcttcagaatttaacttaaactttgaagctgtcctatttcagattgattataagctgagataagaccttcatttgtgtttgctttggaggtggcatgagcgccaggtgaacatagacccatgatgtgtaacccacactgattactatatatcttaactgaattccatggtaagtaaggatcatagtattgtagcttatgaaatgatagtaaagtaaggctactttctaccttacttcaacctcatttttatttgtcacgttt

SEQ ID NO: 109389 - DNA, 375 bp, Glycine max
  unsure (1)..(375): unsure at all n locations
agagaanaatctataatcatacatcttatgcaaataaggcatgctagcccccaacattatttgcatttgattccatctttggacattgtgantntgaanattagaaaacccanagtttattagggcatttcatcaaacatacaactcccaactgatctggcaaaagaaatagtgagtagaanatggaacttgcagacaaaaaacanataaaagaaagatgattntctctntatcattcgcagaaaaagaaaaatngaggaaacacactgcanacaaatgtttagatttcctatgtgacatatactaactagtgaaaattagcagttaattaaagttaatagagatgcagaatgtaataattaaaaaggaatatgc

SEQ ID NO: 109390 - DNA, 51 bp, Glycine max
  unsure (1)..(51): unsure at all n locations
cttaagtgactgggctgcagctactggaatanggtatctggcaagtcactg

SEQ ID NO: 109391 - DNA, 152 bp, Glycine max
  unsure (1)..(152): unsure at all n locations
tcatgcagctagcgagatctttgctgaatatgagcgcaagcgagacctcttactaacgcatgttcttgtctcagatgcatatttagctaactggtcagacttgcttacgagagtgcagctntttaatctgaggtctcgctagcggcataccc

SEQ ID NO: 109392 - DNA, 376 bp, Glycine max
gcttatctgctgcttggactaaacatgctgaagggggcttttattttactacataggctataactgttacaagctatataaaaattgccactgagggaacgtttaaacaacatgctggctggatggaatcaactatatataagatcaaatatgtaaattgaccattttacttctataattttctttcaagtatacttattatattaatatactgcacactttcaatacgcataatacttatgcagtcgccaactgctattttaagagtgacaatgatcgtatgatactgtaagttatactcatatgtgtgcccatgaggctatatgcgtttgtagtagatttatactgcgtaggagggacatactacataggagct

SEQ ID NO: 109393 - DNA, 418 bp, Glycine max
  unsure (1)..(418): unsure at all n locations
gacactctctaataatngatcataggtctcatcctcagcagatccaacatanatgagctctcattccanatctgcacccacaagacagcatacattggtaaaaccaaacatggtatagtagaccacagaaataagatgacgtgagtaaaataatagtgaagactgaagaaggtggaanaatangcttttagacacaaattcgacacgatattttcaattatgctcgttccctganaatcactcacaggagaattgaattgattatttataagtgttacaatgggacaaaatgaaatctgttcaaatttganaaactgttacggncactaagtatagaatgatcaaacatcacagcatgttaatagttgatatctaaataagagaaacacattcggttggaatagaatccccatcatac

SEQ ID NO: 109394 - DNA, 497 bp, Glycine max
  unsure (1)..(497): unsure at all n locations
actaagctgtctcactgttgattacctatgtacatgacgggctttgttacaatactattgacagcgttangcctatgggtacctcanatagaaggaattacttagttgaccctcttgctgacanaacanacttgaagaagtctcagcctgtngaaatattgtccgtggatggtatcagaaaggcattgaggttngtcattattaacatgggcacagtacccgctgggctatattgcaaggacgattctactnntttttactccaccttgaattctttgcagctagattaataataattctataccagcatgcaggaaaagtacacacttctaatcgcagggatangttcttctgagtgaggaatgactatctgactacagcatgcatataagatcatctttatctactgcttgctctttcaccatcgaccaaatagataagacaattcaatgtcacaatggcaaagaggagacaaagaaattatttgcctgatctat

SEQ ID NO: 109395 - DNA, 242 bp, Glycine max
  unsure (1)..(242): unsure at all n locations
tatacgagctcactgaaatcctcataaggtctctgttgtttttcttaacacgcgctatgcggcaccgggttggggggggaaacaactcgcgacttcgaatggtntggngaagaggaatagaaaggaaagactgtntttccaacgctacactaataataaggctcgccacactcatgtgtatctgctctcgggataggaagcgtcttgaacacaccagaattcatatcgcatatctcaacagt

SEQ ID NO: 109396 - DNA, 411 bp, Glycine max
  unsure (1)..(411): unsure at all n locations
acttaagtcatttctcgcttaacttanaaactaaataaattctcaccgaacgctgaattgtttatccgtaacttctgtaaaataaattccgaaccgtcggtcgtgctgcaaccacgttggaatcaaaaagacgtaaaatatataatatcaaaaacatctttattaaatatagagaaaataatggacgtttctcttgggattttattctaatcaattgatattactaagtgaactaagctaaatcaactcgctatcagctgtccaaaatagtttgagttgcattcaattctactagtaaatggacattttaagccacgcctaatgatacattattacagatattgtaaaaaacacttgctgagtctatgagatcgagagcaagccctttgcaccccaaaatctatggcatgc

SEQ ID NO: 109397 - DNA, 318 bp, Glycine max
aggcttaaccctctggcttcgaacacttaatattcaaatgtttaccaaaagtttatctcgtaaacattcccgtagaccatttcctgcgtggaaatcatttttactaagctcacattatgctcttttgctaaaaccctttcctagctggcaatcatattgttacttgttcatctcccccaattttcataattatgtatcacttcttgcacttacttcctctgctaagatcggcttctatagacacatttatcctgcaatctgctttacttttctcatgagttttatatgcagtcttggaccataacattcacagcattt

SEQ ID NO: 109398 - DNA, 176 bp, Glycine max
  unsure (1)..(176): unsure at all n locations
aaaaatacccagttcattaacttgatttacttgacttcaatcataatactgtgcaatcacatacatattcaagcaaaagcccctgagattatagacttcgaatgatgcttcgaagattaattgcaccacgatattntcaagatacaagagcatcaattgtaaatactttttttatc

SEQ ID NO: 109399 - DNA, 437 bp, Glycine max
  unsure (1)..(437): unsure at all n locations
atatattaatagaaatatgtgctcaacatggtatgtggaattaactnctntttaaaactattacattntcataanntctagtaataaaaattcataacttattaatttaataagaaattcccaaaataatcttaatattttcaacanacatttatacatttcccatatanatatataccataacaaaggataatacattatcttcattaaattaataaatcacttgtcacgactattccacaatacgctataaatgaactataatgtcagtcnacctaaactngactattatataatagtttgattcaattgatctgttaatgataactgataaaattaacaactcaataatgattgtgcgctaatatgggacataatatgacgatttgatagcatgtttataaatctgtcgataggatgaatcatcactgacatat

SEQ ID NO: 109400 - DNA, 277 bp, Glycine max
aaaagaaaaaaatggctgactatcactacttgagagctgctggtattaataaaacacagattttacgactgtggtaaaaaatagtatgcgcataaccaaagcttgctcaagagggctaaccacacctttcataatgggatgtcaagaaataaaccataaaactccgacagagatgaagataagacacatgattgtagtgtatacctgcaattattatttcaggcaatagagataatgctcatctctttgagaatacgtctgtgtcctccaaaaatta

SEQ ID NO: 109401 - DNA, 197 bp, Glycine max
tctatctttaaacacaaactggccttgctgagacaacaactctcgcaccaagataagaaaggatcatattgagctatcccatgaaagtctctggcaccggggtatctcctctacactcgacttttaataaacgttgttttcttctaaatggggacctgtttttttgaaacctactcggctcgcagggcaatggattc

SEQ ID NO: 109402 - DNA, 309 bp, Glycine max
ctatatagtgtggctatggggatatattttatataatgcatggacatcgggctatgtgcattgatgatcggaaatgcaaagcaggtacattgggagcaatttgaggggcttttttatgagacactgtagcacatcagtttcaattttcaaagacaactatgacatagacaatttgtattgcttggattgggtcttgtgctgattctaactacactgcgaaatattgcttgggagaatctataatatcacaatctgctgtttgtataatcaaattaatgccactcacattttagaaattaatagtaaatc

SEQ ID NO: 109403 - DNA, 378 bp, Glycine max
  unsure (1)..(378): unsure at all n locations
catattaattgtggatatcgatccattcactagcttgtacgagcctcacaagataaaagctggcctatacgcgtntntcttgctcttccagccctatacatgataccaatctttatgcctttaactagctagcacttactcatgcatttgtatatgctattaacttgcatttgcatcgaggaagtaatnttatgtntaagacagtatgcttttctctcaattaagctntgtaaatatatcattgattgcacagataataatntagaatggtacgtaactntntctccaaacatagaaatataattaattgtataatctatcttgcagcaaatagataaatcacttattttattagcttgtgaatatgagtagcctctc

SEQ ID NO: 109404 - DNA, 310 bp, Glycine max
  unsure (1)..(310): unsure at all n locations
gtggttgttgataanatttcgctagtttagtttttttactagctgaaaagttnngtttgatgtttggtaaatgttaagttcgacaaaggtagctgaaagctagctggaattagctagtagctaaaagcttaaagctntaaaactaacttattaaattataaatgttcgataaaattagttattgaagtagctaanaaatgtaaaatgacagaanaataataaaatcatgagttattttaaaatgtaattaggaaattggataaatatattgagtataaaatggaagaaaatataaaaagtaaaagttcat

SEQ ID NO: 109405 - DNA, 537 bp, Glycine max
  unsure (1)..(537): unsure at all n locations
tcagctactacttcgaacgtgcttgaagcgctgagtgtatntactctatacccgacttgaatatcttgtaaatgtatgtctatatgaaaattacttaaggtgataattagaaggattaagccgtatatagtttaagtgcaaagttctaaggccaaagtattacttggaaacaatacttgtcttcatatgaatttggtacccttcttcgggtcttantctccttaatagccattttcatgagccaccttggctgacttgttacactatggctgacttaatatatcatcaaaccacttaaagcacaagcacatgttttatctgacagcaactgctagccacctcacataaggcatttcatgcttttaggattgtttcgttccagctaaaaaagaatgaaaaacataacagtaaaataagatagagtccattcctaatcgctattaagtgtatgccatanaataacaggaatatctagtgagaaaatgtttgatctataatgtgtaacctgcagactgataaaanagctatatatctatc

SEQ ID NO: 109406 - DNA, 499 bp, Glycine max
  unsure (1)..(499): unsure at all n locations
ctcagcttatctcctcactgacacgctctaatatttgaagagtattcttgtggtacctttatcaacaaagacactgacataaacttatcttctccttcttggacaaagtatggaaggctggaggcatgtaaattatctttccatcagaccttggatgcaactgtgatcttatatccatatcagctagatcttgacgggtattcaagccatacttcgtcttgccttgaatgttagggagcgtcccaatcacactgtcacaaacatatttcttcacatgcataacatcaatacaatgtctaacgtcaagatcactccagtacggaagatcaaagaatatggacctcttcttccatatgcaactctgactnttatacttcttttgngtctttccaaatacagtgttcacgtgttgaacccgttgatatacctgctcaccagtcaacggaatcagcgcaatatcatgctctagacttccattaaaagcttttctcagtcgtct

SEQ ID NO: 109407 - DNA, 528 bp, Glycine max
  unsure (1)..(528): unsure at all n locations
accttagtgccctcttcctcctaacccaaccattgaaccatttataaatttaatagtaccatatgatntatctaattgngcttccaattatttctctcttatatagaacccaagtcaaatactagtattattcaagtatatgaacaacttttnttntaaaaaaatggcataagggttaagactggacaacagatcaattattattaggcgtttaattggcgcatgtgccagctgacagtctgtgtgagtagtaaggttnntgtagttaattgtgtgcgcaagtgacattatcatgtggtgcacgaagcaagctgtcaaggcatgtcacatggtttacgaaatggaattgcgcaatacaaacaaacaaagcagatgttgaacaaagaacccaaatcccacttatgatattgattatccataacaatgcttgcatggacttttgattatagaatgttgtatagagtatacccgttactcttcaacacgtaaagtaccattcttaattcgatgccccattgttgacaccct

SEQ ID NO: 109408 - DNA, 349 bp, Glycine max
cgatcacaatatagaagaaataagtgatcatcattgcaagtggagtacagcagtgatctttctgctcttatgtcctgcgcacaacatgcatatggatttctttgcgaggccttccaatatctgaatttacacttggttgcgcatgacttagaatgactgaacatactaagtcttaccagagagatgcttctcaaatcattctcttgagacactccattaaaatgatttcactagatcatctcatcctaacctagaggatctctaactagctagataaatcatacctacatatgtctatatcacaataccattgacctctctttcctctacacactaaataatattattt

SEQ ID NO: 109409 - DNA, 330 bp, Glycine max
  unsure (1)..(330): unsure at all n locations
tgcatcagcaatattactgggtgcacctagcatatcccattatctagcctctcccttggcctacttgcgtgaaatattatcccttactgaattatttttttctatctcattattactttacattcttgtactagtatttctttatcatgttattacactccttntaacatttgttaataggaattgtctaattgactctagtaaggttaaataatntcatcttcattaatcaatcaatataaattagacaattttcttattctaaaattttattattaatgttataatcatttacattaatgtatcatctctaatctttcttttacaata

SEQ ID NO: 109410 - DNA, 457 bp, Glycine max
  unsure (1)..(457): unsure at all n locations
ttatcaatcatgctaaatatctgaggtcattggatttcngaaagtcctcattgtttcattctaatgtatccaaaaaatccttgtgtgtctgatccaaaataagttcaaaaaactggctgtgattcttccaagctgtatgttcaagagaagtattctgtttaagttcccaatcagagtcataatatataactatactaatagaatatcaaagcgcgcgtaaatcactcataataaactcgcgtaagtttgtcaagagatccaagacaataaataaggtaataaagtactgaaattaatactaagcgataaataaacataaagagtatttcacaatgtntgaaggcatggcggaggactcagcctcctgacgtcatggatacgagctcatcttctcctatgaataatcaaaggaactaccatgttttatctcctctgaaaaatgccttcccaggcatgc

SEQ ID NO: 109411 - DNA, 508 bp, Glycine max
  unsure (1)..(508): unsure at all n locations
gctatgcgctatntccttacgaacgttcacttgcacaagacatcctattaactaagaaaaatgcactcatatacaatcaaggtagcttcattacctagattattcacatgtacttccaaggtgtatttgttatttacatcacacacgcctccttggctgaatttacacacatgcatactcaaagcattttggggtaccaaaaattgcacatgcgctcatcttggtatttctaatacctatacatatacaaacttcacgatgaatcttgactacctacacaataaggtgctacatttcatgcctttctcaagtttttgctacctaaagccgcatgcaaattcaagcatatattcctttgctgactaanattgtattcaaattaaaaggtatatattnttttgtaatatggtttcttcacataacatgcaacatatntatatatatttntngtgagacattttgactaccaacaaatatatatacatacatccacagtatttgctatcat

SEQ ID NO: 109412 - DNA, 338 bp, Glycine max
  unsure (1)..(338): unsure at all n locations
cagagtggtacctggagatatgtcacggnggtcaggagaccttgtggacgtcatgtggggtgctattgcccaaaaccaagcttgaccaatcccgacccaacccgggcatagttggtcagtgagaacctgtgatgtacctaagcaggcgagctcctggcagtcaacagattaaaggaacaaagaccacaaagcaaggaggcttgtggtggctggccaactcgtgaatttgtgtgatatgtgattatggcctctggtaatcgattaccaagggtgggtaatcgattacaaggcttaaaaatgaagacaggaggctaagatggtctctggtaattcattac

SEQ ID NO: 109413 - DNA, 363 bp, Glycine max
  unsure (1)..(363): unsure at all n locations
aaaatgcttttattttttaaatgaanggcaaaattgacctttcattgaatngctgggtgcatcagcaatattactgggtgcacctagcatatcccattatctagcctcttccttggcctacttgcgtgaaaatatatcctttacttaantttttntttctatctcattattacnnttacattttgtactagtatttctttatcattntattacatcctttntaacatttgttaataggatatgtctaattgactctagtaagggtaaataatttcatctcccattaatcaatcaataaaattagacaattntcttattctaanattctattattaatggtataattattacatttaatgtatc

SEQ ID NO: 109414 - DNA, 198 bp, Glycine max
  unsure (1)..(198): unsure at all n locations
agttaagtaaacaaaacatacaataaataagaatgtattaaggaaacaaccaatgcaaagaaaagataaaagtagttgtacttgcaaccgaggttganggttccttcctttactattaagatgatatctcttcttcctggtagatactctttgtgtggaagggatccgagatgtacatggacattcatgagacacatg

SEQ ID NO: 109415 - DNA, 259 bp, Glycine max
atatcaccctgcgtagcttcctcctcaagctcttcttccacctcttcttcttcacttatttcagatgactagtgagttctccatctgccttcatgatcatggtactcctggttggatagtcataagcaatatgtcctctacctaagcatatgaagccatttatggttctggtaccagtgttggatgatgaggcagacatatgcttggttacagtactggacgttgctgactttccatgtggaaacatgtgtgatgaact

SEQ ID NO: 109416 - DNA, 336 bp, Glycine max
  unsure (1)..(336): unsure at all n locations
tgaagagccaatggttgatacatggaccgagatgacaaagatcatgacgaagcggtatgtgccggctagttactcaatggacttgaaatttcaagctccaaaactaacccaaggcaacaaggnggttgaggagtatntcaaggaaatggatgtgctcatgattcngcaaatattgaagaagatgatgaggtaactatggctcgattcttaatggtttgactaatgatatccgtgatactgatgagctgcacgacgttgttgaaatggatgattngcttcacaaagcaatccaagtggagcaacatttacaaagaatggatggctaagaggagttta

SEQ ID NO: 109417 - DNA, 379 bp, Glycine max
  unsure (1)..(379): unsure at all n locations
atagtagagtaccgataacgtgtctaccatctctattatcgtcgtcctttccattattgggggtaccacctgagccgccagatccctccaccttttgngcgtgttcttttaatgatccagcccccttattgcacatgtactgtagttgcatcctatccggaactatatcaaaattgtactgatactgtctaacaaaggcaaccattaggtccttccaagaatggactcgggaaggttccaagttagtgtaccaggtaacagctaccccagtaagactttcttggaaggaatgtatcagcaattcgtcatcttttgcgtattcctccatcttctgacaatacatctttagatggttctttgagacaagtagtccccttga

SEQ ID NO: 109418 - DNA, 473 bp, Glycine max
  unsure (1)..(473): unsure at all n locations
cctactatatggtgagtngaccaatgctgttattggaatgttgcggcaatcattcaacaccttattcacacattctgatanggttggcgtcatgtgaccatatcttcatccagatgtatcgatagccatgctccatctttcctttgaaatgcgatcacgccatgatgctatggctggactcaattgactaaattttctaagttttggcaaacacatgcttgcaaggagtgtacgctgcatcanatttgntaccatcataagttgtggtagatatgagactcaaatntacttaatgtataagagtaaccttaagcaatctcttgaaacatctctttttgttcgcgtcgttgaatatgtgatagagatagctcgctatgtgtcgaacgcagtatacatgataactgtggagaggatgtcaaccaagtgcttcgatagcgacaacagaatttatacttgcgtgacgatcagatatt

SEQ ID NO: 109419 - DNA, 397 bp, Glycine max
  unsure (1)..(397): unsure at all n locations
tttgaggagtttaaataactaatatggaaccatcttaacattcatgattaagataaatttggctttcanggaaaaaaggctaatttttaattggcaaatgtagcaattgggctaagctcatatccaccgctaagcacaacttcagcacgcttagcacaaaggagaatctggcagagcatcagcatcaaagtcgcgcgctaagcgcgagatcagtgcgctaattgtagcaggtgccttcaaccaggctaagcttgagactggcgctaagcccaatttcacttacttgcgctaagcgcaatgtcgcgatttaagagcctatctaaagtctatcttctgtagaattanggtacagctnttacatctattacaacaccttttatgataacttctacagaac

SEQ ID NO: 109420 - DNA, 340 bp, Glycine max
cctcatcagcgctcaggatgtacacatgacgccctgcatacaggtctgaacgatactgaatagagaagacacatgactatgtcttgtaaggcaggctcagcctattatatatcttattagatgaaaacactgattatcctagatttatcaccagatacgctgttgggatagaacaacgacgtgcggcgctaacgtctctcttgcgactgaatgagatgacagccatgagacagctttcgtacgtggtcatgccaagagggatcagtatacttaacggactattcttataataatacctaatcttctacatagtttatgctattggtgagatgtcaatgtt

SEQ ID NO: 109421 - DNA, 344 bp, Glycine max
tctatactctggccgcacttcaatgaagctgctttcttatcagcttatgctcgtgaataccggagcaataactttcccgactgctccaacatgtgccatgaaccgacaagcgtgggtttggcagcgagtatctgtgtatgataagggaccgtgtatctggaagactttggtagtgccatttagtcatttgcttgggcataaccctgggtcaaccaccctcgcttctgactctttggcgctttatgaaaagggagcgaaatgatcccataatcctctactgaactggtctgatcatttaccgccccagatccgttgaaatctgacaatctgaactcatttgccag

SEQ ID NO: 109422 - DNA, 425 bp, Glycine max
  unsure (1)..(425): unsure at all n locations
atcatcctactangacgactgagaanactggtgcaaataaagatggtgaggatgaaggagaaacccatgctgtgactaccattcctgtacggccaagtttcccaccaacccaacaatatctttactcagccaataacaaactttctccttacccaccacccagttatccacaaaggtcatccctaaatctaccacagagtctgtctaccgcacttccaatgacgaacaccacctttagcacaaaccataaaacaccaaccaagaaagtgaatttgcagcgagaaagcctgtagaattcaccccaattccagtgtcctatgctgacttgctcccatatctacttgataattcaatggtagccataaccctatccaaggttcatcaacctacatntctccgagaatacaactcgaacgcaacgtgtg

SEQ ID NO: 109423 - DNA, 410 bp, Glycine max
  unsure (1)..(410): unsure at all n locations
atgatgtctgtgatgtttatatgctganactgctgatggacatctgttagagacgaacggtagaactaacccaacgctagaaagtgagaatgtgatgttatgagtggaaaaaaaaaaaatgagactctgagagttggaaggctaagtctgaattctgtggtaaatggaggttagagtgagttaatactagcttgaaatgtcatttagaacatgtgagacaggttaggctgagctagagagaaaaacaaatgaccaaagtgaacaaagagccattgcttagggcaaattgggtgttgaagagtgcaaatttgattcggtgagatattaggtgtaaatccagtttgaacaagtctaaatggatgttatggactggtgtgaggtgagaagttgcctcgaatntacctcattct

SEQ ID NO: 109424 - DNA, 266 bp, Glycine max
  unsure (1)..(266): unsure at all n locations
cttgatctcactgatgttagctacgggatcagttatattttgttactaaaccaaacatattgtgaaacatttattactcaactgttgtagaaagatcacactttacctactgttgtcatcttattttacttgcatttttttactgttttagctagactagttaatnttgtataaccatcattataatgttctttcacatgcctatttttgaattaacctgctaaactagtcctgagtcatactcgattatctgttaatttaatact

SEQ ID NO: 109425 - DNA, 257 bp, Glycine max
  unsure (1)..(257): unsure at all n locations
gatatcanagtccaattaagcatagatgctgcatgaaacatataaaaggcatcaatagcaacgttgaaacattataattttggaaaataataccaaacagaattaatcataaccaaacatgttttgaatntacaaagaaataacactccgtgtcatagtattcttgtaaagatatacgctgagacaaatgcctcctaaagggtgaatctgttaactactacacacgtcaataaatcctaatttataccacaaaaaat

SEQ ID NO: 109426 - DNA, 422 bp, Glycine max
  unsure (1)..(422): unsure at all n locations
acttttattgtgatntctgttggcatcagagtttgatctcttatgttgagtatctaacacatatagaggagaagatcatgtctaagcacgacatggaagaagactactacaccaacaaactccctatgttcaagggtatcaaatatgactactataatgaaataatgaatgccaaactcaaatacatgctcattgatatgtggatatagnggaaaatgggaatcacattccatttgataaagagctaaatgagatccccagaagtccgtagatggcagagaaaaacaacgagttatgctcaactcacaagcatgtaatgctgtactatgtgcactatcaaaagaagagtacaccaaagttcaatgcttcaaaagcacgaacagatgtggacactcttgccataacatatgaaaggtcgtcac

SEQ ID NO: 109427 - DNA, 390 bp, Glycine max
  unsure (1)..(390): unsure at all n locations
tctgtattcctgtagaattcttgctcaagatgacaaatctaattcatagctatttgatgctgcacctgccgtgctnttttatattttatcccttcacggtttgcatatctattagccttgctactggataaactatgttacttgaaaatctgttcaatgtttaagcatgtcaagaattactgtttgggtagacaaatgagtcctatcattattctgagaagtattcttttatatttcttcttatactggaatctgatgtggatcaaggcgacgatgcagttggaatccttcatgatgttgattcaagtgagccaactatgggagagaaacttgctgctctcagttttccagatgagaacaaattcaggagtgataaagagcaagattctt

SEQ ID NO: 109428 - DNA, 451 bp, Glycine max
  unsure (1)..(451): unsure at all n locations
cctgaacgcaattaactaatctgcctccattttaatggagtgggttaccattattggaaaacccgcatgcaaatcttcatagaggctatagatntaaacatttgggaagccatagaaataaggccttgtattcccaccatggttgctggaaatacaacaatagagaagcctatggaagattggagtgaggaagaaagaagactagtacaatataacttataatccaaaaacataattacatatgccctacgaatgaatgaatactttatggtatcaaactataaaaatgcaaagggtatgtgggataccctacaagtaacacatgaaggcacaacaaatgttaaaagatctatgataaacacattaactcgtgaatatgaactatttangatgaatgcaaatganagtatgcaagacatgcaaaagaggttcacacacatagtanatcatc

SEQ ID NO: 109429 - DNA, 466 bp, Glycine max
  unsure (1)..(466): unsure at all n locations
catcttggtggtgaagctccttcttccatggcttattccttaatggatggcgcctcctctcacctctnttcctttgtcttccgctgcatctccatggtggaaaatcaccattaaaggaccccattgaagctcaaagatccagcctccatagaagccccacaagcaagcttccatcatcaacagtccttaattttagtaaatcatttagcttaatcatgtgttagaagtagacagagaagcgatgtaactcgatccatcttctgccccaactttttgcaagctagtacttccatactngaccttgacctgatgaaactntncttatnacatgtacttgtttcaaccccataatccaaggaatagcaattttgatcgtcaatacttcgaccacatatcatagagatgaatgacttgngcatacctatgctatgcatgacacatgtaattatgagattgacatgagatg

SEQ ID NO: 109430 - DNA, 425 bp, Glycine max
  unsure (1)..(425): unsure at all n locations
ctaaacctaacttattggtttcagtctcatttatagtccttattactcattggcttctattggctcagaatggcagtgctaagagttccacatatatattcaacatggacaaatccctctgtccttatgttttcacaacccatcatgattggtcttaatccaccattgatgtcataaaatcagaagaatagttgatcactcatctaacaaatgacaggaacctgtgtactcaaacttattggagctagatatttcaacaagactgccattgcagcaaattccaaggttaaaatcaacatgattaagttgttgtagtacatgattatgttgctgtacatacttctttttcctacanattccaagggtaaaatcaacatgattatgctgctgtgatactattttcttctcgttgttgatgttatatt

SEQ ID NO: 109431 - DNA, 324 bp, Glycine max
tctcacatgactctcattcatgagagatacaacaagggtgacgcatgcttctattcatagactacgtaacttactcgagaagcattcttaagagaatattcttgagaagactaccttgagaagctagagcttatctacacacactcatctataaactacactcacctccttaagaagctttcttgagaagctagagcttatctacactcacacgtctatagactaagctcacctccttgacataatacatgacaatactagataaagtcctatctctaagactactctcaaagccctcaattcatgggctaaaacctataatac

SEQ ID NO: 109432 - DNA, 364 bp, Glycine max
  unsure (1)..(364): unsure at all n locations
acttgagatctgtctatgttatntgctcaaacataacacttcatggtatttcaagaatttacgattagcattcattgcgttggagtatatcgattagatatatattattaacattcaatgtattagcattcgtagctagctaggtctatgtctagaatatctatctncaatatgtgtcatttcatactaagagcatgacatatattagacctntttgcttacgtaggtgaccttagtttctttatataataaacaataaacaatgtgtttttcatttcacataatgacaccaaccactagaattaatgtatacaaaaagtacaaaccatggggagatatcatctcataatcatacaagataagt

SEQ ID NO: 109433 - DNA, 342 bp, Glycine max
aactcttgatgcgtctcagagcaacgtgggccactaatctgtccaacacaaacatgacaagcaacaccccaaagcatgctaaggtgccaatttgtcccaccacatgctcgttaacaaagctagaaacacccttatcacgtagatatcaacccaatagatatgatatcttattgccatcctcatactggattctagtcagcagcctataaaagtagaatgttgtggatatatatgtgatccaagccatgcaagatggcaccttatggacatagtatccacctgtcaacacaaatgctagcattgtcactgctgacactgtggaagcctgattggcatccatta

SEQ ID NO: 109434 - DNA, 390 bp, Glycine max
  unsure (1)..(390): unsure at all n locations
tctcttctctttgttgtntatgctgtctcttagagcgggaagtgtcacttcttcatcccnttggnggattccattcttgttntttcttatggagcacctatggatgttcatgacaaaactctgttttcacatctttgactcgttctgtgatttgtttcgagttttacgtggtgatgttgtgatggacatgctgctgtaatggaggaaagcccctcccttggacccgaagctcattcatttctttccattattcacaaagctctcttgttggatctataaaagtaagggaagcttaatctttcttttatatcctattgaagtacttaaaacacattacaaagaaaggttgaataatgtgatggtataaacttatttctttttgaaactttg

SEQ ID NO: 109435 - DNA, 394 bp, Glycine max
  unsure (1)..(394): unsure at all n locations
agctatagagcttatctgttcttgtatttattttttacctttcagattcaatcaacctgttcaccaatcaagtctagaccaactaanaggaatgatatgccctggaataacaagaagtataagtggattctctgagcagaatggagactccttgctgaagcttgtagaagtagaaaggccatagcaagctccttcatgtatattctggtatgcttcttctttgaccccacctattgctcttgtagctggatatcttcttttatttccgcaagatcaggcgctgaggagcctctntgatgatgtcttggtcctttctcaatcaaggaaacaaggtcaccctcagaggaacggccggatttcttggtgacaacccactcgtatgcacttccgagat

SEQ ID NO: 109436 - DNA, 337 bp, Glycine max
  unsure (1)..(337): unsure at all n locations
agtgtttatctgtgtgcgctcagctggcgaacctggatgttggtaagcacatccatcacatgatagaacatacagggatagttgtgaacccgtttgtattgagtggattggntgacatgtatgccaaatgtggtgactagctcaatgctatgttggtattctaagggttccctgagaagaacatattctgctggaatgctttgatttctggctctgccatcaatggagaatgcaaagaggctctcgagtctttttgcttgatggaagaatcaaatataaggcctgattggatcacctttcttaccatgctttccgcttgtgctcatggaggtttggt

SEQ ID NO: 109437 - DNA, 329 bp, Glycine max
ctagcctgatatatgccataggaaatcgtgggaaatatgtgttatgctataaacccactcatgcggatatatagagaagcatcgcggtgagaaagagcggtggtcaaagctcgcggttgagacaagaaagtgaaggaggcccgccctgccacataagtagaagctttataagcgcgggtctgggagacgaaggtcaagtggtcgcgatatacgaagatgatgttccgagtacattggatttggtacgaccatgctctcctgatttccagttgggaaatgggcgagtggaggaacaccccggcatttacgcaacgagcataatgtaaacc

SEQ ID NO: 109438 - DNA, 293 bp, Glycine max
  unsure (1)..(293): unsure at all n locations
tatgtaaactaattcaaaaatgagaagtcgatcattactcttataataaatttgaaaaagggtaaatgatttacaataaataatttaattaaaaacacaatgaataaatagttactacatctcagctatactatacatacaaataaaacactatggtaactaagatgagagacggtgagacaaatataatnaaaccaacacgataacaaacgtaccaacaataataattgagacacaaaagatgatgaaactaactatatattgaaagatgttatgcagcggacatgtcttct

SEQ ID NO: 109439 - DNA, 98 bp, Glycine max
  unsure (1)..(98): unsure at all n locations
tgacaattataggaagaaccgtttgtcaaacaaatgaatntatactataataagaatatgcacatcagagtatgaatattgttcaatagaagtcaaca

SEQ ID NO: 109440 - DNA, 444 bp, Glycine max
  unsure (1)..(444): unsure at all n locations
atcacatgtggtactangtggctgtcgggcgaatggtgcacaacaagttntncacattcacaatgcgcgcatatacccaccatcccctgttgcccacctncagctgagctcacgtactcccacgtagcccatatnctcgtttctctcaacaccgggtccccatcaatccntccaagcttncacaacatccaagcaaaacaacattcacacagcacaagctatcacagccaagcaaaacagagcaaaggcagaatactctgccataacaccaaccaaaaatcacagcttttcccactcanagacnccagtaacaaatntccttcgaatccaattcgttaacccgttggatcgactccaaaantntactggaagtctatagtgcataagcctacatnttgaaccgtgggatctactagcanacatncagaactcattctacattac

SEQ ID NO: 109441 - DNA, 343 bp, Glycine max
ctacactggaccctttgctgcgttacaatccttccatctcttccgtaccgtgagctccttaggtacctgtacagctgactcctacaaacatacttacactctaaatactcttttctgaatgagaaaatgaattttcctccaaggtttctgaccaataaaccagcaaatattacacctcaaagaccataatgggaaaataacattgtaaatttctatacaatagcgataacactacacccccattacgttgctgtctcacaaaaaaactactgtctcagacaatccgggtttccagtgtgctcaaatcatcctgaagatgcaaatgctctcctcttccagatgc

SEQ ID NO: 109442 - DNA, 267 bp, Glycine max
  unsure (1)..(267): unsure at all n locations
tgaagtgtatctcatatgactctcattcatcaaagntacaacaagtgttacacatgcttctatttatagactaggtagcttncttgagaagctttcttatgaaaacttccttgagaagctttcttaataaaacttccttgagaaagttcctttgacaaaacttccttgagaagctagatgttagcaacactcacccatctataaactaagctcacctccttgagaagctttcttgagaagctagagcttagctacgcacacccatct

SEQ ID NO: 109443 - DNA, 437 bp, Glycine max
  unsure (1)..(437): unsure at all n locations
tttctcctggntcctacgacgagaaagtattcanggtacgtactgcatcttcaattaataatattctttttaatacaatcatgtcaaagttgttcttgtcttaaatataaactcaatatggttattgagataagntataaactaacgatactctgtacacatgttacatgataaaaagacactcccatggtactgttttctagaaaaatattcataactaaaattatatatcatgatgttattaaatctctacatgatacataattgaattttattaatttttaatatacattaaacaaatattatgtatcacgtaaagatcagtcataatcaacggcatttaaaactgtgaaagtccttagtaatgtaacaatttatcgtaattgagcatcgaatagcatgagaatatatatgctatttattaggtctactntaca

SEQ ID NO: 109444 - DNA, 352 bp, Glycine max
  unsure (1)..(352): unsure at all n locations
gtgctgagtcacttataagcggtcaaatctttatntgaaaaagcccactnntgttccaacttctcccacattttctctctcttcacccccaaaaacttaattgtcactatcataaatcacctcgaccattcactatcaaccttctgtaaactctctgctttctctctccctcataaaccttctccttctcttagaaatntccaaaaaccctagcaatgaccaagaaatanaatcaaacacaaacctcccaggctgacccagactntangaacaactcaccttctacttcatttgaagaaggtgaagttgtacaaatcaccagacatggactagtgtccattatttatgtaga

SEQ ID NO: 109445 - DNA, 343 bp, Glycine max
caaacaagactgtattataataatagagtttataacaagatgagttatattaatgcataggaaataattataattaactaaggtcgagagaataacagagatttattatcttgaggtgaataataagttttttttcaagataaagatagttatagataataatacgcggaaacccctatttaatagaaatgcttgtcagttcaatgatctagcgctcttacttaattcgtttcttctacctttttcccaacccaactgttaaaaagagactggatatctcgggatatggaattacacagtccaccatacactttccgtgattaatctgtagctagaaacttat

SEQ ID NO: 109446 - DNA, 306 bp, Glycine max
  unsure (1)..(306): unsure at all n locations
atctatggcagaatatataaatagtgttgttatttttnntatttgtaaatggtcattgaaaatgtntntaagaaaaccgtaggaattagtgttcaatattcatttgtaaagaaattaaaacatgaatnnttgcattcgatattagtagttntaaagctcactanagataataatcagtagagtattgttgcttttaaaacagaaatggaggcatnggcaagaagtgggccgaggcccatggatgacggtggcactggcaggccctgccgggttaaaacgaagaagattgaggatgaagcaagcatt

SEQ ID NO: 109447 - DNA, 318 bp, Glycine max
  unsure (1)..(318): unsure at all n locations
acgcctactgtacgcatatgcgaccaatgctgatgtgggaatgttgcgactatccttcanaaccttattgatacattctgagacgttgcgtgtcatgtggccataacgacatccttctctatcataagccatcgtccatgtttcctttgaaatgcgatcaatccatgttgctatggctgactcagttcatganattcttctaaatattgatcaaaaatgttcttgcaaggagtgcacgctgcataccattagttatgaataacacttttaagtatatataaaagataaataaatgtgatcatcacatataaaatctta

SEQ ID NO: 109448 - DNA, 305 bp, Glycine max
  unsure (1)..(305): unsure at all n locations
catacntttaactcaaaatgggtgcaagggataaatcaatcatgcacaaagtatgcntcttagctaagtggctatctttaatcaaaacatggncttcatcatctttaatttcacgcattcattccatattcagagattcatgcaaaaaccattacttaacattagtcgttctctcataattaaagatcacactctcaccgggttgcggctaatgcgttccttcacaatcaactttgacaaccaactaacatttncaatcatgatccctaattcctgttgcttcttttctaatgactgcatgctca

SEQ ID NO: 109449 - DNA, 357 bp, Glycine max
  unsure (1)..(357): unsure at all n locations
tattattatactaaaattgttataatgtatcanaatcatatttgcttatctcttaaaaatattatgaatgtcgacctacatacagagtcaaacatataagtttattaagtgataaatttatattctaatttgagggtttattacaaaatatactgtttaactaagttatcttaatggtgataaaactatactactatcttacttaagtgttaaactgacttttataatactcaattccgctattctcatctntattttatgcgttgagtaacaacaatgctaatctttatagattatagttcgtctcatatatacattttcgaatgatatacgagtctattgcccatgttaagagag

SEQ ID NO: 109450 - DNA, 523 bp, Glycine max
  unsure (1)..(523): unsure at all n locations
ctcagctcgtatgaaaaccttctatctatgcataaatatctgtcattctaatactctacacattctaatgcagatgcagtatatatgacaacaaatagcataatgtatagaagaaaggaaaaaggatttaacatatgtatttttatactagttcatcccaaccttaggctacatctattcgttacctaaactgatgagattgtattaacataaccaacaacatgttgtattgttacaactgtcaaccacttgttggacatcataacatattccccaccacaattacacacatggtctttggctggagataagtcgtctcaaccacaacatcatggganagaaaatctaagtatttctcacctggttaggtgggcttaacccacataatgattctccttactcttaagaagcaaaatacactcaaccatgacactcacttgttcatgtgagagaaatataagtatttctttcacttctcctagattccacagataattctacttatcctcttcacgctgcaatc

SEQ ID NO: 109451 - DNA, 338 bp, Glycine max
  unsure (1)..(338): unsure at all n locations
gcttcgccgagtgtcctcatttgaaaacctatattcaaacctttcanagttagtgataaggctaaacgaaatattatggaacttataacaactaaatccttaattgaaggcgtacgtgacaatcatagcgaattactaaacaagattagtagtttgcttaaggtcattccagatactccncaagcttctgaaaatacttccagaatggtaacaagaagtacctccaaattaattaatgttattaatgaagatagtgaccaaaacttagataacacaactgagatatgatcagtgtcagacaagaatataaatccattatactccaaacactggaaaac

SEQ ID NO: 109452 - DNA, 401 bp, Glycine max
  unsure (1)..(401): unsure at all n locations
tctcatcgtctctcacagtctttagatttgggagccaattcnatccttgtgttctgactctcagccacttatgatagccgccgatgatctcattactgcattccctaagctctctgtacttattatatgccgcatctcatgccttgcgaactccttggagtgacccttgcgtctgtagtcacatgatatccccgtgcgatgaaatgcgcgatgctttcgtcttgatggcactcctatcatggggtatccatgctgtcgtatggcgaggactggattataattaatacaaccccttgttcccatcaagggaacatttggacatccttcgcatgaagatagaatcctgattctttcttccttctagcgagggaaccatataacagacgcctcttcatgctagc

SEQ ID NO: 109453 - DNA, 408 bp, Glycine max
  unsure (1)..(408): unsure at all n locations
tcttcttgtattcgattaccagagagaaatctntataatacacagttctgaagaaaaaactcttggtctaacctctgtgctttcaaaatcaacatgtagatgttactagtatttcttggattgcttgaagatcacttgaatcatccattgaaaacacttgattgttggcatcatcacatatctcttcgagatctcgcttctactattgtgctcgctttttaaacacagtctacaccataccctcattttgagaaaatacactctcatcactcgagtaattagattgcactcaatatgtgctactcttggcctatattnttagttccagctactactacatgcaattggacactaatggctataataatattaatgcaaacataacacttttatcgaagattctatgtt

SEQ ID NO: 109454 - DNA, 276 bp, Glycine max
  unsure (1)..(276): unsure at all n locations
ctcagctngctgattacatctcctcttctcaagcagatcttcttgttttatcaaaatcttcatgatttacattctccccttttttgatgatgacaaccacctataggttangagcaacaacanagaanatatctatttgcatatagtttactcccccttggtgtacattgattgcttatatgagacaattgaagatctcatattttcatatataagaagttatctcatacaacaatagatattgtgcaatacactctcttcaagagaagaatatta

SEQ ID NO: 109455 - DNA, 359 bp, Glycine max
  unsure (1)..(359): unsure at all n locations
tatttaactggtgtagacttgttatttgccatcttgtttctttatgcacatggtgctatttgtatgtgaatcaatgacagccacatggacttggagtaaaaaanaactgtctaaaaagacctgagataataaataagcaatcttatatatttgtttactttaattattgggttcattttatatatatatttagaatttaatatgcggaaaaatctgtcataacactagaaaaaaagtgaattcatctcccattaaantatggatntattctatnngtanatgtaaagattgcttacattaattaaactanatatantttttattctaataaatatctgatttntgagtgctaataaaaa

SEQ ID NO: 109456 - DNA, 482 bp, Glycine max
  unsure (1)..(482): unsure at all n locations
ctcagcttagctccttcactgcacangggctctaatatgtgaagagtattcttgtggtaccttctcctgacgaagacactgacttatacttatcttctccttcttggacacagtatggcaggcttggggcaaagtaaatttcttcccatcagaccttggatgcaactgtgatcttatacccatatcagctagatcttgacgggtattcaagccatccttcgtcttgcttatatgttaaggagcgtcccaatcacaactgtcacataacatattttctccacnatgcatgaacatcaatacagatgtctaaacgtcaagatcacaccattacggaagatcaaagagtatggacctcttctttcatatgcaactctgacttatatacttcttttgggtcttcccaaatacaatgttcaagtgttgaacccgctgatatacctgctcaccagtcaactgtatcggcgcaatatcatgctcttgac

SEQ ID NO: 109457 - DNA, 262 bp, Glycine max
tctcagggtattttctcatgtctaaaatttctctatggtgaattttatgtatcgttatattctcatggtgtctttgtagcaatcttccttggagattgtagtgtgtgggtgcgagtctgattattcccataaaaagctttttttttgaagaatttaatatgttatacttgaagggttgaaaaagctcattagatgctctttgcagactgtgaagcataggtcaaccaaaaaatttgatgtgactgatgaattaatgtaggac

SEQ ID NO: 109458 - DNA, 405 bp, Glycine max
acgtacctatacaagcgagcttctggcagtcaaccaatataagaacaaagtccatgaagcaaggaggcttgtgtggctgctgaccaactatttatcttgcgtgttatctgacaaataccctctggtaatcgattaccattcgtgggtaatcgattacagagtttaagaatggagacatgatgttaagtaccttctggtaatcgattaccaatcgtgtgtaatcgattatacagtatgatagggcactggtaatcgattaccagttatgtgtaatcgattacatggtgttacctgctactggtaatcgattaccatttatgtgtaatcgattacacagtgtaactcttagatttcaatgtgcaaaggctgtgtaattcgttttcggcactgataatcgatacatac

SEQ ID NO: 109459 - DNA, 279 bp, Glycine max
  unsure (1)..(279): unsure at all n locations
gtctatttcgcattctttacactgcattctaagcacccacgggtttgagtaaaaaaaggagccctataccccggttcatgggaatntaaagagtggaggtgaatctatcatcatgctaggtctncgacttgcttgataataagtgaaacctcgtctagaagctttctctctttataatgtgtngtcgctggtattccatactgccacaatattattatcttgagtgatgatacctctagaaaacaaccgtgtgagttatgaatttgtgggagtagtatt

SEQ ID NO: 109460 - DNA, 513 bp, Glycine max
  unsure (1)..(513): unsure at all n locations
gcttaattaatgcagatcatacaagctctccgaataaggatatcattaaatgtctnntaatttaaataaataaatacttcattcaacccaacttcccttgcatttcattatagatattaaaaatataccttctccatccaaaatgattgatgtttaagaattttcacacaaataaaaaaagtaaatatttcaagataattaacatttatttatgaaacagtttactaaaatattcttggtttatctcttaatntcaataaatgtattattaagttttgcaagacaatattatntattgtagaataaaattgaaataaatattttaatatcttgaaaagtaaaaaatcaattaatttggattntttttttcaaaaattaaaattacaatcattntggaatggagggtgtaaatattagtttattgcttatgtgnttaacggaaggtcaagccaccatcgatcctaagggacatctattaataattgtgctatcaagtaagcatgtgatacttcc

SEQ ID NO: 109461 - DNA, 478 bp, Glycine max
  unsure (1)..(478): unsure at all n locations
ctaagctntgcaatccaatgtaattctaactagttgttgaactttgattatatatgcacattcatctgttttctcttattgcaagcatggctgtctatgtttgttcatgttgaaaatcaaatggaccacgcacacgatgggagacttgggagtaaaaaataaaaaaactgatcataagagaagacacatgaaggataaataaaataagtcaattctttatatattttcgctgtttactctttatttattttgggtttgcatcttctatatatactatttagaattttaatatgcggagaaatctgtcaaaacactagaataaaagtgaattcatctnccattaaattatggatttattctatctgaaatgttaaagattgcttacattaattaaacttaaatatatntgtttattctagatcaatatctgatatatgagtgtctaataaaataatatgcttatttttaatcttaatat

SEQ ID NO: 109462 - DNA, 348 bp, Glycine max
acactaagcttcagagatagctctgttctccatgtaagctcgatttatgaattacagaaacagagctaggactagctgtacacagaaaagcgactctcatacatctatttgatacttcatctaagcaatgcagaattgtgtgctgtgatgaatgaagtactgtgcacaaattataacacacatcaacattcttgtggtcatgatcattgggaaaacgatatggtgacgctttatgctaaaccattaaacacttataaagtctggaatgaactggagcgtatgcataggtctattcaaggaccatggtgtgttatcgaggatttcatcatgtggctagtgctcctgata

SEQ ID NO: 109463 - DNA, 438 bp, Glycine max
gaataatctacgtctctttgaatgattagagagacaaccctatcaagggatgttctttgattcattcctcgcgtggtgtaaatatccatggagtggagtctgccattggtgttaatgtttggtgttcatggtgatgatgattgatgaactcatgatgattatgcttgatagttgatgcataatgttgattcttgaattgtttcatgatacttgaatatgagatgtttgactcatgtgggttggatgttattggttttatttactttcaaatatcatgatttaaagatgatagagtttatgtaatagttaattgctgttttaaatatatttcatttttgtatgcttatctctgagtgtggcacaccttgatgtgattgtggtgatctcaaattttatgtcatgctaatgcatatttttgtatgggtagggggtggccct

SEQ ID NO: 109464 - DNA, 275 bp, Glycine max
ttttaaacttgggggggataacaacattcggttctaacaacaatcaccctttctgctaacggataatctacaaatccttccacggctctcaatctttgccccaagagatcgagcttcctcctttcttcaaaatgccggggcggtccttccctggacaaaactattggttgtgacgtgatgttgggctgaagcaacgtgctgggtgacagcccttctgggatcgggggatagaactcacatcccttctagcataaacttgagggtctttttggacc

SEQ ID NO: 109465 - DNA, 395 bp, Glycine max
acgaattatttatattgatgggatacagttattagtgttgcgtcaataaactaattcgtaaccttaatagcaaccaccggatcaatgtaatacgctgttaactaacttcaatatgtaatttaccagactgaatggttagaatatcaaacttacgaaaatgattgaaaatgacgaaagaacttcatcgatccattggaattactatattgtataatttgataatccgatggagcacacagaatgataatttcatcaaagttatttcgttcatatatatcttatggcatagcaagtcacaatttcacagatatttagttcttatatttgctttcagtacaaaaattccatcaaatacagaagacaatttatagggataggatacacatatataacct

SEQ ID NO: 109466 - DNA, 199 bp, Glycine max
ggcccgtgcttttaaattttgaatcacgggcttattctgggggggactttttttcggaggcctcataccatgagttattcgggaaaacataggttgttgaccacctttgtgtcgcaacaccgggggagagctcaaagtgggatgtccgtactggtgattggaatccagcacctcatagcggggtggacacatggggacc

SEQ ID NO: 109467 - DNA, 205 bp, Glycine max
ttctccagtaatggccgtagtcaatcgctttaaaagaaaggtgaaaatgttgatgaggtgaaaggcatggaaaatatacctccaaccttaaattccaagtttgacttcattgttaccaacattgaagaaacaaggatttaaagaccatgactattgagcacttcatgggttctttacatgcatacgaagaaaaacaaaagagaaa

SEQ ID NO: 109468 - DNA, 410 bp, Glycine max
gcttggtgatacgtgtatccctcctctgcaatcatgccttcatgggatcaatacggctggccagcgagtccaaacactctccaacaaaggtgtggagtccatccagtctgtcaagaatgttgtgcataagagatgaagagtcatctctctgaaaatgtggtgatggagaacggtcttcagcggcctgtactagagcatccttcttcacccaagagccatccctctctttgcggtatccgaaggaagagactacatttgcaccgatagagaaggatctcttgactttgacaaagggctcagagtcaagagggacattaaaatgttgtagaaacaacgtaatcagatggggatatgggagtggagcatttgatcgcgatgccttatgcatgcgatatctcataagatgggcc

SEQ ID NO: 109469 - DNA, 256 bp, Glycine max
ggattatatatatagcagggtgataatacataataataatggctattactatatttgtaatttagaaatgctattaccataataacatatccaacaattgtcttatgagcacaatagatatatctaccatatctaacactccccataagttggagcatattaatcatatgcattgagcctgtgtcaaatataacccatttgcggacgcctcagaattagtgaagacatttgctaattggttgctagaatagacaaa

SEQ ID NO: 109470 - DNA, 418 bp, Glycine max
gacccgtgatcctctgagtcacctgtggcatccttgcttggccacctgcttcttaatacttcaagaatcaccgggttgagtcttttctgtggtgttttactggtttagctccatcttctaaatttaattcaagcatacatgggggtgggctaataccaggaatgtccgccagggtccagcctataaccttcttatgcttcttgagaattgataacaacttctccttttgctcatcagcaagggaggcagatataattactggaaaacttttgctatcatccaagtaagcatattttacattgatggtagaggcttcaattctggtgtggccggttatatactgtagaaagaaaagggtttttactctgtcctcctaagaaaagcaaaattatgtgacttcctgaaacatgggcagttt

SEQ ID NO: 109471 - DNA, 360 bp, Glycine max
atgattacgggaaaccctaatttcattgaccacatttgcggtagccaaatccattctataaagctataaataggaagtcctataatgttgttaaaaaacctacaccaaaatctagggttgtgctatgcgactagattagtattcacaaagctggccaaacatggtattgcaactaaaattatttccggcaagaatcttggtcacagtgtttatattccaaaaatgtcaatgttcccttcacaatcaccatggccttttaaacttttgaaagaacatttccaaatatgctcttttatgcaaagacaactaacaagtcacagggacaatcactatttatggtttggacttattttgcaaaac

SEQ ID NO: 109472 - DNA, 276 bp, Glycine max
tgttatgacggatctgcgcatactagattagtaacttgaacatctacctgttagatgagtcccaaaactaaaagaagttaatcctaagagctgacctgatatgatccctttcgctatgtaaaaatgacataggtcaaaggacaagttaattcttttcatacaatcaagtatcataaaaaaaggaaatatcaagagacatgttacatcacataaagttatgtataacagactacacaaggacataagatatagttataccatgaatgaaggtatttt

SEQ ID NO: 109473 - DNA, 414 bp, Glycine max
tgttattgataaggagggcccattttcttataagtggagacatgggtgatggcggtaaatattaaaccgtgctttctcacttacaaaatagcagaatacgcatttaaaggcatcattaggccaaacgaaatcaattacgtgatatttattggccaaattctacgatcgatagattcattatgcttgtcagcacacaagaaactcacaacactcctctattatggtatttctctgccattaacaaacaatgcatgtatgattatgaagcctcatggtgggtgtaagcatgtatcatactaatataggtccttccagccaatatcgttgttcagattggttaatcaggtccaactattcaaatttattatctccctcttaagtgttgacactagcattatgcattgcaaaaatcat

SEQ ID NO: 109474 - DNA, 447 bp, Glycine max
  unsure (1)..(447): unsure at all n locations
tatgctcaacanggaagacccattcagtgtggtagctagcctatactatggagcatacaggctataagaactacatggtgaagcaatctcaagaacatggaacactacccatctaaagttctacttctcgtgatctactgtaagaccaaccgttgtattctttatactactcaagccttttgtccaaatagaggaaaatcaaggtattggcttgagaggttctaacgacgcaaaactggtgaatgaagggaattcatactcagatgactacattgaataaaggtctatctcccttcagttnttcaagattccttgtgtcaaccttacaaaggcttgtcaaacctaatgtccgcccttggtagcctcacacaaccctgacgaacgtgtctgggtccatttaaaaggcttgtaaacccatgtccaccctggtagccttcagaattctaa

SEQ ID NO: 109475 - DNA, 344 bp, Glycine max
cgaaattgaggctgtggtttgcccgtgcaacatccatctactggagcttgtactttgtggggggcacaggctctatatcctattcttgaacttactctcatttctttgctatgtgattgactaagatccagtttatagacaactggaagagatctgacacaaatttctcacccactgctggcgtatttatgagcgcaggaagttgagctaacaggttgcccaagcctatgtgatctgagatcaacatacgtattgggcggctaggggaacttttaattcttattcacttacacgcggctcaaggggaacatttccacctctaccgctcttcgggcatatccaca

SEQ ID NO: 109476 - DNA, 314 bp, Glycine max
tgcaactttgctggaggttgataatttatcccttacagcaaaccattacagggggataattgtgatctttgagcatagatacactccacggtggaagattcatcaatcttggaggggcagtcttcacacaacaacaactgtcccttttttaagaaggctacgggccaccaggtttatagccaatgaccaaccgaaaattgcatttgttataaaaaggatctttttttaagatttgtacatacaagggggatggcatctctgtttaacatgttcttataaaattttaacatcgcttgtatatttgtaacgctaaa

SEQ ID NO: 109477 - DNA, 316 bp, Glycine max
gctttgagaaaagaaaattttcctcctgcctggaccaatgataaaactgtggctggttaattcggtgcaaatgtaggacaagcccctgctgagactgccaatcttataatgggcaagttttccacaaaaccaacaatgtggttatttattcaaaaaagaactttttccttaaccacctaccggtaattcactaacgcaattcgcaatttctaaccataaatactatctattctacttgcaatgacaaataccatttgttgaatggccattaaactcaaccaacaaaagatcttatgtatctagaaagtcggcttaa

SEQ ID NO: 109478 - DNA, 335 bp, Glycine max
taacaatggagattgcctcagatgggtctttggccttcagttgcgatagcaagtgagtcagttgtggtccgtatataaagggaagacattgctcctgctctgaaaaacccctgcaagaaaacatttgtaaatgcagatgagcatttaaaactagaaactttgcattaccatcaatcattgggtgagtgaaaaatattatctcattgtgtggctgcttttccctcattaaaaattgtacaccactagaaaagggagactaaagggaaaaaattgatcatgtgaaaggacaagggatgggcaaccctgaacggtttaagaatttacactggatgggt

SEQ ID NO: 109479 - DNA, 235 bp, Glycine max
catgccaacttcatgcgaaattgcttactccatgttttttttaaggagcgacatgcatgtgaattgagaactgactgaaatgaaatatacacaaaaactgaaaatctagcagacatgtcagctttcatgctggatctgaattcttaggggatatgttgcaaattgcaatgcgcatatatgacacacaaagtatttagtggtcaccaccagaatgacataagtaataaatgcacat

SEQ ID NO: 109480 - DNA, 442 bp, Glycine max
agcttatgcttgcaacatttataaattgactcccctcaaccaggcaaaaaccatatcaacgaggtagaaataatgtgttgagtcttttatagcatataaaattacaaatctcagggttgggaagaaatcattccaaactctgtagatggggcaagtttcttcacaacaacaacaacttgtcccttttttccaaaatgctactggtccaacagttagtaaggcaaatgaccatccagaatatgcaattttttcaagaaacaagagtcttcattcagagtctgacaaatcagatggggcagatggctactcagttcaaccaagctcagtcccaaaaatctgacaaattgtcttctcaaactatggcaaatccaaaaaatgtgagcgccatcaccttgacgtctggcaagcaaattggagtggctccaccagtagcagaacctac

SEQ ID NO: 109481 - DNA, 310 bp, Glycine max
gaaactgttagagatagggggagaaacacgaagactaagtcttggagcttgaagaagtcttgtatttttacatgcccaactcttttgaatggcatttgtattgattgttgtattgagtgttgcatcttagtctctatctgttcatatgtacatcatgcatcatcatgtaggagtaaaaagattgttgctaaagttagaaactttctttagtgcataaaactctccatttaaatgattacaggctaatcataattgattacacaagtggttgtcgcttgaagagagagtctcgtatcaatttaatcgatta

SEQ ID NO: 109482 - DNA, 339 bp, Glycine max
tgggaaaagtcagcaacacattatttattttatgccacttgtttttttctgaagacctactgatgtttggggattaaatcttgttattttcgcggtgcatagactttacttatttctaatgtcctttttacagggtgctacccaccattatccattttttccgtaataacaattggataaatgagggactaatccgcagtcttttttattattaaaaatcattaaactatttgaatattaattaattttaattattatttttatctaataatatttataaattaagtatcattttttataagattataagataattagtactgtaaacaacactcattt

SEQ ID NO: 109483 - DNA, 334 bp, Glycine max
tgattttctgccatggagttgcagccaacgatcaatgatcaaaggtgaaatgaagcgccatctactacaggataagccatgaaaagagaagcttcaccactcaaaagattgtcttggattatacactcaccgaggaagcttctatgaaggaagagactgacagaaatctagatctgcaatatcacatcttaaaggcatactctagaatcactaatgaagatatgacctattcaacataagttttaaaaaagttttttcaaactttgaatagcacatgggtatttgtacaaacctttcccaaaagtatttacctctttggaatccaataccctat

SEQ ID NO: 109484 - DNA, 307 bp, Glycine max
ctatgcatcgccttgtcctatcccttgagggataccctccttctttagccattccttcctctctttctatcatttcatccaaaccctccttccatccacattagcccctgaaatgtaaagcctctcatggctatgagaggcttaaccccattgatgggagcctaactagccaacacccttgcaatgtaaccgatattattatctatgaaaggcaagttctattcctattgcttatttcctgctctcatgcttattgcgcgagtcgatcatccatgcattacttttacggattatacattgggaaatg

SEQ ID NO: 109485 - DNA, 324 bp, Glycine max
cctaatgttgggaccaggaaaactcatatttggaagggaaattgctccggctgggatccaaatgaaccgttccccccgacctaaagatcccggaagagtaccattccttgttaattggagaagtacaaggtggaaaagctcctattgacccgggagccagcaataatttgtagccccttctccatgtgccaaaaaatggggagagatggaataaaatcccccctcgaatgaacttgtcaaatatgctgacccgttcattactcatggcatatggagttatttgaacatgtgctggtcgaaaaaaaaaattttatttctcccgca

SEQ ID NO: 109486 - DNA, 376 bp, Glycine max
tacatcctattaactaagaaaaagcccccactttcaatcaaagtagcttcatttcctaaattatttacaagtgctttcaacggcgatttgttgtttacatcccacacgcctccttggcttaatttacatacatgcatactcaaagcatttcggggtaccaaaaattgcacatgcgctcatcttggggattgctaatacctatacatatacaaacttcatgatgaatcttgactacctacgcaataaggtgctacatttcatgcttttttttttcaagtttttgctacctaaagccccatgcaaatataagcatattctcctttgctgactaaaattgtattcaaattataaaggacatattttttttgtaatatgt

SEQ ID NO: 109487 - DNA, 359 bp, Glycine max
ttcatttcacatcccagaagacattaccgcctcatccagaggccattgagtttctgctccacgtaaaaattcctctataaggtggtagccagaaagcaaaggttgtcggcgctgtagataatcacgtacctattttttaatattcaaaacatgaagcattgtatataatatatatacacatggcctacataacaatgatatatagagagaaaaatgggaaatatatataatagttaacgattgtacaccttacaagtctcaagttcaccatcccatgaatcaagtataaggagagaattgtcatttccttcccaaacagtgataatatgaagagttacgatcaaaagggaccaatgaat

SEQ ID NO: 109488 - DNA, 294 bp, Glycine max
gtttataaacagaatcgctcgatttattatccttagaagaattccatcgcattctgttttaagaagattacaagcaccatcgtgatctacgtcgtaaatactaatttcaagtagcgagaagtgaaaaacaagttcacacttattagcttagtcaaaaaaggtcatggggacatgccctttctttatgggttcctgatatccccccaggctggagatgagaaaatgttgatacactctagcttggagaataatattgaataattacgacgaagacttctggtaacatatctacta

SEQ ID NO: 109489 - DNA, 381 bp, Glycine max
  unsure (1)..(381): unsure at all n locations
gcttatgatctggtgggtggagtttttttgtatcatgtgggcttctgtttgtgtgattaaatttnctttgtgagcaagcggtcgttttatttatggtaacatctttaaagtgttactattataattccgtgaatttggttgaatatacgtctgaaaatgtgcgtgtgttggtgttgacccgtttggtattttgattctgcagtaatatattactataatggaaaggaaacttaattaataatattgcaattatctcttttctgcctctaataccttcctatatttcccgccaggcatattaaagcgttaatttgctccacaaaattagcaattccactacctagctaaattgtcccactctgcaaacgcttctcatccacc

SEQ ID NO: 109490 - DNA, 347 bp, Glycine max
  unsure (1)..(347): unsure at all n locations
tttatttccgggtgattcctataaattggttttcagtntcacctatcctaagttctatctatttaagaatcatgccttttcacactttcatttaaaaataacaatacttactctggttaggaagttggaaaagtcatgtcacaaatgtgattataatatttaaaactaaggatcttttgaaatctgtcagagattcacgctaggaagcctcttatatgtttctatttanacattattcacagtagataaacanatagattcatgcttatcttattataatcaatgttttaaattgcgatcacagctacaagtttatcaccgttcttgatattgcagaatattatgcg

SEQ ID NO: 109491 - DNA, 393 bp, Glycine max
ctatctaaaaaagatgctttttattggaaacccaagattgctaaccagacctttaagtcagatcccatcctttattgcttctattaaaacatgcattctcctttgtaggggtaaaccacaatgggctaaagaatttcccttcaaactatcaagaaagttgccaatgatgaatgcgtaccttgtcatagttctccttgcatccaaatctacagcatagtgcaaatctaaataaccagccagagcacaagacgtgtcttcatggtagacaagtccaatattaagtgtacccattattaccccaatatacatattacaacttaccaattgtggcaacctacccttctgcgggaaggcgacgctgggctcacggttgtttctccaaaaaacaaaaat

SEQ ID NO: 109492 - DNA, 404 bp, Glycine max
  unsure (1)..(404): unsure at all n locations
atgcactcctctaatgactatagcatcatttctggcgcttttttgtttggagttggaagccatcttctcaaataaatttctgactttagcaggggtcatgtctccaagggctccaccactggcagcatctatcatatttctctccatgttactgagtccttcataaaaatattggagaagaagctgctcaaaaatctggtagtgaaggcaactgacacatagttttttaaatctctcccaatattcatataggctctctccactaagttgcataatgcctgaaatatcctttctgatggtcgcggtcctggaagcagggaaattttttctacaatactctctcgaggtcatcccaactcgtgatggaccttggaacaaggtaatatanccagttccttaccact

SEQ ID NO: 109493 - DNA, 298 bp, Glycine max
ttgcatcgcagcctttcgcttggtatttgatcattctttagcatttcatatgccttcttgacatatgtatgcatcatcggtgtcttccaacagtgatgatataatttttaagagaaaaccacttggctacttctttcaaaattgaagtgtgtgggccgggtagttgaaaattttcataaataatgtcgcgactctccctctttattttcagggggagtagtatgtttcctgcctcccccagacaatatgttaaagggtatgggaaattttaaccattcgggggagcgtacaactaaat

SEQ ID NO: 109494 - DNA, 457 bp, Glycine max
taccccttaatctaacctaaactgtagcagtgcctagtagaagcaccacttaccctctgtaaaccgtttgacgctttctacttatattgtccactgcaaaataagggttttgttagaaggtttaagaagtcaccctggatcccatggtaaaagattgatcccctgcaaaggcaatacaattcatgaaaatcctcatgtttccattaatgtggccacccaagggtatcatgttcatattacattttcatctcaccacgcccgtggtggaaacacaacatatatatctgttgtacatttatgagagtcacggacctctggtcttttcacctcaacgctttctccattcgtgagttagcatataattgagtcttcatagacattgacaatctattaagaaaataataagaatgttgacacagtattatttctctttatactcggatcaaaaaatttatta

SEQ ID NO: 109495 - DNA, 422 bp, Glycine max
ggatcttaagtacctcagctgcaacttaaaatttttccaacagatatacatatgtgaattaatatttatgttctaaatgtaccaactaaaatattaatcacgtaactaaattaaaattttgagtcttaagttaaaaattgataaatcatctaaattaaacaaatgaaattaattgaatttaagtttatcttgaactaaattaataattcaaatattcacaaaaaattaattattgaatcaatataattaatttaattttaattatgttgaggttaggaaatgaatgcaacttgatgaacatttttatcatttcttgtcttatgtgttccctgagttgaccctatcggtccagaaataattgtgttagaatacaaatagaatagaatgcaaagtgagtaacaagtcaataaaagaatgcacat

SEQ ID NO: 109496 - DNA, 331 bp, Glycine max
  unsure (1)..(331): unsure at all n locations
gacccctatcaccttatcttacatctttcacataaggaacttcttcactacttaagacacatgaaaggaagggatatatccatggagtgaaaattganatatagtcaattacctataaaggcgctgaataatgtgctaatcataaataataaaatatcgtaaataatgacttttatcatcaattttaaaaagattagatacaattagtgttctctccacctgaaataaatacaaacacagttctagatgataaaaacaacgtctaataatcccacaatgaataaaataagaatttcaccaaggttttcccagtaaacacttggtgagcaac

SEQ ID NO: 109497 - DNA, 356 bp, Glycine max
gctttttggagtagaaacatgggactcactcgttttatttcaaaaagaaaggcgtatctagtcaaggtctgagagaccatacaagtttcctaacgatttctaattatgtgggccattaagtctatcatatgctgacaatagcccagaagcccatgaatctcttcgggggcggagtaagtgtccgccatcgccttggccttggctaacaagcggggaagttcttgactcccgttcaaggtaagagcaaaccgatccatccacatggttgcctctgggtgtaaagaatcgatcacccttcctttagcctctttttctgcgtatacttgagcatactcgtccccgatcctattgcttgt

SEQ ID NO: 109498 - DNA, 267 bp, Glycine max
atgaaaaggatgagaatgagggagacacccatgctatggcttccattcctatatggccaagtttccactaacccaacaatgtcattactcagccaataacaaaccttcttcttacccaccacccagttattcacaaaggccatccctaaatcaaccacaaagtctgtctaccgcactttcaatgacgaacaccacctttataacaaaccaaaacaccaaccaagaaatgaattttgttgtgaaaaagtctatagaattcaccccaat

SEQ ID NO: 109499 - DNA, 406 bp, Glycine max
gatcttaagtcaccgcagctgcagcttattgaataagttattttttatgtgagttcctggattaatccttattttttctccctctttggcatcagcaaaaatcccaagtgcataagaaatataaaacatacataaataactaatcatacaagagaccattaaaacaattaagcaagatattttaaccattcatcatacttagaaaggtaagaaatataaaaaccatacctaaatgacatacacaagaatagaaaacaatcaaacaagaaatcttaatcattcatcaatcttagaaagataatactttatagaatgtcatataatccagaaagtcattcataataaccaaataaaaaagcatacctctagtcatacatcatcaaaataattaaagtttaaaacttca

SEQ ID NO: 109500 - DNA, 360 bp, Glycine max
  unsure (1)..(360): unsure at all n locations
tgggtttatatatgatactttgtcccatatgtgtcccgcttaaatccaatggggataagatttggtttcatttctacactcatgtaatgtaaatctgaatccaccttgttttcatttctacccgctacagatatcatattataatgtctgaagaagttaatgggtcttactattgcttatgaacttattattgattcctgacatgtcaccaatgggccatgcaaattagttagtgttgcttcaaanaaaactttatcacttttcctttgacttctaattgtaaattggctccaatctaaatgttcatgtatgggtctaaccaatctacaattggatgacctctatctttaatcgtgattg

SEQ ID NO: 109501 - DNA, 351 bp, Glycine max
tgctttcactgtctggtaacaggaatgcctggttgatattcatactatatcttgtgggggttttgcccctgcaaaatccctatgagttttgttctattcgagttaaccgtatatgacttaggtagatggtacattctttttgtttcattaagtgagcagctcattttctctgattatccacacgatatgagttacattatgttttctctaatacgattttcaaagatgttggtactctacccaaggatggaactttgttaccacttcacaaccagccactatacatattcttgaaggttttctgagtcacccaacaaattacggtttcaatcaatttcgaataataaaaaa

SEQ ID NO: 109502 - DNA, 388 bp, Glycine max
  unsure (1)..(388): unsure at all n locations
cttccgcaaacttcgggaagatccagagatgccttacttatgttcctagatgctctgacactcatccaatcctctacctgtctatgagatgacttgcattacaagacttctcttactaccaaccattgaagatcttgacgaacttatacgatgttctctccggggaagaccaccatatctttcatccgggtgtctcctctctgtgagcagaattgcaactgcggtcaaggattcaacaataggtttgtgccacataagagacactctaaacggcatagtgggcctaccacgagggtacctanaagacacagcgaggggtatggccaatctatgagatagggtcctgtctatggatgtgttagctatgctaattattggagtcgttctc

SEQ ID NO: 109503 - DNA, 392 bp, Glycine max
actttgggctgaaaaactatatgactgccccaacggtctagtttagccctctcttccttttattcttttttcgaagttggcaattccaggtctgacgtttaattttatcaataaaatctcgttcttcaatctataatttccttctctattggataatggaaagctaagtctctagcgttgttttctcttgaggatcaagcacaaatctcattgaggttctattattactgttaaaatctgctcaaatttttcttttcactaattactctgaatttagtgctattaattcatgcatgcttattgcctgaataatatgatttgagcttaatttaccttcatgcttaaagatcgtttatgagtaatcggtgtatgtgttgcttaatcacataatg

SEQ ID NO: 109504 - DNA, 180 bp, Glycine max
actctccatttaaagttgaagtttttatagtggcaacaaaaaatggtctatagaatatatgagttgacaaattcctatagatgtaaggatgcaaaccttttaaagaaagtcaatacccacacgtgtctatgttcgataaaatcatacactctccataagtcagctcaaaagcctcctaaa

SEQ ID NO: 109505 - DNA, 381 bp, Glycine max
tttgctgcaaaaatccctttatgtttaccctaaaggggggggttgggcattgggcaatggttaacaagcaagccttgccgctgatttggggatggcttttatggattactgggtggggggtaatgaaaaaggctaatattggctgaataatgaatgttgtgagctagtggaagattttcccatgtagaacggcagccccaacatgggtttcttcttcattctcacccttttcatttgccccagttttctcattcatccaagcaagatgatcaaatttgcctcttttcagacccactttgatcctttcgccggtgaagaccaaatccccaaacttttaggtgcgtaccccaccactttttcataataaaacactggtaatgt

SEQ ID NO: 109506 - DNA, 333 bp, Glycine max
ctcagcttaactctcgagtaatcaatcttgtctcaacaacagtgttatctattacaaaactacacgtatcgattaaatcgatatgagactcaactcttttagctctagacaacttgtggtaatggattatgatgaggcggtgatccattaaaatagaaaagttttgtctgagatgaaacttttctaacttataaacttttcttctaacaaaccatgatgatgcatgatgcaatatagatatcaaatttactaagatgcgacgacccagatacaaccaatacaaatgccccttaaaggagttaggcgtgttaaagtaaaacaattttctaaact

SEQ ID NO: 109507 - DNA, 394 bp, Glycine max
agcttgaaagcgcgtacccctacattttttcatggtagaacactggtatgtgcctattattattatgatcatcttcctttccgcccttggaggtgccacttgagctaccgggtctttttacctttgggccgtatatctttgaaaagattttgtgcgcccttattttttgcacacctttctgtagatgcatcctatctggagccatatcagaattgcactgatgcaagtaacagctaccctcgtattactttcttggaagaaatggatcaataagccctcattttttgcgtatgcccccatcttccgacaatacacctttacatggttcttggggcaagtagtcccctcagacttgtcaaagtccggcaccttgaacttgggaatgaccacgttc

SEQ ID NO: 109508 - DNA, 445 bp, Glycine max
  unsure (1)..(445): unsure at all n locations
cacactatcttttatcagaattggagagatccaggactcctaccctcaatactaactccctactgaataactcctctcagcctctcttcctatctataggctacatgccttatctatctcttctaactcaccttaactaaggctctcaactaacagacctatcagcactccccccctaaacattcaacttgtactcaaggtgaatgcttgtggatagcgaaataaagaccctttcgtgtactacacttctaggtatttgaaacatgatgttctaatagaaccgatattattcagcactttcctctgcttcactagcataaatatgtctgcaacgtctcttatgatgatgtctctcacatcaatgtttcagagttgcacagataagagtcattctgaagtcngaacgactaagttatgctataaatatccaatctagtacttaatg

SEQ ID NO: 109509 - DNA, 287 bp, Glycine max
cagaatattctagaatgcttcaacaaaccatgcctctgtttaaaattcactaaagaccaagcctttgcctaaaaccaagtgctttcaagacatgcaaggctcttggaatcgattaccaggaagggtaatcaattaccacaagacaggggtgagaaacagctattgaataagggtctgaatttgaatttgccacatgtaatcgattatcatatgtcctggatcgataaccacaaccaaactttgggaaatcatattcagaggcataaccctccaattataactgggta

SEQ ID NO: 109510 - DNA, 375 bp, Glycine max
ttataactttctgtgcctccatcctttgctgggaaatccttcttttctggggctccgtcctgctaatggggggttttactttggttgggtccaagggggttttgtggtccatttaaggaggccttttgggcatatctggtgggttggaaggaaaaagggtgattctggttaactactgactcgttggggtggggggaaaacttgcctttttgaagggcctctcagctggggttttccttatcctacccttaacttgccccaatctttcattcgccaacaagagataaattagctctttcaaatcgttcgatcctttcttgcaaactatacaccatactgaagggcgaccctccattttttttataaacctgtatg

SEQ ID NO: 109511 - DNA, 466 bp, Glycine max
  unsure (1)..(466): unsure at all n locations
tcttaagtcacctgttgcatgctatcttcaacaaatgctgatcccttttatatctcccttgggcatccgattacggccgcttacatatttgagaatttctaaaatgatcactgaatctcctatcgaattcaaccaccttattttgacccgtatttgatgccacccatacacatcgtgactctcgaaattgtacacagaatctcctggcaaattcaaactgtcgagacttttcacacgaatgtatgatgtgaggtcaaaaaatatctcaacgctcaaaattcgacaaagaaagctttggggaaattccaattgtgatgactttngactcgggcttccgattgaagcttgagatataatctcctagcaaattcaaatggccataacatttgacttaagcgactgattgtggcccataccatatggaaactttgcgaaatgaacacggaatcttcttaaaaaatcaaac

SEQ ID NO: 109512 - DNA, 412 bp, Glycine max
  unsure (1)..(412): unsure at all n locations
tcttatatgattattcaggtacagtatgtatgatgtcnaatataactttgcatgcagtatacttctagcgacatatggtgctgataagtgtgctaacactggttacttgtggtgatgataataatatgcaatgtataagtagagtgttagagaatttgaatcatcctggtatttattgaacagatttggctatatcatttgcggatgtattaaaaaaatgtatatatgacatgcttgttatacttcttacaccgtcataaaattaaaagatatatatttaatattttttcatttaataataagagtattagtgatatatgacacgagatgtattcagacataaatatgcaccgttattattaggaattggagattgtgtacctcgagaatgtctcctagtgtatccaattga

SEQ ID NO: 109513 - DNA, 364 bp, Glycine max
aacgtggggaaaggagagcatcaatggggaaagcttcgatataaagagttgttcatcaacctacatgctcatcttgcacctaataccacattatgacggacctccccttaatgaatacacctcttagcccatacctggcgaaacattcactactattaacactattcatactccaaaaaaaatcaccctcttgtacatcggtgcttcaactagcatttttgaacagaggatataagacatgttactccttccatacgccaacctataagaaactatggagaataggttacttgttgaatgcttggaaaccaatctgttgattataaacacacaagaagcttcgctcaaatccttcaatgattct

SEQ ID NO: 109514 - DNA, 335 bp, Glycine max
gtctttatagtcttagaaaaggtgtattaaaatggaagggaattccaatttaaataacaaaaaaattggcccacaaaattaagttaataaagcttttttaacaaatatactttctggtaatcgaaaaccagaggatgtaatcgattgccagtggccaaaactgatttacaacaactattaaaatttgaattccaaatttgcactgtgtaatcgattacacatatatggtaatccgattaccaatagtttctgaaccttttaattcaaattttaaagcgtgtaatcgaatacacacatattgtaatcgattaccataggaaattttcagaaaatat

SEQ ID NO: 109515 - DNA, 290 bp, Glycine max
tgaatatagattagtcataatcaactacacatcctaatgaccaaatgaaacaagaaatggggcttcacttttcttcatttttatactggatctttatcagcagccttccttctagtgaacctttgagttggcatgaaaaataaaggtgttgttggtgggacatctacaataagtgtgtctactgttgaagtgtatgaaaagttcttttgtttgggtcttcttatgtataacgtataccttgctactatttgaacaatcacaataagtgcagggacctacattaataactt

SEQ ID NO: 109516 - DNA, 83 bp, Glycine max
ggttggctttgaaagggggaaaaaatttttgaatagcaaaacgtccccctcttcctcacttctatattttggtgcatgggttg

SEQ ID NO: 109517 - DNA, 305 bp, Glycine max
catggttgaaggggtatcgatacaatcagtatcgataccagagactctgaacgttgggaattataatgtaaatgagggtcacaactgtgttatcgattacactaattatgttatcgattaccagagaggaatttcatggaatatctgccacagtcacatcttatcatttgaattttgaatggccatcaaaggcctatatatatgtgtgacttgggacaaattgaaaagagagtttggtggtccaaaagtctttcctctcaaagacaatgagagaaatccaaagaacttatgtgaatgctcttcaa

SEQ ID NO: 109518 - DNA, 428 bp, Glycine max
ttctattgtttagatcccctcacctctgagacaactgaactgttttagcttcaacctgaaagaatgctcaaaataagttatagttgcatctttaaaaagattgcaaatgctcaaataaacttgcaccaggatgaatattccattaaaataaaataaaattattctttttgtgatttggagcaattgaatggtatttactacttatctaagatagaaaagttttcttctacaagcttatgcaaaatttattaaaaagtattcccaagtttattctcaaagcctttccattcactacatacacacttcccatttgattttttaagagaaataaacagactttatatttatactggcagcttcttacataataaatatgtacatatatcttgtcgatagacataatgtggaagttttttcttttataaaaa

SEQ ID NO: 109519 - DNA, 471 bp, Glycine max
gacccgggatccttaagtcacctgttgcatcgcttctagccgatatgggacccgttatatgtggactcggtggcgatcgggtgaaggtgctatttcgacttttcacaactacaaatcacacataaatccaccattcccagtgcccaccttcaactgagctcacgtactcccacgtagcccctatcctcgttcttctcaacactgggtccccattaattcctccaagccttccacaacatccaagcaattcaacatccaaacatcatgaactatcaaaaccaagaaaacagggcagaggcagaaaactctgcccaaaacacaaaccaataccacagctttgcttactcaaataccccagtaacattgtctttgttccaattcttttaccggtggatcgaatcaaataatttacttggaggtcccttagtacaaaattcttaaatttgaccgttgggatctgctagaaaacgt

SEQ ID NO: 109520 - DNA, 362 bp, Glycine max
cttagcactttagcctgacacttggctccaaccttaaaatagggctccgggaccccactatagtttggtcacctcataaattaacacttgtaacttttgacggtgatatccacttttataacgctaccagagtgatttctttaaaaaatatgcggcatgataaaaagacctgggtacagcccatgtcactttaccgtagaaataatggatcaatatattttaaataactaaagaagtaattttatagtaaaccttatctttctttatctgagttagaagttaaaaacaattaacgttggcatcggatcataatatatattattatgcattttataaccaataacactaaagatatacttata

SEQ ID NO: 109521 - DNA, 430 bp, Glycine max
ggatccttaaagcttctgccgcatgcaacttgtttaaaaaaaaaaaaaagttaccaaattttgaccttcacaggttttcagagagacaatctaacaacatctttatgataccttggggactttgtataattggtaataatttgacctattcttctatttacaatgggagctggaaccatgaacatttgggcaatttcaaaaaacttgctcacttttttattatagtacccatgccttcaaatgctttcacaaaagcttcactggccccagtacttaatctacagtatacaaagttgtctttcaacttttttggctcttaggaagcttcatagcataatctgtcatgcattgaaatggtactttgttaatatggaaagcttaacttaggtgttgtcaaataaaccaaaaggagaataacttaccattttcc

SEQ ID NO: 109522 - DNA, 356 bp, Glycine max
cttctctatgctttacatggctatatggttatttcttcgtctgacacccactctgaccggagaacaggcatagtgtattgggcgacattcccatgttcttgaagaaattttgcatatgaacttggtccttggcatcctctatgtatctaccatagcactccccacctctatctgatctcacgatcttaatttgttttccacattgtttctcaacttcagccttataaacattaaaggcatctaaagcttcattcttagaatgaaggaatgtgagatacatatatcgtgaataataatctattaaggttatgaagtatttccaattatttgcatccatgtctggacaacatatgttt

SEQ ID NO: 109523 - DNA, 351 bp, Glycine max
tggagaggatgcttcaatggatttaattaaagagggatacaaagtgatagagggtaccccaaattggaagaagaaaaaccgagataaattgaactttgaattgggcttacagactttattcttaaagttatcacaaagtgttacacatgcttctatttatatgactatggtagctttccttttggacgctttactttatataactttcttgagaagctttttgagaaacttccttggaactatacttatgtttaacgtgcccttcatgggcgagcgaaggctacgctcaccggtgcactttccaaggaagaaaggtgcgcggaatccccaccaacgtttattttgtggaaa

SEQ ID NO: 109524 - DNA, 431 bp, Glycine max
  unsure (1)..(431): unsure at all n locations
ttcgtcctcttctatagtccagtcttcttctggcttcatatcatcagagggctttacttctgtgtccagcatcttgtgatgttcccagcctttgatgaccagctttcaggttctgctatccagtgatntgaggaatgccaccattcttgctntccagtattcatagttgcttccatcaagaattggtggtctgttcactggtcctccttctttctccatgttcatcagaatatatctccccagatctcactctgtgatttcgagtgttggctctgataccaattgaaattctgataccacgggacagatgtcgtacaggatgtcacgacatcacgcttcagaacatgcagattgtatgtgtccgtatgaaccagatanacaagtatataacacaagagaattgttaacccagtcggtgcacctcacctaca

SEQ ID NO: 109525 - DNA, 391 bp, Glycine max
cttagggttcctttcaatttatgtatttcggggttttctaaagatcggcaataccctaatttggggtttgggcacaatctctattgacgttgctgatcagggttaaattattggactttgatccaagtcttcaatgggttttgatctggatgttgttgatcttcctcgatcaacataattttgttgccgttcatcacttgctttactagtggttttttgggaatggaaaatttgggagccaaaaggttttgggttttggatgaagaattaagtctatggctgggatttaatcattgagttaatgactgaaagcatgaaccatggagaattttattgattggatacagtacctgatctgggaatgtcattacaatgccctgtctgtttctta

SEQ ID NO: 109526 - DNA, 231 bp, Glycine max
  unsure (1)..(231): unsure at all n locations
tcttcatttctctccatgattctcctcacatgtcttgtgataaatattgttaacatgattctttatagtttccaccgattaaacttgctataaaagctagatttgttttctatggttcaaatttcttgttcttgttcttgaaccatgaaatgtgttgagtntaagttccttttagttttgtcttggtattttttgggctgaaacctacacccgaaaattcttacacaatat

SEQ ID NO: 109527 - DNA, 411 bp, Glycine max
tgggataaaagggaatggaaatgagacaaaaatccttaaagtggatgaagaaagcaataagagctactgatgttggaagatcatcttacaatgatttctataagttaataaaggaggtttttcattacagtgttctttaagtccttattttataatcaggggtattaaggtttattagttatataaaaatacctttcttaagttataatgggatgacaaacatgatgcaattggtttggcctaattactgttagtttaaaatgttttcatttatatttatcatgtcacgtgtactaaaattttaatattgtaactctttgtgtaagcatccatgattgttataaaaaaatatatgagttactttattagttttatatatgttgagttcaagactcaaaaagacgaattcaa

SEQ ID NO: 109528 - DNA, 304 bp, Glycine max
cactatgtctaatgtatatatattggaggcgtatcatacatatgacatctcaagacatgaaaaatattaatcttatcatgtgcacaaatgaaaggtattcgtcaaaataatctcttctcaatatttcatatgtgagtgtgagtgtagaaagtatatcatataataacttaataggagctaatatttatcatatacaaaaagtgaggtctagatagatttactaaaccaatttaattatcatgtagagtgcatgacaacattaactcctgcacactagctagatatgctccacttgtcacacaaa

SEQ ID NO: 109529 - DNA, 233 bp, Glycine max
tgatgatgcccaatctctttgtgccgcactacggtgtgattccctatgagagagaaaacaaaatgctccatcctcgctggattaaagcaaaactttgtccttttattttcaccgtcgagatatcttgaccagctacatctgtaattaagcgatactctggttgcgattgcagcttttaatcctcgaacaattatttggcctgaacttattaagttttggtcatttcctgaacg

SEQ ID NO: 109530 - DNA, 305 bp, Glycine max
ctgagcttatggaaagtgtgctttacattgattgaattcacgtcaagcctagtatcattccaaacattgtatcattacgcttttgaaatattggacgtgtaattaattgaaacttttaaagaatttgctacggtatcgatacacattggtatcgattaccaagagaaaactcttggtaacatgtttggaaaatcatgggctctcagtttgaaaacatttcatacttatttgataagtctctcttatcttgatttgaatctgatctgatctgatttgaactgatcttgatctgattttgattcatc

SEQ ID NO: 109531 - DNA, 160 bp, Glycine max
ttttaatatagcatgcattttaccttggtaatggataaaaccacaatgggctaaaaagttcccttctaactttcaatacagatgcaatgaagaaagcgaacctaggcatatgtctcattgcgtccacttttcccgatcagctaatttttaatacccatca

SEQ ID NO: 109532 - DNA, 374 bp, Glycine max
ccctgaaaaattactagttattaaatcgaagctcaattcgtatttattgggataacttgactatatggggggactctgaatgaaagtgatgctatggcttcgaattatttcatgtgcgagatttcttgatggtggatgctgaaattataaggaacctttgtgaaactaatttgaaattatcaagatttcatactattgcattggcctcatgaaccgtaaatccaaaaccggtggatcatcttcaaattttgcctggggctatctaaaacattttttcacaatcttgaccggtggaattttgtaataacaacatttgatggctccctatacatgattggcgcccttagcaccattactacttgagaaggaattgc

SEQ ID NO: 109533 - DNA, 429 bp, Glycine max
  unsure (1)..(429): unsure at all n locations
tcgacttactcccgtgccttcttgaagaataagccaagcccctactttcgaggggcagcttccaccttatgaccactattctcggctagacgatgatgaaggagatacccatcttggtccccttgctcacctcaaagatccgtccccccatgaactaccccaaccaaacatagtccggcatatcccgacttcacccacacccataaaagaatcatgtcccttcatggaagataanggaaagattgaggcgcctgaagagaggttgagagcantcgagggcctcggcaattacccattctcggatctagcggacttatgtctcgtacccaatatcgtcattccttccaaggtcaaagtaccggactttgataaatacaaagggacgacatgttctaaagggcatcttcggatgtattgtcgataaatggg

SEQ ID NO: 109534 - DNA, 401 bp, Glycine max
agcttgccacccagctcgcccaagcttgctaagttgcttcctccaaaagcaactgccttctggaggaatattctggaaggcccaagtggggcctatttgttatttgcacccccatttttactaaatacaccccttgatcttttttggggattttttttccgtaacgttacgaaactttacgaatttcataacgatgcttgttcgctttccgtaatgttatgaaaccttacggattacgtaatcatcccttttttgccttccggaacgctacaaaactttacggattacgcattaacacttccttttaattttcggcatgtcacaaaacttcacggattgtgctacaatgctttcttttgacttccggcatgtcacagaactacacgaattacctaacgatg

SEQ ID NO: 109535 - DNA, 381 bp, Glycine max
tactatcattggcatcatttctttcttcggcattaaaggaaacacttgggctgccaggtctctccacctttgggccgtttctttgaaagatacgtgcccctctttgcacatgttctgtagttgcatcctatatggaaccatatcaaaaattgtactgatactgcctaacgaaggcaaccattatgtccttccaagaatggactcgggaaggctccaagttagcgtaccaggtaacagctaccgcagtaagactttcttggaagaaatgtatcaacagttcctcatctattgcgtatgcccccatcttccgccaatacatctttagatgggtcttggtgaaagtaagtcccttgtactttgtcaaagtccggcaccttgaac

SEQ ID NO: 109536 - DNA, 429 bp, Glycine max
atattctgatgatggtgttccatatgttctcaagactagacgaatacatttgctgctcaagtttcatggtcttgcaggtgaagatcctcacaagcatcttaacgagttccatattgtttgttccaccatgaaaccgcctgacgtccaaaaagatcatatatttctaaaggcttatcctcattctctggagggagtggcaaaagattggctatactaccttgctcacaggaccattttcagctgggatgaccttaagagggtgttcttggagaaatttttccctgcatctaggaccactaccatcagaatagacatttcacgcatcacgcgacttattggagaaagcttgtatgagtattgggaaaaattcaagaaattgagtgctagcttttcttaccaccagatatttatacaactccgtactgaatg

SEQ ID NO: 109537 - DNA, 306 bp, Glycine max
  unsure (1)..(306): unsure at all n locations
atcaataggaagcattgtacacaatccgcgaggttccgtaacattccgaaagccaaaaaaagagtaattacgtgacccgtaaggttctgtaaccttacagaaagaaaacaagtatcgttacgaaattcataaagtttcataacgttacggaaaatgaatcaccaaaaaaagcaaggtggtgtatctattataaaaaggggtgcaaatagcaaccangcccacttgggcctcccaggatgttccttcataaagcagttgcttctggatgagcaacctgcttcactggcgagctgtgtgcaagctctt

SEQ ID NO: 109538 - DNA, 403 bp, Glycine max
atgataaattaattattatctcacgtctttttcaataagagttaaaaaaagcgttactaagaggcaacctagtaccttttaaattcccatttttaacttattgtctattatatatgaatccgcctatttttatttgcgacctttcgagttaatatataaatgacaaaaaaaggggggataattaactttttgcaaagaaattttgaaaaaaaaattatgttagctcgcctgggcgagcatgtctgcatgaaaaaacataaaagggggggaggggtaaagctttattcaccccaaaagtttctcccacatttaaaaaaacgtattgctcactggattcacgagttttgcagccctacgcctacatttgttgtgttttggttcttccctacaagaaagtgaacta

SEQ ID NO: 109539 - DNA, 241 bp, Glycine max
attctgctgcatggttggtacagaaccctgttatattgtgactgcaattgatggttcatattggtttcatgagaatgtacttgagtaactcgggattgtggctgttgcatggaggacatatgacttggggggagctgtcctgcctgtactgaattcatgcctttcctgggtctatctgaatctatgaaatctatcatttgcttctgatctgatcccacgttttctcttgaattacgcaaaa

SEQ ID NO: 109540 - DNA, 366 bp, Glycine max
tacactggcgatcattcctggagagtcgttatagagttccaaaaaaggccaaatatggcaattgccagcttaaatcttaccctttccttgatgtcacccaaagtcgggaagtaccacttatagaattcctctctgaatgcgaccacaaaccttaaatgaagcttataaaccctcaagaataagacaattagaacctgtgtgatttgtataaatttaagggacaacccgatacatgtactatattatagcattttcacttttaaaggactaaagaacaagtattgacccatattgagatattagcatttggatttcactaactcgctcttacttagtatgtctctccaactgcaatacaaattcatt

SEQ ID NO: 109541 - DNA, 317 bp, Glycine max
gggcgtttgattttgagtggacggtggaaattgggtgtggaatatgcctctttgtttgttggtgaagaattggtggcttcagtgggatatcgctttgtgattgatgtttgagatgtcgataacttcagccatggctaaggtaataagctaatagcaacactaaagttatcaatatatttttgggtagtaatacaatttgtagatgctcaactattttattgttgtgaatggattaagaatattttaaacctacaaattctgaaaccaataatatcattaatatgagttggatatctcatattctattaatagtttta

SEQ ID NO: 109542 - DNA, 215 bp, Glycine max
taaatgtacatacttcaattgtggctcgctcccctctttgagagtgaggaggatcttcataagaacttatacagctgatgtttgtcggcgaatttcatcatccaccaccctcttcttctgtgccttctcacgttcattattggtaaacccatatttatgccttcttcccttcatgtgatgagtgaggacacattagattaaatctttcaactcac

SEQ ID NO: 109543 - DNA, 204 bp, Glycine max
accatattcctacagaatcttcggaccttggaaatgatcaggaaaaaggcgggggggtatgggttcatcggactacacttattgtgggcttgaccatgatgaatattggccacacttgatgtcattgatattggataaagtggacatgcttgatgagatctgtttctcaaggtttagacatcagatcaaacgcaaagaaaagaa

SEQ ID NO: 109544 - DNA, 364 bp, Glycine max
  unsure (1)..(364): unsure at all n locations
ctttatttcactgtctccgtgctatggacaatttgctcaccattgacattatttctaaaaactccaccggtgggatgtgcgatattaattccaaacttggtgttacatttcatgatgatccaanggctacgagttgaaatgtattttaccggacagatatagtgttgtgggaaaaaaaaaggttttagagagtgaaaggtaatggattaatagaagaagagacgttagattatcataatgtaaaattgcctatatgctctattatgggatagacccttaccaatattactttatttatatttatgaagaaactttttactcttcaatgataataaactcatttattctagataatattattatc

SEQ ID NO: 109545 - DNA, 195 bp, Glycine max
aataatttcgacgtggggaaggtattttttataaaccagatgggtgagtttatacctttctttaaattaccatatacacaagctgatatatggcagcccctcattcttcattgctagagggcgcctttatgtttggtactataccaaccaatgtgatgggttccaccttgggttttattcctcacctcatttttt

SEQ ID NO: 109546 - DNA, 81 bp, Glycine max
ttagataaggttgacatgccttatatgtaaaaagaactgatcaggcgaaaggggtctgcttctaagagaaaagtcacttga

SEQ ID NO: 109547 - DNA, 330 bp, Glycine max
  unsure (1)..(330): unsure at all n locations
tcttacatttctcatcaatcaatcacaacacctcatttcttagaaatcacaccacgaaatatcataatcaattanttcactgttcaaacatgcttgtgtacaaacaactaaaacaactgaaatttataagactaaaatttaaataactaaaacataaagcattaactaaataaactgatcaaaataaattgttcaaaatgcaagacaagaagataaagatcctgtcaatcctcctgcgagtagtcctctgcatgctcattaagatccaacatcagaacagctggtacatcctgaagaatgggctgctctggctccatggctggtgctgat

SEQ ID NO: 109548 - DNA, 393 bp, Glycine max
ctcaagtgttactgtaccctacttatttgcaagtatgggcttacgtggacaaattcgggtaaagagtccttattacgacgtggtatcctgccgcaaacaaaggttagatgaatgcctttttggagaggtggtactaggagatgtcttccttccatttgcctgtcagagagatggtcatcactctggatgatgtgtcttatctgctgcactttcctatgacatgtagacccattaatcatgtcctttcactctttgacaaaaaggcagagaagatcttgctgatgagtcatttgggcatattgatatagacaaaagcttttgcatcaacaaacacaagtgttaaggtgatggtgatgtggcaagaaaacctttaccactaacttttttgagtca

SEQ ID NO: 109549 - DNA, 424 bp, Glycine max
  unsure (1)..(424): unsure at all n locations
tagctntattggataatactaaatgttttctatgaaaagaaaagagggatatatagagagagccgtcgttgaaatcaacatattcaaaattagaatagagccacatagacattatgaaggattataattgataaataataagtattatttggattggattatacacaattgagaaaaggtctaagcggtatgttgatctccatggatatcatttctctctttaggttgggaaatgatggatgttccattattacttcaggggcccaaatccccaactaattaatttattgagaagttctaaacgtgctataagacttcaaaacatgcaaaagctattgactaattactaatcaatagaagaagaaagtatgggagagccttttctttcctttggagccttttctttcctttgtagctgatgaaa

SEQ ID NO: 109550 - DNA, 377 bp, Glycine max
tgcaagcttcggaccatgactaaatgaaaatttgatttagaaccaatattggaggtagtaaagagagcatatatttaagtcatatactatatatcacaagctgaaatagtggaactccatcgatgtccaaaagccaaggttgtcactaatcatgatctcatatatttaacaaaaagataaaagatggttttcaacctatggctttttctcccttgccttcatttatttgattgctgcaaccaatatcatgttcaattgggttgacctcgtaagaaatctctctcttgtctatcttaatcaattctcttaactaatatcagtgtctgtgttcaagattatcccttgttttagcttaaaaataatgctttgcttgcttt

SEQ ID NO: 109551 - DNA, 382 bp, Glycine max
agttgctcggaaaagataaaattacttcagattcaaagacggtgtgtataaaacccgtctttggataatgcagttcaacaacagtgtccactaaacccgcttttgttactcgcagatgacagttgttgtcaacaaaaacgtagttgaaataaatctcttatatactataatgccaccgcctctaaaacaacatcatttttggaaccaccgctgttgaatgcgcatcgtaaaatactattattttagtagtatttattgctttctcacacagcccagtacattacttttttgttgttgacgctactcttcggtggttgtgaacataataatagagaaaaacatcacagaatatgattgatccagggtatttagttctctaaaa

SEQ ID NO: 109552 - DNA, 417 bp, Glycine max
  unsure (1)..(417): unsure at all n locations
gccgcatgcaancttctggtgggacatcttgactttctttccaatcttgacattcaccataaaattctgccttcttctattttcagaatgggaatgccactaacagcacttttgacaatgatgttcttcatgcctcttagtgcagatgtccaaatctttgatggccatattctgacttcattttctttggaggatagacatgtggaggagtaactggtttcttgaggtgtccatacgtaacagttgtcctttgatctgctgcccttcattataacttcactcttctcatttgtcaccaagcattctgactttgtgaagtttacattgaatccttcatcacacagctgactgatgctgatcaagtttgcaatcagtcccttcaccagcagtactttgttcagactaagaagtccatca

SEQ ID NO: 109553 - DNA, 369 bp, Glycine max
agctttgagcatattcaaatgacaattacttttactcagaaggccgaatgagtccagtaattatgtccgagaccgctcgaatatgaatcccaaactctgaacaaattcaaacgacgattacttttcactctgttgtctgacagagtcccataatatatcgagacgctccaaattgattatcgaagctctgaagcaattcaaacgacaataactttttactccgatgtctgagtgagtcccccaatatatccagatgctcgaaatggaatacccgagctttgagccaaattaaacgacaataaccttttactcagatgtctgattgagtcccgtaaattatccatacgcttggaattggatgccgaagct

SEQ ID NO: 109554 - DNA, 391 bp, Glycine max
tcttcaacacatttaaggggtggcttgtttctgagtttgccctcaagtttactgaccacccactgtctatttgcttggttggtggtcacttctctgcaacaattatgggtatgcttaaatgtctttatctgaaaaaagtttctaacttcattctttgcacagtaaatttcccaatcacaaaatgccttcttgcattttgctctaaccctctgtttatcattcttcttccacttgaactccctgcccatcaatatggcattctccctcaaggcagatttaaattcatttagagtaccaaactccatccctaattcaacttctgttaccaactccactactttgctatattgaggataaactttaacatcctcatcttcatcatcactactaa

SEQ ID NO: 109555 - DNA, 395 bp, Glycine max
gaagagggagaaaagaagagggggggatcccatattggagaagaaaaggagagaattgactttgagtggtgtctacaagaactctcttcattcaagattcaacaagtgttgcacatgcttttatttatagactatgtagcttccctgagaaagatttcttgagaaaactttcctgagaagcttctctgagaaaacttccttgagatgctagagcttagctacacacacccctctcataactaagctcacctccttgagaagctttctaaagaagctagagcttagcttcacatacctctctaatagctaagctcaccttcctgagatgagagagtagaacatagctacacacccctataatagctagctcaccccatgcaaaaaacacgaaatcc

SEQ ID NO: 109556 - DNA, 402 bp, Glycine max
gccccggaccctaagcgacggagctgcagctgaactaatgtattgtaaaaattttccaatatgactggaggaaaggcattattttaccgttaattaaaaaaaccatttaactccaatttatttctattgaatttaatatacttatgacatataacatctcattatataataatgaactactaatgaaaaagtaattggaatctaaagatgaaaataccaattctcaatatcattgctctaaacgaatccctatacttttgagttttgatttattctcgactgaatactaattaagagcactaaaaatttcttagaatgcagtattttcaatatttcatcatttatgtttttctacgttttttatcatctgtcatcgacatccattgaaagatttgtagctat

SEQ ID NO: 109557 - DNA, 329 bp, Glycine max
ccatttttatggggataacatttatttttgaacacgaactactttaatattgtacaaatccaaacgtaatatcattccaatcataaaataacattactattcactttaagagagtggaaagaaaataaattagcatcaaatacgataattaagcgatgctaattttgcgacaaggacatagactatttcctatgagcaataagtgtcttttcatctttagtcaatcgcccgacatatggatgtccaactaatgacttggccaattcatgattattaatcccacataataacatttgtatctagccttgacctccaatcactggtttgcg

SEQ ID NO: 109558 - DNA, 412 bp, Glycine max
taaagagcctgtacccgaagtgttttcgatattgtatcaaagaagggaccaatagcgtcatggggagcagtctccacaaggtctcaaacgaagacgttagttagttgtccaaaattaacaccaattccctgcatgtggccaccgagaataatatgaagaatagtgtggtcactccagcgaaactcattttacatgaaactctttgtcctcgtccaacgacgtcgtttctacttccaccattcccctgtatcgctctactctcccacttgaagtcaagttgaggattttgagtgctttgccatcgattgcttgcgaggactatattcttcatctctctccttgtattggattttgtttctgtcaattcaggagaactatttcagatttcctttcaactgactttatcttatta

SEQ ID NO: 109559 - DNA, 219 bp, Glycine max
tagcttgacatgttgtaatgttgaacggtgatcttgctgcttttatagttcaccacctctggtacctggagatatgtcgcggtggtcaggacacctttgagacgtcaagtggggtactattttccaaaactaagcttgaccaatccctaccccacctgggcataggtccgccactgataacctgtgatttacctaaacaagcgagctcctgtcagtctt

SEQ ID NO: 109560 - DNA, 435 bp, Glycine max
  unsure (1)..(435): unsure at all n locations
ttgaagatatgaagtatgatnttgaagcgctcattatttcattctttatgtaaaaagctctctatgtaaattcttgtaaagtttagaataactctcaaaacactttgttcatcttgagagaaaaaactaaaggttgaaactacttatccatctataagatgatagagtattagtcattgtgcaattaaaccaacaaatattttttatttgtgtttgagccaacagtggcttgggaggacaaaaaataccgattgtaacaagtttggagtaaagcttgagttaaggaacttggtgaagttccactaactgatgctttcttcaaaatttgtcactcatcctgtaactatacaagttacaagttacaagtatttgtcactaccactgttggctcaacctgatgcacaaccattcttagatgtacctactttaatattt

SEQ ID NO: 109561 - DNA, 448 bp, Glycine max
  unsure (1)..(448): unsure at all n locations
ntanaattagaataacaatcaatagagaggtcaaattcgtttaaggcataattttattcatttaaaaaatgtctcattgattcattagcatttaaacgattcattgattcacatattacacaagaagctttgtcatcttcattttttcatactcatcatcaacatcttacacttgaagaagaaccatcccttgattgagacatttcaacaaacatcctaaaagcaacaacaacaaaaaatagaatttcttcaatccaaaatttggggcaacaaatgcaaatccaacaccaaacacaatgacataaggctacacaaacactaaaagttgcattcaaacagcaaacccaacattcacttgaccaataattcaatgcaaaaaaacaaagaatgcagagaaagagaacacaattatatgctcacaaccatgcttataaagtttcattatgta

SEQ ID NO: 109562 - DNA, 388 bp, Glycine max
  unsure (1)..(388): unsure at all n locations
agcttgnggaattcaccttaatctctatgtaatatgnttgagtgctttcatccttaatcaccaaccaaatggcagtggtgaaccctangaagatctaccaatctcccttccctcgatggtacaactctaacacaacctgtgcttatcatggaggtgtcccggggcattcaatagaacaatgcctggctttcaaacacaaggtcaaaattttaattgatgcagggtggctaacttttcaagaggatagcccaaatgtaaggacaagtccttatgccattcataggggattgttaattaatgcggtggaggaatgtggacctcgagggctgaagcagatggaagatgtgttaacatctaagaggttcctattaaaggtgttgtgccaaat

SEQ ID NO: 109563 - DNA, 429 bp, Glycine max
  unsure (1)..(429): unsure at all n locations
tctagtagctgggcaacactgattagcctctcgaaactccacctaggtagtgtttgaatntgctgccattcacgatccatgtccttttggtggttgggtcctccaatatcactgctccatgtggcataacttctttgatgatgaatggtccaaaccacttggatttcagcttacttggaaacaatcttaatcaagaattaaataacaatacctattgaccagactggaaattcctttttgatagctttctgtcatgatagatttttactctntgcttataaagcttggaattctcataagcttgaaccctcagttcctccaattcatagagttggagcttcctgtgttcaccagttgtatttgaggtcgaagtcagaaattttaatgcccaaaaagctnntgttccaactcaacaggtaggtgacaaga

SEQ ID NO: 109564 - DNA, 413 bp, Glycine max
tccacttcagttgcaagtagagatctaactggtgttatttcaaacgcttaaaaccagaatgcacaataccctctagcttaccggcaaaccaattttggatgaaacttactatcagccagcctttacgtatgcaaggtatcaatatcggtttcaatgtatgcaactgaaagaaaatgctgatgctaacacaatgttaatgtgaaatcatgaattttcgttgttggtccgatcgagtaattatgtaccattgctagacacccagatgatattttatacttacttgaagctactatgacccctacttatgatgccctgctatattataatgggaggtggaacatgccacgccaaaagagtttgttggttactcattcacaggagaaaatcgcaaaaacttttacattccatcggat

SEQ ID NO: 109565 - DNA, 438 bp, Glycine max
  unsure (1)..(438): unsure at all n locations
actcagcttaacattcaatntcagcgtgtcgatatattacgggactcaatcagacttccgagtaanagggttattgtcgtttgaatttgttcaaagcttcggtattccatttcgagcgtctcgatatattacggaactcagtcagacatccgagtaaaaaggttatagtcgtctgaatttgctcaaagcttcaacattcaatttcgaacgtgcggatatattacgggactcaatcatacatccaagtaaaaatttatagtcgtttgaatttgctcagagcttcggtattccatttcgagcatctcgatatattacaggactcaatcagacatccgagtaaaaaattattgtcgttcgaatttgctcagagcctcaacattcaatttcgagcgtttcgatatattacgggactcaatcgaacatacgagtaaaaagtta

SEQ ID NO: 109566 - DNA, 354 bp, Glycine max
  unsure (1)..(354): unsure at all n locations
agctngtccctttattatctataaattgtgggagatgtgaagaagaaaagggttcaaccccttaggcacctttctttctttcgaatttgctgaggaaaaatagttccgtgaagaaaatccaagccgaggcgctttcgtaacgtttccgtgagtgattttgccaaggttttcgaccgttctttgacgttcttcattcgatcttcattgctcttcagtctttcacgggtgagaacctcttaacaagccttttggatttttctatgtacccgtggtgggccaccctttgattcatgtattnttaatctcattttcatttaacttttatacccccttttgacgtgcgttagcccttta

SEQ ID NO: 109567 - DNA, 433 bp, Glycine max
  unsure (1)..(433): unsure at all n locations
ntgagccataatcctgactcaccatataccttgacttatggtgagaatgtcaatccttaccctcggaagcaaagaaaaaaggagagaaggaaaatttccaatcaaaggaaaaaaggagaggaaaggaaattcccaatcaaagagtgggagaaagcaaaaagaaaagaaagaaaattcccaatcaaagaatgggagaaagaaaaagagaaggagaagaaggaaggaaagctcctgatcaaggatcgaaagaaaacagaagaaatgtgcagaggggatctctggaccagacaatatctaaacaaatacagaattgtcaccaaatgaacaaaagaaagaaaaggaaaccataacctaaaagtggtcttctccctttgattaccaaccaaaatcctgtgcgtcggtgacttgttcgcctcgcgtcaaacaaaaacag

SEQ ID NO: 109568 - DNA, 375 bp, Glycine max
agcttggatgaagatggagatgaatttatttgagaaagagaagagcacgatattttgtgctctaaaagagctctgaaatctgaagtttaattttcaaatgatcaaagttaaaaaaaaatgctcacagatgacctctatttatagcctgagtgtcacacaaaattggagggaaatttgaatttcaattcggatttcacttgaatttgaaattgaatttgtggagccaaactttggagcgaaaatttcattaattatgattagtgaatgttagttatggttcagcccactaatccaagatcaatttcaagattttccactaagtgtgcttatgtgtcatgagacatgtaaagcatgaaggacatgcacaaagtgtga

SEQ ID NO: 109569 - DNA, 413 bp, Glycine max
  unsure (1)..(413): unsure at all n locations
cgcattaggaattgcgaaagccctcatccatcattaggatttggtcctgccatctcaaacaaacaaatcagacgtaacaagacaattatagttgttgtttgaatacctcacccactcaagtgtatcacacaattatggcttttctctaatgaaacactcttgccttttaccactctaattccccttgagttcttaagcaattcaagagattatggccacaacatagaacaattcaccaatatgtgtaaggtaaggctagagagacaaggaaaaggttaaccaagataaaggctaacaatgtttttacgcacaaatgaaggaaataaaattcataatttaagaattcaagtaacaatccttcatgccaccaatatattaccttanagagattttttttacagttcttcaagcat

SEQ ID NO: 109570 - DNA, 364 bp, Glycine max
  unsure (1)..(364): unsure at all n locations
ncagcttgtcatcttacattcatgtttttataaccctaacacttacaacatatcggttgctagctactacaacaaaaaacaaatttacaaaacttttaagacaaaattagtccaatggctaacaatttctctctatttttcctttcattcaaacttgtttctccatcttcatgggtgcttccatctcattcatctttatcattagctcatttnttaagcaatccaagaataactctcttctcatgaatattcatttcaagatcttaccaataaaaaaaaagttacatcctcttctatccgatacatgtaaacaacaaaaaatgaaccagttacatccttatccttagcaaacccattacaacaa

SEQ ID NO: 109571 - DNA, 367 bp, Glycine max
gaagtatataatatatcctaggcttgtgttctcagagaaactacttgttatggactcgagtaataatgctttatctggtcctattcccagtaaaattgctgagactactgacaaacttggccttgttcttcttgacctttctcacaatcagttctctggtgggatacctgtgaaaattactgagttgaaaagcttgcaggccttgtttctctctcacaatcttctctcaggagaaattcctgcttgaattgtaaatttgacttatctgcgggtcattgatctctcacacaactctttgtctggaaccattccattcagtattggtgggtgcatacagctgtatgctctgatactttacaacaacaat

SEQ ID NO: 109572 - DNA, 388 bp, Glycine max
  unsure (1)..(388): unsure at all n locations
taccttaagcagtttcaagaaggtatacaaagcttaccttanacatgttataattaagaataaggtatacattgcagggtttgattgaagaaacaaaattggactcttttaacataccaacttatgagcctacaattgaggaaattatgcatttgattaaggaagaagagtctttgtttcttcaaagattaaaggttttcaccgtgcctatggatgagggtgtaagtgaatgtggtgatgattcttttcttgatggaaatatacgagctgaattcatagccacatacacaagagctgcaatggagcctctcttatctccaaagtttgaggcacaaattataaatgaattatttatcaaattcaaaagaaacttgtgcaaataataaaa

SEQ ID NO: 109573 - DNA, 400 bp, Glycine max
gctcgacatctacaccctccaccatgttagatacacagacctttttagccttctgagttcttagtacaattttctctttcacatctcttgcccccaccatgccgaatacacgatccagatttccctctggcagctcggaaacaaccctcatgactacatctctggtcaccaccatgagcaatacagaaatttgtatgtccttctacactgttagtgcaactaagatattcacatcccctgccttctccatgagacttgcagtatacagtacggccttcagctcctttattgcagccaggtttctgacacctcctaccaccaccatgagatatacaacgtccagaagcacctctggcgtccctttcacatccctcaactagacatgtcttagaattgctat

SEQ ID NO: 109574 - DNA, 437 bp, Glycine max
  unsure (1)..(437): unsure at all n locations
gctccttatattcttcatctattcatcagatctgtgatatttggtaagatnctcaatacttgttgcattgtaattatttaattgtttctattttaataattaaggaaattactttagatattataaagtttatatgtaatgaaataataaatgatattaagctcttaggtttagttattacttttgaatgttgttagttttaagtcttagttttatatgggaagttaattaagttattagtttgataaggtacgttacgtttaagtcttagttctatatggtaagttaattaagttattaattttataaggtacgttaattaagttattaaagctcggaaatcttaaagctcctaaaagaaatgatcaacaccaaactaatttaacacaacaaatattacaacattctcagattcaaaatttattcagcactttaaa

SEQ ID NO: 109575 - DNA, 372 bp, Glycine max
atctccatgcaaagatggttgtttatgctgggatttgctaattccatatctccgtaaacactccatcactattttcctcagacgcttctccttgcatcaaaaagtatgcactccttgttgtgtactgtccattacgatctgctgtccatttccagcaatctactgagtgtggatgaatatgaatctttgctgtatcttccaaaaatctggtagctgtctcaatttcacaatcaaatagaggtcttctccattgaaaataccattcccatgctgtgtcggtatgtcttcccatttgatgaacagttaggtgttgctggctggatatttggtaaagccttgggcacttcatcattaatgtctccccatcactag

SEQ ID NO: 109576 - DNA, 415 bp, Glycine max
  unsure (1)..(415): unsure at all n locations
tgatgganaaaggatgggtgagagaaatcttgagctcatgtgttatgcccatcatcttggtaaatcaaactctatctcaacttctaaggtacgtggtaggtaagaatttggaagcctgggaggaatgcctaccccatgctgaattttcttataatatggtagtaaactctactacttattctccttttgaggtagtttatggttctaatccattgtcccctcttaacttgttacctttgcctaacacctttgctatgatgaatagggatgggctttctaaagccaattttgttaagagtttcatgagaaagggaaagcacaaattgagaaaaggattgaacaatatgctagatattccaataaggggagaaagaaaatggttatcaaatcgggtgattgggtttggattcacttg

SEQ ID NO: 109577 - DNA, 406 bp, Glycine max
agctttaacagggaagaacctgcatggtttcaagtccagtgctaatagactgtgttactgtaagtctaacttgaagggcaggttcatcataaaacagaaccaacgatccaagataaccaaaattacaacatttcacgcaaccagagctattacttgcataatccgaaattcttagcattactattattaccaatagcagtatgatctccattgagacacactattacactatatatatcaggaatatgccctcaagaaattaaattaaccatgcgagtatatcgtcacaacatgattgcagaggatgttactaaaatcaaaaggaaaaaatatcattagtgcgctccttatgccatcgcattgagcccaaccatacaagatataaattcgtacatttcataaaaac

SEQ ID NO: 109578 - DNA, 406 bp, Glycine max
  unsure (1)..(406): unsure at all n locations
ttgactgagaatggaggtctgttctattaaattatttgaatttgattgaagtactctgagctattaaatgtgacaactattaaggtaaaagcgttgaggagtatcctactgagtgtcctctagatgataaaaaggttttctctattaagtgcaatctattgttcttatatcgagaaaatactcataccatgagtcccctctatattgaacctaactctctgagctttatgtcttgatccctcaacaaatctcctctagcagacttgcactaagcacacagtgttaaatatactagatcactacactccattcctagacatacngatttctagacttgtctatcaagttctaaggtttgaaagcatattccaatactaaatagccttactactcatacacatgggtg

SEQ ID NO: 109579 - DNA, 328 bp, Glycine max
acttcctgctctttttgttgaccacagagtggtacctgaagatatgtcgcgggggtcatgagaccttggggacgtcatgtggggtgctattgcccaaaaccaagcttgaccaattccgacccaacccgggcatattcggttagtgagaacctgtgatgtacctaaacaggcgagctcctgtctgcaacagattaaggaaaacaagaccacattgctacgaggctttgtggggctggccacctgtgaattttgagtaaaatgtggatggtggcctctggtaaaccaataccaacggtgggtgatcgattaccaggcttaaaattgatga

SEQ ID NO: 109580 - DNA, 438 bp, Glycine max
  unsure (1)..(438): unsure at all n locations
cacttaaatactcaagctctgcttccttgttctataagaatgttaaggagggtttaacaanaaggatcaaccctgctatgatctgagactcacttacaatcgatgagagaaattgtttacgtgcaaaatatccaagccgaagcgcttgcgtgacgactccgtgggttatgtcgacaagactttcaaccgttctatatcgatcgttgttcattctccgaagtacttcggtcttcaaccgggaagttaccgaaatctaacttttcaattcattctatgtacccttagtggtcctcattcgtttcgcgtgctgttatttccattatatttactttccgtagcccttctgacgtgctttagtcatttatttaagtcattatctcgcctaatcaaaaataaaatgaattttcaccgatcgttcatattggaacatcctttaat

SEQ ID NO: 109581 - DNA, 348 bp, Glycine max
tcttatacatatgcacataatttatacgttggcacgttatttagcctattcagctaaattttggtttagaatgtaaaaatgcctggatataatgacttgtttggaaggttattattatagtttaaattcatgttgccccatgacgaataccttgcaccttagtacaacgctatatgccgattgaccggatgtaatatattgaacataattggcatatacaaacgctagttaagtgtgtgatttgtgcgacaccattacggggaacagtgtgcgggtgcagcacataatgcctatcaaaaatctgtatgtgttagaatgcaacgcatggatgcattcgaaatgtgttat

SEQ ID NO: 109582 - DNA, 428 bp, Glycine max
  unsure (1)..(428): unsure at all n locations
ggaccttaaaactcagctgctagataacctncggttttatttagtttcataaatgggaattggccttagatcttcttaagacttaaggatggtcttaaccactttccaatgttactcaccagggtttgcttgatatcaactaggtacagctagggcataaacgacaccatgacgtgtacaagtcatggtgtacatgatagcttccactgcactagcatatggtactctactcatgcgttctctttcttcaggagttgttagacaattcttcctactaagagtaattgcaacacctacagganaatatcctcgtttgaattatccatgttatatctctttaagataatatcaatgtacatagatggtgagaagtcaagcaccttttagatctctctataatctttatacctagaattagacttcttctc

SEQ ID NO: 109583 - DNA, 271 bp, Glycine max
  unsure (1)..(271): unsure at all n locations
aaaggatggaaagaagtggataaggagatcttgggagaccttcangaaaatagaggtgaacatacctctgctagatgccatcaagcaaattccaagatatgccaagtttctaaaggagttgtgtacccactaaaggaggctcanaggcaatgaaaggattagcatgggcagaaatgtgtcagcattgataggtaaatctattactcacattcctgagaaatgtaaggacccaagtactttntgtataccttgcattattgngaacaacaaa

SEQ ID NO: 109584 - DNA, 313 bp, Glycine max
agcttactgtttagtgaagacttgcttcttctctatggatcaagctggtgaggaaagaaagttgcaactgagtgagttagatgaaatctgcctagaagcctacgagaatgccaaattctacaaagaaaagaccaagaagttccatgatagcatgatagttaaaaaggactttatggctgggcaaaaagtgttattgtataattctaggcttggactcatgagtggtaagttgaggtctaaatggattggtccttttggtgtactaatgtttttccttatgggacagttgagatcaaaaacgactccacaaaca

SEQ ID NO: 109585 - DNA, 388 bp, Glycine max
tcagtccctgagaaactgattcccagaagacaacatgtagtgaagattgctgaaaaccctagccctgctacaagtcctagggaagtagacacggagatggacaagaaaatccgcggtattgtgagtagcattctgaaagatgcttctgtgcctgatgctgagaaagatgttccaacatcttccaccccagatgtttctgtgcctgatgtcaatcaagatgttccaacatcctccgctcgaaatgctgaagccctcccttcacccagtgaagaggaatcaacagaagaagaggatcaagcctcagaggagacccctgcaccaagggcaccagaacctgctccaggtaacctcattgacttggaagaagtcgaatctgatgaagaaccca

SEQ ID NO: 109586 - DNA, 347 bp, Glycine max
agacaacaatggtggtgtataatatgaaaaagatacgtggaggaagaagaaagagttgtgctggaatgtttctggagaaagaaagagacgatttggcttatcaaatgggtgttcctttctttcttcattttctttgttaataacaattccacatgtcatttttttaattggagcataaagggcccacctttacctttgacttgaccaaatactcagccataaaagaagaaaaaaatgggacctttttggatgctgaaatcttgcctccgtttgcgtgccgcctttttcggtccagttcttcgtgtttctctgcacccctcgaggcccattttcaaagggaggccata

SEQ ID NO: 109587 - DNA, 258 bp, Glycine max
atgcctattaagctaaattttggtttagaatgtaacaagcctgaattttatgacatgtttgaaaaggttttattataatttaaattcggctgccccatgaggaataccttgcacctaagtagcatggataatacctatcgacgggatgtatatatgtgaacatatatggcataaaaatacctagctagagtgtgaatatatgcgcataaaaataccttgcacagtgtgaaggaatatcacataaagcatatttaaaat

SEQ ID NO: 109588 - DNA, 361 bp, Glycine max
  unsure (1)..(361): unsure at all n locations
agctttataaatctatttatggacttataacaagcacccaggaaatggtatgagaggcttaacaacttccttcttgaacaaaattttgagaaagaaaattttgataaaaacttctctcattaacaaagcctcttataacattttacttgggccagtttatgtgggtgacatcatttttgggtccactaacaaatctctttgtgaaagatttgtgcacaagatgtagggggagtttgaaatgtcaataatgaaggagttaaattactttcttggtctccaagtgaagcanatggaccatggaacatttctcccacaaaaaaatactgcaaggaacttctcaggaaagttaagattgacaaaa

SEQ ID NO: 109589 - DNA, 415 bp, Glycine max
  unsure (1)..(415): unsure at all n locations
ttcgaaagggtgtgaacaatatatttggagaccaatatcttagaaggcctaacaaccatgacattaatcacctactataaattccagaggcacattggtttccaagtattgtgggtcttttgaatgcatacattggaaatggaaaatattatccanttggcaagggccaatattgtagaggtgatcataaaacacccacaattatacttgaggctgtcgcgtcataagatttatggatttcgcatgcatatttcaaagttgcatgttcaaacaatgacattaatgtgttaaatcaatctcctatgtttaatgacattttataaggttgaattcctccagtgaaatttactactaatagaaccattacaattaatagagccatatcttgcagatgacatttatcctaattgggaca

SEQ ID NO: 109590 - DNA, 377 bp, Glycine max
ttggatcaaaattggactacggcactttatcaaaggtggttggtgatattaatggagtttgatttttcaattgagtataagcagggacatgatattgtatctgttgatgccttgtcgcgagtggaaccagatgcttgtcaagctctcgcggatcatcaggtggtttctgaattggtgataaagattaaagcctcttgggattcagatcctacaatttagaggttgatttcagaattacaagcaaactttggttctcacaaacattattcttggaaggatggggagttaatgaggaaaggaagactatttgtgggtagagatgatgctttaagacaggatattcttctgcatttttatgcttctgccgctgctggtca

SEQ ID NO: 109591 - DNA, 446 bp, Glycine max
taagcttcatcattatggttgagcccgctgatccaagatcaattccaaaattctccactaagtgtgcttaggtgtcatgaggcatgtaaagcatgaaggacatgcacaaagtgtgactatatgatgtggcaatggggtgtagtaagcaaatgctcacctccctctctaaaattaaattggattgggcttctaccaatttaattaaatttatttccaaccacacacatcaaatattcacttattgcatatgaaattacaaaactacccctaatacaaaaacaagtctgggtgccctaaaatacaagggctgaaaaatcctatatttttagggtaccctacctacattatggagccctaaatacaacacccaaaattaatgaaaccttaatataatatgtacaaagataagtgggctcatacttagcccatgggctcgaaatctaccc

SEQ ID NO: 109592 - DNA, 358 bp, Glycine max
  unsure (1)..(358): unsure at all n locations
gatgacaaaaagctcaaagggtcaagaaacaccttctatgataaacaaaggatgaatgatcttaaaaaatcaaaaaatgagtttcatatggttcaagaggaaattagatttcaagaatcaagattcaaggttcaagcttccaagaatcaagatcaagattctagactcaagatttaagaatcaagagaagacttaatcaagataagtatgaaaacgttttttcaaaaactgagtagcacatagaattttctgataacctttntaccaaagagtttttactctctggtaatcgattaccagattattgtaatcgattaccaatagcaaaatgggtttcaaacagctctcaactgaattt

SEQ ID NO: 109593 - DNA, 449 bp, Glycine max
ttcaaactaagcttttatccaggcacattcttggtggcgaagctccttctttctggcttattccctagtggatggtgcctcctttctcctcttctcctttttcttccactgcatctccatggtggaagatcaccattgatggacctcattgaagctcaaagatccaacctccataaaagctccacaagcaagcttccatcatctagtgtcaagggaaattgtcttgtgttaagggagattgttccgtgtcgagggtggtaacctccacaagtgtaatggttgtaggtttgtgaagcatgtcaagctcccctatcttggacgaatgttgtttatgcttcttctggcaagttgtctggggtggacatgcttttgatcttgcaagcacagttagacgtgttaggtggatgatgtccttatatatgacaattcagccctttttcgatcattgg

SEQ ID NO: 109594 - DNA, 304 bp, Glycine max
gttttccatgctatcaatctgctcagatgaatctcagaaaacttaatctccacagaggacaacgtgcaatcgatacattaatgaccgcggaaatgaagataggcatactttcaaagtgtccgtgtcaactgtttaaatttcaacctataagatttatttgactccgaaagtcaaaactctgagtgttccttctcataccctctctttaatttggaatatatgcataccttattagttgttattgcgcatgacccatccttactccatatatgaatgttataagaatcgcagggcctgcgattta

SEQ ID NO: 109595 - DNA, 223 bp, Glycine max
aagacttctgatgagcggacgtccgattaggtcagttatgaaggaaatttcggatcaatccgatcagatctgatcagaggatcttctgatgtctgtcagtttcaacattgatggcttgagttacaagctttcctgagtttatttgataatcataccattacgttcgatccaggcaggtgttaaagctcaactgattaacgtccatattccatggggacattca

SEQ ID NO: 109596 - DNA, 378 bp, Glycine max
tgcgattcacgctcgaaatatttttctgcacgcttgctacatattgaagagcatatgaatatataagaaggtactacatttagtatatttggtgataactaatcagcttttggcgttttcccaatcattgatcataacttggaaggcagtgactctggttgtatctctaacaaaactggaatgggaaatttaaagaacgttctataaaattactaattaaatacttatacctgtgaatcatgtgctcatggataggtcccataactctttccatcattgccaagtgctccaagttttgtgagttgaaacaatgcttcccactgacaaaagattcacatttagaacactaagacttgttgtctcatattcaagccatgc

SEQ ID NO: 109597 - DNA, 309 bp, Glycine max
  unsure (1)..(309): unsure at all n locations
atgcagcttattttttatatgaactattttaaggccatctataaaggtaggtgccgtgtcttagcatgaggttcttcataatcattcacctatattcatcttccccctcgtcacaactncaagatcatcacaggatccgaactcaacatctcacatggagtgatgtatcacattcctagctaatacaaaaacaagaacacttaatatcccttttatttaaatgagaaaccacttgcttaaacatagatcacgtaactttaccacttttgcattcacaattcacttttcaattatcaatcacattacaca

SEQ ID NO: 109598 - DNA, 400 bp, Glycine max
  unsure (1)..(400): unsure at all n locations
tactcagcttgatactgtaaaccaaagccttctttttcgaattcactaactgaactttcaagaagcatgctccatctcatacgatgattcaaataaaagcttccagtgttttgcttatgtctgaaatccttcggaactgcaaacttcccattgtatgcacttcgattaataaagatggacgacaaatatgggaggtccttaagtagtggcaatggatcaacagtcaaatgggtgcgtctcatggacaacgtaacaagatttttttttccatctaatgtagagtcacgtncaacacggaagatatgagtgcgactctatgtgatgcattggatgtgggacataatcagcgccgagttgaagaatgattgaattctgataaatttttatcccacaacattga

SEQ ID NO: 109599 - DNA, 408 bp, Glycine max
  unsure (1)..(408): unsure at all n locations
actcagcttaattaaaagataaaataggttaaatattctgtgccactatttattccaatggatactcgaaaatggggaattatttttataatcggtaatagagttattctggttaaaatttgatgaaaaatatctaactccatatgggtgaggagttcagacctcacaaagtccaaattgggtcctattcttaaccacaccgcaaaacccgagataaagtatgttaatccaacttaacatgaaactagtaatagcttatccttgggatcatcatttgtatgcttcttctggtacttgctngtgatgtaagcattggcttgtagagaactctccatcactaatgaaacttttagaagactaacaaatagcgatgaattggagcatactacttcttacaagatggatagg

SEQ ID NO: 109600 - DNA, 375 bp, Glycine max
  unsure (1)..(375): unsure at all n locations
agcttccatttgtggtaatcagagttcttagcttcaagtaggtgctccttaaacctccattaatttttttttctttaccttctcttccattgttgtttcttcatttttctccatgtatctcctcacatgtcttgttctaaatgttgttaacatgattctttaaagtttccaccgattaaacttgctatagaaactaaaattgattttctatggttcaaatttcttgttcttgttcttgaaccatgaattgngttaagtttacgttcctttgaaatatgtctcgttaatttttggggctgaaacctcaaccattaaattcttacaaaatatttaagtaaagaaaacctcaaaatcctaggtgacctgtcacctatt

SEQ ID NO: 109601 - DNA, 447 bp, Glycine max
acttcaatctccgcttagtgcgggataaaaatatagtttgaataatattgatagatcatcattcttctcatgaaaagagaggggtatgaagaggatgagggaggaatgaggaatgaaaggtatatggagagaaaaaatcatataagatatggaggtacgcaaagagaggaagggattgactgagtgaaagtgaaaatccctacttttaaagggattgatctagaagtgtatcttaagtgggagatgaaggttgagtaagtctttatttgctacaactacaatgaagagaaaaagatcaaattggcctccttggagtttgagggatatgccttagtatggtggaatcaagtgaggagtgatgctgagaggatgagaatgcctctgaataatacttatcaagacatgaagagggttttgagagagagatttatgtcgtcctattatggg

SEQ ID NO: 109602 - DNA, 369 bp, Glycine max
tgcagctttttgaaaaactccttgttttctagagcatagctacacacacccctctcattacttagctcacctccttgagaagctttcctaagaagattcctaagaagctagagcttagctacacatacctctctaatagctaagctcacctccttgagatgagaagctagaacttagctacacaccccttataatagctaagctcacccccatgacaaaaaaacatgaaaatacaaaataaagtccttactacaaagactactaaaaatgccccgaaatacaaggctaaaaccctatactactagaatggccaaatacaaggctcaagttgaggaaaaacctattctaatattacaaagataagcgaga

SEQ ID NO: 109603 - DNA, 347 bp, Glycine max
  unsure (1)..(347): unsure at all n locations
tgcctcanagatgtccacgaaagacaaagcggccgtttgaactagttccgccccggagtacgacagtcaccgctttaggagcgttgtacaccagcagcgcttcgaagccatcaagggatggtcgtttcttcgggagcgacgcgtccagctcatggacgacgagtatactcgatttcatgaggaaatagggcgccggcggtgggcaccactggttactcctatggccaaggttgatccagaagtagtccttgaatttatgccatgcttggcaacaaagagggcggcgtgacatagatcctggttagggcaaggatccgtcatgccagcttcaccactctggatatcat

SEQ ID NO: 109604 - DNA, 369 bp, Glycine max
  unsure (1)..(369): unsure at all n locations
agcttttttacttccgactaaactttttttggagctcatataccctcttgtgcttggcctggtacgtataaattttcaaaaaaatgctgtctggttttttgtttgcatatacttgttttaactggcatgttctttttttatgtaactgcaaaaaattatctacttgttgagtggcttctaactttaataatctttaacaattnttaattaaggaatgatgcccattgctgattgcatgaacaaatgaattggaatccttccaatcctttgaataacttctcatgctatcatgcatgaggaatatagtgcaattntattcatatgccgacatatataaattcttgacccaatcaaatatgttattaactt

SEQ ID NO: 109605 - DNA, 354 bp, Glycine max
acacttaaaactccacctgatgcattgaacccagtgacttctttagttttttttaatggaattttccaaattgaggcccaattggggctagaacacggtgtgctacaaaatctatgtatcctgacaacacatcatcgtacccacgcatattaagaacttccatgaggccacttccgctcacaaatgcaatccccctgcaaagctccacctacaccctccaaatctgtgcgatgtaaggcatctcgaagaagaacatgggccaggtcgggtgaccataagagtggagaccactatagagagtttgcgacctaattggaggaaaaaaagggagaacactgtctcagtgcatgagga

SEQ ID NO: 109606 - DNA, 403 bp, Glycine max
gctcatcactcagcataatgaaccctattttttaattattgagtaaaaatatgctaaagttcctaaaaccaacgtggcatgatagacattattaaaaattaacaaattctactttttcttttttctccttggttagagatcattgtctcccaatctacaaaattaaagactaatctcacttatgatatattattattaaataaaaatttataaaaaaaacttacatgtctttgttgttttttagctatcaattaaattaataactaattttactaaattttctaattcaacaagcaaacacaacaaccttcaacttaaaatttagaattttttttcagttttaaattaacttttaactatttttttttctaagcagactgatcatctaatcaatttttatttg

SEQ ID NO: 109607 - DNA, 428 bp, Glycine max
  unsure (1)..(428): unsure at all n locations
tttagatggcgcttgcacccgtgcctgagattgaactgctcaaattaaacaccccaccaattggggcaaaaaaaaaaaattctgtgagaaacacaaaaataatgggaaatgagcagcaccaccaaaccaaaaaaaaaaaccaaaacaccttcattggtatcagnttctgttgctctaattgatagtctcctccctgcaatgtccataaaaacaccaagaatttcaaatccactgaaacaagccacatcaaaaaagcataaaaactgcaactttgaccatcttggtcgctaagaaactattagaacatgattggttagcacattgaagatggggaaataaaagaaaggccaaaagggtattcagaacacacaagagttgactgaaagagcaaccagaaagaggtggtgtgagccacctactggaaaatg

SEQ ID NO: 109608 - DNA, 398 bp, Glycine max
agcttgtgctgctcgcttagcgtgggtgtcttgtttcacgcttagcgcgactttgctcgcttagtgccaatgcgtgttttcgtcgtgagcatgtgatgcgcattgagcacgtcttgggctgggcctttttgctattctttgcatctttttgactttttattcctctttttcatatctacaagccatgaataagaaaaacatcaattcttaacttttaagcataaataattgctaaataattatttttaaggttatttccattatatttttatcataaaaaacaactcatatttagcaattatcagtgatgcagtggggaatatagcaaagatatgttggtgggtgcccaagaaaccaacctaatctaatgctataccttatgcacctgcagccctcaa

SEQ ID NO: 109609 - DNA, 337 bp, Glycine max
tgacttcataattattgaacatctgctgtgcacggagagaggctttgaaaagtagcattgaaatgctggctgcatacaatggatatgagccctgacgagtttcccaacttgggggacaactacgactggagaatatttactgtttaatatgccagggcagttgcgaaaaaatgacagctaagagtgatggacatttgtctcaccacatcgcattataattaagatcccagtggcggtgataagagcaaatgagattctaacccagcgttcgaacgcaaagatgatacaacggctaacgactctatgatcacaattttactggcataagaggttcgga

SEQ ID NO: 109610 - DNA, 387 bp, Glycine max
aatggcctcatcaatctatctgtttcctgaagggaattcaataaatagacctcctatttttaatggcgtgggttaccattattggaaaaccttgttgcaaacttttatagaggcaatagatttaaatatctgggaagccatagaaatagggccttacattcccactatggtggtaggaagtaaaaccatataaaagcctagggaagaatggagtgaagaagaaaagagattagtgcagtacaacttaaaagctaaaaatataattacatctgccttatgaatggataagtactttagggtatcaaattataaaagtgcaaaagaaatgtgggataccctacaagtaacacatgagggcacaacaaatgttaaaagatctaggataaa

SEQ ID NO: 109611 - DNA, 411 bp, Glycine max
  unsure (1)..(411): unsure at all n locations
tgagagtgttgaggtcattntgaagaggtgaagtcctttctctttctcttgggctaatcatagcttgctgtgcatgcatgcagaataaaggagtttcaaggtgatgaactcgcctgggcgagccatagcttgctttagtgagtgactttccttcaggttgaagatatctactcgcctaggcgagtgctcacttgagtgagttntattgtcatcgacatgataaaaactcgaacaaaagttaaaatcaggagagcttttggaaaaacgagaggcatgggttctgagataacgagaggaatagggagattagagaaaaaccaagttggagctacaaatgttgacattgaagtgattgtggattccatcctttatattttcatctattgatcttgtagtcactaccatgagtag

SEQ ID NO: 109612 - DNA, 358 bp, Glycine max
agctcggcccgaaatcgacaccttgctacccaaattgttcgccccagatatcaagattgggttcccacgataaaagaccccattgaaacacaaccttaaactttttgaaccttggcctataaaaaagaatcctcattccttcctcgaagcaaaggacaacggaatcacctcaagggagagcgaatagaatgctaaaacctgatttcccaaagaaagggatgggaaaggagaagtgaaaagaaagaaaaggaagaaatggacagaaagaaaaagaaagaagatgaaaattaagaacagaaccaagaagaagggggaagattcccggtcgaaggttgaaaagaagtgaaagggaaaaaag

SEQ ID NO: 109613 - DNA, 352 bp, Glycine max
  unsure (1)..(352): unsure at all n locations
ctacagaaaatcccnttcaatttggtataaataatcattggccaattctgtcatttcaagggtcaaattgagcttggaagtcaaaacctctgcacttgaaaaaatgggatgcgagtangggtgtgcaaaactattcggtaaaaaaccaaccggattggtttgaactattttaattggtttgactttatatccaaatagtcaaactgatttagaaattggttcaaaatcaagctagttttaaaaaattggttctgaactaaactagttttaactagttttaagagtcgaaccagtttcgaattgtgtttcgaactatgtttttgactattttttcaaattaaaaatatttaaa

SEQ ID NO: 109614 - DNA, 418 bp, Glycine max
tgcaggtgaatccgacccattgtgagagttgatgattatattggtttatgtgtaccacaatccactggaagtgtcgtgggaggcgagccaatttggacttcctgatattggggtgacaagtgtttaaacatagcgatactacagttgtggaccatgtaagtcattttcctgcaaccttaatgtttgattacctaatagccattatttttaaatgtaaaacatataatcatgacttgtcttccaaatagatatatgaatgagtgcggtagaagcaaagctgatcagtcactggatggtatgctggagtctcaatctatacaaaatgcctaggaaagacatcaacaatgcccacaatacattgaaacatggatcaaggaatcaccaaggcaatcgtatttatgagcttacttgctcaagt

SEQ ID NO: 109615 - DNA, 345 bp, Glycine max
agcttgtatggttcaccccaaattcctttgtcatatgctaaacttgtatcccatatctacttgataattcaatggtagccataaccctaaccaaggttcatcaacctccatttctccgagaatacgactcgaacacaacgtgtgcttgtcacggaaaagccccggggcgttccattgagcattgtaaggctctgaagtgtagtgtcgcaacctacccttcggcgggagggcgacgcgagactcgcgggatgcgtgttccacgaaaggaatacgcgcggagtcgccaccaacgtttatttgaggaaaacgtcggaaaaactggaaaagacgcgatctacgaacttt

SEQ ID NO: 109616 - DNA, 385 bp, Glycine max
acctataaaactcagcttttatccaggctcatcttggtggtgaagctctttcttccatggcttattccctagtggatgccgcctcctctcacctcttctcctttgtcttccactgcatctccatggtggaaaaccaccattaaaagacctcattgaagctcaaagatccagcctccatagaagccccacaagcaagtttccatcacattatgtgattaagcaacacatacaccaattaatcatgaacgatcattaagcatgaacgtaaattaagcgcagagacaattaatcaagcactaagcatgcatgaattaatagcaacaaattcagagtaattagttaagaagaaaacatgaacagaatttaataataataatagaacctc

SEQ ID NO: 109617 - DNA, 431 bp, Glycine max
  unsure (1)..(431): unsure at all n locations
ntatctcagattagtccanaaattatcgnttgatctctactntgcaaaacatcattcagtctagttcttttgttgcgtgtaaacaatgcatctcagaatctatttgggaatctaggttttttaattattgcatattttgtcataagatatatagattactctttatcatgagataattattaatccttttgaatttaatatggttagtcttttctattttaaatatttctaataagagatttcttgtatttaagtgcacgcccatctttcttttcctactaatgattaaaataatgaagccagaaatgaaatataaaagtaagttttgcctgactagtaaggggtgttgagtgaaaaataactagtctgggagaaggagcaacagaaccagaaagagatctgggcgatccaaaaagtattttattgataat

SEQ ID NO: 109618 - DNA, 417 bp, Glycine max
  unsure (1)..(417): unsure at all n locations
tgttgaggtggcatagtatggcacatatggttaatgtttagaagttgaacatgttgattccaatgttattaagtgggctggtcttaaaatgtggcccaaaagccatgtgaaagtttttaatggacctactacaaagaaagatctggtggataaggtggttgacaagctgaaagataaaaataggancntgaaaaattgtcnnaacacgattattaaaagtaaaaggggtggtgttgttggaattttaagggatccttataaaataccaataaccacaaggaacacattacgttagattagcaagaagagttttaggaatacctggatccataatgattgatcaaacaaatgcagcggaatctgaatctgtaggtgatttctgatctatgtactnttcttgagtatctgtatggaatg

SEQ ID NO: 109619 - DNA, 361 bp, Glycine max
  unsure (1)..(361): unsure at all n locations
agcttctaacattatctaggttnggtcttttacggcataaaagaatgatattctctaaaagtttcacttttcaaaaatcaactgtaaagttcaaataacgagattatttttcatgattgagtctattttacatagtaattctccatcaaacaaaaacctttttttctccacaaagtattcaaatgatagtcgcccaaaatcttatccattgtcatcaatatgctctaaataattacatgtcctattaaatgcttgcacgggcattaaacccttagagcttatctaattgttctcaatatgttataaacaccttcattatcgttacttacattaagacgacatgccacctaacctctacact

SEQ ID NO: 109620 - DNA, 387 bp, Glycine max
  unsure (1)..(387): unsure at all n locations
tgtagtacccttttatgaagaggaaataaagttagttatgtgggattgtgaaggtgacaagagtcccatcccaaatggttataatttctcattcatcaaacacttctgggatttactaaaaggagacattgttgctatgatgcatgactttcactcttgtgggaaacttcctagaggtgttaatgcatctttcattgctttgattcggaaagctgacaacccacaaggccttgnggaatataggccaatttcccttataggatgtatttataagatcattgccaaagaaatatagaaaagattgtccaaagttctaaacaagcttaatccactnttgtggtggggggatgttagatggaatggtcattactaatgaaaccattgatg

SEQ ID NO: 109621 - DNA, 340 bp, Glycine max
cattcaatttcgagcgtttcttatattacgggactcaattagacatccgagtaaaaagttattgtcggttgaatattctcagagcttcaataatcaatttcgagcgtctcgatatattacgggactcaatcagacatccgagtaaaaagatattgtcgtttgaatttgctcagagcttcaacattcaatttcgagcgtctcgctatattacgggactatatcagacatccgagtaaaaagttattgtcgtttgaatttgctcagagcttcaacattcaatttcgagcgtgtcgatatattacgggactcaatcagacatccgagtaagaagttattgtcg

SEQ ID NO: 109622 - DNA, 328 bp, Glycine max
gatggaccatttctgtgcttgtttaatcaatgacaatgcttacaaagttgagctgcccggtgagtataatgttagttccaccctcaatgtctctgatctatctctttttgatgcagaatgagaatccgatttgaggacaaatccttctcaagagggaaagaatgatgatgacatgaccaaaagcaagggcaaggatccactttaaggacttggaggacctatgacaagggctagagcaaggaaagccaaggaagctcttcaacaagtgctgtccatactgtttgaatacaagcccaagtttcaaagagaaaagtccaaggttgtgagt

SEQ ID NO: 109623 - DNA, 372 bp, Glycine max
agcttattttcagcaggatcatagattctgtagccaaattcattctcactataaccaatgaagatacactaccttgactttgcatccaacttggatatcttatcctttggaacatgcgcaaaagccttgcagccaaaaactcttaagtgatcatacttcacattcttgtcaaaccaaattttgttcggcacctcactattccaagcaacaataggactaagattgataacatgcatcaccgtgtacaatgcctcaccccaaaagtgcttggataactttgcttcaaagagcatacatctcactctctcaatcaatgtcctattcatcctctccaccaaaccattcagttggggagttttcgaaggagttttc

SEQ ID NO: 109624 - DNA, 395 bp, Glycine max
tctagcctcccattaataggtatcttcatagaaacattctacatgttgagacatgttcaacagcaagggaaggaccatcagcagctagccgcaaatgcaccaccaccacctctacatcagcctccatccttagagtccatcttggctcacgtgtagaggattgagctccagatgcacgcatatatgcaacatttggtcgaccaacaggcggccaatcataggggacatgtgtagctaaatgagagcttttaccagtacaccctgcgttagcaaagccaggatcccagcccttactcatggcctactcccgagcagtttagggccacatttggatggcctggagataagcccaattttcaagtaagaacatgaccctcagaggccccaggagatga

SEQ ID NO: 109625 - DNA, 431 bp, Glycine max
  unsure (1)..(431): unsure at all n locations
tganatgaggaagtgtggaagggtgagacttcctacttttattcgtttaccacagagtggtacctgnagatatgtcgcgggggtcatgagaccttggggacgtcaagtggggtgctattgcccaaaaccaagcttgaccaatccctacccaacccgggcatagtcagtcagtgagaacctgtgatgtacctaaacaagcgagctcctggcagtcaacaaataaaagaacaaagaccacaaagcaaggaggcttgtgtggtggctagccagctgtgaactttgagtgatatatgggatatggcctctggtaatcgattaccaagggtgggtaatcgattataatgcttaaaattgaagacaggaagataagatggtctctggtaatcgatnaccaagggagttgtatcgattaccaggcttaaaaatgagat

SEQ ID NO: 109626 - DNA, 370 bp, Glycine max
  unsure (1)..(370): unsure at all n locations
ttggttatgtgctcaaaannnggcgctccatttggccaaccttaaaggaacacactaattctgtaaagagaatacaaagctgggtggtgggctatggtcaccatattaattaattattgcttccttgatcgaccaacgaatgaaaatctaaattgtacaggttgcttggctgtctccatgtgaaatctttgtgagaatggacttataaccatctattcctttcatgccactttgctacctcgatctggagctggctgcaatctgccataataaggttcctctttaatctaccatatgtttctctcattataaagtgcatggagaaaccaactcacttatgtgggcacacttaccattaatctttcctatt

SEQ ID NO: 109627 - DNA, 235 bp, Glycine max
aacgcataatttatcacgcacgctcgttttctaaaataaaatattgtataccgtgcgacatactatcaaccacaaccgtggtaactcctagatgactatatctacatccatagacatgtggaactgatatatagacaactatggtataagtggattagtgggagagaagtgacgaattaacttcacaaaaggaagcgcttatgaatattggaggagataaatgttgctcataatt

SEQ ID NO: 109628 - DNA, 372 bp, Glycine max
tatttataagaattggtgcaaagagaacaagattatgttcaaattctcaccctaattcttgtttaccaatgagtgagaaacatatttgaaaaaaaaaaggattattgcatggtaaaagaacaaagaattaagcggtggtaaaagtttatgataataacttctaagaaggacctttcttataaaatgctccaatttcatacctaagctagcactaatttgatacccccactgctatattcatggagaaataaggagaaaattgagttaatatattcgtaaactttagattaaataagaaatcatgaggaaccaacccattatgcatgacctccctattggatcataagcattaatgtagaaattttagttttt

SEQ ID NO: 109629 - DNA, 335 bp, Glycine max
gaaaaaatgcattaacagtttctcgtccctagagtatgcccccatttttcggaaatacatattcaattgatttttggggccaggggtccccttgtatttatcaaaaccaggtaccttgactttggaggatgacaactcggaccaacacaatttgtcatgtcggataaagggtaatcaccaaaccctttgacagcccttaatctcttttcgaggagaatcaagttctctctcccttccactgctggaggcgggccccctactaagaaatgcaatggttgcagatggcggggtcaaagagctcctgtgatattatgttgaggcacaacattaaacgt

SEQ ID NO: 109630 - DNA, 453 bp, Glycine max
  unsure (1)..(453): unsure at all n locations
tactcatgcttacatgaatcattttaaagcctagcttaatttatgagacaatctgctcttggctaaacctttaaataggatgtcatatcaaagcatcttcaacgttaatgcttacatgagttgcttaaaggtaaacaatattgtataacaaattcttgtgtaaaattcttaaatctatgtggcattgtaaggcctatgaatttaattgaagattaataactcatttaaataattatgcatttaagatgctctatgtaggctttcaagctggtcacaccttcaaatagtttatgccaagtcttaatgcaagactatatacttttttcaagtaaacaaagctatgtgtggntattagttgaagaagaacttttggatgttgaatgtacctttggagagtaaactcattctggtattaatgttggctaccccccaaagtgaatctaccatgaaaat

SEQ ID NO: 109631 - DNA, 405 bp, Glycine max
agcttataagcagtgctaactcaagtctttaaccgagtaacctactccctttcttcaaagagtaactagttaactacaaggatcatcaatttaggctggtccactgcaaattaatgcattttttattagcttggactgaatcaataattgttagtacaaaagagtagttgcagacttgcaggataaaaactagtactgtcattttgcctccatttccacaccattttttttttctagttttgactactttttaaagatacattggtattcaattctaacatgtgtcaaagtttaaaagcaaaaagtttttgcaagatagtaacaaaataagatgatgtgaccataattctgtttgcaattgcagccttataaatgaaattatatctgattcatagcatcaactgg

SEQ ID NO: 109632 - DNA, 455 bp, Glycine max
  unsure (1)..(455): unsure at all n locations
actcaagctnttcaccctctanaccaaactgctgtttactctatacttctcataatgtatctcaacatagtaaaatcaaaggcccatactcttaagctagcattaaaagtccctggaagtactattttctacctgttccatccatagagaaataatcattgccaactttctgcctcacttcacccacctctaatttcttgattcataaagcagatcaatgtcaaattaatactctgaaacaactatttcaaaaaatttaaaaaaagatagttcatccttaaccattatattaccagctattggtaatcaaccactcatctaagccttatcacacacacacatagatatatataaaattgtaacagtacaaaatcaagttaaggtagataaattcttatgagaaattgtcatgaactaaatgttaatggagtaaactttcttatcccttaaatatc

SEQ ID NO: 109633 - DNA, 291 bp, Glycine max
aaataaccatacataacaacatgacctttcagcatagatacaatcccgatggaggaataccctaatctcatatggctagccctaacaacaacagaacctactccttccttccaaaatgctactggcccaagtgaccatacattcctccaccaattccacaacagtaacagccccagatacaacaaatagttgaggctcctccgcaaccttctctctaagaacttgtgaggcaaatgactatgcaaaccattgcagttcaacaagagaccagagcctccattcaagcttaac

SEQ ID NO: 109634 - DNA, 309 bp, Glycine max
gtttttgtattgtgcactaggtggtgatgaatccatgacaagtacactccttaattaaagaaaggtggtcgtaggaacgttgttactgatcgacaagagtgacaattatcgctaacgattgactgagataatatgattcactgcatccctatgttgtttgatgggcttttttgttcccttcgtgttaatggacctctccttattatccctttagacaaagattctgacatctcttcatccatcagtctgttttcccattatatatgttaccctgtgatttttcttatgactctgacgttaagggaaata

SEQ ID NO: 109635 - DNA, 431 bp, Glycine max
  unsure (1)..(431): unsure at all n locations
caatactcccagcttaatgtcatcttgaaaccaagcattactgttagcgtatatgaatcgttagccccatttgtttcgattatatatatatatatatatatatatatatatatatatatatatatatatatatgcgtgtcacacactcacaaagagtcactttaatatattatatttctccagctaagtttctggacaatgccaagttccataccaggaaaactaaagactgttcataaatgcaaagaaaacaaaatcgctactttgtatagtcctaaggagaatgagatatatataacaggtgatcgagagctatncagagtcttcgtgcgcatctaattattatcaaatttgtgttctgaacagacccttatatcttaagcatttgtgatatttataataaaatcgctatacagagtctgagttggata

SEQ ID NO: 109636 - DNA, 383 bp, Glycine max
ttgcacaatgttgatgcatatgtatgatgatgatattcttctcagtcattatacaatgggtgacgacggaattctgacacatcatgtcagttacacgtgaactgcgacatgtgaatggcataaaccaacagtgccaattgtagtgcacatatgagatccatggatctaatctttgacacccgtagtttggctttggcgcaacttattacaagcctcttctttaactactacttatgaccatttttagatctaaattaaatagtttttctctttattaaacactttcttaaccctttgtgatgcacaagaaccctttactcttattgtaatagtcgatatcttgatcatttgttaacccaaaagaaatcattgttcaaccaacc

SEQ ID NO: 109637 - DNA, 388 bp, Glycine max
  unsure (1)..(388): unsure at all n locations
agctnttatggtgttgtatacttgtatctgtgaccgattatattanggcacaaggatttaacccaacaatttgaacaatggggttttggaggggccacggtctgtaaaaggagatctgtctcttagaagtgcttagctcatgaattaatgaaactagcttcgatttattttaacacagtgaatgagaatttgtggcaaagaattggattatgtatacttttgacgtaatgactcaaagaaatctgattgacaattattggttgatacctacatgtttttgtcatccatggattgtcctgcacaaatcgngaatctaaaatctacatgcttaattattttcacatctttaaattgttgtgcagtatattcgtcctaaactcggttgtca

SEQ ID NO: 109638 - DNA, 197 bp, Glycine max
ggagcctaaaaaggaccccacttttcctggagtgtccggaaggtcctcaagattcaccctgacatccggccacacccggtacgaaaacaatgccatatgtgcctcctccacctgggcaacacgcgcaccgtcccaacgttattctgatgctgtccgcttacccccgcttctaagctgtgtagggttcccctctacgt

SEQ ID NO: 109639 - DNA, 265 bp, Glycine max
atccgagaaaaatttattgttggttgaactctctatgagttttctgtttcaatttctagtgtctcgatatattatgggactcaatcggatatcctagttaaaaagttattgtgatttgcttatgaaacgagctttctttttcaatttcgagcgtctcgatatatgacgggactcaatcggacattcgagtaaaaaagttattgtctgttgaattttataccagcttccgttgtcaatttggagcatctcgatatattacctgact

SEQ ID NO: 109640 - DNA, 262 bp, Glycine max
atcgacacatgttaatcggtagtattattctttttttggtagtagaagagattgaaccatataccattccgtatttcccttctttcctaaccattctacccacttttaatctcgcaccacaaatataggtatttttgttgactttaaatttacgtgcattcatgtttttcggacatttatggatttatgcaaaatgatactctttttcatgatctatcaatgttaattcacatgtaacttcctcttttaacatttatttata

SEQ ID NO: 109641 - DNA, 375 bp, Glycine max
  unsure (1)..(375): unsure at all n locations
tgcatcaagcttatgctgaagaaatagctcgtctgggcgagcaggttacttctagaggaagcaagcagctcgcttgggcaaactattgtgcaacctccacccttcatttcatataaatatgcatgagggggctgaggaaaacggtccaatatcatatattaagaggttttcactgaaattaatgagaagaaggagaaagaagaagaaaaatcaaggccgaggcatttccgtaacgcttccttaacatttccgtgatcgattctgtggtcgttcttcatagttcttctttcttcgaccgtttaagttttatttttgaagatgagaattcattctattaatgattttcacatcttgtttntcacatcttcatcttta

SEQ ID NO: 109642 - DNA, 302 bp, Glycine max
tcttctaaggcccaagtggcctgggtgctatttgcacccccctttttacctaaaacaccccttgcctttcttggggaatcttttttcgtgattgtacggaaacttatgggattcgtaacgatacttgttttcttcccgtaatgttacggaactcttgctgattacataatcatccccttttttgacttacggaatgttacggaacctcactaattgtgcaacgatgcttccttttgatttccggtgtgtcacggaaccttacggattgtgcatcaatacctccttttgattttcggcatgtc

SEQ ID NO: 109643 - DNA, 393 bp, Glycine max
  unsure (1)..(393): unsure at all n locations
ttgatgcaaagcaatacatatattgtcaactntatcgtattaagattaaagaactaatcattataaccattttggaacatatatngatttgcatatgattcatatatggttataggtacaaggataagactaatctgaaataaggtaaataatggccagaatctacgtgttcattgtcatgatttttattagttgatagcttttgcatgattttatcaccatggaagatattgacggttaactatatcaaaaaaaatgcattcaacttcatatagtttgaaataaaatggaaagaaaaacctgaagtacagatgttgaataaagaaatgcattcaatttcatatacttatggatgatnttatcatcatggaagggctttgtaccagctttttt

SEQ ID NO: 109644 - DNA, 437 bp, Glycine max
  unsure (1)..(437): unsure at all n locations
gcttagcatcattntcctcaaaaaaacatactccaagtgagcgggaaatacctttaattctacttaaggcttctctactacattatctttcttcaattcttgaaaggcatanttcccctagggaatctccttcaatctgtcactaaatcttctatacaagccctaagatctttctcctcctcattggtcaggcaatcaatagcattcattaaagccttttccaatggtgaatgaatggtcaagcgctgcatagcaaggtcagcttcttgcccaactgcctctaacttgaagcgctatcattatggtgctttatcgcttcaaacaaattgaaggtctccttttggtcctccacacttatttctagattaccattccccatgtccacaatacatttggccgtaagcatgaatggatgacccaagatcaagggaatgtct

SEQ ID NO: 109645 - DNA, 306 bp, Glycine max
tgccgttagttgaggttatctctttgcctttgaaaacaatactaaagagggagtcttatagacccattcagcattagaatgataaactaattggattaattctcatgaggtttgcaggattttgatgctatgcctctgcagctatatcacccttccattatatgctcttgtaactcaggtatacccttcacatttttatttcctggctttttttgagacattcttgcaaggcttgatgatttcaattactaatatattggtctggcatgaacttaacccagacatattgcacacaagtgttgttta

SEQ ID NO: 109646 - DNA, 357 bp, Glycine max
tctctcttaagctcattcatccgctattgattgttctttgcattaccaaataataaaaattgaggcttttttcttttttatagaaacaaattgtgattcttactctcttaaataatttttttcagaaaatataaaaaatatattctacacatttttaaggtattctgcattttaaaatgtttaaaatcattacaatggaaaaattctatgttaaaaatattcttaaacgaacaacaataattacttaagtatatatgtttaatttaaataagtaagccggcgttaactacaaattactaataaagaataaaagaccttcgtaatacaatttataaaggagagcttattagtataaca

SEQ ID NO: 109647 - DNA, 344 bp, Glycine max
  unsure (1)..(344): unsure at all n locations
actaagcttcgcgcaatttctatttagggggagngtgaattatattaggttcagccctttgcacttgctctctctctagaatgctgaagaaaaggagcccgtgaagaaaatacaagccgacgcgcttccgtaacggctccgcgagtgatcacgcgaagagcctcgaccgttcttcgagattcatcgttccgtgctttgttatctacagccttcaacgggtcagtaccgccaaccaggctgttgaatacattctatgtacccgcggaggctcacattatgttccacgaatattaatatcggggacatttactttctattacccccctggacgtgcctaagccatt

SEQ ID NO: 109648 - DNA, 412 bp, Glycine max
  unsure (1)..(412): unsure at all n locations
cacctgcacgcatgcaagctcgcaaagcatgaacaagngatttttttgagctatgtttgagaacaacatatgatttgtgataccactagagttggtttgtgtgttcatgatgagcaagggggattggtttaagcaatgacattgtggagacaaccatgcatggacgttcaagaaagtgaaacatggggtttaataatgacttcattttgtagctacaataaatttgaatcatgtagtgtttaaattagactgtaaaatgatagttggcgagataaatactgcatgtggggacagacaaaattgagaaatattgttgttgaatgtagaaatattttagttgctcattcatcctatggaattggatttgttaagaggtaagctgctaatggagttgctcatgagttagcaagga

SEQ ID NO: 109649 - DNA, 456 bp, Glycine max
  unsure (1)..(456): unsure at all n locations
tactaagcttgtaagcattgatttgatactgcttccctcataatgtttcntatgttgtttacaatttaatgatcttttgctaccctgcaatgagacacacacagatacacaaacacacacacatagagacaaacactcgcagacatcaagactctaacacgaacacatacacacacacacacacagagtcacgcacacatgaagacatagacaaagacacaaacacactggatcgcaggaacacacagaggcccacacacaaagacacacacactgagtgacaaacacacacatacgctaacacactcacacacatggacagacacacacacacacacacacataaagagacaaacacacacacgcacgtaaagagacaaacacatagactcacacagatgaagagacaaacacaaacacgcacacccacacacagagtcacacacacataaagag

SEQ ID NO: 109650 - DNA, 304 bp, Glycine max
gctcgagctgtctctttctctctatattattgatacactattcattctcttctttcacccctgcagcgtgaagccctcaatggccatgagtggttaatcccctagtaagggcctggcgggcctcaaaagccaacgatgtatggtgttcttcaagagttatcattgcaaagaggattccttcctcgttttattgaaacaaatggccttggaaaaattaaaaaggggggggggtttgcattaattatgaacatatcctgactaaataaaaatgtatcattcctaatgttctataatcaataggctt

SEQ ID NO: 109651 - DNA, 443 bp, Glycine max
  unsure (1)..(443): unsure at all n locations
tatcttttccgtaccatacagaagttccaagaatcttactgtttggattccttgngttcacttgagttattctggcacccttaatgttgcccttcttgttgatctactttntcattgcttaccttgtttatcgaaactaagttagtaaatctatcaggtatttgtcttgtattatttacgcttttctatctttgtgtgtgtgggtttaaataattattagttcggacgtttgttcttgtagagaaacactaatttggagatgctactagatatgcagaacacgcaattgatgttcaattttgaattgtaggtatgtcattctctctctctctctctctcccactatctccctctccctcttctacttaacagcatcacacattgcatctgcgggacagaattttgggaaaattacactttattggcttttagtatcaccattt

SEQ ID NO: 109652 - DNA, 294 bp, Glycine max
gataaaagggatgccccacattatttccatgacacaaatgcaaaaatgatgatttggaaacattatgcaaaactggtcatgcatgcacctatgtggacactcaagtgtcaaatttttatggccatgtgatgctaaggctcaagattcatttcctctattataaatcaacccaatgtttccaaaaaatgttcttttatccatttgtgcattcatccgagctcattatgggcgtccggagaaatttcacagcggttaccctttgcgtggttacacactttttttccaaaaactagt

SEQ ID NO: 109653 - DNA, 437 bp, Glycine max
  unsure (1)..(437): unsure at all n locations
gaactaacaaantcagcttagatcaaagagnnctcgcttttctctccattttctacaagctnctcccgcatttcaattatggtcttccttcttcttgcgaaaatcgcgtgctcttccactagtgatgatcatggaagactaaacactcaatcgatccaaggattcactccaagcaaggcttaatttgagtgctggtttagtatttcaatnttgtatgaatggtcatctttttcttcaatcttatctttaattttcatgattattaataggcttacgattgaaaatgaattacgtcatggattcatttcctaattttgaaaattaaatcttaagtggtcggatgatattccaactaatttgtgatctcaatgaatttaggggattaattcgattgaactaactctaatgacattgaatgagctttcataacatgatca

SEQ ID NO: 109654 - DNA, 339 bp, Glycine max
  unsure (1)..(339): unsure at all n locations
aaaatgtattataaacatatatctttaattttaaatttttttttccatggctcttttaaattactctctcttatcatggcgatgaaatgttaaaaatttggatcacaacctccacaaatttggtgtcccccctctataaacggaagtcctagacttgtaataatgtgctttttggctaaagttgagacacaatgatacatagagttgaagcttctcattcaatagattcatttgttagtggccaagtagttccataattcacttcatagagaatntgaaacaaaattaccgaaaaattatgggttgttccctattccaccatcattgttgcttgccatt

SEQ ID NO: 109655 - DNA, 439 bp, Glycine max
acactatcaaactcagcttatgcaaatgtagaaaagtattcccaagttagtctatagcctttccagcaccacatacacactcccagattgacttttaaagagaataacaagactatatttatactgtcagcttcatacagaataaatatgaacataaatctgttagatagaaataaatgtgaaatatatatctttttttaaaaaaagaactaaccatcgcaatagtgtcttctacatcatccttgtttctgcctgccagacgcctttttaaggattcaagtgcatctctaagcttcttcaaaagaacatgtttttccaatgatgctgcctctctaagtctagcctaaacttcaccagcatacaaaaagctagttaaaacaggaacatcaatctattagtaaactatgaatataatcattggttatttcagttgcaaaca

SEQ ID NO: 109656 - DNA, 389 bp, Glycine max
  unsure (1)..(389): unsure at all n locations
tgtcttgtgcagaattagggtgaataggtcgtcaatctttacngncgttatttgcagagcacaccacagatcctttgtctagaaaagagctctggaggtagcaagaataacaaacttgtgcagagatacctaagttttgtagtcattaagagattaatgagttgttatgtgattgtgacatgctaacaacacgaagagggatcccccttcttgtgtaacgaataaatattctctactcctaatcttacttgtgttaaggttttctgtatggatggctgaacactcttgttgggaatttctaatgaacaactgatgtaactactctgatatatatttgattgtgttctctgtgtacaatgcttctatcaatgctaaattgtacatgctct

SEQ ID NO: 109657 - DNA, 261 bp, Glycine max
  unsure (1)..(261): unsure at all n locations
agctngaggttgtatgtgaaagatttttgtttttgcaactggcatgttttggaaaggatttattttgttatgcaacggatttgatttattctgcagcttctgtgcagtggaagggatttattttgttatgtactggaaagggtatatttttgttatgcacgtgctcaattttatgagcttacatgctgatttaaattatagatgctatcggtgattggtgcattgaccgttcggtgagcactctaccttgttcgatgtttc

SEQ ID NO: 109658 - DNA, 311 bp, Glycine max
  unsure (1)..(311): unsure at all n locations
gagatttatgatcattaagagttacctcctcctcttgatttgagttagattcttcaaagactatttgccgttcaacatagggaggccttcttttcattagatgaggtgtcatctatatctttacaagggctcatgagacctttcttttccttgggcttaatagatttcttcttgtcttgagacttgtcttgttctgcgcattcaaatttgaagtgtccaaggttcttgcattcatagcatactatagagctnttgtcttatctttctttccattgagcgtgcttgttgaggagtccttccatctggattca

SEQ ID NO: 109659 - DNA, 327 bp, Glycine max
aaaaagtgtcatatgtttcaaatcttttgtacgccaaaactctagaacaaaaatgtataagaatcacagatgaggctatttcagttaaaaaacactgctgcaatttatgctatataaataatccaaattttagggctccacccacacaggaatatattaatttcaccaaaaaaacacccattgggtcatcaaacgtactcaatctgcgattaaaacataaaaaaaatattgaatttatataaccacccaaaataacccaaaaatgtgacctctaggaattccacacatgttcattctaatcctcaagtgtgagtaacttatccctta

SEQ ID NO: 109660 - DNA, 344 bp, Glycine max
ccgggatccttaagtcacctgctgctgcaacttgttgtttagcagcatattttggcccgagtttgtttggaacggttacaacccgaacgggttaagcaaagacaccggggcttatcttacctgataaagccaaaggaaattcttggaagtatggtttaagcttttaacccacttcatgccgataataataagaatcattccgggaatgaaaagcggtggtcaaagcttgcgttggaaacaagatagtcaaggaagcccgccctaccacataagtagaagctttataacacgggtctgggagacgaaagtcaagtggtcccgatatacaaagatgatgttccgag

SEQ ID NO: 109661 - DNA, 327 bp, Glycine max
ctttcctttcttggaaggtaccccaagatatggtactttcccacctttgttcatagcctttccacttctactcttctctgaaatcttatttttttttctttttcatttttctcattttctatttctttttctccttctttatctttttcttggttctccatctttttattctgaaccattattttcctccctttttcctgattctttttacccttcacatcattttccttaacctcagcacctatcttttcacccatttgctccttgtacaccatactctcttcattctcagcttccacacattttttactcctactcatcacaacc

SEQ ID NO: 109662 - DNA, 435 bp, Glycine max
tatggcctgcctccggacttcaccccccgtgctctccctgtagatttaagccttgcccctactctccaggggcaactcccaccttatgaagactatccctggcttagatgatggggaaagagatacccatcttggccccctgctccacctcaaagatctgtccccacatgaactaccccaaccgaacatagttcgccatacgccgtgcttacccacacctttaaaagaatctgttcccttcgcggaagataatggaaagatagaggcgctccgaaaaaggttaatagcagtcgagggccttggaattacccattctcggatttaacggatttatgtctcgtgcccaatatcgtcattcctcccaagttcaaagtatccgactttgattagtacaaatggacgacatgtccaaagggcatcttttgatgtattgcc

SEQ ID NO: 109663 - DNA, 344 bp, Glycine max
atcgatacttttgaccgctcctcgaaaaatcataagatgaacctcttccaaaaggttttgacttcttttaatgggttttaagctcctctcacaacgaataactcttcagaaaggtctctttgaccacacatggagagtctataacagccacgcgttggtttgcctcttgaattaatcttattaacaacaatcttgaatacttttgcttttacaatcaatctcttacacgccttgtaatccctttgaagctcttttctatttcttgagtaccaaagctatctcaaatcttctggtttctctaccttgacaactagtgctatttatcttttcattttcttctccct

SEQ ID NO: 109664 - DNA, 202 bp, Glycine max
gttcaagatatgaatctagaagaattcatgactcaagattaaagttcagagtcaagaatcaagactcaaggttcaagatctctataatcaagaacaagactccggatgctagaatccggagaatggttaatcaagattgtatgaaatgttctctcaatatttgggccacatgagtcttctcaaacatgtaaccaagagtttt

SEQ ID NO: 109665 - DNA, 389 bp, Glycine max
tgctctattcaatggagtttacaagaatatctttatacttatcaacacatgctcagtggccaaggatgcatgggagatcctgaaaaccactcatgaaggaacctccaaagtgaagatgtccatattgcaactattggctacaaaattcgaaaatctgaatatgaaggaggaagagtgtattcatgacttccacatgaacattcttgaaattgccaatgcttgcactgccttgggagaaagaatgacagactaaaagctggtgagaaagatcctcagatctttgcctaatagatttgacatgaaaagtactgcaatagaggaggcccaagacatttgcaatatgagagtggatgaactcattggttcccttcatacctttgagctatgac

SEQ ID NO: 109666 - DNA, 440 bp, Glycine max
  unsure (1)..(440): unsure at all n locations
ngaccaatcccgacccaacccgggcatagtcagtcatttttaaccttgtatgtacctattctagcgatctcctggcagtcatcatattaattgaacgaagaccacatagctaggaggcttgtgtggtggctggccatctgtgaactttgtttgatatatgggatatggcctctggtaatcgattaccaagggtgggtaatcaattacaatgcttaaaaatgaagacaggaggctaagatggtctctggtaatcgattaccaagggagtgtaatcgattaccatgcttgaataccaagtcatgaagctaggagggcttctggtaatcgattaccaagcggtgtaatcgattaccaggcttataaatgaatgcatcatgttgacatgcctttggtaatcgatacacataggaacatgcactggtaattgttaccatttatgt

SEQ ID NO: 109667 - DNA, 252 bp, Glycine max
cttaaatgctctacttggagggtggaactacattatggctacaatagtccaacccatgtcctgcttgcactgaagctttatggacctggcctaagcaaggggacttgctctaggagcgggtgacttggtccacatgtgctagcatctaaatcgacaccttctaagcctttacacagcaggggggggcttataatccacttccttatggacggatgatatctggcaacataaattaaagtggtattgaacccc

SEQ ID NO: 109668 - DNA, 388 bp, Glycine max
  unsure (1)..(388): unsure at all n locations
ggatccttaagtcacctgcagctgcagcttccagtttctgttccttntgctatagattcctctcgcggaatctgacctttgttatttctagaatgatgataaatcatttttgttgataatgaatctggagctccttgaatgtatgatttgtgaaattgcatatgtttatttgtatggaagggtttcctttatcaggtatgtttgttgacttatcgatggagagatcttaatctgttttcctcggtcttctctatgcgtatgtttatcattctctctttgttggacttgtgcattatggagaatgcgagaataagctagtggttgaaccttctggtgtgtgcgctggtgttgccgatatcaaaagcttcttatgtgcctatcattattg

SEQ ID NO: 109669 - DNA, 356 bp, Glycine max
cggagagttttgtggagctctcccctgttatgttagatgagtttctgggggagctccatcgatggcagtggcacctggttctgaccaatctctcggaaaagcggatcgacgttgctcttgtctagaagttctactcctacctatatgacctcgaggacagggccccgaagtactgtagggtgcgaggacatgtcattcatttcaacgccgagaccattaatgacttcctcgacacccctgtcatcctggctgatggagaggactatctggcgtactcccagtaccttcatacgtacctagaccattccaccatcattgtatccttgtgcacaccagggggaggattttgtctaaat

SEQ ID NO: 109670 - DNA, 438 bp, Glycine max
  unsure (1)..(438): unsure at all n locations
ntntctaagcttctcgaaacccattatctcctcttttgacaacatcaaaaagccaaagattggtgggaaccaacaaatgaaataatatgaatgaagtgacaaagatcaatcaaaaatcataaccaacccagaacataaataagtgataaccaagatgaaatccaaatagtcacaattcataaccacattaaatccaaacataaaagactaaagtccaaatactaaaagataaataatgtgctaaaaacaataatctaaatatcatagccaaaatacacggcttataagacacatagaattataaactaaattctaataatgtggaggtggtggtggaagatcgaaactctgacgaatgtaacccacatcttcttcaagctgtgtgaggcgaatatccattccgggcaagcgagtatccagtgagttgaaacgttcacc

SEQ ID NO: 109671 - DNA, 342 bp, Glycine max
aaaactcagctgcttttggaatattatatttttgtactgtgtgactttatttcttcattgaatggttaccaatgttaattatatgataacactaatggatgagcctgtgtgtaactattcctaaacatttttaataatccctttatcttaatgaacttgtggcgaaaactatagggggtcacttatgcttgaattgttcatgacctgattaaggaaatgtattaatgcttaatttgaagtttattttgcttacctgcacaggttaattaggtccctaacataatacaatggatggtgggggtttattgtgctagatctacaatacttggctgtgaaagctat

SEQ ID NO: 109672 - DNA, 373 bp, Glycine max
agctttattatataaatggcatacattttataagagtaagggaaattctctaaaataaaataatggaatataacctataatgtcatgctctacagcgaatgacatggttaaacactaaaacgctatgctaagaaaatcatttcttaccatccatagtgctacgagtaaagaacacagacaaaaagctaccaacaaattttctatccaatataatttgcatgggaaaaattgggtatccgttaaaatctcatggcacaaaaataccataaatgtgtgtgtaaattatgtccatataaagtgttatacacttggaaattgagcagcagagctactaaagctgtccagtatacaataaaactgaaataatttttgt

SEQ ID NO: 109673 - DNA, 418 bp, Glycine max
  unsure (1)..(418): unsure at all n locations
tcagctttggggatatanaaatcattttttagatctctttccttacatttttttgaaaaaagagaataatttatacaaaacttacgacagaaaaatataaattaggatttgttgagaaatctctcataaacattcttttcaattataaacaatggaatcatccattttaatatataaaaaataatcaatttaaaaatatcataacaaaaattcagaatttttttcatatatatcaaagtgatgaaaaaaaaagatcttttaagtatccacgaaatttatcaactttccttaagatatggaaaccacaatttattatctgttcactagtgataaaatttctctcaaggcatgatcctatcgagttaaatggaacattctaattatacaataatatatagctaaactcctacaattcatc

SEQ ID NO: 109674 - DNA, 349 bp, Glycine max
tcatggaatttcattctgactcctcctctcgatatgacaggaaaaacttcattttaaatgggatacagaatttcctttgacttagaaaaaataagtcactctatatccttatgttttctcactacaaacattatttacattattaaataatattaattgtatatattataatacattaatatgtcattattttatgatataaatactgaaatcatttccaaattgtcatttttgtatcattacttaataatcttcgcaatcatctattttcataagttagaaaacacaacaatctctttgtatttacataaaaaaaaaactggcggaaatattttactaatgcatggtg

SEQ ID NO: 109675 - DNA, 402 bp, Glycine max
ctgtgacactattccttccatgttctctaacccatcttagtacgtagttcattgatacattatgacattgccagctcatgactaatatttataaatgagctataattaattaaatttacatcgaattgaatattgatttcatggacattgcttttctcagtcagggatcaagcttgtatctaatcaaccactgtacatataagcgtctgaaggaaagaatatataaactgaagggggagaacgagaaaatcatgacatgattgatgagctcaaactcaacaacaatagcatttcaatatttggctacaagtgcctctacttgagattaaggactgggttccggcattgaaggatggtgaaaagtggttaaaaaaaactttcgctctatgaaataatagtgtc

SEQ ID NO: 109676 - DNA, 378 bp, Glycine max
  unsure (1)..(378): unsure at all n locations
tatagtacttttaagaataagatatgaaaaanctttctgtgnnacacaccaaaacaacgaacgcatggttatatgatagggtcatttctttcactttttcctttctccctcttctttcaggtaaattaatgggaagagaagagaatgatgcaccctttttttttctcctctcaatgcttaatggtggattatccaataaatactttggatcctttaaattatccctttcttttcttaagactcaaataacaggtatacttattttatccgaatcgctattttactttgcggatatatcttaaaacaaatatacctgatacatgctagttttgggtgtctattaaataactacctgtatatgtttcatttacactatat

SEQ ID NO: 109677 - DNA, 251 bp, Glycine max
aatatatcgatacgctcgaaattggaccacggaagctctctagaaattcaaatggtgataacttttcacacggatgttcaattcaaggacctaatatatcgagacgctcgtaattgaacaatagaagctctcgagaaattcaaatggttattacttttcacccggatgaccgattcggggacattatatattgagacacttgaaattgaacagcggaagctctcgacaaattccaatggtcatcacttttc

SEQ ID NO: 109678 - DNA, 433 bp, Glycine max
  unsure (1)..(433): unsure at all n locations
ggcctcanagaggtctaggaagggacaggcagccgaaggaactagttccgctccggagtatgacagtcaccgctttaagagcgccgtacaccagcagcgcttcgaggccatcaagggatggtcgtttctccgggagcgacgcgttcagctcaagacgttaaagaagcgctactatgaggcaacctagtaccttttaaatttctgcctgctatttgatcactttttatagtaggacgcacctaagtgctcatgatcctgggaatttaaataaaacaagcgcaagctcggaaggtagtcataccttacaaaacatatatatgtatgtttaggtagtgaaaataccttagatatacatgtatgtaaacaaaaaaacacttcacaaaatatatatatgtatgtttaggtagaaaaataccttaaatatgcatgtatg

SEQ ID NO: 109679 - DNA, 323 bp, Glycine max
  unsure (1)..(323): unsure at all n locations
gtggcatttacctgggggaaaacaagacaagcctttgatttgctcaaagaaaagcctactaaggcacctattctagctcttcctgacttttctaaaacttttgagctagaatgtgatgcctctggagtgggagttggagctatattgttacaaggtgggcaccctattgcttattttagtgaaaaacttcatagtgccaccctcaactaccccacctatgataaagagctttatgccttaataagagccctccaaaattgggaacattaccttgtttccaaggaatttgccattcatagngatcatcaatctcttaagtacat

SEQ ID NO: 109680 - DNA, 364 bp, Glycine max
  unsure (1)..(364): unsure at all n locations
tgaagatgaattcctggctacttcaccactcctcgaacgactatagcatncattattgcattaaaaagttgggagtttggcaccatcgaacgggtttaaccctctggtctcagaagctgccatcgaacaaagggctacgcctcttgctcccaatcccatactttagatcttgtgacggagtacattgtaaaaatatcggatcagacacagctccgaattttatgggccggggcaacaagcaccaatgtcattaaacctatttctactgtggggacatgactctacactgacatgtctttaccacgtatgttctttctgaaagtattgaccggcacattcgaaattttaatctaaaaaacactgt

SEQ ID NO: 109681 - DNA, 396 bp, Glycine max
  unsure (1)..(396): unsure at all n locations
accttcacatattgggaacataatgttttcntacgcatactcaatactaacacttcaaaataaaaaataagtggagaagaacgaatggaaaaaataaccatacttaagtgcttgaaaaagtttattaagaaatgaaacaagtgaaccctccaaatcctgaagattgttgaatccatcctgaaataagagatgtaaatcctgtccagtatactttaagaaaagtttatagttcgcaaagaacataaggtaaagaaaacataagatcaatatcagacaataacagtacctccttgtcctgcgtgggtgcatcatctgaatgattagctgctccagctgatagcctctctgcagaaactttgaagttgtccaatctgtcttgttgcttcttatcccttt

SEQ ID NO: 109682 - DNA, 439 bp, Glycine max
taaaaccgggtgatgttgttgaagtgaaagggtatgtcgtttgcaatatcaatttaagatcagaagaatactttccatgttttcacttcatataagaaacccattgcttctttcagccccattgaaaagctcagatatactcctaatatgaagaagcatattggcatggtaagcatattcacactagtagccattgacaatgcttggatatggtgttcagtatcatcattttaattgtccattactccattaacatataatcttaagatgaacaatgagtttactgaatgcagctccttaaaaaacaatacttgccctaaataagagatactttccaacttataaattaagcctactttgtaaccggtagagtcaccttgcctttgaaaaagggagaggaagaaattagttactccttttcctcaaaagtttgtttgga

SEQ ID NO: 109683 - DNA, 436 bp, Glycine max
ctcagctttttgcaagctttcagtataatctgggacctagccatggtagaagtctccatagaggccattgcctccctcgcccagtattatgatcagccgtcgaggtgctttacctttggggacttccagctgtcacccatggtggaagaatttgaagagatcctacgatgtcctctatggggaaggagaccatacctcttctcagggttctatccctcattaactagaatttcaaagatagtccaaatctcgacgcaggaattataccatggaaagcaagtctaaaatggggtggctggaataccgagaaaatgtttggaggcaaaagcaagaatcttggcagtagatgcgaatgggctccgttcatagacattctcgcactgttgatcttcagaggagtcctcttttcacatgtggatgggttggtggatctacg

SEQ ID NO: 109684 - DNA, 329 bp, Glycine max
  unsure (1)..(329): unsure at all n locations
cataaccattacgaaaacacccactatgacagcaagggcatgaagttaaaaatgcctcaatatttagcacttacagaaaattttgatatctttgaaatcatataatcttcaactctgagaatgctcatcatcaaaatctctcccgtagctgaagggaatataatagtcttaacttcactccctatggtggctatggttttctctttaacctacaaatttcacagcattgcatgagtgatagtttcagacacaanatgttcaaaattaaaaatagaatatatgaaccaatgtcacaattgattgttgaacccaccagaaagacaataaaa

SEQ ID NO: 109685 - DNA, 416 bp, Glycine max
tatataggaaaagcctcttatctgtccttatatattataataagagatgtcattatgaacggcatgcctcgaacatattcattacacacaatgctgatgaaaaacagcagctactgatggtagatgctaatatgagttctcaaaaaatggaggactcctacacattgaaagacatgctacctccagagtcttaaatccctcaccctgtacataatttgaacacccaaataagtacagcttgtgaacacagcctacctcttccgttgaggtatgcattacacatcatcgtgaagcatataggccttacatctagtcaatatgatattcattagaattacactaagtgtaaatagtttacggatgcgagtatgtttgtacactatacacgttaggcaacatggttgagctcatgagac

SEQ ID NO: 109686 - DNA, 425 bp, Glycine max
tgcatgatctacatctcccttgtctaagcaatttttttgatatcataaaatcttcatgatttacattctcccccttattgatgatgacaactacttgtaagttaggagcatcaacaaagaaaattctatttgatatagtcactcgcccttgggtttacaatgattgcttatatgagacaattaaagaattcatatttttcatatatacaaagttgtctcataaaacaatagataattgttcttactatcttatcttttatctttctctcccgctttgtcaacatcaaaaacaaatcatgaatagaaaggagacagatgttaccacttgttgcaatgtatgagaatacgtgataccaaaaggtattaaaacaatcattcaatattaatcaagcgaaaaacagtacaataacacatcattctaacac

SEQ ID NO: 109687 - DNA, 335 bp, Glycine max
gcatggcttaaaaaaacaactcttattgatggggaaatggtaggaccaatggaattgtaagggcaaatcctctattttctaaatctaagccctttgaatgaccattaattctactaattggcagctcggaaagcccttgaagtgctctccatgaactcagtcatgccttatatgaattcttgtacctttccaaaactaacaattcaatggtaaaacaaagcttctgccaaaatggttaaaaatattttcctcaaactgtaaatctatcctaatcttctagattatgtgctaactttcatactagcggcttaccttccttggaaatgtgtacttaa

SEQ ID NO: 109688 - DNA, 413 bp, Glycine max
  unsure (1)..(413): unsure at all n locations
ttagatatcttggtgttatcgattactatgaggctgctatcgattanaacagagagttnttactactgaagaaattttcttacttataaacttttcttcacacaaaccatgatgatgaatgatgccatacatatatcaaatgtactaagatgcaacaaccaagataacaaccattacaaatgtcattcaagggatgtgggcatgtcaaagccaanacttcttcaagcttttccttgagcttcaagctttagcttctgagtngttcaccatgtcgatcatgttgctccccctatctctaacaatctccctcttgttggatttgatgatgccaaacttagaatatgacattgagtgcatttacagagtcttgagatccaagacttggtcttagtttatccttgaaggtcttacac

SEQ ID NO: 109689 - DNA, 268 bp, Glycine max
  unsure (1)..(268): unsure at all n locations
atgaatttcaaaaaattcactaagtatgtgggcttagcgagctaggctcgcttagcctaaaggctgccgcaatgaaatgagcttaacccaaataagcttggtttagcgcacgactttcaacaaaaaatngacttagttactcgggcttagcgaaatagccccgcttagccacaggtatctcctcaggaagatgaatgttcttcccaaaagatgaacttgcttaacgcggtaggcgtgcttaacgagttcgtctgaaaacacatatatt

SEQ ID NO: 109690 - DNA, 222 bp, Glycine max
ctaacgtctatggctctcatcaatatacaataggagaagaaggagccgttgtggactttcatggaatgcttcagaaagggtgcattgaacatccgaaacctggacccagcagtggctatgtaccacctgatgacggcattgcggccagggccctttgcaaaaacctatgaaggaagcctacaattgatcttgaaaaattgcgatcaaaggcagccaagtaca

SEQ ID NO: 109691 - DNA, 375 bp, Glycine max
agctttagtcaaacagaataatccgtatatgtcaaagaattgggtgttgaaaaagcataacaagactttctgtgattggtttaaagatacaatctttgcagatgagaatgcttcagaaacattaagaaagctagcagatgggcctaaaagaaatgttataacttggcaaggatacgacataaataggtattcattttacacaaaagcacaagatgacaaaagtacaatgcagaacagcggggtcaccctaagggctgaatctcaacactttgcaagtgtcaatgacgccaatccctgtgcagcttccatcccttactttgggttcattgatgaaatttgggagcttaattatgtgaaatttacagtatgtgtttt

SEQ ID NO: 109692 - DNA, 319 bp, Glycine max
  unsure (1)..(319): unsure at all n locations
ttaagtttcaagggcttaatttacattcctagttcccatagaactgcgtgtaccattcacattttaataaaatttacctacattaaggacgaatgatcgattcaaggatatcgcctgatctgatgtaacagctgaactagcaaactctttcgcanaagagaaaatgaagaggggacagaaaacaggaagaaaactttatctgggatatctttttatgtattctgaatagaagcagccacgagccattaaaaaacaaagtatcatttaaagagcaatgttatatcattctattaattctcttacaaattcgccttaatgg

SEQ ID NO: 109693 - DNA, 225 bp, Glycine max
ttatcttcttagtatacacctcatattacaacattatgtcccaccatataattctctacttttaaaaataattttgtctctaaacagtattaactcgcgtatgttctaaatcttaaatttaacatatatacgttgaaaaatcctctctatgacatttttataatatttatatttttctgactgtttcgcctactataattaatttttctattttaagactccact

SEQ ID NO: 109694 - DNA, 266 bp, Glycine max
  unsure (1)..(266): unsure at all n locations
ttcttttgggggaatttaataacctataaatccaatggaccccaacacatatgtctatatcaaagtggaggaataccggaccataagagcttataacatcagcgaatttgcaggggcacaacaatggttaatacctttgtaaaaaacatttattccttgggacctgtttctttcatatgggaaagaaaacgttatgattgggattgggaccatacctcctttgtctnacctttaggtccatttccctatgggcaactgttcgtctt

SEQ ID NO: 109695 - DNA, 362 bp, Glycine max
tgtccttcactggaatggaattcaacgcccgggtatcaatacaacagcgccaggaaccatccttctttttgacaagtaaaattggggaagaaaaaagactttggctgggttggatgaagccggaattgaacatggccgcgatctgtgattcatattctgccttttggtaatgggggtagcgataagggcggacattgactggggacgcattacgaaggagaggtatgtggtgttggatggtgcctggtggtggtagttgggtgggctccgaaaaaatggaggaataacgggtgaggacagcggttatgggctcagggaggggttgagggtgttcgtctgatggaaagggaggggagcgggct

SEQ ID NO: 109696 - DNA, 219 bp, Glycine max
atgattgtaaataatggaagaaaatgcttctaaagaagaagtctgcgaaataaatgtttgtcatatttatgatatatatactacagattgcacaattttttttttctcactctctgatatagaaaaccaaatagttcatgttgatgttaaatattaaattgtaatgtggttatacatatcaaataatttttactaattttctattcatcgctcatgaat

SEQ ID NO: 109697 - DNA, 411 bp, Glycine max
  unsure (1)..(411): unsure at all n locations
gcttctcagggatgtttctcaagaaagcttctcaaggattctacctaatctataaatagaagcatgcgtaacacttgttgtaactttgatgaatgaaagtcttgtgagacacaactcaaagttcaacttctctccctttttcttccttcaatttcgagctcccccctctctctttctctccctctttcttttcctccattgaagcatccttcccaagcttcttatccaaggctcatcttggtggtgaggctccttcttccatggcttattccctaggggatggcgcctcctctcacctcttctcctttgtcttccgctgcatctccatggtggaaaatcaccatttaaggaccccattgaagctcanagatccagccttcatagaagccccacaagcaagtttccatcaac

SEQ ID NO: 109698 - DNA, 420 bp, Glycine max
catgcaagcttatgccatatggcactggcattagaagatgtgttttctacttcctcataactcgtcactcttcctcctccttcttggactaatacagcttcatcgtcatggtgttaaggtaccaataattaactactaattgcttatcaaagattttcactttggcttttaaattgcccggacaaaatttcttcgtaagtatttaaaaaaaaaaattaatcttttcttataaactaatattaacttatgtatctcagtttttcaagaagttacataaaaataacttctaacaaaatttaagaaaaattaatcctttaatctctatactttctgctagatgtaatcaagatatttgtagttatatatgtatcgatgaatttatttcaaatttgaaatcacgtgaattcaatactttctaac

SEQ ID NO: 109699 - DNA, 288 bp, Glycine max
  unsure (1)..(288): unsure at all n locations
actacgacactacttctctatctatatgatanggtcttaataattagtaaagaaattagggatatcacaatttatttacatacagttaatgtataacagaatgcaatctgtgcctatgctatattatactatgtaactatgtatatcataattntcttagtctagctaacatctgtaanttantcaatgtaatctcntgtcacttagttgactaaatctattatgtgttcacgagtgatgagtntaattgaagcatctgagtaatctgaacattcagatacatactac

SEQ ID NO: 109700 - DNA, 323 bp, Glycine max
aactcgtcatcagtcgagatgttgaagttgatgagtatgcttcttggaattgggatgaaaaaaaagtgaagaagaacgttcttatacccgctcaactacctcaagaagaagctgaggaagaagacccaagtgaaccaccttcacctccaccataacaacaagatcaaaaactatcatcaccagagtctactccaagacaagtaagatctttggtggacatatatgaaatcagtaacttggccatacttgaacttggaagctttgaagaagcgtcaaagcaggaagtatgggtcaaggcaatggaagaagagatacagatgatc

SEQ ID NO: 109701 - DNA, 159 bp, Glycine max
gcagtacgcgttttttttaactgcagtttcgtatttgtaccccaacattttcttctaatttagagggtggattttctgccgctaaattgtagtacagtttgcggatcgtttatagtacagatttgccgggtattttcgctgctatcttataccgaggtt

SEQ ID NO: 109702 - DNA, 338 bp, Glycine max
tctagcaagagggtcttcataggcattcacctattcatctgctcccccgaacacaaagttcaagaacaatacaagatccaaacacaaacagcaaaccgggagtgagttatcacatttctaactactagagaaaaacaacacaacatatagtagccaaatacaatttacttagcatatctcacattatttcatcactttgttgttcatcaatcacacttttcatccatcaatcacacctttccaacatcaatcacaatacacaggaatcacacactccgatcaagacataataacacatcagtttcataaatacaattagcaagcgtaagccaacagta

SEQ ID NO: 109703 - DNA, 129 bp, Glycine max
  unsure (1)..(129): unsure at all n locations
tcagtagtagaacaattggatttgttaatacactgattcttgatcttannaatattgatgcactattgatgtataggatcacgctatgntattgctatgctctctgcctaagagttactctcatttcaa

SEQ ID NO: 109704 - DNA, 241 bp, Glycine max
cggagtgattccgaaggttcaccgtcttgacgtcttattcgtcttatcgtcttagcttcatgggaagtacctcaaaccaagcctttcaattcattctatgtacccgcgggggtccacatttggtttcatgtatttttattctcgttttcatttactttttatacccccttttgacgtgcttaagccatttatttaagtcatttctctcttaacctaaaaataaaataaatttccactgatc

SEQ ID NO: 109705 - DNA, 301 bp, Glycine max
tcaaaaacttcatctacaacataaaaatcacctggaattttattaaccaggtcatccctttctaatctggatcctggtggtcagcaacctaccacccatcctgaaataagatagaaatgaaatatcttatggaaaaaacaaaacaaatatactttatgtattaatacaaagataaaaagagtgtacaattcactagttaattaagtgaatgcctaacaaaatgaacgctgctgaaggaaaacaacaatagttactagttaggaatgggtaattagcaagcctatagttcatacaacttata

SEQ ID NO: 109706 - DNA, 135 bp, Glycine max
aaagaattaattacagtaatgcctgataactgtgactatctaacgctactatgggaacaatgccaggggaggataagacgcatgaggtcccaagatgcataatcgcaccccaaagggtcgttattccgatcgctg

SEQ ID NO: 109707 - DNA, 365 bp, Glycine max
tatacgactcaattagacatccgagtaaaaagttattgtcgtttgaatctgctcatagcttcaacattcaatttcgagcatctcaatatatgacgggactcaatcagacatccgagtaaaaagatattgtcgtattaattggctcagagcttctacattcaattaggagcgtcttgatatatgacgggactcaatcagacatccgagtaaaaagttattggtcgttgaatttgctcagagcttcaacattcaatttcgagcgcgtcgatatattacgggactcaatcagacattcgaataaaaagttattgtcgtctgaattggctcagagcttaacattcaatttcaagcgcctcgatatatga

SEQ ID NO: 109708 - DNA, 252 bp, Glycine max
tatctagcttgcatcacaatactttctcgtgtatgtccttttagactaatgagtgacttacataacaatattttgtgtatatcgaattaacctaatgagtacttacatacaaacttctgagtgagtcgattcaactaatatgtgattacataacacatatttatcgtgcatatgcgaaatggactaatgatggacttgacataacaatatttatgtgtgtatccaaatgactaatagtacttacatacaaac

SEQ ID NO: 109709 - DNA, 353 bp, Glycine max
aaaaattctgtatgattccaattgatattctcttttcatgcacagttttatgtgtttggtccttgaatgataataggtgcacacctttacgtatggtacattatattaaagctattattttttttctattttcttatcagatcatataaaaaaatatatttacaattatcttttttgactctctgggtgttaattttattagtgtccactgtccaccaaactttttcttgttcattagtgggatttaataacagcaaagggtgttaaataattatcactcgcaaaagcacgaatataaggtctagacctatatctgtgtactctatagaataataaggcggcattcagcacat

SEQ ID NO: 109710 - DNA, 298 bp, Glycine max
  unsure (1)..(298): unsure at all n locations
gattccacctgcatataccttgggtctttcanggcctcacaattnccacacttgcgtgcacacnntcatgctctattnnctgaactcatcttggtattgtgatgatgatcttgtattcttcttagatgactnttatgtgacaagagaaaacactaaagtaattgttcttgctcntagttgaatgaatgacgaaatgaaatgaacgtggtctctattatatatagagaagcacatgggacaattaaagttgctaaccagcggaagtaaagtggtggtttttaaaagaacatgggtatga

SEQ ID NO: 109711 - DNA, 142 bp, Glycine max
gaggatagataacgagtacaatacaacctaaaagccaaaaacataataacatctgccctatgaatggatgaatttttcacagtttcaaattgcaagaatgctaacgaaatgtgggacactcttcgattacacatgaaggaac

SEQ ID NO: 109712 - DNA, 405 bp, Glycine max
  unsure (1)..(405): unsure at all n locations
tcagcattaatggtctaaaggtatttccttgttcggtggtttctggtatttcaagggtggaatgggaatgaaccatgccttgcattaaccggagtgaaccatacactactgatctaaagcttggttttctttgctggatgaacaatacactacgcatgctattttcaaagatgcgtgctttttcttggtttctttgctgcacaagtgaactaatggcatgttctaaagcttggttttctttgctgaaaataattaattagttttgcatttttaatatcacttagttattattaatttatggtttagtgttaaattaattttggtaaattattattttgtgttttagaataatagtgtttagttattattaatttacagnttaggtagataaattattatacatga

SEQ ID NO: 109713 - DNA, 403 bp, Glycine max
  unsure (1)..(403): unsure at all n locations
ccggtacatccaccatatataaatgagatcactcatttcaatttccttcaccagatgaacaattaacgaaaccatgtattagagataggggagcaacatgaagactaagctntgaagcttgaagaagttctttttttacatgcctaactctttgggtgacatttgtattgatggttgcatcttaatctctatattttcatatgtacatcatgcatcatcatcatgtaaaggtaggaagattgtttctaaagttagaagcttctttagtgcataaaactctttatttaatcgattacaagactatttgtaattgattacacaagtgtttgtggttacaaagggattctagtttaggtttaatcaattactggttaaccataaccgattacatagttcagttgag

SEQ ID NO: 109714 - DNA, 385 bp, Glycine max
aactatctcaatccaagcttatgacttgtacactcaagcagtgtcaagcttatgaacctattacacttataacattggtcaataagggagagaataaatgcaaataattatagaaaaaacattgaaacacttggggtcccaaatgaatgccccaacccctcacaagtcaagttgtgtcactcaaggcatgatttattaaggttatcacttccactcattcacacatttaagtccctcaaatgaactttgtttttaatcccatttttcattcaaaaaatcacataaagcatgaatcactaaggtcttttaggcttataacttgattgggcttgctacagatctttgcttttctagacaatttaaatcatccaaggatcaatgagag

SEQ ID NO: 109715 - DNA, 290 bp, Glycine max
cctgttgtatgtggaagctattatattgttgcttccttttgctttgataaaaaaatttcacgttatatcaaatggatgtaaaagtgtttttctcaatggatatattgaagaaaagatatacgtggagcaacctctatggttgttgacttcgatcatcctaatcatgtttacaagttgaaaaatgcactatatggattaaaacaagcacctagatcttagaattctcttgttctatccaaaaagagttgagatgtctatgatgagagaattgactttcttccttggacttc

SEQ ID NO: 109716 - DNA, 84 bp, Glycine max
tctatttcaccttttactaataattctaaatatacgatgaataccacaatataactcaactatctatatttgattttatagggt

SEQ ID NO: 109717 - DNA, 376 bp, Glycine max
tggctaggagaatggtttggactagtagtggcgtttgtgaagtgagcccaacaaaactcttctttgtagatatgtaggctcgatcacgaaggatgacatggtcactacctgccatattttcaattaactccatagctctatcgggtgtcttcaatttgatcttcccaccaacgaaggcatcaagtaactgcttcgaatggggtcgcaagccatcaattaaaatattgagttgaatcggctcgctgaacccgtgggtgagagtcttccggagttaaccatggaagtggtcaagagccttcacttagtgattcatcattggaacttggtggaatgaaaaagaactcttccctcccctcaatgggcttgggactctaaa

SEQ ID NO: 109718 - DNA, 379 bp, Glycine max
ttaagcaccgcagctgcaagcttgagaagtaaatgattttttttaaaaatagttatcctaagtatgaaaaaggtatttaattttttctctaattgttagctaaatacctttagttcttaaatagattttagtctttaagttttttgttaagtccttaatgaattaaatattttggttttatccttaacgggccaataatcatgtgattaaatgaagtaagaacgacggttatagaattctggagaagatattttgataacaggaaaataaaagggaagaaaactcagttcattaaccattgaactcttcctttctaggaaaaagaaccactgaactcaaggcgattagttaggatagttatcattaactaaataggtta

SEQ ID NO: 109719 - DNA, 414 bp, Glycine max
tccttaagtcacctgggctgcagccttaactcacggcttacagtcttagattgggagcccatccaattcttggggtcggactctcaaccacttatgatagccggcgatgaacccattacttgttcccctaagctctctggtcttttttcacgccgcatcccatgccttgcgaactcgttggagtaccctcgcgttgtggtcaccaaaaccccgtgcgatgaaaggcgggatgctttcgtctgatggcactcctctcatggggtagccaagctgtcttatggcgaggacgggattataattaatacaaccccttgttccatcaagggaacatttggacatccttcgcatgaaaatagaatcctgattctttcttccttctagcgagggaacaaattaacagacgcccctccatgc

SEQ ID NO: 109720 - DNA, 64 bp, Glycine max
taggccttgaactgcttgagatgcgtataattcacatcaacaggctccattatttggacttgtt

SEQ ID NO: 109721 - DNA, 260 bp, Glycine max
  unsure (1)..(260): unsure at all n locations
tgactatcatggaatgcttcaatcaatggccttcacaaaacatgcagctnttcaaagataggaacatatgttctagagccacaactganataagctagtaatgaatgacatgatatcaagggaaggatcatcaaccaaaacctcaccgtcattgtttcactcaagctcaagtgttgtggctcattccatcatatacaactaacacaagatcctaaccttgcatttcatctcatgccatacagaaataaacacacaaactg

SEQ ID NO: 109722 - DNA, 367 bp, Glycine max
ctgcagctgtagggggattttttttttttctttgaggggatttatgatttagtatacatgaagagctccttagttctcagaagcgatctaattgattactattgtggtaatcgattatatcaagctacaaagactctcttcttttgaaactagcttggggtatcgatcaatgcaataatattaccatttttcgaagagaacaaaaatctgttgattgttctaacacttcgtcattgattacttaaacttatgaatctattacacattgtgtgaacctattgcttctaaaaactttgagataatccatctatgtctcaagttgataaccactatgcctggtatagagactgatactaaacctcacccg

SEQ ID NO: 109723 - DNA, 369 bp, Glycine max
atcattatggtatctcaatttaataaaagaaattgatctttaattttaattaatcaaaatggaattgggttcaatcaaaatcattcaaatctaacaaagttcttggattaaaaattagagggctcgtattcatgatagaagattatgaataatgagacaaaacgttaatttataaattttacatctaaatttgttcttaaatcgcaaagaactatgggtgaataaagatatcaataaatccagaatagattaatcaatatacatgtaatagtttttattcgatacaagatgaatagatctccataaattgcatatataaaagatatatatggtggatgcaatcattgaactgactcaatcgaaaatttc

SEQ ID NO: 109724 - DNA, 123 bp, Glycine max
ggatggataaatatctggttaggaataaccagagcctgtcccaccatcccaccttttatgattttggacactaattccccatcatcatatttgacctttgggtaaaagcgccacctttattct

SEQ ID NO: 109725 - DNA, 368 bp, Glycine max
  unsure (1)..(368): unsure at all n locations
gctgcctctgttaaancattccagtagacatgctattggggttgccagggaggtctgatggtgtcagtgaaaaaaaccttatgatttgacacctctgtccttttctaaccggtggagggggcattgaaaaccaacattacattctgtctgttgctgctgcaggcatgtgcggtgcacgcgcaatactcttgcatacttgtcactcgtggagtgggcaagtattggagttgtggtgcatggatgaatggggttgtgtcgcggtgcgaaaattccatcttctttttaaatggatgagactntttgattcaagtcattgtcactatgacttcctgcctcttgaatcttctttgctttcgggcttatgattc

SEQ ID NO: 109726 - DNA, 200 bp, Glycine max
tgtcttggaagatgaaactgtagcctctctatagaagggtttctaccatgtattggaaaaccaaagatcctccaagtagattcacatggagaaatgtatctgtaatccgaataaatatattttaaatacaattattagatgatttacatattaaacttggctcatacatgcaatccagatatttcttgatttcatcattc

SEQ ID NO: 109727 - DNA, 388 bp, Glycine max
ctgcagctgctctaattacattgatgttgatttatgggattgtgttatatgccatttttgctttaagagtgatgtcccactggtaaaactaactttccaaatgtttgcctttccaagaatggccccgaagaagctagcctcaaagaggtccaagaaagacaaggcggcccaaagaactaattccgccccggaatacgacagtcaccgctttataagcgttgtacaccagcagcgcttccaagccatcaagggatggtcgtttcttcgggagcgacgcgtccagctcagggacgacgagtatactaatttccaagaggaaatagggcgccggcggtgggcaccactggttactcccatggccaagtttgatccagaaatagtccttgag

SEQ ID NO: 109728 - DNA, 244 bp, Glycine max
attgcaccaatcaatggaaggcagtgagcagaattttgcttctccttcttgggttcacggccagaccagcatcagagaggaagaatagggttggttttgcttccaagtgtgtatgggctgaatgtttgagaaagaagagagggatttgagtgctcaccaatttaggaagtgaataatgaagaatgaatgtgagtggggaaatggtgttggccctgtgatgttccttgggaaagaagggtggtgt

SEQ ID NO: 109729 - DNA, 358 bp, Glycine max
atgctagcatcatcccaagtaccaaaagagtatgtctaaccatgcccacgagataagattgtggacgagtattgctcaatatacgcgataaaagatgctagaggaagggtgatcgactctttacccaagaagcaaccatgtggatggatcggtttgctcttaccttgaacgggagtcaagaacttccccgcttgtagccaaggccaatgcgatggcggacacctactccgccttcgaagagattcatgggcttttcggctattgtcagcatatgataaacttaatggcccacataattagaaattcgttggaaactttgcatgggctctcagatcttgactagatacgaatttccttt

SEQ ID NO: 109730 - DNA, 91 bp, Glycine max
tttttacatcttcaaatcttatcctcaaatcctaatgggagttgtcattaccagtttatcacaagtagtctttcccgctacactcccaatt

SEQ ID NO: 109731 - DNA, 349 bp, Glycine max
  unsure (1)..(349): unsure at all n locations
taactcactttaaccctcctttaccacagaattcagacctaacctttcaactcttaaaggcttactctttttccactcataacatcacattctcactttctaaccctaaggtaactttacctttcatctttacagttttccataagttatttcagcatataaacatcacaaacattatcacaaaaaccctaaaacagaatgggtatgtctaactcatccaaacatggcaatttcaacaagccttcagcaaatgtcttcacaaataatcatcacacagcagaaacctagcaagactacccatcatatcttcccanaccccatacccacgaaaattaaaggagaaagaagt

SEQ ID NO: 109732 - DNA, 181 bp, Glycine max
ccagactgctaaagtctaaggagcgcaagaactttccccgaacacgtacgttagactgtccccaccttcaccatagaggcgtttcgagcacctcctaggcacattctgttcgagaatgcccgcgggccatgtctcctgcattgacaaaatctggtatcatctgcacagagctctactaact

SEQ ID NO: 109733 - DNA, 310 bp, Glycine max
aatttggtttggtaaagcataatgggtattggattctatctattatactagtaatatatatacattgacaagggtgtataaagtcttttacaaacatcatttaatttttgtggacttttatataatgtctaatatctatgcaatgtttatgtaatttacactatcgactcatcagaagtcattgtaagtatgaattttagtgtaaaagtcaatagagataccatacctgacaatgtgtgattgaataaaattgtaaaatctgtaaaaaaaaatattgatagaacatgattattaaacgtaagttatgttt

SEQ ID NO: 109734 - DNA, 200 bp, Glycine max
  unsure (1)..(200): unsure at all n locations
tcttctcttcntttcttcttcttcctagatggttcttgngttctgagccttngagtcatcaagcttatgtaaatgagcttcattcttcatcctaaacttgatttctcttcattctcttggtctagattctctaataacatcggaactgcgcatgttntactcatgacgggaaatttgaaaaccctgatattcttcattct

SEQ ID NO: 109735 - DNA, 346 bp, Glycine max
  unsure (1)..(346): unsure at all n locations
tcgtttacccactcattaatacaactagcttatngctagaaaaatcgagtcatattcatagttctaatgctttcaatgttaatttccttattgtggtaatgcttcttctgatgatgagatggcttttgatctgtggatgaatcttctccaccccgaaaaggatcctgcagtgcaagattgaccaaagttgacccaaaaaagtcattcgtgtccatttttttacaaggagtacacttttttgaatggaaatgaccttctaaggagactgcattccctactagcaatgtgttgattgatattntagccaaatcctattgttaaagggtaaaatttgcacatttatctt

SEQ ID NO: 109736 - DNA, 359 bp, Glycine max
ttttttttaatccaaacccaccctccgtgttaaaaaaggtaatgttacttgaaatacacttttgcaggctttaaatgactaacaagattcagatctaacaaaaaaaaaaagtgtaaatatgctaacggctagtatgaagtgaccaaaccaaaaaacaacatgaatatcatgtctgcaggccaggagccaaaaaatcaattaaaaactgggataatactcattaatcaacacgcacaaacataagaaatccagataagttaataaaaaagaatggttaagaaaagaaaacaagcaaaacaatgatactgagcaagtaggaatggtttcaagatgatgtacaacaagaaggcttgtttgtg

SEQ ID NO: 109737 - DNA, 316 bp, Glycine max
aaaaggacacctgacttctacaataccaataaaaagtgaagattatgggcaacaaccacaataactttaaactatcaattcattcttttatttccatatgaaaaattttcaaaaagcatggtgaaagtggtgagagaaagggcattgttgagggttccaaacaaaatggttggaaaaaatatataattcccacaattttgtctttggggtggtgattggaggagagggcatctaaacccacattttcttttgaaactacccaatctatattgcatagtaggtaaaatgtggggcctctctctttctttctctcagt

SEQ ID NO: 109738 - DNA, 260 bp, Glycine max
gatgacgataatggttttgataaaaacatttgtttgtatacattgaatgagtagagacatgtgttatctaaattgacatgtccaggattcacagcaactttttaatcatgataaccaaattggcatattttatatattaataaatcatgataattatatctatttgacttactctatatatatgcattcttttgaatcaacactccattattggtggatactttttttttttggaaaaggagtctgccggcaaatatttg

SEQ ID NO: 109739 - DNA, 423 bp, Glycine max
  unsure (1)..(423): unsure at all n locations
ctgcaagcttgtgaagggatggnnaatcgtttcatatttttaaagatggtttgtgttcgngcggcccgagactattggtaagaagaattaatggctcaacctcatagcagcaattgctgttactggcactttgccaaattaattgagtgcttgctagttttgttaaataccatacttatatggaactaacttttcttcaatatcagtagagacagcatggacattttggtgatcaatcactgcttttgaatgtagttgtctgatgatatgtgcattaattaagagctgatacttgcttaaattntgttatttagacttaagggttgtgtttgttttgaaggatgaaaataatattcaagatgtgggacccacacattcttcattctacattcttcataaaaaaataaatgtgttctgctttat

SEQ ID NO: 109740 - DNA, 245 bp, Glycine max
  unsure (1)..(245): unsure at all n locations
ggctggccaactgtgaaacttgattgatatatgggatatggcctctggtaatcgattaccaagggtgggtaatcgattacaaggcttaaaaataaagataggaggctaagatggtctctggtaatccaataccaaggggtgtaatcgattaccangcttgaaaacaaagttatgaaactaagagagcttcttgtaatccattaccaacgggtgtaatcgattaccaggctttaaaaaggaacctg

SEQ ID NO: 109741 - DNA, 304 bp, Glycine max
tgttccctaattaaaactatttacttttactcaattataattcctaatgccatctcttaatataatcaacagcactgattgattaagaatataacaacgaataaggaaaaaatcaactagttatcggttgcccctgtctctcatccaaaccctgaatcatttgaatcttcagttacccagcatctctggttaatttcacaaactcgcttatcttaatgaaaaagacaatttaaaaaggttcgatgcgccatattctataatgatgattgccgatttaagaaatattttttaggaactttgctaa

SEQ ID NO: 109742 - DNA, 354 bp, Glycine max
tgtatgagctaaaattttctccctacacgtgaaccctaatggtaccagcttatgcttgcccaacacctgtatataattagataaatgtatattaatctaataagtgcttgtaagttcattctatgtaatgacattttttatacaccaaaggtaaaaagtatgctttatgctcacaagatactgtgaacgctaacacctgaaccctccgttcgtatacttgattcgattgacctatatgttaaatggttcttaaatatgatgcagaacttgctagcagaaaagccaagtacgtttggtaatccttcttaacatatggaaggaatcatggattttcattcattatgaagaccaact

SEQ ID NO: 109743 - DNA, 356 bp, Glycine max
  unsure (1)..(356): unsure at all n locations
atctactcgataattcaatgggagccataacctttgctaagtttcctccaccttcattttctgaggatacgacttgaacgcaacatgtgcatattatggaggaaccctggggcattccattgagcactgtatgaccttgaagcataaggtgcaaagtccaattgatgcgggctggctgaaatttgaggagaatcgcatatgagtcccgacattgacaagcgacaccacacatggngcaattttgaaagctgttgttagatgtctctaatgactcatcaagattntcaagtttataaaccacatatacaatgctaaataaaatggataaatctgacatctttgtccctcatcctctc

SEQ ID NO: 109744 - DNA, 386 bp, Glycine max
ggatcttaagcaccgagctcagctttagaactctagtactctaggaggactattataagaggtggtactactctactctcagaatttttcaaaaacttctcaggaagtttctcagaaacttctcaggaactcctatcttaataaacatggtacacttgttgaactttgatgaatgaaagtcttatgagacacacttcaaagttctacttctccccctcttttattctttcaatttcgtgctcccccctctctctttctctccctctttcttttcctccattgaagcatccttccaagcttcttatccaaagctcatcttggtggtgaagctccttcttccatggcttattccctaatggatggcgcctcccttttcctcttctcct

SEQ ID NO: 109745 - DNA, 235 bp, Glycine max
  unsure (1)..(235): unsure at all n locations
agcattgggaaagagaagggcccgcgttcattgttgcggtgggtggttcaacgtccgtggcaaactangtacccatttctgtcgggtgtgcatgagtggggtgatccgcaaatcatacaggacaacctaattcgcaaggctgatacgaatcaagttgatctgtatgttgatataaaacatacggatcaacttgatcctataagccttacggatcaacttgatccgaaagctcaaa

SEQ ID NO: 109746 - DNA, 306 bp, Glycine max
  unsure (1)..(306): unsure at all n locations
acacactntntcctagtcgatctctcacttaattctccatattctcaccctctgttgttgagtttatgccttcatttgaaataagttaatcacttatgtgagttctcgatttaatccctatttctgtcccccctttggcatcaacaaaaaagccaaagtggcgtatatgtcaaaaatgtacatacactactaatcatacacaagacattcattataaagtatataccaatcatgaagcatgaaacatgaatagatcanatatataanaaagatatagtcatataacataattcataattggtcaat

SEQ ID NO: 109747 - DNA, 405 bp, Glycine max
  unsure (1)..(405): unsure at all n locations
agcgaataagaacaaaatttcctaatttatgttctaatatgcatangaattaggaagcatcaacaagaatcaagccaaggctattgtgcaagcaatcaatggggcaaatcacaccaaaagattatgatgatggatggctcaaattctcacaaaggtaaactcatcactttcaaaactatcatgacatgtagaggaaaaacaaggatttcaaatcacaaaatgtcaagagacttttattatcagaacaattacccatctcttgaacatatcctataattcaaagaaaaatatgcaaaggtgtacatgcaaatagaattgacgctaaatattaaactagaaacccaacaaaactaacaaaactaacaaatttaacacaaacaaaactaacaaaactagcaaaaccaa

SEQ ID NO: 109748 - DNA, 214 bp, Glycine max
actctgaaagctctttaagacttctgagaactgacttactccacacttttatactatctacctcttggaaactctggagatccaagaactagctactcaccacttttatactactcactctggagaaactgactactctccccttatactactacccttgccatctgaaacaagaagctcttcagctcttaagctcatccagtaaccttctcta

SEQ ID NO: 109749 - DNA, 367 bp, Glycine max
cacccaacttaacttaacccaagtttcatgcactgcttgcgatttcatagatatgaaccatagctcttttcactatcacactaaccctataagtcatgaaataaaagttgagaaattgggctttttaaagtcatgatcaggttagggctgggtttcaaacagctaattaagcttgcggccacgagagatgttgatagcttcaacaaaaaatttagtagtaatataaagtaaataatttttaactattaaagagaaatttaattgttaatataaataatccttagttggtgatgacaaatttaataaatggataatcaacaaaccatgcatatattataatattagttattattttttcatcaattac

SEQ ID NO: 109750 - DNA, 249 bp, Glycine max
  unsure (1)..(249): unsure at all n locations
atttttgatgtaagctgtgattactgtagtgctgtggactattatgaaaaaatatgaaactttgagcagagctggtgctgccattgaattatatagcaaagtagggttctttcgattttattgatcatgacctcaaaactggatattatttaaaattatacaataacttaaccaattgttatatcttcaatgtctatacctanaattattggtacaagtaactgcctatgtatgggttcaaatattgta

SEQ ID NO: 109751 - DNA, 415 bp, Glycine max
agcttcatactatccttcccatgggtcagacccttctctttttctgaggcacactgtctttccaggatattggggtttggttgcccgaaacaattgtcctgttttgtgctatttaattctaggtgagatgctgtagtgatgtgggctgttttcaaggttcctttgttaagaggcgccattgtaggaggtgttagaagttccacagacaagtcctggttaatttgggcctgttctctatgcccgttaagcatttttcttctaacatagaatttagtctcagcagagccagggattgggcctgggggtctaaggcccatatcccccttgtccatacttctctcattctcaaaatctagccttcaaaacaggaagtacttgaatatttcatgaacaataattatttgtaaacaatcct

SEQ ID NO: 109752 - DNA, 414 bp, Glycine max
  unsure (1)..(414): unsure at all n locations
agcttattaatnttggaattagggtntctactttgaagttatnntaataatggggaattatttacaagcctttgttcatgggtggacagaccttacaaataattacccgattcccttctagttttttgaagttagaatgaaattttaatctgtagtttaagtttaagtttaagttagtagatgaagcaagcaaatacacttatttattttaaaactactgttgttatgattaattatttttaattttgttcatgtaggtatatcatgaattcaattattacagtgttgtatttcaatggaagagtatatgaagacaatgatggtgtaatatttgaaggcagtaaaaacgcgattcagattaaacgcagaattagtttcaatgctntgaaaaagaattggagataagggtaagtt

SEQ ID NO: 109753 - DNA, 372 bp, Glycine max
  unsure (1)..(372): unsure at all n locations
cattaaaacaaccatgggcttgtgaatggctacatctactttatataacaatcttttaaccctatctctcttcagcatagccacattgacgcttaaaacgaggcctcagcccttggcattacccctgtccttaactccctcaaggaactgaagcattccaacttgttcaatccctttgtcctcttagggccagcaaagaatgtgatgcctgctaccacgtgaatcatatctggacttgtgaaattntgggatatgatttctatatcctgctccattactagtaagatagtatttcaagctgccagcatcacgaggtaagaatacccttggtgaggtcggagccaatgatgaatcatcaaaagaatcgtaatt

SEQ ID NO: 109754 - DNA, 63 bp, Glycine max
tcttgggacttgctcaggagccctgtcaaactctgggcgtgtatttctcaatacaaactttga

SEQ ID NO: 109755 - DNA, 361 bp, Glycine max
ccgagtgcaccatccaatccttagaggacctcttgagagcctgtgtgttaaagcaaaggggtagttgggatagtttcttacccttgatagagtttacatacaacaatagttttcactccagtataggtatggcgccttacgaagcattgtatggtagaagatataggacacctctatgttgggtagattccagtgagagcattgccttaagacctgaggtagttcagcagaccacagaaaaggtcaagttaatccaagaaaggatgagagcatcccaaagtatgcagaagagctactatgataaaagaagaaaggatcttgaatttgctgtaggtgatcatgtatttctgagagtcactct

SEQ ID NO: 109756 - DNA, 357 bp, Glycine max
atcattggggaaccttcaccccaccaaaacacttaccaaaacttttcttcttcttcttggacaaagatggcaggcttggggtaaataaatttttttccatcaaacttggatacaactgtgatcatatacccatatcaactagatcttgacgggtattcaagtcatccttcgtcttgccttgaatgttaaagagcgtctcaatcacactgtcacaaacattttttcttcttttagttattttgtggttaaggaaataagatgggttgttgaatttgttgtattagcaaactgtcagaccctttaattgttataagatgaagtggattaagtgggctgctattagaaagcttaatttaa

SEQ ID NO: 109757 - DNA, 331 bp, Glycine max
aagcaaagtcagaaaatggcaagccaagagagaccaaaaccatgaccaaacttaactaacacaaatggaacgaaaaccccaactaatgattcacatgtaagggttgtgtacagcacaatgaaacaaacaactctagaatggttgtgatagtaagcaggggcctccttcattggcttcaatcactggactcctcttactcgagggggccaacaaacaccaatcaagaactctcccatgcgtccgtgactaggaaatggaatacgtgcacccattggagaaggaggcagccattctatacataattccgaatcgtatagaccatctcttaata

SEQ ID NO: 109758 - DNA, 397 bp, Glycine max
  unsure (1)..(397): unsure at all n locations
tacccactgttaatcagtggacgatgtatatcattcttatttgaagtcattccttatttttgattcttataacatgcctgtttgtggacaaagcaatcgaacgatatatttacttatgtaaatatcaaacacacaccttcatttgatttaattgcttagttgaaaaattanttttatttttagtattagaatgtgataaattaaagtaacataaagtgtttactcttggttactttaaataaataataaatagtgctttatatagatgaactattatttttcctcgacatgatcataaaaaaatgacaacctctatattttacaatcatatttcataatataaatgggaatactggaaacttaatactaactaattgggtatcttaataatcggatg

SEQ ID NO: 109759 - DNA, 328 bp, Glycine max
tataaatagaagtatgtggtaacacttgttgtaaccttgatgaatgagagtcttgggaaacacaactcaaagttcaacttctcttccccttttcctccttcaatttcatgctcccccttctctctttctctctctgtctttcttttcctccattgaagcatcctctcctagcttcttatccaaagcacattcttggtggcgaagctccttcttccatggcttattccctagtggatgccgccttttctcaccccttctcctttatcttccgctgcatctccatggtggaaaatcaccattgaaaggacctctttgaagctcaaagatc

SEQ ID NO: 109760 - DNA, 373 bp, Glycine max
cagctactacatccacctttttctttttgttgtcttggtcgcacccctggagaacttaagaagaaatggattagatccgattcgcgcctcggcaaagaatgtgtagagtcccaaaccctcggtgttttaattatgaaaaactttatgaacacaaatcataagccttctgagttcatgctcaccgatgagctcgcttaagtgcattcagaaaagagaagttgctgaaagaaaaactattgaagcaaactcaaggctgtcatgagtcactaaaaaagggtgaaatgcttgaaaaggtacaagaagacccaaagtatcctcggttgtgtaccgaaacgaagaagccagcatgctcactggatgaagagaaaaccct

SEQ ID NO: 109761 - DNA, 326 bp, Glycine max
  unsure (1)..(326): unsure at all n locations
tatgagctatggagaaaatgagaaccaaatctgatatatcttatagtgtaagagcgtctagtaaatggtaacatccttattaataagaaaagaaaatnggatcanaaaactattgattatgtctttgttggatattctttgcatagaactacttataaattcttggttgtaaatcttatatggttgaaacaagctcaaacaatggacaaaagttgatcaaatgttttattctcaataatataggaaatggtgatggaacaattgatgaactgactgcatttatgttatatggatgacaatcgatattgatgcatatgtttcataat

SEQ ID NO: 109762 - DNA, 402 bp, Glycine max
ggacctaagcaccgagctcagcttgaagaaatttgcttttccttcaacgacatcaggttgcttatgtcttacactgcatgacgtgtattaattagattcgggatgcactgcgctgaaattgggaattttcctcatacatttcctcgggtgggacagaatcgcgttattttgtcgaggttcaagatattgctttcccatattggagattcctgaattcattttatttcccaacatatcatcttgagtggatacgccaacttgattggcttattccattatagagaccgccatagaggacgtctgcttgtatcaattgcgttgccttcggaacatggtatagcacccttgggagggcctccaacacactctctgatgcatcctctttaacacacactctactat

SEQ ID NO: 109763 - DNA, 417 bp, Glycine max
accgcggctgcagctatccatatctaccaccaacccttttttttttcttttgctccacacaatttccaagggaatacctcagcatggacaccaaaaagggcgtataaagatgctaacaactttccaccatacaattattgatatgagctgcgtatatattaaatggattaaaaatttcttttcttatttctaacacatttgcaatttcaacagtgattgttgggaaagattgtccaatttgcagcttatgcatttgccccagctatattggtcacccctcttggtgctcttagcattattatcaggcatgataaaaaaatttagctttaaattgatgcttgactcttgggaaattttgatttttgacgtttgcttgcagtgctgctcttgcttcatattattttacgggagaggctc

SEQ ID NO: 109764 - DNA, 304 bp, Glycine max
tgaaaaaaaaaaaaaacaggtagttaggtaaatatacacacgttgttagttcaggaaccatactatttcattataataatttaaaacaacctatattgaatatctgtaaaattaataataacattcttctataatctcaaacatgtggaagataagaaataatatgatatgatatataatgataagatataaaacatttaatgaatatgtgagtctttaaataaaaacagcacgtattctttagtatataaactaattcgattgtattattattgaccaattacatatggaaccgtatggaaaa

SEQ ID NO: 109765 - DNA, 235 bp, Glycine max
  unsure (1)..(235): unsure at all n locations
tttactctcttgtgcctgggcctacccctgtgcttgtttgcctttttctaccngggccttgaggctatatctctggaatcttggtctcaacttacaaccttcaacctaatcccaggaaaccttttaatgtaatttaatttttcctccaaaaccttaaccctatgggagaagaattaatggcttttaagtgcctttctggttaactttaggggttttaagtttaagggttacaaat

SEQ ID NO: 109766 - DNA, 330 bp, Glycine max
tttactataaaatatggctacagtatgtgctaataaatcccaatcaaaagcagacatctccttgagatttaaaaaagacaaccaattgttttatttgagaacttggggatgtctggcctatgtaaggatcccagaccctaagagggttaaacttgcaagtagagcctatgaatgtgtgttcattggttatgctattaatagcaaagcgtatagggtttatgacctaaacgcaaaagtgatcatagagtcaaatgatgctgatttttatgaaaataaatttccttttaaattaaggaatagtgggggtacttcatccaattattttcctga

SEQ ID NO: 109767 - DNA, 313 bp, Glycine max
catcattatcacatgtccggctgatcacatccaactaacaaccctttaagacattatagttacactgcggacaagctttcatacatactgcaaaataatgcttttatcttcttgcgacactcacaacatatcataggactatcagacaaactaactttactttgaaacaccgcctttccctacgtccacatacacttacacgcactggcatcctacaaacaacgattaagcttttcaaatcaccattctaaaccacactactgaattgacaacttttactgtcttgtctaattctaaccaggtcaaacttcac

SEQ ID NO: 109768 - DNA, 332 bp, Glycine max
cagcttatctctataagacaggttattggctattgtcatgaaaaagtttgatgtgcaggtcccggctatttatagtattatttttcatttgtgaaatcttgccatgtcatcataatttactgattttttccatgttaagtatgtagatcacctaaccatgtggtcctggcttacattattcagatctcaccattgttattttgaaaactagatccctggtacatcatcaatatgaccataattcatgtccagttacccattttatgtgcattgggagttgaaacttaaaaaatagtttgtcctatcagtatcttaatcaaatactatctaaa

SEQ ID NO: 109769 - DNA, 160 bp, Glycine max
tctggatctattcctaacaatggtatccactgtatgcttacactcaacatggtgatgatagtaccattggaggatacagatattcaccaacatagcatggcgaagacaaaaggacaactatacacataactcgtgtgtcagaactaatatattgttggag

SEQ ID NO: 109770 - DNA, 351 bp, Glycine max
ttcgaatcattatcggggaataaataatttttttgcccgagggggcctaatgttttcctggccgaataaatcggaacatgccaatttcagccgaaacgacacaatgggttgagctcgcacggaaaaacctagccgaactacattgttagttttgtatgcaacaccgaaacaagaaaacttcccctgccgtaagataaaacattatcggccagcgagcgttttttaaaaaaaaaaatagcgcaatgtcggctgaagcatatcagtcggggccatttcacgaccgatgtcggctattaagttttctattcaatccctgaataacaattgcatgatgtcgattaggaaatgttc

SEQ ID NO: 109771 - DNA, 367 bp, Glycine max
ttttgtgtgcttaaagggagcagtttgtgtcctatatggatgttagttcaaggtggtgaattgttgggttgggacctaaatccatatggaagttattctgttatattttctgaactgtcctcttcctataaaggcaaagatgcccttgtattttcaaagattagcttccatttgtatactacaaccataataagaaaagctctctgttttccctccggtggatgtagccttgatcaaggtgaaccaacgaaggctgagcgcgctctttctctcttttcttctctttcacctttgatgcacaattctgtgtgtatgacatttttagtctgctgcaatatttgctgttatcttgatgttctcatcactt

SEQ ID NO: 109772 - DNA, 364 bp, Glycine max
  unsure (1)..(364): unsure at all n locations
actagcttattgtatgatctataattgggtttgctttatctatcaatgaccatatnggaatangctatatgggactgccagcagttgtgggaatcaatggaatatgatttataccactagttcggttaaagtctgcattcgaagtctatgacatcatcataatgtcttgcacatcaccatttccatataacctatacctcacaactagaaatggcaagaaaactcgtacccgtgggtacacgtatgaatctgttctgactttgacaggtaatacccgagttgatcggggatgggtttgggtcaggtattacttgtaaccacaatcggtacgggtgtgagtatgagatactacattcgaaatcta

SEQ ID NO: 109773 - DNA, 336 bp, Glycine max
agcagaaacggggcgacaacccaacccgacaaaaaaaaaaaaagcgcaaaagaagggcgaccctcgagcaaagacagacaccccccacacaagctcggatcaacgcaacaaaccacacttcccgcatagccgaagggagggggagaaacccccatcaccatatgaaaatgagagagctcagcaacccaacaacaggggccctaaagagcaaatacaattcgcagaaaaacggagggcaggcccctccaaacgtataaacacagaacggagaaggaacaaaagcacgggagaggactaggcaaaaatccatgaaacaaaccacacaaagcaaccccg

SEQ ID NO: 109774 - DNA, 321 bp, Glycine max
attattgccagggagaaaaaagtggagtccctgtctaaaagaagtcaggtagctcttgagcaggcgggttcaacttacttagtaagggttcaataaccattattaaatgagtatgagaatgttttgttttaagaagataccttttggttaaaaatatctcgtgagaagtgggttcgattagggagcaggaatacattgttctttcatgcacaaatagttattcgtcaaaatgtaataaaattcatggtctttgtttaccttggggtgaatggtgtactcatgatgagattttaaaagttgaagccatcaagtatttaaagt

SEQ ID NO: 109775 - DNA, 329 bp, Glycine max
  unsure (1)..(329): unsure at all n locations
ttttgaggccaagtggctggtgctttgcaccccttttatnatcactctcatttttggtattctttcgaacgtacaaacttacaattgtacaactatttcttccaagtacaatctacgatatgttcttttacttcaaatacnactacgtgcaacactttcattctcctacgattacgatgccacctgttctatatttgaccttcgattatattgcacagatcatgtcgacacctcagtgttataatcttccgcaattgttacccatctgacttcttatcaaaaactcaattgctcaacaatgctaattaacttaacacaactcaatacaa

SEQ ID NO: 109776 - DNA, 398 bp, Glycine max
agctcgtccacaaaaatattgtttttttagtttgtcatttcaatctctcactaagtaacatggatcatttacaaggtccaacgccttagaatgatcacctcttaaagtaaaataagaatcacttgataagaaagaactacgtaggtctgatttcctcatcgcaattgaggaatacgtaggagcaaagggaaacacccttgtcgaccacaaaaagagaaaaatattaaaagggtttaaaggattttaggactttaaagggaacataaaaaatcaaggtcatgtttgcacattctattaaaggctgcccgcccttgagacagacgtgtggggtgctaataccttcctcggcggaaatacactcccgaatctttacttaaaagttcgtaaatcgcgccttt

SEQ ID NO: 109777 - DNA, 398 bp, Glycine max
tgcaagctctaacacaatgacttacttttattatttctttgatagcccttttgagccttgattccctttccttgttttgaagctcactacaagccttaagtgaaaaaccatgatatcaccatatccttaatgaattttggagctttggaattgttttgggaataagtgtgggggggtttttgtttcattggataaactgcgttgttggctatacttaatgatgtattttgggccatactttatagtacattgtatcttgtgtaaatgttggacatgctgaatgaaatgctgcttcttcaaggatatacactaaataaaaaattcatattgaaaaagataaacaatcaaggtggatgaataatatcttcaatggtacaagaatgatgagactcttggtt

SEQ ID NO: 109778 - DNA, 175 bp, Glycine max
  unsure (1)..(175): unsure at all n locations
atcgattacttctctctcgttaaagtgtcaanggtgacaaaatacttaaccaatactaggccatctatcgatacattgtctcgagtgtntctaatgttgatgacagttaatcatacttaatatctatcgatacttattgaataccgatacttataattaatgatatatcagtata

SEQ ID NO: 109779 - DNA, 232 bp, Glycine max
taaatcaaaacactgtaatattatttagaatttaaaaaaagtcactgtctgacatgtaacaaactgtcgtgggcgatgaacatgtgcccatatctatcgggtggcttagacacttgtttatctgccatctctaactgctcaatggtaggattgctatgcaaggtaatatgtgtagaagaagtagctttttgtctgacaactcctggattactttgctgagcaagctgagtag

SEQ ID NO: 109780 - DNA, 346 bp, Glycine max
tagatttttccaattggaagaatttatataataacaccactttttggtttgagcttattcataggtcaaaccaaattattataatatactatctttgaacatttatttaatattcaatgcttaacacactctttgtttgaattggcaaaactacagatatagagttgtagacaaaggaagatacgtatagaacactaagaaagagagtccttgataaggaaggaagaaaaaaaaagataataataccaacaataattaacataaatgataattgtgtatttttcttaattaactaatctatggttcaaatttttattaattattgaatatgaaataaattatatta

SEQ ID NO: 109781 - DNA, 299 bp, Glycine max
atatgtgtgttaaaggtgcttgtagtcttatcatgatgatcataaacagttgagaaactgtaaaacactaccgttatattcttatgcgccatacgataatatattaagctctgtgaattattagttattatttattgacgatcacttaactgattctataatactcaccattatgtaagctacatagcactcaaattgctttcaatattgctttatcaacctatactttttcttcaccacaagctctactgctagtagtgaatcaggttttccagaagtttcaaaaaatgttattcgtg

SEQ ID NO: 109782 - DNA, 227 bp, Glycine max
atgttaagaatgaggtggtagggtttaataatagagtttatgtgccactaaatacaactaatcaacttggtggtatgtataagttagtcaagaattatttctgtcaagaatcgaacttgggaactactcaaaccatttaatcttaactttaacacattaatcacttgtcctcaatcacttgtgtattagagacttaagatacgaatcaaagaagtggtctcaagaac

SEQ ID NO: 109783 - DNA, 278 bp, Glycine max
tctctggaagatttagtgacttacaatataatgaaaggatatgatgcatgctctatactttatgataatactcttattaattttgtaccatatcaccatttaaatcctatgcatgagagaatggatttatatttaataatcactcagatcttgctttctctattatttaatggatgatatgtcttgaacatgaagaagcaatatttgaatcatacatacattgttgagagctgaataaatgttgaatgaaattgctttgaacaattgtcaccacaaca

SEQ ID NO: 109784 - DNA, 414 bp, Glycine max
  unsure (1)..(414): unsure at all n locations
agcttggagagggtgcttcaatggaggaanagatttatggagaganagagagaggggggagcacgaaattgaaagaagaaaaagggagagaagttgaactttgagttgtgtctcccaagactctcattcattaaagntacaacaagtgttacacatgcttctatttatagactaggtagcttccttaagaagctttcttgagaaaacttccttgagaagcttctttgagaaaacttccttgagaagctagagcttagctacacacacccctctcataactaagctcacctccttgagaagctttcttaagaagattcctaaagaagctagagcttagctacacacacctctctaatagctaagctcacccccatgacaaaaatacatgaaaatacaaaaaaagtccttactaca

SEQ ID NO: 109785 - DNA, 269 bp, Glycine max
  unsure (1)..(269): unsure at all n locations
aaataccttcccggaaaggccttttggaatggaaattatttacctttttggaaaaaaccttcttgaagggattcccaaatggttggtttggaaacctaaaaaaagtcccttaaacaatttggagggtcanggagcaattgccttcaaagataatcgtggaattcacaaaacaacccaaattgcccattctattataatgactataaaatgagggccacagatcgtgaatatctcatgccttttttttattttattttttgacaagtaac

SEQ ID NO: 109786 - DNA, 203 bp, Glycine max
ctcagtcaacagacccatttctctctttctctttctctctctctctctctctcttctctgagggccaagaagctgccattgaccgtgtggaaggaagaatattcaatttttccccctctgacggactagtgtttttttcttagagaatattatttatatatataaaaataattaaatatttaatatatgtatattagttcatg

SEQ ID NO: 109787 - DNA, 353 bp, Glycine max
cttcgatgccaccgtttctggcaggtgtgctttgttgccaattcgttaatatatgttttgggattgtttaatgtgttcgtgtcgtgtgaattgtggaattaaagggttgctggattcaaattggggacctgtgttccttgtaataagctgttatctgtgtacgctttatgttgcacgaagaggaggtttggttacccaattatcttatagttattcatttgattatagatttgcagagtgatgatgtatcttggtttgattttattgcatataacaactatgttttgagccactacgattggattggcggtaaaaggaatgggtatattgcatgaggttatatgctcaaacat

SEQ ID NO: 109788 - DNA, 348 bp, Glycine max
aatatggatattatgaataccagttgatttatgtgatatttcatcacaaacttccataatcgtatcattatgtgaacacacgagactatttatctgcaatctttaataagaatattatctgaaataaataatatgttaagctggaaatgacaattgatgactttatattttgtttaatcctcatataaagttgtttatagttctcctcataaaagactatctttaatgatttcatgctcacgtggatggtcatatattatgcataaatcaataagttatttaatctcacacacaattgactttaaactaattataactaaaatctaaactattttctattgaaaatct

SEQ ID NO: 109789 - DNA, 407 bp, Glycine max
  unsure (1)..(407): unsure at all n locations
agctntaatatgccctctcccctctgtgggatttcttcttcggcgaacgcgagatagttgtggcagtgatattattgaccagccctcagaaaccttctaccgagatgtcttgggccacgtgggcctcgttcagaacttttactagcagagccccatgaggctcggagctcatgagtaactccaacagccagaccctggccggggttttgttgagttgttcgataaccttgaattcgctctgctgaattatacggaggaactcgctggcttcctctagcgacacctcctttttaccctcctttttctccggaagacctttcgccagaatatctttattcgaagcgaggggtgctctgtcatcttgttcctccaccactattgcttttcccttgacgttcgggggttgg

SEQ ID NO: 109790 - DNA, 269 bp, Glycine max
  unsure (1)..(269): unsure at all n locations
gcagcatggcgcgcttagctctgcctcatcagaataacactcaggcttaacgcacaggcgcgtntagcctaactacaannaattaaaagacaatgagagaagtgagcttagcgcatctgggcgcttagctcaacacacaacatgggaatagcacacagatgcacttagccttattcatatgagaacatacagaagcatagtggcgcttagcctaacatgtcatgcttagcgctgaacanaaattctcanaatcttaatgtctgaacact

SEQ ID NO: 109791 - DNA, 131 bp, Glycine max
tttgagtgctcatatataccgattatcgaactcattaaatatttgttgatttgccaatttttctttccgctttattatacgactatcgactcagtaagttgtgtgattctcacttattaatcatcctttta

SEQ ID NO: 109792 - DNA, 265 bp, Glycine max
  unsure (1)..(265): unsure at all n locations
atcaaagaagaaaactaatatacctgaatatcctcgcatatcaaatccttctgagcagcagggactttctttcagttctcgtatgtcacatcgtgaataataaccgatagacacacaacaggaatagataacacacgaacggagtgagaatcattcccgcatcatattatacatctcatggtacatcgatcatgcatnttaaatgaatattatgcataacggatacagatattaatgacattcacatggaaactaagttcttgac

SEQ ID NO: 109793 - DNA, 273 bp, Glycine max
caccatgaaccaaatcaaaacaagaatcaaccattttatgattggtaggaaaagagaggcgattttgtttagctagaggacacacaacaatcttggcaagaaaaaatactaggtaaattgatacttttattaaaaataagaaatcggggaccacatctgataaatgtcctaatctagagtgccatctgtctacaagaagattgggatcattatgagagtgaatattagcattggtgtgacgagatgaattgagtaataaactagttgacttat

SEQ ID NO: 109794 - DNA, 261 bp, Glycine max
  unsure (1)..(261): unsure at all n locations
cagcgtctacaattttagtctcatacatgtgtcgcaacctgttgacgcatcagtaccaaatgtgtggagatatcccactataccgtgacgacgtatcgcgtcactcatctgcagcaaacgatcgcacgcataccaacgcagccatccatatctacttcaccacaggtcaacaccacattcatttttacgttcgcgttcagctgtggatacatctatattgtaatgngtgcacacattaccgctggttaccctataacacac

SEQ ID NO: 109795 - DNA, 358 bp, Glycine max
  unsure (1)..(358): unsure at all n locations
tatatggtggtcagcaaatgagcataaaccacaaactcttgtgacaggtacaaaatttctgattcaaggcccagctcggttaccaagttaaccaatgcatctagtttgccttcaagcttcttaatttcagatgatgcagttgaatttgtagctacctcatgcactcctctaatgactatagcatcatttctggtgctaaactgctgggagttggaagccatcttcttaattaaatttttggcttcaacaagagtcatgtctccaagggctccaccactggtagcatctatcgtacttctcttcatattactgagtccttcataaaaatattggacannnncctgcttccaaatctgat

SEQ ID NO: 109796 - DNA, 274 bp, Glycine max
  unsure (1)..(274): unsure at all n locations
tgacatctacataacgattgtccttaaacataactgggggatactatgttagcatagggagctactccggtacaggacttgtttgaaccaaatgaactttatctttccaactgcacgtatcaatgaaaggcgaatgttcctataatgactgaaaattcaaagactttgaagttggaaaaggatcactaattttgccaaacntttataaaaatccaatctttggtgagtgacaactatgaactgacaagctattacttttaaacccttactttaa

SEQ ID NO: 109797 - DNA, 336 bp, Glycine max
  unsure (1)..(336): unsure at all n locations
aatattctggaaggcccaagtgggcctggttgctatttgaacccccatttttactaaatacacccccttgctctttntttgtgattctttttccgtaacgttatgaaattttacgaatttcgtaacgatgcttgttttctttccgtaatgttacgaatccttacggattacgtaatcatcccttttttgccttccagaatgttacagaactttatggattgcgcactaacactttcttttaatttccggcatgtcacggaacttcacgaattgcctaacgatgggtgccaagtacctcaaagtggtcaaacgagggtcacatcccaacaacggatg

SEQ ID NO: 109798 - DNA, 366 bp, Glycine max
ctcataacatatgagaataagttaagaattgtacaataccaagttttgctgtagtttgaaaagcaccaaactatgtaccaatggctcacaatataagtattataaaaaatcccctgcattgacacaagagttgcaatttatcaataaatatagctagggaactagcatgatgttttccttcttttttctgtttatcttttccccaaatatttttttacagtggttctctagattagtatgtattacaccttagaaattggtatatgttgggattatttaaagttattacaaagaatagtttgaaattgttggagctaatagagaaatggactaaagcaatgagtcaacaaatttacatgaatcaca

SEQ ID NO: 109799 - DNA, 413 bp, Glycine max
cggaccttaagcacctgagctgcagctgatagacgagagacaacgtcttttctgctcattcataatcgcggcgacagccctgttacacgcggtgatttacgtcatcttacgtgctcaaaagatctgtcatactgacttttgaggcacgctgacgggcggaaatacccgagtggttatccgtataaaagtttttgctgtctggaagaggaaaaactctataacacacagagactaacttcgtcttctgtgcccttcgtcaatcgcgggcgactagcccgttaacaagcggagatttacgttttcttccgcgctcacaagaactgacatactgacttttgagtcaccgctgacgggcggaaatactcgatgggttatccgtttaacaatttgctgtcttgaaaacgaaaagcctg

SEQ ID NO: 109800 - DNA, 252 bp, Glycine max
tcagtgaattgagtacgctgcaattggaaaacaataatctctctctctgcacatatagatggagctgtctcattactgcaaagtctgactgtaaatctatgtacccttctgctaatccatcttacgctatcgctctctgctttgtgctgtatgacttctgaataaaaatagacttcaaaagaccttcggcctcacttctactatagggaacaagtcaaaatagcaatggctaaacagccaatagctaactaa

SEQ ID NO: 109801 - DNA, 259 bp, Glycine max
acgatgggcgagccaaaagagacacaagaacagatgaaagccgacatgtcagccccgaaagaacagaaggcctccatgagggaagccacggtaggaatgaggcagctcacggagaaaaacgggccaccgctgccgttgacaaatcggctgccgaagcaaacccaaacactcttggcaactgggcaccatcctccctcaaacaaagaagacggggaaggcacacactggggcacgatggcaaccctcatctgggaacaac

SEQ ID NO: 109802 - DNA, 76 bp, Glycine max
tggtcattacttattcgaatacactatttatttgaaatcttcaccagatgtatgttttttagactacatcacactg

SEQ ID NO: 109803 - DNA, 367 bp, Glycine max
  unsure (1)..(367): unsure at all n locations
agaaaaatggttccgacgaccattcttgtccatgaccggcaacaaaataccacaatatttttcagttaaaaatgtgtcatctacttacacaaccggtttgcaatattaaaaacctctaatgcattgcttaaaagcccaaaatacatgactaagaatcaccttagaagagtcatcctcaccatcctccattgaattggatgttntgtatntaacaagtctacctggtagaaaatgttgagtagatccatataggcaaataactgtatgattcatcctgactttcaaatgcaatttagagtgctttttgttagttgccatgtcttttgtatgtcacagacatataatcaagtgttgagaatatctgcat

SEQ ID NO: 109804 - DNA, 391 bp, Glycine max
agcttgaagcatgcaccatatgcataaatgcatattgtgataactgcctaagtggctgatgactggatatttatacataaaacgagggcttagaatggtctctttctttgatctctcaatcgtatcatcaatttaaattaatatgatcttgtttcttagaattagttgacttctcttctcatgcgccataaataattactaataaacctctttgagattctaacttttgatcagttttcctaccgcatttatatttcattttttaattatattattaatatgaaatatttattaacttattgatgattaattttaataaaaaaactgattgatctagcgggattcttctcctcccaatcacatgtatcattaggaccaatgatttcttcat

SEQ ID NO: 109805 - DNA, 274 bp, Glycine max
atacctttagtacaagttattatagaaaagttgcaagtttaaaagaagtgcaagttatgctcctcacttcatgacatatgaaataatctctgatgatagagagcattaacccttaagaaataatatcaaaaatctttatttaacactcattaaactctttttatcttttttttatcgacatgatcttatactataatttttttactcttctatgagtttggtacacattatgcggtcgtgaacattaaaaaacgaacaattaaaggagcccttt

SEQ ID NO: 109806 - DNA, 226 bp, Glycine max
atgaaatgggcacgtccttacaataggaattttgctcctactataagcttgaagcaaggggaaccctttagctcccttactctttaatatagttgcacaaagcatcacacgattgatgagggaagcagtccataaaaatttttatataatctatatgactggaaagaaaaatgaacccattaatattttgcaatatgccgatgacacagtatttgtgggagaggct

SEQ ID NO: 109807 - DNA, 174 bp, Glycine max
cactgaacctttcaaattagctactcactaaaataaacagacgattgccctgtcttacaaacatagcccagaacctccacattaggctttgccattactcaccaaaggaagatatacgtcaagctatttgagaactagcttctacgtcaaaattgccacattaccaacgaggaa

SEQ ID NO: 109808 - DNA, 291 bp, Glycine max
agctttgataatgtcgatattaaatcacatgtttgtcatcatcaaaagggggagaatgtgaatgtatgtatacatgattttgatgatgtcaaagaagaatctaagaaggttgcttcaaatgataagcattttcttcaagaataattcaagattgcttcaacaaacaaatccttgtttcaagattcactaaagaccaagtcttgccttaaaacaaagtgctttcaagacatgcaaggctctggtaatcgattactaggaagtgtaatcgattaccagaagacagggttgaac

SEQ ID NO: 109809 - DNA, 376 bp, Glycine max
  unsure (1)..(376): unsure at all n locations
ctatcgtagccttcttcatgtatcctcatgagctcatgcatctgttctaacatcatctgctcaaagaggcttangggcgtttatctgcttcttcttgttctgtttgatcttttctactattctcaatccattaaacccagcttcttcagacttgatgtacaccatctgcctcaaaactatggtcttcacttcaaactctacctcaacaaaaccaacaacttcctcttgtgtatcaacaccaaaatagcaaagaattctggagatcaaaactgcataaggacatctgatagagccaatccttttcatcttctgtagaagcaagcttcatgatgatgaatgaagatgattcaagtagttctgatgatgacaaagatga

SEQ ID NO: 109810 - DNA, 292 bp, Glycine max
  unsure (1)..(292): unsure at all n locations
agctttaatgaggtcctttaattttgattttccaccatgganatgttgcgtgtagacaaaggataacaggtgagaggaggcgtcatccactagggaataagccatggaagaaggagctttcaccgcctagatgagccttggataaaaaacttggagaggatgctttaatggagggaaagaaagagggagagaaagatagaggggggagcactaaattgaagaaaaaaaagggagagaagttgaactttgagttgtgtctcacaagactctcattcatcaaagtnacaacaag

SEQ ID NO: 109811 - DNA, 292 bp, Glycine max
agcttctcaaggatgtttttttaagaaagcttctcaaggaagctacctagtctataaatagaagcatgtgtaacacttgttgtaactttgatgaatgagagtcttgtgagacacaactcaaagttcaacttctctccctttttcttccttcaatttcgtgctcccccctctctctttctctccctctttcttttcctccattgaagcatccttcccaagcttcttatccaaggctcatcttggtggtgaggctccttcttccatggcttattccctagtggatggcgcctcc

SEQ ID NO: 109812 - DNA, 291 bp, Glycine max
agcttggttttgggcaatttctttcccacctgacgtccccaaggtctcctgacccccgcgacatatctccaggtaccactctgtggtcaacaataaaagcaggaagtttcacccttcaacacttcctcatctcaagcttgtaggattatggggtacccatcacatgtcgtactaggtggcggtcgggcgatggtgcacaacaagctttccacatccacaatgcgcgcataaacccaccatcccctgttgcccacctccaactgagctcacgtactcccacgtagcccatat

SEQ ID NO: 109813 - DNA, 290 bp, Glycine max
atcttgtccgatgggtctttattgactctgtcactgagcagaccaaagcacagtgcatgcaaatctgtattgtattcgggcctgtggctcatggagaagggatgatcgatataggggatgaagggaacatatggaggcgcgtcagctttgtcattagaaacagctttcactaaaatggtcaaaaggaggagacaaacatcgttgaaggagaagtgttctatgaagacaaaggcagttttaaatcacctccatccatgtttcgtgacaaggaggtgatggggctagtggac

SEQ ID NO: 109814 - DNA, 314 bp, Glycine max
acacaaaaactcaactgagcagagtgtctgaagctcaagagttggattgatttacacctgacggaagagacatctccacttgattttgcatctttatctttgtcttctctttgatgattaaaaagaatcctgcgtatagacagcttactcctctattggatccttcccgtacgtacctgaggtacatatactactatctatttaatgcgggtgatgtgaatactctatgctatatgcctttcactcccatctgcatctacctggatcaccgagatgcatgctctgttacgggccttcaataatggacaccggtc

SEQ ID NO: 109815 - DNA, 290 bp, Glycine max
agcttttttgaaatttcttttttgagaagctagagcttagctacacacacccctctcaataactaatgctcgcctacttggaaagcttccttaagaagattcctaaagaagcttgggcttagctacccatacctttctaatagctaagctcacctccttgagatgagaagctagagcttaactacacaccccctataatagctaagctcacccccatgacaaaaaacatgaaaatacaaaaaaaaagtcctttactacaaagactactcaaaatgccccgaaatacaagg

SEQ ID NO: 109816 - DNA, 427 bp, Glycine max
acctataaatctcagctctgctagctgagatcagttatcctatctccgatagccaattgttgtgtcccgtccaggtaatcccagagaaaaccggcctcaccgtgatctaaaatgagaaaaaggagttgattcctactctaatgcagaacagttggagagtctgcatcgactataggaggctgaaccaggttaccaaaaaggaccattttcccccaccattcattaatcacatgctttaacgcctgacaggtaaatctcactaatgtgtccttgatggtttgtctggttatatgcaaatcactattgcttctgatgatcaagaaaaaaccacattcacttgccccttctgcactattgcctatatgaggatgcctttctgcttatgcaaagcccctggtgccttccacggtgcatgaatagtaatttc

SEQ ID NO: 109817 - DNA, 314 bp, Glycine max
gagcttttataaatatttatttttcatctctatctgcgcagatcaaatatatacccccaaattcacttgatcccgttgctttgattccattgatggatataaatctctacacgcgtttggaactctaaactcagtacctattatacatgacattaccgcctgcaaacactatttatgactgaaaatgaaagagagaactgaaataaaacaatcccgaatgtttatataaccaatgaataatgattcccgaaattgctgctattcggtgtggactacatgggatatccatccgattaaagcaggaacatcatcaa

SEQ ID NO: 109818 - DNA, 288 bp, Glycine max
agcttgacaacatttgtttttctctaaagaatatatactacaaagaccaccattggattcaaaaggaatcctaaggagttttgcatgagcgactaataccaggtgtatcccactatcataattgtctttgggcattttttcaagacctcctagtcaaatgagcttttttctcaaatgtgcaagtgtgaaacctcgagggttctctttcttttttcccctttttttctttttttatatatatatatatattttttcaactatcacaagcatgtgcgggtttcattccaa

SEQ ID NO: 109819 - DNA, 321 bp, Glycine max
ctttatcaagccatgcagaacatctgaattcatttggtatttgggaaagccactcattgttttcattcttaatgatgccaaaaatcctctttgttgtcttatgatccaattccaaagtaagtctaaaaaatactgggtggtgatacttcccacagcatgttatgtccaaaaaaaatattctcgttaaagtcccaaaaagagatatatataatctacaagatctcggttggagagctcaatttccttcaatgaaataatcaacaagatgcgccatgtcttcatcttcatctgcgtctcctccatcgcatggggcagctttct

SEQ ID NO: 109820 - DNA, 285 bp, Glycine max
agcttgcacttcatgactttcatttctagtaaagaattgcggttctgagctgcttgaataatcctcaagggtgatcctcaggtgttgctcgtctgccatgattatggtttcaagcaattgagtaccggatccccttagatgatggtgaatcaagtgataatgaatcataaaaatgagtttcttccttaagaatggatgccactgttctgtcctgcaaaagtttccttctcctttccaccctgatccttctcaacgtagctactatttctaagtccataggaacta

SEQ ID NO: 109821 - DNA, 378 bp, Glycine max
cttgatctagcttctgtcaggtagtcatgagagaaatatctttgtttttatatgacgctcaactgagacggaagagattcttgccttctctggcattctgagacgaatgaatggagattacctattcattgggatgagaacatgagcacaaattgagaagacctttctctcatatcggtggagaagatgatgcttgtaacacaacaacattgatgctcacactgattgggtcactttgagccacggacaatttggattttcatatgtgaataaaaaatcaatgtcatttaattctaattttaacggtcgattacacagctcaagtatggatgcccatatatgcgtcaaaaatggataagcacgtgtactactgcaatc

SEQ ID NO: 109822 - DNA, 289 bp, Glycine max
agctttagctacatttctttattttatgcaattttacaggttgatttgtcaagattgccaatgaatgctcttcaccttacacaccataacttctgtataaaattattcgcctgattaagctatttgaccaaaacaaagtgtgtaatgtttggcacttggtagttgcaaataggtggaggatactaaacgggttgtagcggtgatgataatgctaattatgtttttaggtggtgcctataaaagaaatgtttttatgtggtaaaaggttttggttcaatgtttatatacc

SEQ ID NO: 109823 - DNA, 472 bp, Glycine max
  unsure (1)..(472): unsure at all n locations
tcatgtgacaacatggtatgaaagataatgctaaagttgtctttatttataactttttttactaattttgtgttgtaattgataatattcttatatttaattccacaacaattcaatatatatatatatgtttcattaaatttgctctgtaaccacatcttttgttaatttataaaacattataatttgaattacttcttaatggataatattgattcatatttcattagttgactcatagcagaactgagataatattagtaaaagttaaatataattctaattctatatataatatattaaataataaattaatatacaccataattattagaaaaatgtattatatagattttaaatttgtataaaacgagtatatgacatcctnttgagataaaattcataatacacacaatgtttagagaatatatctggttgatctggcgagattatactttgttctatatatata

SEQ ID NO: 109824 - DNA, 309 bp, Glycine max
ccgggatccttaagtcacctgcagcatgcagctttgtttattagagcacgaacctacctgctcatttcaattctttatgtaaaaagttatctgtttattcctataaatgtttgtaaaactctcaaaatacgttgaacaccttgagagaaaatactaagtgctaagattgtatatccatctttaagatgatcgagtgttagtcaatatgcaaacaacaaatcttttgatttgcattagagttagcagtggtttgatcgaacaaaaaatattgattgtaacaagcttggtgtagaacttgagctgtagagc

SEQ ID NO: 109825 - DNA, 337 bp, Glycine max
gaggcttggattatgtttataaatatatattacatcattttcgtgcgtactttcaagaccattatcgtgagttctaagtctatacactaatctatcaaaaagcttgatactaaactagatttatattgggaaaacacgaaggtgattaaaattcatgaacaccctttaaattgtatagcgaaagttctcaaatcaaagatattaatagtgctttaaaactaaaatagcatcatattcatcattatgtggacgaaacttgtgaaagattaatgtattaatgattagataatagatgggtaagaaactatgttattgtgatggttgtgcgaagatatta

SEQ ID NO: 109826 - DNA, 283 bp, Glycine max
agcttgttttatcgtatatgcgagacggagaccaacatgctagctatcatcgccaagtaccaagaagagttaggtctagccacggtccacgagcataggatcgcggacgagtatgcccaagtatacgcggaaaaagaggctagaggaagggtgatcgactctttacaccaagaggcaaccatgtggatagatcggtttgctcttaccttgaacgggagtcaggaacttccccgattgttagccaaggccaaggcgatggcagacacctactccgcccccgaaa

SEQ ID NO: 109827 - DNA, 447 bp, Glycine max
  unsure (1)..(447): unsure at all n locations
ttgaatgctctattcaatggagttgacaagaatatcttcatactgttcaacacatgcacagtggccaaagatgcatgggagatcctgataaccactcatgaatgaacctcctaagtgaagatgtccagattgcaactcttgtgctccaaattcgaaaatctgaagatgaatgatgaagaatgtantcatgacttccacatgaacattcttgaaattgccaatgcttgcactgccttgggagagataatgacaaatgataagctggtgagaaagatactcatatcctgcctaagagattgacatgaaagtcactgcatagaggacgcccagacatttcatcattaaagtgataactcttggttccttcaaactttgactatgactttcgataggctgatagaaaacaatatttgctttctgtcatattaagaaaaaaatatttacctg

SEQ ID NO: 109828 - DNA, 290 bp, Glycine max
agcttgaaccaaaatcggtgagagtgtgaacttaaactgtgagtgaacgactagctgtgagaaataatctttgcatcaatatctgaattttagaatgaaatgtatgaatgaggacatgatgaaggtcgtgattgtgcgtatacaagccttttgaccaaaaagcttaccttgaattataattgtatcatttgcaccctttgtgagctgaatgattttgtcaataattgaaccctgaacctgaatgattatctccagataccttgtttagattctaggagagcatatggttc

SEQ ID NO: 109829 - DNA, 242 bp, Glycine max
gtcttgtaagggctctgtatgctgttaattattgccataaaacttcattaaacctattgggaccaatccttccttgaatgagcaactattttttctaaaattttcttaacttccctattagaaacttcattttgcccattggtctgaaggtggtaaagtgaagctaccttattttttgaaattgtaacgttggaggacttctgtgagttggacattacaaaaatgagatactctgtacttat

SEQ ID NO: 109830 - DNA, 314 bp, Glycine max
agcttatgcccttaatcattgccggtgctgaatgagccccggcacttcagggagcgcatatcactggttaaaaggtccttatttctgatcctgactcacacctgccacaattatttagaaacatgctatatgcaacgattatattttttacccacaactctaagtgaatgactatgcgttgacatgccactaaataattacaaatcccaggtccatcgtattataatcgatgtgacacagtcgcgtccaaacaaaattctttctaatcaagcccatgaaaatattcccaaaagccaccctcttataataatagc

SEQ ID NO: 109831 - DNA, 290 bp, Glycine max
agctttctagcttttcatttttttattttgatctccttttggtgctctaaattgtgggaatgtgctcaaatatggggggcaattttggtttgttttcttgcttgattgggttgaattgggggtttgtatgagatggccctaggcctataatgcattttgaagcaatgggacatgccacattgtccccgttctcttgctattaatgcctaaacgcgcgcccaccaagtgttcggtgaaatgcctcaatggcattagcgcgtggttttcgtagggaaacaacccgtggggca

SEQ ID NO: 109832 - DNA, 243 bp, Glycine max
  unsure (1)..(243): unsure at all n locations
atgctcataatggcttaaatgcgcagaatgaccacgatgcacactatgcctaactaatctatgaaaggggctatctgtttcacgatcaaaacgttgtaaatcacctggagtgccgctatccatgcacttattgtagcaaataatgtgtttctcaacaagcacctacaagggtganacactatagctatacttcgagtatatcaaaatgagctgaactcttgtgacgaacactccaacatcatt

SEQ ID NO: 109833 - DNA, 173 bp, Glycine max
  unsure (1)..(173): unsure at all n locations
aagcttagaagtannttctatatgttgtttctcttaacatagacttgggccgtaattcattggtgcattagactggttttcctggtgtggaagatttgttaatcccgcttcacaaattctcacagcatacaataccgaagcccgggaagccatataagatggtaaaagccctg

SEQ ID NO: 109834 - DNA, 288 bp, Glycine max
agctttgaaaacaattttttttggactaaagtcaatagtaattgatatcactaaaatcaatacacataacatgaagagatgataataataaagtaactaatatgagagtaatcaattgaaatgatatactagtatcgtctattatatattgaaatcctcttgttagaataaaaaataataagtcaaattcttgtatatattatagatatggtctttatcatgaatgagtttcaagagtgtaatatttttttcattgtgatgtaataaaaaacatgggacaatcattct

SEQ ID NO: 109835 - DNA, 354 bp, Glycine max
gtcatatgcttgtgtagccgatcaataaaaaccatgtggtagtagatctctgcattaagttgtctcgaactatctttaatatacatagagtgtaaactatgtcaaataagagaaatacatcaccactctcaatgcattggtaatatatcttctatattgttatgctacaaactattaattatataaatcatactcattgatggaaatacctgtccatctaaaagcgagtacatatcattaaatataaccactctaaccatttaatataaccgatattcttgaataaaaaataaggtatgatatattattctactcaaatcttttactcttcaagatatgaatactatgtgataa

SEQ ID NO: 109836 - DNA, 287 bp, Glycine max
  unsure (1)..(287): unsure at all n locations
agcttctcatcttttgagtttgcgcccatcangcgacagtacatcttgatatggtttttggtacangtcgtccctttatacttgtcgaagtccggcactnnnaacttcggggggataacaacatcgggtactaagcaaagatcagtcatgtctgcgaacggataatctccaaatccttccacggctctcaatctttcctcgaggagatcgagcttcctcctttcttcagttgccgggggcggtccttccgtggacaaaactattggttgtgtcgtgatgttgggctg

SEQ ID NO: 109837 - DNA, 259 bp, Glycine max
  unsure (1)..(259): unsure at all n locations
cttgtcttgctctttctaatcaagcccacccatctctaattcttagttataatgtggatgccccttacatataggaacctatatccccattctaataaggacctgtagacatagggacaccccnntttggctccctattgctattataatattagtaggcatgagtggcccttacttggctattgatgaagagaaggcttttgaattaaaaaccctcttataagaagttttctttggttgaggaaagcaataatgtgcc

SEQ ID NO: 109838 - DNA, 278 bp, Glycine max
  unsure (1)..(278): unsure at all n locations
taaccgatggcattgatacctccgaggaagaaacgacatctattacgccggtctccattttaacagagacgaccttctccatgacgcantaggcggagcgcatcaagccgttccgcgcgagaatgtcgaggatgacagagcaggaaatttcagatcgcttgaaacccgtttgcctctctgcccagcggaagaaccggagcgcgaccacaaggcggttccggaccgtgttaagaacccggaccacatattatggttcggcgaccgcggcatgaaacaga

SEQ ID NO: 109839 - DNA, 288 bp, Glycine max
agcttcctcgctattctttttagcctcgcttagccaatctagcttgctaagcgagcccttcagtggcatttcaacatcttcttttctttaggctaaaaacctaattaaatccaacattactcaacaaaaaatggagtttccactatataaattcacataagaataaattatttacaaatcacacaaaggaaaccataaattagaggtacattgctactttttcacctatttttaatgcagttaaaactcatgaatagaaattaacaataatcctcccccaaaaatgtg

SEQ ID NO: 109840 - DNA, 448 bp, Glycine max
gtaagcagagcattgagagagatataccaatgaggaatgtgattgttcaatggagagagagtggccacaagagtcgatggagagttgcaaggaagcttgatagacgaaggcattgggtttggaaagagtgggctgctgaataccccaaagcagcatggtcttttcagcggcggattcctcctcacctaccaccaaccgaacctcaggtccgtaagaacccaacttaccattggcgtgactgcttcctcttcctcttaattgttgttggccatgagtcctcgctctctctgtttcggatagaattgggtgtaatttgcggccttataagtatgggcgcgaaatgagaaggctcttgctttctgcccccctaaaagtgaaacatcttgtccccattgaagttgtcaaccgacttcaagttactcatgcatcctctgtagaatctgactat

SEQ ID NO: 109841 - DNA, 294 bp, Glycine max
  unsure (1)..(294): unsure at all n locations
agacangtattctttaaggttcttttgcgcgataaagacggaagggaattctaatttttcaacctgtttctatctcttctacaaactgcaataatactctttttaggccttcccaaaaataaaacatgtttccttattaattttatatgaaagttctaatttttgtgtctttatcccttgaaatatctctctattcatattttttctaacttgcctgctgcttgatcatttttgaggaaattagttgtcatttactaaaagataatgaacccaaaaattatatataaaaaagtt

SEQ ID NO: 109842 - DNA, 281 bp, Glycine max
agcttccatattatatttaatgactactaatgagtggtaatgactattaatgggtggtaatgactactaattggtggtaatgactactaaatgcattcttgatggtagaatgtctatatatagcatatgtgtttggttcttgagctcacatctttcattttcgtctgatattgacatgtgttttgttttgttgtttgtaacctcacatgtttgatacttgagtcttacatttggcattagagccacaattgcctttgccttgtccatgtacaattttcggt

SEQ ID NO: 109843 - DNA, 198 bp, Glycine max
ctttattacctttaagaattaacaatatcttgttgattaagagtatagttctgataagcataagcataagccacacatctccaaggtgtacacccgttaacagcgagcaatagaagaaataaccttggaccaccaacatgcatggcacacaacacccaatgggtgctaaccatccaacattacgaaccaccctaatgg

SEQ ID NO: 109844 - DNA, 290 bp, Glycine max
agcttggtacatatgatttatatactccaacttgagggggagtgttgaatattttagtatttatctatgtttggtagcttagttggtaagctttattcagaaggcagcagtgaattgtcactgttaatagtccgtctctctctctctcttgtgtcttgtatatatgtatcattttgaaatcaataaaaactaagagagaaagtgagaaatttctcaactcacctcagtctacaagttgttggaaaagtttgtgtggtttctgatactgcgatcctatgtgctgtgttaga

SEQ ID NO: 109845 - DNA, 360 bp, Glycine max
  unsure (1)..(360): unsure at all n locations
agcaagaatgaatgacatagtaagttggtaatatatatatctttattattgtatatatttgtatttttaatttgttgtcagntgccgctctctacacgcctttgtaatctacaatgaaatggttctttataagatacttattagttaataaccatattttatgcaagattgaatgtaattgtgagccattatttcattatttcaagttcctgcaactataagttgtacactgctcgaacaagtgtaccttatcttatgtgtgcaattcagttcgaaagaatatatacacttctgcatanggttccctanaggaggtgggtttgttatggtgagattggggaaatgatatatcttatcact

SEQ ID NO: 109846 - DNA, 288 bp, Glycine max
agcttggctttggtttatttttttttgatacatgatttgggacttgtaggattcgatttgagcaagattggatgaggggaagtgtgattttcgaaatctgcacttatgcagaattttgctgtcaaaataggtgcatcaggattttggctttgtgcagaaaaatgcttgtgtgtggttggctgtggaaagtctagtgcagaatgagttctggatgttttctagtagatcccaacggtcacaatgtaggcttatgcactatagacttccagtaaaattttggagtcgatc

SEQ ID NO: 109847 - DNA, 349 bp, Glycine max
  unsure (1)..(349): unsure at all n locations
cttgatgcaccttcatgacataatagntagactgcattcttgacttcatctttactatcaacatccatgcctacatataattctaggccacatataaggtcgacagcatctccaaaccgcatatgttctccttatcatgataactccagttgatattgctataatgtgatgcatcattccaaactggatattcaatacgctgtgcacctaacagtccaaaataaaatcaacaatcaaataatacttatgtaacattaaatacaattgtcatcaaataataaatgtattgtctaatttttttataccacatattataccatctgctgagtgaacaattttacttgttgaa

SEQ ID NO: 109848 - DNA, 291 bp, Glycine max
agcttaagctccttcaactgcttaaggctcttaatatttaaagagtatccttgtggaaccttaacccaacgaagacactgacaaaaacttatgttctcctttttggacaaagtatgataagctgggggcaagtaaattttcttcccatcagaccttggatgcaattgtgatcgtatccccatctcagctagatcttgacgggtattcaacccatccttcgtcttgccttgaatgttaaggagcatcccaatcacactgtcacatacatttttctccacatgcataacatca

SEQ ID NO: 109849 - DNA, 291 bp, Glycine max
agcttttgcctcaaaacattgttttttcaagagatcaagactttggtaattgattaccagacagtgtaatcgattaccagaagacaattttgaaaaacagcttttaacaagggttttaaatttgaattttgaatcatgtaatcgattaccagatgtttgtaatcgattactagcaatgacacttcataaaatactttgaaaagtcatgacccttcaaaatataactgtgtaattgattaccagaaacctataatcgattaccagtgaaaaatttcagaaaaagttttttga

SEQ ID NO: 109850 - DNA, 329 bp, Glycine max
taaccaaatgtgactttacaaaaatgttgttaaagctaaacatgctcatccttctatatttgaacttaaatatttcacttatgtagatttgagtggatacaaatctaatagttcaataccaatgttcatccaaactatggagcaacttgcattcctttctctttctgattgtcattttaataggatgatcccttacaatcttgcgaaccctacacaattgctccttcttgatttcagcatctatgctcttctatatgctgatgaccttcattggagttctcaacttccatcacatcaatactttacatgcgtgatgtgcaatttggtat

SEQ ID NO: 109851 - DNA, 291 bp, Glycine max
agcttgtacttgtacttgttattggcagattacatgcattacttcttcctttccaactcatcaacgtgagtgggcattttattctttttctataattacggggttaataagatgaaacaatagggtgatgaaacgaatagggtgtcctctcactgcttgaagcatccaatttttatttttatttttatggtagaacatattatcatatcttggaagcatcagctgtgactcggctaaaggctaccgcggtctttgagccagatgggcgccccaaatgcttgccgatgaact

SEQ ID NO: 109852 - DNA, 475 bp, Glycine max
  unsure (1)..(475): unsure at all n locations
tacggacctatgaaactaagctttattaaggtttgtccaattctctaacttgcctactctttattgagtnggtcgatgtggcattatatgctcctatttcataactctatatatcacacatataattactgattaactctaattgtcgaatatattatcttagtcttatcaattgggcccactttgactaatatcggtgtttttaattcaatctcacgataattataagcaatcgggctgagccaaattggacttgatgagagaagacaattttattagatttcgtctaatttcattgtattgcattcagctttatttatgattttatttcatttagaccaaataatgtatatgcccagtactttgagtgaccttatatatagcaccttggattcggcacggagttactatctatattcagagtttaggtttaccttgaacttggatacgtacatgaagcttttcatttttgctc

SEQ ID NO: 109853 - DNA, 288 bp, Glycine max
agcttttgatctatttatatgcaagaaataaaatcaatcagtcatgattccgaaatgaaaaataagaccataatccaaaatgtacgtaaccaaacactgcagtatatatactactctaatgtacaatatatctctgaaatgattcccattgatgatagcaccttaaagtacaacaaaacaaattcttcttgtccaacataagattctagcaagtacaagtacaaataagagtaaaatagaaaacattataacttactttatttttgaaagaaattacaacttccttgt

SEQ ID NO: 109854 - DNA, 341 bp, Glycine max
tcttagctctagatgatgcagatgggtgtgtggctacctcattcactcctctaatgactatggcatcatttctggcgcgtaacttctgggagttggaagccatcttcacaataaaaattctggcttcagcatgagtcatgtcttcaagggcttcaccactggcagcatctatcatacttctctgcatattactgagtccttcataaaaatattggagaagaagctgctctgaaatcttatggtgagggcgactggcacatagattcttaaatcgctcccagaactcatacaggctctctccactgaattgtctaatacctgagatatctatcctgatggct

SEQ ID NO: 109855 - DNA, 287 bp, Glycine max
agctttttggtggtgttctttaaggtgcctgttgatgatctccaatatgctgatgatacgatatttttcggagaagcatctatggcaaatgtcaaaactgtgaaggttattctcaggaattttgagctggtttctggattgaaaattaattttgctaaaagcaaatttggagttgttggtcaatctgaggagtggtgtcttcatgctgcaaactatcttaactgtgctttggttcaatttcctttatgtcatttaagaattctgaatgttgtcaatcccaaaagaag

SEQ ID NO: 109856 - DNA, 308 bp, Glycine max
  unsure (1)..(308): unsure at all n locations
tcttatacaatgatgagaagatatcacaacgaatntcatatgactattctaactccactacatcagctaaaaatgatctgttccaaaaaattatacaatgatactcggatcataaaaaacttttgacaaaataccttttttggcgatggagacctcaacagcctacgaaagctatcacagcgtagaaatgtgttttaccccacaacatatattataattgcgattctgataactggagcagaagatttggccatctgaagctttcgacaagaatccaatttgctacctttatggaactctcaaatctg

SEQ ID NO: 109857 - DNA, 288 bp, Glycine max
agcttcggaagaaagtgtttaggtacaagccctaaaggcagagcttgaaaaagcccgagtagttgaagagaagttcaagtccatagccatcaaagtctgaaaagagtatgatgaactaagggacgtcaatatggccaccgctgaagccttggaacgagaaaccaagaaggcccgaaaggaagaacacgtgccagcaaagttttgaggggctttatagggcagcaatagtaagctcaagctccgaagaggtgaaaggaatcatcacgggtcaaaggcatgatcttgaag

SEQ ID NO: 109858 - DNA, 273 bp, Glycine max
ctcttaatagcgagagcttatcccccattgcctaaattatcatgagtaacacaaataaagtgccctactacacaagactacttctaaatgccctgatatacaaggctgaaaccctatactactatgatggccaaaatacaaggcctcatagaaagaaaacatattctaatatttcaaagacaagtggacccaaccttgcgccatgggcgtagaactctaccttatgggtcatgagaaccctatggccttcttagcaactctggcccatcttat

SEQ ID NO: 109859 - DNA, 288 bp, Glycine max
atagctactaaccaatttatttggctttgtccaaggccataacagatcccctttgcaaataactataaaaacaagcctcttttggttaatagtgtataaaaggaccccccctacattatattagccatacataactgatcctttgacaaaacccttagggaggaatgttatattataaaccttgaggggaataaaacttaagccacttgaaaacaatcatgtgatggtacccaaccttcgtgattggagatctcatgaacaaggtacatattggtaaaaattaagcca

SEQ ID NO: 109860 - DNA, 371 bp, Glycine max
agtctctctatggctcgaaacagttgcctagagcatgttttgtatagattgcccacttatgaggaagctgggataatcttaatgttctgagtgatcacaccatgtttgtgacacactcttctgaatgaaagatggttgtcctaattgtcaacatggatgatattgtaattacccgcgatgattctatggaaataaataatttgaacgcatctcttctagagaatttgagattaaagaccttggaatcccaaaatcttttatgggaatggaggttgcactatcaataaacgtgtttgtggagtctaacaaaatatattctggccttctcaatcatactgggatcattggttttgcctgcattacttcatata

SEQ ID NO: 109861 - DNA, 285 bp, Glycine max
agctttgttctttttatttttgagaagttctgaactcatcacgttatctaaaaaaccttggggtggatccaagtgctccgatcattcatttgcatattcatgttttggtggcatactcaccattgtttatttctttaggaatttcatcataactaagaaagcacaaaggctcccctgtaagactcgatccaaaaaaatggataatgaaagagggcgtgcaggaacagatgaaggccgatctatcggccttaaaagatcaaatggcttccatctcggaggtcatgt

SEQ ID NO: 109862 - DNA, 338 bp, Glycine max
tctagaacgatgttaataaggagcacactcttacctcacacaagtgctataacatctatctacacttgctcacactggttttacaccgttggtttccaccgaatcaaaatctgaattctcaacacccaatagtgccctagaaacggctctaggttcacctaggtcatatggaaagaactctagctcagcctaacctctctcacgtgctctaaatgacatattgagctcacattaactcacttttacctacatctatcacagaatttatagctatccttccaactactcaagtgtcactctcattacaatcataacatcacattgtcacttctaaccct

SEQ ID NO: 109863 - DNA, 283 bp, Glycine max
agcttgtacctttcttttcttactttcaggaatggtgtgggttgccttctttgccgccatttacaaaagaattaaaccaaaagacaatgcaccaatcaaactagaacaaacattggataattaccctgaacattagaataaataacaagaaataaggtgcataaagcctaagcaaaaaaaaaataaaaacgaaaagaccatggaattgtatgcaaaattcgcttagagcgaattttttgaccgaaatccgaaaacccaattcatttcagtgatgagcatgcct

SEQ ID NO: 109864 - DNA, 317 bp, Glycine max
  unsure (1)..(317): unsure at all n locations
tatgcacggaatatgttattatgaaatagagatgtctcttaaaacaccatttcctaattaaccatgcattaagtgccatgttcaattattttgtcttggtgttgtgtgcttctttatattttagaaatgggtttatgatcccaacatggttggcttatggtgcctcacacatgcaactaagaatgtantgtgaagtttcacgcttccncctttttgtctttgttttgtcaagagacacaatgatgagcaaacatgaaaacaaatggtatgccacttttcagaacaaaaagttctttaacgcatatgcatgatgatgc

SEQ ID NO: 109865 - DNA, 283 bp, Glycine max
agcttgccttattataatttgttcggtctttagtgtcactcaaaatcaaggttttaattaaaagtgtaaagaagtattcaaaactgcaatctcagaaaaggaaagtaaactccaaaatttgacaaattacaattttcattagccagaaattttcaagatatagattaagcactcaaaacttatttgaacctcatgaaaacaagcaatatgactaataagaatcaacaacttgagctcttatgaccctaatatcacacacataaatgccctcataaattgagca

SEQ ID NO: 109866 - DNA, 370 bp, Glycine max
  unsure (1)..(370): unsure at all n locations
ngagtacaagactntgtatgaaaagatgaacgagtacatcttttatgaggcgcaattttatggaaatatgttcaacatactgcacaagctagattctcttgacagaatgtgagtttccgtctccttagtgctcttaagtatacatacatacactcttattttccattataagtctacgtactcattggtaatttttgaattaaaaatctctccaagctatctggttgttcataaccagaaaccaatgcgaaatacttctattttgatatcaataacatgaatattccccatctgaaaaacgaacaagttttaaattttctcatgtctaaccaagtatgttaatttatttgacataaattgttaggctaca

SEQ ID NO: 109867 - DNA, 289 bp, Glycine max
agctttcttgaaagaaatggaccaacaattttcgtccgcggaatacgcccccatctttcggcaatacatccgaagatgccccttcggacatgtcgtccctttgtacttatcaaagtccggtactttgaacttgggaggaatgacgatattgggcacgagacataaatccgctaaatccgagaatgggtaattgccaaggccctcgactgctcttaacctctcttcgagcgcctcaatctttcccttatcttccgcgaagggaacagattcttttaaaggtgtgggtgag

SEQ ID NO: 109868 - DNA, 407 bp, Glycine max
  unsure (1)..(407): unsure at all n locations
tgtactggctttaccctattcatagtgtacagggcctctaccttttccacagatctattacgcactgcaagagccaacctataacataggtgaaaatgtcactgaaaagaacaacatgttctgttataatgttgcacaaggaaattgccgtgcattctataaggtagattcacaaaaaaagacataaccttgtgcaactttctatggaattttaagcagtattactaaatatgtggcccatttattatacaaaaacatgagtgacatgctangtgcactcactaatgttgctggtgcacccaacaattctatgaaatggcaaaattgcccttaagctaaaatttaaaaagaaaatgtgctggccctttgttttcttcccacctttctgccttcttcttcttgcttca

SEQ ID NO: 109869 - DNA, 251 bp, Glycine max
  unsure (1)..(251): unsure at all n locations
taaaanaacgggaaaaacgagaggaaaggagggagatttgtggaaaaaggccaccgagacactagagacacgggcgaacaaacaggagaaaaagggggagggacaaacaagaggacacccagcacccgagagaacccgagaacggcaggggaaaagtcagagccgaaggagggaggaaacgagggcggacagacacaaacagagagcaggagaaccgagcagacaaagagagcgcaacaggggacagagag

SEQ ID NO: 109870 - DNA, 290 bp, Glycine max
agctttaacagtttaacattttttaacttactagtataggaaacttctttaattatattactcgtacttaaatgtgaggtgcacatgtgtttgagagtttcaaagatgaagaaggaaaattcaaggttaaaattagcaacgatgtgcaaggattgttaagtctctatgaggcatcatacttgagctttgaaggagaaactgtttgggaggcaaaggcattttcaagaacacatctcatgaacttaatgaaagaagggatagagagtactgaagtggcagaacaagttagg

SEQ ID NO: 109871 - DNA, 456 bp, Glycine max
  unsure (1)..(456): unsure at all n locations
tgccatacacacaagctgtaaataatcctatttgtctaattanaccacaaacattcatgcatttgttttaacttccaagcatcaagccaagggaaagcgattagatattttacctcgactggctgaaagaactcatcaacaacattctgcgcccttgaatcatctgagggtgaacaagcatccgaaggaaccaccgacgcatttgaatttgaatttgtaccgactccaggattactatatgaaggaccttgccgtttctgttgccttcgctgagacccataacgagatctcaagagcctccatgtgaaaacaatngcaacagcaagaccagcaactgcctcgaagagcgtaatcctaataccagaatatatttctagatcattgaaagaacaagctcaaaagatacttgatcattatacgatacgtttcctaaaatatatcctagcaacagtacta

SEQ ID NO: 109872 - DNA, 292 bp, Glycine max
agcttgaagaaattgctattgttaatgtgaaattatgaagtgatcttcaacaattatatgatgagtatgtggctttaagcaatgaagagtcatcctcaaatgaaaggaatgttggtggcataaactctttaactgtccatgtgcctaatacatctgctatgactaggtttgatcaattaatgagccttatgcatgaaaaggaaataattccaccaatgaaatcagaactagatgcttatcttgagaagaaaaatacttatattcctaataatggaaactcctcttttattgc

SEQ ID NO: 109873 - DNA, 438 bp, Glycine max
  unsure (1)..(438): unsure at all n locations
ntgatcatgagcaagctgatgttcatttattcaagcctctctgttttcttatagtttccttgcagaaagtaaactagcagtaaacgtatgcctggatcactatgacatgagaacaagagcacaacatttgcgtcctgggtataaatgattatacattcatctgaaaagcatgcatttttgtcagcttatttctaacataatgtggactaatattctaaaaaaataatatctattggctacacagctaaaatattgtcttattattgggacacaatatatgaaagttgtgttgatgcaatcctatcccgcaaaggcatttggtagaagactccaagtagattgggctcgagatccacggaatgccctacggttctcataaccttaggtaaatttgagccatggctaaaatgacccgctatcttgaaaatagaataggtt

SEQ ID NO: 109874 - DNA, 291 bp, Glycine max
agcttatcaaccaaatactcacgtttttttactcaaagtatattacaattacaaaacataaataagaaagatcttcacatctataaaaagacttaatgaacattaacagaaataaaacctaccagaacctgtaagtgaaagaaaatatacagacccatgtaaactatagaacatagatctaaccttttaagtggaaaataacataaacgtagaagtatgcaaatgaagatttaccaaatgaattcagtaatagcaactttacctgaaagtgtaaactgttaatgcagcacc

SEQ ID NO: 109875 - DNA, 492 bp, Glycine max
  unsure (1)..(492): unsure at all n locations
actaagcttattctgctagaacataccacccactcactaaggtgataatttccccagctgtgaatcaccatattctgaaaacctttattcttcaacaaccagtccatgaccttgagaggtgtgggcccccaatccatgaatctggatctcaaaaggatgggacaatggtcagaaaagtctctatctaacacaaactgtgtagtatctggccaaagagacagacatncatcttacagaaagaacctgtccagtttgctcataactgttccattgggtctacaccaagtaaagcatcttccaacagacctaacctcctcaacattcatgtcagctatccactaattaaactcagatattattggagcttcccacagattgagatgagctcaacctctcttgctgatgtcgtatataattaaaatcacccaatcaacaccaacggccatcatgataaagactttaatattgttaactcttacactggtctctctt

SEQ ID NO: 109876 - DNA, 288 bp, Glycine max
agcttgttacttgtttcttttttcacttcttcaactcttgttttttatatttcccacatcaactttcaaagtgcctgaattccgcaacagtaataccattaacacgtctttcttttgattcaggctttgtttgattgattgccccaatggccgcgtgtggctatatatctgctgccaacttcaatcatcttgttggcgccagaaacttatccaaattcagttcttcggatgccacaattttcgttatcatttggcgggagcgattcaatgggtcttagtttgcgaccc

SEQ ID NO: 109877 - DNA, 331 bp, Glycine max
tttatatgtaggataaagaactcaaaaatgatcttaaatgtcaaaattatgacacacttcgaatataaaatgatataattgtagactaacgaatttgctagtactaactaatgtgataaaatttctgaatttctataaagtactctaaataaatcgtctatataatacaccattaccccaagaatgctgcaactctggactgtgaagcactagagtgtaatgaatccttcattgagagccaatagaatatgggaggagatgcttgctgctccgaggtgattaacagcctattcttgctctacctatcaagttaagacttaagacccaccta

SEQ ID NO: 109878 - DNA, 285 bp, Glycine max
agcttgattgccctttattcatctttattggactcaacaattgctaagagaattgtctcaactttgtcaaatggagggagaactgttttgatgaccatacctcaaccttcaagtaggatgtattgcatgtttcaaaaggtgtttatgctttcaaaagggaaccttgtgtattttggaaaaggatctgaagctatggaatatttttctagatttggatatgccccaaccacggtcatgaacccctcagatttccttttgaatcttgcaaatggtatgttgtttgct

SEQ ID NO: 109879 - DNA, 288 bp, Glycine max
agcttcatgatgaatctttattgattcaaagagttttgatgataacaaagatggtgaaaaaaagctcaaaagtcaagaacacttcatgataacaaagatgatgatatcaagaatcaaagaatgagttcaagattgaatcaagtacacttcaaggattaagaggaaagttgaattcaagaatcaagaatcaagtttcaagattcaagttccaagaatcaagatcaagattcaagactcaagcttcaagaatcaagatcaagattcaatcatgataagtattaaaaagtt

SEQ ID NO: 109880 - DNA, 364 bp, Glycine max
gaccttaaaactcagcttttatccaggcaattcttggtggtgaagctccttctttcttgtcttattccctactggatggtgcctcccctctcctcttctcctttgccttccgctgcatctctatggtgaaaaatcaccattgaatgacctcattgaagctcaaagatctagcctccatagaagctccacaagcaagcttccatcattaggagataggggttcagcccttctggtacttcgtaatcacttaaaattagtgaggagagttgtttccgtgataaatatccaagccgaagcgctttcgtaacgttttcgtgagtgatttcacgaagactatcaatcgctcctcgatgttcgctcttca

SEQ ID NO: 109881 - DNA, 290 bp, Glycine max
agctttcactttttttattattcactttaatttgaacttgttctctctcttgacatgattaattacactccactatcatacattgatatatgccctcttatgctctcaatatcaactccacaagctgtagctaaatatcatatataaactaattgcaaatatatttttatctttaaaaatacaaatagctcctaatatttatgatatatcttcttatacttttaacatcaattgaacaatttaccaaaatgtaactaaatatcataaactaattttgaatttatattaaa

SEQ ID NO: 109882 - DNA, 325 bp, Glycine max
  unsure (1)..(325): unsure at all n locations
taactcatccaaacatggcaagntcaacatgctatcaacaaatttcttcacaaataactatcatgaagcagaaacttagcacaactacccatcatatctcccaagataccatacccacgaaaatcaagtgagatagaagtccaccccaacctgaaatctcgaagacccacacgtagagatgctcttcatgactccgaaaatgccctcctttcgcaattggagcagaaatgatggccaaaggcttgagacttgttgggcaacaatggtggatgagacaaaagacaaataatgctgcgtgagagagagagagagcctctgaattttc

SEQ ID NO: 109883 - DNA, 287 bp, Glycine max
agctttttgccagttgattttaaatcagcatgccatcgcggtcagttcagccaccgccggaatgcatatcacgctaatggcgttgaaaattggcaagggcgatgaagtgattacgccttccctgacctgggtttcaaccctcaatatgatttccttgttgggtgcaacgccggtaatggtggatgtcgaccgcgatacgctgatggtcacgcctgaagctatcgagtcagccattacgccacgcactaaagccatcattccggtgcattatgccggtgcgccagcag

SEQ ID NO: 109884 - DNA, 473 bp, Glycine max
  unsure (1)..(473): unsure at all n locations
ttcctgctcgtataaacgggaataaccaccgagactttcttatcttggtggatttcaaacatggcttattgtcctgcgagttgctgaagggctgtgatgacatggtcggcatcggcggttgtcatattctggaacagcggcaaagaacagatgcgttcgctattccattctgtattcggtaacgacagcgtgggaaaacgctcgcgataatatttttgtgtgtgagcggcgcggaaatgtaacccggtaccaatgcctctntcttttaacgcttccatcaacgcatcgcgactgataccacaacagngttcatcgacacgaataatatacagatgccaggcgtgaacgtgctgccatgcgggaaggcttaatggctgaaaggagagagctgccagtgcttgctgatattgctgggcaattcgcgccgacgggtgttgatgtgctctaattgactactgtgtcaagctatctcg

SEQ ID NO: 109885 - DNA, 282 bp, Glycine max
agcttcataccacagtattacaaaatctaggtgtccaacacccctcaattcaatgggttttctaggtttgaaaagtgaaattgagaatgagacaaatttgaagcaaactctcacctcacacaagtctataacatcaatttaaacttgttcaaactggatttacgcttaaaatctcaccgaatcaaaatttgactcttccacacccaaatttgccctagaaatggctcttggttcactttggtcatttgtttttctctctagcacagtccaagctttctcata

SEQ ID NO: 109886 - DNA, 280 bp, Glycine max
agcttacatttttaaagatcttcgatctccatgtttgcaatgtttgcgttctgagcgacttgcgaggcaaaccttcataactttattttcatttccatgttggcgaaaaaacaaatctatttgattgggtacattacacaacctggaccttagcatactttattcttattttatcttttgggacaccatgtatatcatgtacttactttttttggtcttctgatttgtcgctcacataggcttacatttttattgtcaatcctgtgttgtaaatggattc

SEQ ID NO: 109887 - DNA, 352 bp, Glycine max
  unsure (1)..(352): unsure at all n locations
cttgatgtgttctanaaagtggntatggaattcacataattgctttcataatcatgattgctcatgtaatacctctatgaatagctcatattcttgaaacatataacttgttatttactactttataatcattacttatcggtgctagatcaatcgatgaatcaactctcactgatgagagtgaatccaatgatgaacgtatcttcacttttagtcgtgctaaattttctcatatcattatcgtatctaatttccacattctttaaaatataaggggatctttggtcaataacattactcaatgcttcgagaaagtatacactttcgagaccgttaagtatactatactatt

SEQ ID NO: 109888 - DNA, 291 bp, Glycine max
agcttgttgcgtggtagtttattgaagatagaagggggacaaatagtacaattgtttttcgttgcaatgcatcctttgctccactacttgtatgattgagggctcttgtaggaatgttcttcctttctatctataagagcacacaaacttgaaattcaaatattagtgaatttgaaatcaatcaccggatgaaaattcaaatgataagagtttctagaacatgaatcatcctcaaaatgcttccatgtgtattgtgaaatcatatggacattaactaactttatataaagc

SEQ ID NO: 109889 - DNA, 407 bp, Glycine max
tgtcttctggtaatcgattacactgcctggaatcgatacctgatccttgcatgtcttggaaacaacttgttttaaggaaaggcttgatctttagtgaatcttgaaacaaggctttgtttgttgaagcaatcttgtattaatcttgaagcattgcttatcctttgaagtaacctttgttgattcttctttggcatcatcaaaatcatgtagacatacattcacattctcccactttttgatgatgacactcattatcaagcaaattctttttgacatcatcaaaacctgcatgatttacagtaaatattgcatgttacatcttgaatacagctctaataagactcatcttacagaagactccatatgaattatttaacggaagaaaacctaacatttcacatcttcat

SEQ ID NO: 109890 - DNA, 289 bp, Glycine max
agcttctcgatatattattcttttgaatcagacttccatttgaaaagttatgaccaattgaatttctggagagcttccgatgtgcaatttccagcgtcttgatatattatgctcctgaatcagacttccgtttgaaaagttatgaccatttgaatttatggagagctttcgttgtgcaattccgagcgtcttgatatattatgcgcctgaattggacttccgtgtgatatgttatgaccatttgaatttctcgacagcttccattgttaattttgagcgtctcgatata

SEQ ID NO: 109891 - DNA, 290 bp, Glycine max
agcttggtggggttgacctactctccatataattggcacaggcacgtgatcaaagcataaaacctcaaggccctattggacttctctgagtccactgggtgtctaggaggcactatccttgcaatctgatacatagcatctaaaatcagataggctacatgcatactcacctaagttaggatgacgtggaccagctgacacttcggcagggggaggtctgaattatggacgctggggaggatgttgctgaacaacaacatcatccaaatctgcgtgagggtggtcatgtt

SEQ ID NO: 109892 - DNA, 378 bp, Glycine max
aaatataagctgctctactatggactggaaacttaaggccacgttattgttaaattatgccacatgattatggatgtggaaaatattttggctttttgagaatacactaaatgggagatagaaaagtggtcagtaattcttctattgttctgctacctgaaataagaaacctagtgtctatgggggataatatatccctgatagggtgtctgtataaagtgctggcaaagatgttggctaatatttcaaaatgggttatggatgatgttatttccactaccctatctacttgtattttacggaggaaataggtggatggggactcattgctattaattgttcataagctatgggacaaaataactgttgtgtttaact

SEQ ID NO: 109893 - DNA, 291 bp, Glycine max
agcttatctgaagtatgtgtgtttaggaaagaactcacaaaattttcagtcattcaactcgctcaccgcgccccatgcgctaagcgagccataacctatgcgttgagcgagtagcatctctcgctaagcatgccaaccccttgggttgtgcatttaatagaatagggctaattgaggcaactcgctgagtgcgacgttgtctttcactaagcgcgcctatgcgttaagcacaaaaggctctctgcctggacctttatgataattgggctaagcgggtcatcccgctaagcc

SEQ ID NO: 109894 - DNA, 290 bp, Glycine max
atcttctggtgggacattttgacttgctttccaatctgacattcaccacagattctgtcttcttctattttcagattgggaatgcctctaacagcacctttgtcaatgattttcttcatgcctcttaagtgcagatgtccaaatctttgatgccatattttgacttcatcttctttggagactagacatgtggaggagtaactggtttcttgaggtgtccataggtaacagttgtcctttgatctgctgcccttcattaagacttcactcttctcatttgtcaccaagca

SEQ ID NO: 109895 - DNA, 403 bp, Glycine max
  unsure (1)..(403): unsure at all n locations
tctacactttgtacaagaatgaagctctgataccacttgntatatctttggcctcagatatcttaagaagtggggggttgaattaatatagtccaaactgtttcccctaattaaaaaaatctatttcactttttactcaagttatgaatacccttaatgacaatctttttaaatattaattcaaatgaagcaacttgaatatgaatataaagcaataataaataaaggagattaacggaagagaaaatgcaaactcagttttatactggttcggtcacacccttgtgcctacatccagtctccaagcaacccgcttgagagttccactatcttgtaaattccttntacaagttctaaacacacaaggacaattcttcctttgtgttgagagatcctttacaac

SEQ ID NO: 109896 - DNA, 155 bp, Glycine max
agctaggaacatcttctctttttatcgaggaaaaaaacctttagggtttaactcatattccctatgtgtactcatcgcgcaattaacaatattatagttcgcatattagagtcattctctctaatctctcctacatcactcacaattcctatata

SEQ ID NO: 109897 - DNA, 291 bp, Glycine max
ttgcttgcatgcttggcttaggtttttttcagggcctgattcctgatttgcggacttgttgtgattagatcctgagcattcactcggatgatgggacagtgtggtttttctaaaacttgcattatgttgctgatttttcgctgtgaaaattgagctatcatgatttttgcacaagtgccataacaattctatgtttttcgcctggttgtggaaagagcagtgcataacgacttctggatgtttgcttgttgatcccaacggtcaaaatgttggcttatgttctagagactt

SEQ ID NO: 109898 - DNA, 333 bp, Glycine max
  unsure (1)..(333): unsure at all n locations
tcgtcctcatatccctcttgtcggacaatgctcgaattttatcttccctcctangattagactaacttaaactaagcctcattctcagatcccacatgatggactagacatagctcagatagcccacgaaagcgtagaccaatttagcccaaactttctccacagatccctctggccggactagacttagacaaaatagcagtaatgaaatagcattcttaaaaccaaaactcaatcccgcgagccctcttagaaaactaacttctacaatctgcctcactccagctctaaggcaacaatacatataccaatgctaaatacacctatcattca

SEQ ID NO: 109899 - DNA, 320 bp, Glycine max
tcatggctgccctcatagccttctatatgagtgggattctcatattcatcagccatcttattgctcagactctatataacaataggaggtactatagtagcacatgagccaccccctaccatctctgagtgtgatggacaaattcaaggatctcaataaagcactacaacaattagtcatagtacctttgtacatccaaagacatcctcacggaatcatatatctgagtgttggcaaaatgggcataccacactgttaatcactcacgcacaaacttgcctatatatgaggaggcctatgggaaggccctgccaactcta

SEQ ID NO: 109900 - DNA, 287 bp, Glycine max
agcttgaatattattaatttcattaacttagtaatgctaagatttactcaattcactcaagtttccttcgtccagtggactgacaacattacgacacttattcattttgtctcagaatattctcttgttttttttacattcttaaaacgaacatcttctggctttatatagacctcagagttttgatccattgagagatcccaactagttgttatctaataactttggcgcttgacatgaggttgctactgtgcagagagagagtggggaccacaaacgctttttgc

SEQ ID NO: 109901 - DNA, 475 bp, Glycine max
  unsure (1)..(475): unsure at all n locations
tctcgcccaatnttctataaatatggagagaagtgaagtttattttggttcagccncttaggcacttctctctctctctctcgaatttgttgaggaaaattatttccgtgaagaaaatccaagccgaggcgcttccgtaacatttccgtgagtaattacgcgaagattctcgaccgttgttcaagatccatcgttcgttctttgttttcttcagtctacaacgggtaagtacctcaaaccaagcttttcaattcgttctatgtacccgtggtggtccacatcttgttgcatgtatttttattcttgttttcatttactttttatacccccttttgacgtgcttaagccatttatttaagtcatttctcgcttaatctaaaaataatatacatttccaccgatcgtttgaattgtatcatcccgtaatattgcgtgatatgaattccgaccgacggtcgtgccgaaccacgtggaa

SEQ ID NO: 109902 - DNA, 278 bp, Glycine max
agctttatttgttttatttttgaactaacttgagcctcgagccaaacaaacaaatgagactaaaatttgagtcattactaagattaaggtgggcctaaatccaggaagaaaccttgtataggctaaccatgagtggtgggccttatagagttcgacccaaaacttagaaaaatacaatactaattttaaattacacctaaattttaattttatattaatttattactaaatatataatataaaggtatatatttaattatttacaattcaactatggg

SEQ ID NO: 109903 - DNA, 282 bp, Glycine max
tagcttgatatataaatataaactatttgagctagatttccatctgtgcaagattcattgcacactgagtcacaatgtaatttgtctctgtgtgaatggactttgtgtgaggtttactctgagtacatctatccctatggaaattagcacaataatataggaagttagtgcattagtctaaatgattaagataagatttaccagtttcaacaaaagcaattttaccatttttgtttatgtctactttatccatctctagctaaaaattgaaaagcaaaatca

SEQ ID NO: 109904 - DNA, 287 bp, Glycine max
agctttctacgctgccagtttttattggtttgagctctaccctagtttgtggctctttttattaaggtacttaatcaacgcggaggcattgttgtggcatttgtatgtgctccatgtggttttcaatgcttgaccaaagtaacacgccgagcaaagattcccatccttgcttgtgggggtgttcacaactcgtaggataaattttattattattggtttgggtttgaattgggatgattctgccttatcatctggtgttgactttgggaacattttttggagaaaat

SEQ ID NO: 109905 - DNA, 294 bp, Glycine max
acctatgatactcagctttcttgactaacgcttaatgaaagtcattttgtattttgtcatccttttcaatttggatgaatctagtaggtcatcctctcacttgtggatatacaggaatttaatgtcgtgagagacaaagatcaagctgcttgcttagaagaaagtcaagctaaccgccaggaggcacaagatagtgatacttggatgaagccaacaggggggtcctcatgggaatttaatttaatctagttaacagtgttaggcccatgttcctataccaaccttatgtgtgtt

SEQ ID NO: 109906 - DNA, 291 bp, Glycine max
agctttggagaggtttaatggcttgctgagaagaactcccactcatgggttttctgagccaatccaactaaatatgttcataaatgggttgagaccacaaaccaagcaactgctagatgcttctgcaggggggaaaaataaagctgaagatcccggaagaagcaactgagctaattgagaatatgtcagccagtgatcacgccattctgcaagacagaacccatcaacccacaaagaagagtttgttagagctatcatcacataacgctttgttggcacagaacaagttac

SEQ ID NO: 109907 - DNA, 284 bp, Glycine max
  unsure (1)..(284): unsure at all n locations
atctgcanaagaacatacatcacagactcttgctacacgtgcctatttcttattcatggcgagctgaggtactacgttgaccaaggcctctagttgtcccttaaggcttttattttccatagattaagatgaaaccgcgggcatctcatggacttcccttaagacaataacatcatattttgcactggattcgtgggagttggaagccatattctcaatcaaattcctaacctcctcaagagtcatatcaccaagggctccaccacttgcaggatcaatcatac

SEQ ID NO: 109908 - DNA, 291 bp, Glycine max
  unsure (1)..(291): unsure at all n locations
agcttgggactgcatttgtgcatttattttgactttcctatgctgtctctacatacacaaaatagccccaccatccctnttttgctaaatcatattcattcatcattggggcattttaccgagcacttagtgagcgcatgtttgaacataaattgcaagaggatggggacaatgtggcatgccccattgcttcaaaatacaacctaggcctaaggccttctcatccaaatcctcaacccaagaaaacaaggatcaaagcaaaccaaaactgccttacaaatataagcatgt

SEQ ID NO: 109909 - DNA, 336 bp, Glycine max
  unsure (1)..(336): unsure at all n locations
tgtttgccttgattcaaattctcaaatattcttttgtgcttgttgaccatatctctatctgtccaagtaatctattactgattctgtaattcttggttggatttgataaacggttttcaagagcatcaatctggaaatgagtgagaatgagaatacccaaaacttggacattgtaggtgagttagtccttaacctctaatatataattatgatgtttaactaacatatnttaaatatggttcttagatataatatgttgatgtacttcaattatttatgtcatctttcctctcttgatataattcttatgcataatggaaatcatgaatatgtata

SEQ ID NO: 109910 - DNA, 290 bp, Glycine max
atcttacatttgtcaaattttttttataaacaaagctaggaacacaatcaattatacaaaattgaccattcaaggacaaaccatgattcaccatataaccgttatttgattaccttcttacaacgaatgagactatgcacaaagttgaagcaagagtgagtgggataataccccttggtcaaccaagtgattaaaattttagaatccgattcaataataaaatccttaaattgtctacttcatttcatttttgtggaggttcaaaattatttactggcaattataaatcc

SEQ ID NO: 109911 - DNA, 285 bp, Glycine max
  unsure (1)..(285): unsure at all n locations
agcttttagcaaanngatttgattantttccccanacacggatgggcggattttaaccgaaatacctcgccacgctcaaaatgtaaatccgaagtttttaaaaaattgaattgacattaactttattcacggatgtccaactgagtcctgtaatatatcgagacgctgctatattgaaaaccgaagctcgtatgaaattcaaacgacaataactttttactcggatgttcgattgaatcaggtaatatatttagacgctcataattgatactagaagctctgagc

SEQ ID NO: 109912 - DNA, 320 bp, Glycine max
  unsure (1)..(320): unsure at all n locations
aaatactaagcttgccatggtttaacatgattgatcatgattaagacttgtncgttctttttgngaaaantggatgagggcgaatgtgatctcgaatatctgcactatatgcagaatattgctgtcaaatatagtcagcagaatttttgctttgtgcataaaatgatgtgtatttgctggttgtggaaagagtagtacagattgtgttctggatgttttctagcagatcccaacggtcacaatgtagacttatgtgctagagacttccaagaaaactttcgagtcgatccaatggttaacgaattggaacgaagagaatg

SEQ ID NO: 109913 - DNA, 287 bp, Glycine max
agctttacatgctttatttctcctaagcacacttagtggagaatcgtggacttgatcttggattaatgggttgaaccatatctgaaattcactaatcataattagtgaaattttggctccaaaatttggctccacaaattcaatttcaaattcaagtgaaatttgaatagaaagtcaaatttgcctccaattttgtgtgacacttaggctacaaatagaggctatgtgtgtgcatttttccaactttgatcatttgagaattaaacttcaaagttcagacttcttta

SEQ ID NO: 109914 - DNA, 379 bp, Glycine max
gaccttagatactcagcttcagtggacttatccactcatatctgcgcgaggcacggtgtttctctctgtagcccaatacaccactagaagccttcttcactctattgcctcatagctgataatcaaaaccgttggttctggtcccccatgtgaaagggtccataacactcaacgatgattgtgctctctcaatgctcgaagtactacatggttgtgcttggatgtcgtcacttttactcaactgcatcctagtcctaactaggaattagacacccaccacagcacttgatgaacgctctccatatgatgttaatctactggctcacatatcgttgttcgatggcccctccaaataacatttaacttccttccatatttg

SEQ ID NO: 109915 - DNA, 212 bp, Glycine max
acccgggatccttcaagactacctgcatgcatgcatatcatctatattcgctctgtttcttatcttgtgcaccatgaactatactcacgttgttcattactacatattagtgcgacttaccactaatttttggattatgtgcgcatattgttcctacatattgccatctgtcattgataaaccttatttcatacattattggtaaaataatc

SEQ ID NO: 109916 - DNA, 291 bp, Glycine max
agcttcacaaagcattgttttattacaaattttgatggaagaaaatggtggacaatgtctcctccaacctctcaaccctaaatcttcctacttctcatgaaacttagctctccttgctgctctcaaccggttctccttttttaactccgccaacttcagtgtttttaaaggctcttgtactcttcattttctgaaggctcgcttatctagcatatcttgctaagcgagagttaatgaattttttgcttaccgagagtgggtgctcttaccacgataagaaattacgacctc

SEQ ID NO: 109917 - DNA, 365 bp, Glycine max
gacacatgaaactcagctgttggggagtataatatatacctactgtttctttatcatgttactcgtctcacgttgagcagttttgcacagcttgcccctctatggacatactcacccgactatctcttactctggcctgaactcgaaccaatgcctgcatgcaccttaatgtccccgctgtctgcttcctcacctgtctccccccgaacaagtgcttgaatcctcaccactgtctttaatgccctcgaagcccttcttgcctgcaatcaccacacaactgatgtctaaatataaggttggtctagtggtaaacgccgtacgctcactgaaaaggaggagaggccatatgtataaactaacaattc

SEQ ID NO: 109918 - DNA, 415 bp, Glycine max
  unsure (1)..(415): unsure at all n locations
ttctntgctctcaatgggtcttcattcttcagctttcctctctatttccaccacttctcttgcacaaaaatatgtggtttctccaatggcgatgatcatggagggctcaacaattaatcaatccaacgatccgctcctagttagactgaattcgagttctgatttggttctactactctttgtgaatgtactcctatctcttcaatcctatattcatatttcatgattatgattatgtacaagatagataatggcatatagttttgattcatttcctaatttcaaattgaactacagattgtttggatctcgtccctctaattgcgattcaaacaatatgagagtgtttgattgacttttctaatgattcgagtgactatttcattgaactcattcgctgtaatgtgaaatccta

SEQ ID NO: 109919 - DNA, 287 bp, Glycine max
agcttgcccagagaaggattccatttaggaaatgctgaccacctcaaaagactggaaagcggtttctaacgattcttctgcggcttccacataaggcatagaggatgggcagctcaccaagatgtcttcctcgcctgacacgatgaccaaatgcccctccactacgaatttcaacttttggtggagcgtagagggcacaactcccactgagtggatccacgggcgccccaacagacagctgtagggggggttaatatccattatttggaaggtgacttgacaggtgt

SEQ ID NO: 109920 - DNA, 403 bp, Glycine max
  unsure (1)..(403): unsure at all n locations
cgagacgtgaagagcatgtcgccatgacacatgatgaagccctctatagcattcgagctgggtgcagccatgccttcccgattntcaattgggaaattggctagtcattgaacgacctgaagtttccatggcagacacaatgtaattctttagtttttaaccctacaactgggtctaggctttaagagtttctccttgttatggcgttatgtcttatttctatctaagaatataatataagatctttccttcatctgttcttgcgccttcgcctattgtcattcatatgcatgtgtatttctattgcatttaaaccggacagatccgacgactagttctatgaaggtactaataccgacgacccagccgtcaattttgaaagagaaatgaatctcctgatgat

SEQ ID NO: 109921 - DNA, 281 bp, Glycine max
agcttggccattgtacaattccatttgatatgaaattagattatcttatgcgtttgagaatgatcataagattttatattattttatcctatgacatgtttatcaaatattagtttttatatttacttttaaataactatttttacccttaaaaaataaactaaatggaactactgagtacatgtgaagtggggatggattaggatgaagacatgaagtcgtggtacactggacagtgtgactgactggttgccactgtgggccgaggggggtagatataa

SEQ ID NO: 109922 - DNA, 288 bp, Glycine max
taaagatggattaaagctttttggcttaccatatcccaacaaaaggaaaagaccaaatgatagtaacattaaaaatattcataacataacaaaatgttctcacctttgttgatggagcaattgaagtagtagatccttcaccggatgaggctctactctatcatattttaagcacataattgttatttagagcacaataaaggaataaatttattgcaaccacgagttcataatatttaacaacaacataatatatgcaacacataatggaatatattccatatcttc

SEQ ID NO: 109923 - DNA, 285 bp, Glycine max
agcttgcttctaaaataaatggttcggtctttagtgtcactcaaaatcaaggttttaattaaaagtgttaagaagtattcaaaactgcaatctcagaagaggaaagtaaactccaaaatttgacaaattacaattttcattagccagaaattttcaagatatagattaagcactcaaaacttatttgaacctcatgaaaacaagcaatatgactaataagaatcaacaacttgagctcttatgaccctaatatcacacacataaatgccctcataaattgagcat

SEQ ID NO: 109924 - DNA, 333 bp, Glycine max
actcactgagtcaacttgaagaaagatgaggattcttctttaaagacgcgcaagtgtatggaaacattggcaacatacaggcgagctagatactcttgacagaaatgtgaggaatccagcgctcatagggcccataagcatacatacatgcacggcagtattccatggcgagaaaacgtgcgcattggtaatctctgaactataaaatcagctcccagctagtttggtgggtgatagccagaaaccaacgcgagagagtcgtactatgatatcaattacacgaatattccccagttgaacacgaagaagtctaaaatatactcatgtctaaca

SEQ ID NO: 109925 - DNA, 289 bp, Glycine max
agctttataagcgcgggtttgtttacaaaggtcaagtggtcgcgatatgcgaagatgatgttctgagtacattggatttggtacgaccatgccctcctgatttccagctgggaaattggcgagtggaggaacgccccggcatttacgctacgagcataatgtaaacctttacgggtttaaaagctctatagttgggcctaggctttacagtttttccttttgttaaggctttgtgtcttttgtttttgaatttataatacaaggatctttctttatctgttcctacgtc

SEQ ID NO: 109926 - DNA, 380 bp, Glycine max
  unsure (1)..(380): unsure at all n locations
ctaccacacgcaccaccatatctagtttctatatctaatataccagtacctgcttctagacagtatttggcatattatacattggatatctaaatctggaattcctcatccttggtttttctatatttccaccattcttcaattctcgcaatgcaggatgtgcgtcanaattttctcatgcaccataccactatttaatacaaagctgcacttcatgttcctcctctgtagtttactagtgccacggagactctcaacgactggcatagtcctgtgatcagggcggaaatcccacggcgctattggacctatacgggtcccgagggtgcctggtaggcgccatacctacaataagatatatgaccttaacgattaactga

SEQ ID NO: 109927 - DNA, 289 bp, Glycine max
agcttccattgttcaattttgtttgtctcaatatattatgcgcttgaatcagacatccgagttaaaggttatgtccatttgaatttttcgagagcttccgctgtttaatttcgagcgtctctatattttatgtgcaatattcggacatccgggtgaaaagttatgaccatttgaatttctcgagagcttccattgttcaatatcgagcatatcgatatattatgcgcctgaatctgacctccgtgtaaaagttatgaccatttgaatttcgcgagagcttccattgttc

SEQ ID NO: 109928 - DNA, 291 bp, Glycine max
agctttagcaactctttctttttgtttagtcaagacttctaatgctcttaatctctcctcgtctaaatcaactaactcatctgacatcattttccaataatggtcgatcggaatgtccatttgtttttgtactctagctgattgcaaatgtatttcgaccggaagtatagcatcgtgcccataagtcagtcgaaatggggtagtattagttgattccttaggagaatttctacatgcccatagaacttgatctaacgttttattccaattccttggcttttgggcaatgtg

SEQ ID NO: 109929 - DNA, 442 bp, Glycine max
  unsure (1)..(442): unsure at all n locations
tggagcaacacatgttctaatncttattttgnaacatcaatttattttattagaattaagaatgaatccttcttttattgataattattgccaaagttgattctctaaaaaaataactaagagagaatagcctatggatcaacagtgtataaaaaaattagagctattaaataataaggtaaaattattttaccgcgtgaactcttataaaaaacattgatcttttcttgaaaagctgacacctatatatgctctgtgactcttgaaaaaaaaattataacaaatgattaaaccgcttcttaataaaattgaaactttccttttctaacctttgcagaaactggatctttatgaaaagattggcatcatttaagacccattgaacttttaattaaacatcaaataaccttcgaaatcccgtgcaatccttttcatacaatgt

SEQ ID NO: 109930 - DNA, 419 bp, Glycine max
tgtgcattcagtatcctgatgacgatgttccatatagtcccttaactggacttatacattcgctgcccaagtttcatggtctcgcacgtgaaaatcctcataagcatctttaaggagtccatattgtcccttccaccatgaaaccccctgatgttcaagaagatcatatctttctgaatgcttttcctcattctctggagggagtggcgaaagattggttgtactaccttgctcctaagtccataaccagctgggatgaccttaagagggtggtcctgctcctacgtccattatcgttaataaattctgtcgtatttgtccagagcggatttcaataccatatactatcttatctctgtcagctatgaaatattaattcaactgttaaatcattattccattacagcccactacaagct

SEQ ID NO: 109931 - DNA, 284 bp, Glycine max
tgcttgcctcggcttttttatttttgagggactcatggtcactatgaatgacaaattccttgggataacggtagtgttgccatgttttcaaagcccgtaccaaggaatacaactccttatcataaagtgaattagtaagggtaggaccacttaacttttcactaaaataagcaattggatggccttcttgcatcaacacagccccaatcccaacatttgaagcatcacactcaatttcaaaagatttttgaaagtttggcaacacaattatgggggcattatat

SEQ ID NO: 109932 - DNA, 279 bp, Glycine max
aactcgcttgcaagtatttttcttgaataatactctctgcttattctttttcaatctgctatgatttcactgcaatatttgattaacttattgaaagcacttaattattggattcatctaaccttcgccctgcaattattttctgattgaggattcctaccattttttatgttgtggcaaatgaatgtaatggatacattctgggttttgtatgttcaatgatctaacttatctatgactgatttggtcacccatttataatccttttcacatttacac

SEQ ID NO: 109933 - DNA, 283 bp, Glycine max
agcttttgtttcttagaataataagaagttcaaagagattcaaggcttgtaaaggattgtatgaaataagtgttcaagatttttgaaatgcaaaacaaagtcttgcttttatagactcttcatgtctaatcaagaggaccattcagaagaattataacttttagaaaaacttaaaacctatttgaaaaagttaaaacctttttaaagagttacatcttttgatatttttttttcagaaacagtcactggtaatcgattaccaaattagtgtaatcaattacac

SEQ ID NO: 109934 - DNA, 283 bp, Glycine max
agctcagtttattgaagttctcttttaaaggtgccgttgcaaactagtggtgcttgtggtggcttctactaatgaaaaatttcactttaacaatgaggacattgcatacccagtagtttatgaagaacccttctaaaaattttgctgtattttcgctctccctatctacttctcacctgccttaaaatcaataaacatcatatttgcttttcatataaaactttttattgcaacaatcctttggacacaaaattgagtttttaaaaaaccgctttaactaaaa

SEQ ID NO: 109935 - DNA, 290 bp, Glycine max
agcttctcgatatattattcatttgaatcagacttccatttgaaaagttatgaccaattgaatttctggagagcttccgttgtgcaatttcgagcgtctcgatatattatgcacctgaatcatacttccgtttgaaaagtcctgaccatttgaatttatggagagctttcgttgtgcaactcccagcgtatagttattttatgcgcctgaattggacttccgcgcgactctgcgttaaccatttgaatttctccacagcttccattgtacttctcaagaccaattttcct

SEQ ID NO: 109936 - DNA, 114 bp, Glycine max
ctctagaagtcgcacctgctatgcattgctagtcttatattctcaagaagctctttgtttactattctttgcgctacctgtggaggatgtgtgcttctcgactcgatttgtgtt

SEQ ID NO: 109937 - DNA, 323 bp, Glycine max
aaaacttacttacctgaattgcccacggaaatctcgggtaactgtagttgtgaactatatccatcaacgccgcttagctatgttgttgaccaccatacatatgcatgtattaatcgtgttgctatcacaacactatgtgggtatactactacgccgtacgcataactaactctttatacgcttattacatgacctagcgttggtcagctgaatccatgttcgaaccgacattcatgttacgctaaccttgcagttgtgagtaatatctctccagcatatttacctttggaccatcaataatcggtctatatctacactcctga

SEQ ID NO: 109938 - DNA, 291 bp, Glycine max
agcttcaagctactcaattgttccaggttgctgcatggtagggcaaaggtctatatggtggtcatcagaggagcataaaccacaaactcttgtgacaggtacaaatttctgattcaaggccagctcggttaccaagttaaccaatgcatctagtttgccttcaagcttcttagtttcaaatgatgcagttgagtttgtagctacctcatgcactcctctaatgactatagcatcatttctggtgctaaactgctgggagttggaagccatcttctcaattaaatttttggc

SEQ ID NO: 109939 - DNA, 445 bp, Glycine max
cttatctaactgcaaattgaagaagtaaaactctttgcaagtcaatcattgtttctacctcagaacaccttgaacatcttccatagacttatttggccctctaaactatgagtttgggtggtaattactatggcttacttatagtagatgcttactcaacgctcacatggactttgtttttgaaaaccatatatgaagctcttgatgcttttcgcacacttgccaaggttattctaaatgagaaaggactgacgattgtttctcttattaatgatcatggagaataatatcctaatgagtctcttgaaagtgtcttgaaatacatgaattcaccataatttttctgcgccaagaactcttctagatgacacataaatacctatatactctcgggctgatgttgacgtactatttactcactttgaacaatagacgtatagatcta

SEQ ID NO: 109940 - DNA, 282 bp, Glycine max
agctttattgttgccaatttatacctgccctccatcaatcttctcataagaactgaactattccattgtaggacacatgtgaaatgaacaacctgagtcaagaacccaatctgatttgactagtgcctctgaaacacacaagacattgacactttcatacccttctaaggcaacgtctgcatcaattttgaacaattggatcatatatccattacactatggatcctgatatcaagacttaattgtaatttttccattctaggaaacaattacaattttgaa

SEQ ID NO: 109941 - DNA, 318 bp, Glycine max
gtattcagctgctctaagagatcaagccataacaatctgtaatgtggacaactagctcactgtctctcctacaaatgagacacagaacttgtgatggatgtgctcttatcaagatcacttgcgaaatctgaatctatatagcccctgacaaaattgtttgatccttctaaacataatgcacctcctcaggctcctttgatgtatctaaagatcctcttcacatgatcctaaggctctctaccaaaatatttcgtgaacctactatatgctcccactgcttttgccgtatctggtctagtacaaatcatggaatacatc

SEQ ID NO: 109942 - DNA, 288 bp, Glycine max
agcttcctcgataaatattctgcccagccttcattaaccgttggatcttctccaaatttggtcttcaacttcacaagacaccatgccatgatctgaccgttgggatctttaagaagatgtctggagtgtactataagcctcttaatgaagcttctggagggagcctcttaatgaagcttctagagaaaactacatgaagctgcctcggcacaaacgcttcccagccttcgttaaccgttggatcttttcgaaatatggtttgcaacttctcaagacaattttccatga

SEQ ID NO: 109943 - DNA, 283 bp, Glycine max
agcttgtagaggattctttttggaggaaaagaaagagggagagaaaaagagaggggggaacatgaaattgaaggaagaaaaagggagacaagttgaactttgagttgtatctcacaagactctcattcatcaaagttacaacaagtgttacacatgcttctatttatagactaggtagcttccttgagaagctttcttgagaaaacttccttgagaagcttctttgagaaaacttccttgagaagctatagcttagctacacacacctctctcataactaagc

SEQ ID NO: 109944 - DNA, 285 bp, Glycine max
agcttgaaggtgtttttcccaccattttccatagtagaatactggtaatgtgtctactatcattgtcatcatttttttcgtcattgaggtgccacttgagctgccaggttctccacctttgggtgtattctttgaaagatccgcgccccctttttgcacatgttttgtagttgcatcctatcagaagccattataccgacactgcctaacgaaggcaaccattaggtcctccctggaatggactcgggaaggttccaagttagtgtaccagggaacaactacccc

SEQ ID NO: 109945 - DNA, 435 bp, Glycine max
  unsure (1)..(435): unsure at all n locations
gtgatggtgtcaagaagaaatcacatgtttgtcatcatcaaaaagggggagaatgtgaatgtatgtatacatgatcttgatgatgtcaaagaagaatctaacaaggctgcttcaaatgataagcatttgcttcaagaataattcaagattgcttcaacaaacaaagccttgtttcaagattcactaaagaccaagccttgccttaaaacaatgtgctttcaagacatgcaaggctctggtaatcgattaccaggaagtgtaatctattaccacaagacatggttgagaaatagctgttgaataagggtttgaatttgaatattcaacatgtaatcgattaccatatgtctgttatcgaataccagcaacgaaactntggaaattcatattcacaagtcatagacccttcaattataactgtgtaatcgattacac

SEQ ID NO: 109946 - DNA, 285 bp, Glycine max
ggctgctccaacctttgtttcccctaaaactaaggaaaccgaaacttgcgacttgggccaagttagattcaaaaactcgggttgaaccaaaacccttcgaagcataactatgcctgaaggaggaatcataatgatcctctacaatccaaggtgaggtatcaagaggagcatgtgcaactgtgcgttcattatgggaagacccaacaaaccgtttcctcttgttttgacctttaaccatagtactactaggctgagacttatctccttctctggaggttcagagga

SEQ ID NO: 109947 - DNA, 423 bp, Glycine max
tgttgtatatataagctatccctgtgcctctgagtgatttgttgtaatatctgctcattacaattcacaaaggatgtaacactctcactgaagtgttgttacaaatattaaatatcaatgtttgtggtagtaataaaaaccttgagaatatggtctttaactgagcacaatggcattgtacgattcatgtaaccgatctcacctggtgcctagtgggaaaaatctttgctgttgtttgttggtgtaacatattattgttgtccagcaattactaattctgttgatcttcacattcatgctatttgtgctcataggcagattgtaaatttcgatttattaagattttatgttccctgaactgccagaaaacttatttatggtcaaatctctaacatatagatagtggatattgtcatttcattt

SEQ ID NO: 109948 - DNA, 282 bp, Glycine max
agctaattttattgtcattacaaatgacagtagcatgaagagaagtggaagtcaagtttatttaggacttaaatgaagtaacatttatcctgacagccagtactatgcccaagtaatgccacaccttcagagactttctttgttaattaaataattaattagctgatccagctccttagcattcttcaatgggaattcaacaagcaattgcatacttaagaatcaagatatctaagcttatcaatcagctagaaatattaacattgcacctttcagtaaaac

SEQ ID NO: 109949 - DNA, 285 bp, Glycine max
agcttggttctttatcttaacgaatcaaccgcaaaggctctatactaagaactgaataacaatctgaataaaaatatgattttaaattatttgagcattgaccccaaatgtacaaataggcatattaaaaatacatcttcttaaagaccaatggttaacgatggctatgaagggccatctttgctaacaatatttaatttatcttactttaatccataaaaattctatatttattttttggaaatttatatcatattttaaaaataaaatctatcaatataataa

SEQ ID NO: 109950 - DNA, 283 bp, Glycine max
  unsure (1)..(283): unsure at all n locations
agctngtttttccttttttctttcaattcaaaccctactttcatgtttgtaaatattgatatttttattacatatatgtttcaaacaatccaaaccttcactatgcatcaagcacacaaaagtacgaaaatagccactgaccctttcgcagccaagtcaacaatgtagcaccggttggtcacaacgaacttgttcattaccagcgtcttccttgcaacgaccattaccatacatcagcactaaaccaagcttaaatggtacccgcgacatgtcttcaacacta

SEQ ID NO: 109951 - DNA, 197 bp, Glycine max
acaataactcactatatcaaggatctgatgtgaaaaattttttgtttaggtctacacaccgtcccacggttgcagtatgtcctacaaatataaggatcaacagcactttttgcgaaatctcccccgtggacccatatctataaaactcaccccgatttccccagaacaacttgaaaaaaagaggctcccttcctaat

SEQ ID NO: 109952 - DNA, 159 bp, Glycine max
ctggaaaaatgcctggcagctatgattataggcttctcatttgatccttcacttgtgtcaaccatttgctaatctcttgctttgatgtgttgctgcttatcatgctcgtattcattatgatccagaagtcaacattaaaaccatctcggggtctaatac

SEQ ID NO: 109953 - DNA, 315 bp, Glycine max
gcacggaaccgaagtcaataccttctatgtcactgggcctgccccccatgccaatagaaaatatttccgcttctgtcgaaatgctctatcatgctcctagcattcttatacatctaggcaatctgcttggcgtttctatcgccccatctgctgagtgtggatatatctatcgtcacaaattttactcaaatgctacatgtgtatttgtatctggtttctctacaacaaacaaagggaacggactccctcattttttatggtagccccagcaccttggactaaccgttctaaacaatataactgccagctgtacag

SEQ ID NO: 109954 - DNA, 93 bp, Glycine max
ctatcacacccctatcgtgaaaatgcactaatttcatataatgaaaccacccaagacaaaaccttgagctggttataatactatgtaatttta

SEQ ID NO: 109955 - DNA, 404 bp, Glycine max
  unsure (1)..(404): unsure at all n locations
aagcacgagctgcactcgattggaatcatacggaaggtgtacattgtttgtnctcnccgcaacctctggtaatggtgagtgcatgaataatattgcgccacggaagtcacgcagttcattattatttggtataatgaagaaatgtcttattaagtaaattaattaatcttatatttgcgatattgcagttgtttttagatctctaaaagtcaggtatcttacatattaaataataaatcatcttcgaataagattttattttttgagactgtttattttttataatcagacataaattatttatattcactgctaaaatataaatttactatataaacaaagaggctaactgttatatatgtgaaataattacaacatcgaaatagaacttattcaattttttt

SEQ ID NO: 109956 - DNA, 313 bp, Glycine max
  unsure (1)..(313): unsure at all n locations
agtggtcgcgatatacgtattatgttttccgagtacattagaattggtacgaccatgccctcctgattccagctgggaaattggcatgtggaggaacgcccctgcatttacgcatcgagcataatgtanacctttactgtgttaaaagctctatagttgggcctacgctttanaagttattcttttgttaaggcttgcgtcttttgttgttgattttataatacaatgatatttcttcatcttgttcttacgttctacccattctcattcatttgcatgtttacttctttgtctgaaacggcagatccgatga

SEQ ID NO: 109957 - DNA, 218 bp, Glycine max
  unsure (1)..(218): unsure at all n locations
gcgacgagctgcactgattgaatgcaagcccctcctctttgatatccgacaccaacaacaatcaacgtacagacattatgttgtgttgaaacctacccctcagtgatacacaatatgcttttctatgaaaactctgcctttaccactctaattccccttgagttcttaggcaagncaagagattatggccacaacaaagaacaattcaccaatatgtg

SEQ ID NO: 109958 - DNA, 445 bp, Glycine max
  unsure (1)..(445): unsure at all n locations
tcaaagcttctgtattcaattctgagcatctggatatattactggactcaatcggatatgcgtagtaaaataaatggcattagaattgctcagagatcgtatttcaatttcgagcatctcgatatatgacgagactcaatcagacattcgagtataaagctattgtcataagaatatgcacagagcttctctttgtaatggtgagtgtctcgatatattacgggactcaatcagatatccgagttaataagtattggccgttgcgtttgctacgagcctcccggtttcaatttactagcgtctcgatatattatgggactcaattggcatctgagtaaaagtattgcngtgaatttcatgagctccgttgattgagggctgattgtcggatcatcgacatcagtaaagcattgcgagattgtatagcctgtttaattaacgccga

SEQ ID NO: 109959 - DNA, 359 bp, Glycine max
  unsure (1)..(359): unsure at all n locations
gcagctacatgcacatggctcggcaatgaacttttctntgatctgaaggtttttcaagtttaaatgatcttttgatagattctagaaattctttgtacgcttttgctagcctttgagagaaataatgagttacatagaagctcatgacaagtctttctaagatattcatggtcgttgaaatttaccttcttgattcgattcagactctagcgaagctacattttacatcangcatatgtaggctttttatcaaattcattaacgaggtagtgtcatgtcctcccaggacttataaacgctccttttcttagtctcatgaattcttcttatctaactctctccagtctgggcattcaact

SEQ ID NO: 109960 - DNA, 163 bp, Glycine max
gaaaaaaactatctctcttttgaaaagttgacagcggtgcaataatatcttccatatacctggtgcactgtatctgtccatctaactaatttgagggattaaccatcatctctgcttaagttagaggtccaagactgcgatcatttctcaatgcatacataaa

SEQ ID NO: 109961 - DNA, 212 bp, Glycine max
tgcagcttaactagtaccaactacgagtttattttttctttcaaaaaaaaaataatatcttttataattaataaattcataaccttcattatcgtagttatgactttagtactggcttactactataactacttataaactactatagctcttgacaaatagctgttggacgcgagctacttagagctattttatagctctcagtttataaa

SEQ ID NO: 109962 - DNA, 332 bp, Glycine max
  unsure (1)..(332): unsure at all n locations
acgcaacaacaagaaacaagccaaggctattgngcaagcaatcaatggggcanaacacaccaaatgattatgatgatggatggctcacattctcgcacaagtaaactcatcactttcaaagtgagctttcaaaactatcatgacatgtagagaagaatcaaaggattcaagtcacaaaatgtcaagaacttttattttcaacacaactacccatttcttgaacatatcctataatacaaagaaaaacatgcaaattcgtacgtgcacaccaacattgatccaaatattaaactgaaaatccgacgaaactaacaacattaacatattaacac

SEQ ID NO: 109963 - DNA, 319 bp, Glycine max
  unsure (1)..(319): unsure at all n locations
tgttcggactctcagccacttatgatatccgccgatgatcccattactgcttcccctaagctctttgtactttcttcatgccgcatcccatgccttgcgaactccttggagtaccctcgcgtttgtggtcactgtaaccccatgcgatgaaaggcatgatgctntcatctgatggcacttctctcatggtgtagccaagctgtcttatggcgaggacgggattataattaatacaaccccttgttcccatcaagagatacattggacatccttcgcatgaagatagaatcctgattcttccttccttctagcgaggaaa

SEQ ID NO: 109964 - DNA, 278 bp, Glycine max
  unsure (1)..(278): unsure at all n locations
tgagtctaatgccattcttccaaggaatggatttttatatgatatttcagattccctagaagatacacatattcatggaaattgactctataaaanagatgaatgaagcaatgaagattctcaagataatggagttagagcaaataatgaacttccaagagaatggatagcctcaagagatcatccactcgacaacattattggtgatatatcatnaatggttacaactagacactctcttaaagatttatgcaataatatggcttttgtatctatga

SEQ ID NO: 109965 - DNA, 449 bp, Glycine max
  unsure (1)..(449): unsure at all n locations
cataaaatactttgaatggcaagacttttctttntaatctccttgcatccatgtttcanattatcatatatcattagtgagttaatggacatagagtagtgacaacttgagaatgacccanagattgttgtgataactctcaagaatgaaaggcaaacgaaggtcaacttattatattaaaaatgtttntactctanatggttcaaagtctcattnttttatggtaccagggttagtacactcctatgcaatttgtgaggagctnntgcaatccaattgaaagcctacatggatatgagtcanaatgaanatgggtcaatgggtgatttatacacgtggcanagattaaagaaattaatgggttgtaccatgaattactatatctatttatattcattgtagctctctctttttttacaaatatgtgtgatactgtcatataatctata

SEQ ID NO: 109966 - DNA, 249 bp, Glycine max
  unsure (1)..(249): unsure at all n locations
tctcactgactnactcttaattgtcttacaaacaaatatgaaagctaagctcttaatcttttctcttagcatatacaaggtgttgtgagagtgtttccaactttccaagaatatacataatgctttntatagaaagtgtgaatggatgcatgtatgattcgtatcctatttcttcaaagcttttggtatttatatgcctttctcaacaagtgttcattgtctntaaacaaatanctcatgtttgaagtt

SEQ ID NO: 109967 - DNA, 294 bp, Glycine max
  unsure (1)..(294): unsure at all n locations
cgagtggaggaaccgccccgcatttacacaatgagcataatgtaaacctttacagttttaaaaagctctatagttgggcctaggctttagaagttttctttttgtaaggctttgtgtctnttggttttgaatatataatacaaggatctttcttcatctgttcctatgtctctacccattctcatccatttgcatgtgtacttctttatttctganacggcagatccgatgacgagtcccccgaaggtactaatacctgggactcgtctatcgacttcgagcaagaaatgaatc

SEQ ID NO: 109968 - DNA, 356 bp, Glycine max
  unsure (1)..(356): unsure at all n locations
agctcaagcctgatcagctggcgtgctttctgtgctgttgtttactgaagagggaagaagtatgggagcaagagagcctggcatatgtctgcttgagacacgtgcaaaagttccacccatcttctctgagatagccgtgaaaagacccttcctatcttggtgaccaatgtgatgctagactgacccgcataaggaagaatctggtgaagtagatatnccaagagccatgagagctgggctctccatggatggcagtatgacatgaattgggtggtgttccatgttgcacattgatggacatttgttgtagtaggatagatctagaacaatctatgactgcgtacaaaaactgttag

SEQ ID NO: 109969 - DNA, 69 bp, Glycine max
ctgacataagaatttcttggactcaagtttctatcaatacaacaatcagcaattggaagaaacataata

SEQ ID NO: 109970 - DNA, 275 bp, Glycine max
taaaattgaatgaaataaggcctcacatctgaccaactaaagcaattaactaattctatcatttcaattggagacactatagacatgtttattcacagaaaatttatttatcatagcaaagttgttcaactacctcagattacatgtccacattgataaaaattaagcttatccttaatctgacgtcttgaatgctcctatgatgattggactcaaaatgaaactcatttatacacactttcatcagaaattaacataatatattgatgttttgc

SEQ ID NO: 109971 - DNA, 293 bp, Glycine max
  unsure (1)..(293): unsure at all n locations
tacattaatttatatgaattgttgttaaaaaaatcaagtcagatagaggtgataatccaaacttacattccactaatctaacttgagcaattacctaacacacctatgttttgcttagtgcacccacaaaaatagtaaagtctccatcttacccttttcatctcgggcagtcttttcttctatccatcttactcttcatcacgacaccatcatcaaacataacatgcnctatgagagcatcaacatnggacttagttaaatcgcataaagaagttattatgtctcaacacaca

SEQ ID NO: 109972 - DNA, 312 bp, Glycine max
  unsure (1)..(312): unsure at all n locations
ctacatcnaatgtccaatctttggaatttgggacgatcggccctctcaatgagtcaatctctttctttctcataaagatggacccttgggtactagtaccctcgtcttcagagggctgctcgccctcgtcttcaaggactacacgtcctcgccatcaaagggctgcatgcncacgccatcagaggactacccatcctcaccatcagagggctacacgcnctcaccttcatagggttacacgccctcaccttccgaggactacatgtcctcaccttcagagggctacacgacctcgtctttagaggacaacac

SEQ ID NO: 109973 - DNA, 386 bp, Glycine max
  unsure (1)..(386): unsure at all n locations
agcttgacctgcgagatgaaaccagctattgacttttatattntaccactcacanaangaaacagatcactgaagatgtcacctgtgttgaatgctctgcagctacactatatcangtatgctgctttgctcttgcatatgtacttgctcatgcttaaggtttaagtngtgttcatgggtgcggcttcattgtgtttcttgatattgtggaaaactgtagacaaatgcggtcacaattgcagtggtggacaccactaatacctcaatgttgtgggtgaaattgcactcggagatgtttttaataccttggcatgctatctattggtaacctgcaaatataagttatattaggctgtataacgtgaaaacaacgtcaaatgttgagt

SEQ ID NO: 109974 - DNA, 296 bp, Glycine max
gaaaatgataagaattaataatactcctacaatagaccacgcaactgtactaagtggaatgatagatgattaattgaacctgaatacaacataatgttgtcattgaccgtactatataaacaaatctaacaattaattgacaccgatgaataaaatataaaattgagttgcataaacaatacataaatgtgaaacatgaaagatgcttaatatatatttaattatattagagatcattatgcacaaaaaataacgcgtaatcgtagaaaaaaaatgttgaagtttataatgtcaaa

SEQ ID NO: 109975 - DNA, 335 bp, Glycine max
  unsure (1)..(335): unsure at all n locations
ttcacaaaatcgatataaaaacttgctaagccatgaaaactcctcacctcggtcacggacttaggtgtatgccattcttgaatagccctaaccttctcctcatcaacttgcactccttttgaacttacaacaaatccaagaaacacaacatggttagtacanaagaatgcattntcaagattggcatacaattgttcttctctaagcacacacaagacatantttaaatgatcaatatgcaaatcaagtgaagtgctatagataagaatatcatcaaagtacaccacaacgaactttcctatgaactctctcaagatatggttcattaatctcat

SEQ ID NO: 109976 - DNA, 279 bp, Glycine max
  unsure (1)..(279): unsure at all n locations
acagctgatnattaggaattattctcattattagtcttttttatgtttccatatattgtactattagtcattataaataagaatatacatgtgtgaaacacctcacaattacagttttaaagggtattagatttgtacaggaattgtgtctttgagatcacacatgatattatttaggtttaattatccatttagtccctataatttccaaacttatcccttttagtccctatagtttacantttaattctcaaaaagtccctgtcgttataattttta

SEQ ID NO: 109977 - DNA, 260 bp, Glycine max
  unsure (1)..(260): unsure at all n locations
tttcaccaacgccatgcaataattgtgtagtacgatcaagctaattntccttgttgatttcgctctatgataggtntaccatcgatgtcgcctgtggtatttcatgggaactcaaccgccgttgtgtttcggtcgacattggactgcgctggttgaagatgcaaataaaaatatagcagaccttggcagcgaataaaaaatacctcgacaaacttggataaaaacaattctagccgcatcggccaataaagataccggtc

SEQ ID NO: 109978 - DNA, 206 bp, Glycine max
caatttcgagcctctcgacatattatgtgcccgaatcggacatctgtgtgaaaaagtatgaccatttgaatttgacgagagcttcccgtgttcaatttcgagcgtcactatatgtgatgcgcctaaatcggacattcgagtgaaatgttatgaccatttgactttctcaagagctctccgtgttcaattctgagcgtctcgatatg

SEQ ID NO: 109979 - DNA, 362 bp, Glycine max
  unsure (1)..(362): unsure at all n locations
agcttagatgctatgagtagttcaccatgggttctgtttagatgtctgtattanntcactaatgctaatatgaanattctaatattgaaataataatggatcggctgttcagtaatggtgatatgataatcttgtccaatactttctacttattagcagaatttcttaaaagtacaaaagtgaattcttggcctttacttttgagaattttaatttaaataaaatgtgctgtatctatgtattntanaaaggcatcaaagcatgacaactactatcgcggattgttgatgtcagctttatagagtgtntattgctggcctaatctggatttgtttttcttgaatctgtcgtaagggcaagtg

SEQ ID NO: 109980 - DNA, 402 bp, Glycine max
  unsure (1)..(402): unsure at all n locations
ctgcagctttagccaatggacttaccttgaattaatcattttatatctctctctgagcctatgttctcctgtgcttggtgtgaagctcatnacaagccttaagtgaaaaaccatgatctcaccttaaccttaaggaatatttgagctctggaattgtgttgtgaataagtgtgggggggtcttgttgataacatgttcttgtggctatgcatcatgatgtannttttggccatactaatgtacattgtatatgtggtaaatgttggacatgctgctaaatgatatgctagttctcaaatgctactgtgcacataatataatgaatgatgagactccttgctctactctttatgtntaaatactatacttggggtgtcttattatttctaacatgctcttact

SEQ ID NO: 109981 - DNA, 317 bp, Glycine max
aaacgtagaataaggtgagtaaccaggttgaaggaaatatggtttgatgaacaaatatgttttagagttgaatgccaattggattatggtttggagttaaggattatctactgaatgtcatttgactatgagatagttggctgtgcagaagaaaactttgtctagtgacaaaaccattcttggtaattggtgtgggagcaatttatcaatgatttcgtgaatcattgagcattatgtgtatatggtaggaattgtcaattcttttattacttaaactgaatcttaatgagggttgtaccaatttattgttatctaac

SEQ ID NO: 109982 - DNA, 422 bp, Glycine max
  unsure (1)..(422): unsure at all n locations
agtcacctgacgcatgcaagcnntatcgatgcaagtctntagagaagaagttggtatctggattcttctggattgctcccttgtaactcactctatgaatctntcactcatcccattaatatcaaagatttcttctagaataacttatctagagcaatgtgtgtcacatgcaatttaagttcataaatggtgcagatcatttctatgttgctagtgtaggaaaaaaggtgttcaaaaacacacatggcgaaataaaaggatatattntgtatttaaattatattataatcaaatgacatattaaaaggtgtacctattgatgagttctcgaagcataaaaattcttcaatagtgtaaagactctacgtgtatccacatcgatactgacctctattcgtcaacaactttgacaagtaaaaaaa

SEQ ID NO: 109983 - DNA, 345 bp, Glycine max
  unsure (1)..(345): unsure at all n locations
cggacaataagatactnggtctaagcttgtcatgatagattttaatataaaaagataaaagagagtgaaaagtatgactatgtgaaaaagatgaaagagatttgaaatgagaaaatagaaaatcatagtgctagtaaatatttcgtgtttaaaaatcatttgtaccattgcaatcttattcatgtgaacctgtattaaataatattttattgtggtatatatatatatattccattngattgtgattgtggtatcttttaaaaaaaattaacacgcataactaattatggagagatagaatcgaatatcattagattgtggttaccagcatactattcaatttta

SEQ ID NO: 109984 - DNA, 164 bp, Glycine max
  unsure (1)..(164): unsure at all n locations
atgaagaacgatgaataacggacganaaccttcactgattcgcttacggaaacatctctgaagcgttactgaagcacctctgctcggattttcttcacggaaacaatntgtttcacccaaaacagctgatatacatatccagggggctgatggatcattataac

SEQ ID NO: 109985 - DNA, 314 bp, Glycine max
  unsure (1)..(314): unsure at all n locations
accaccaaactagtatgaattagtagtttaagtcacctactacacantaactcagaggatgccgaaatccattgattacacaaaaagaagcaatataaaatgtaagaatattgctaattcttatatagtttaattacgtaatctacttatacacattatctatcagtttactagagtcagtaaatcaatcccacagaacatgcttgaaagcagttaagcatatatttaaaactatcaacttatgggtatgggagaacagtatcataaaatcaaatcatcgtgtaagttgcttaaaacaacaaaattgagattca

SEQ ID NO: 109986 - DNA, 349 bp, Glycine max
  unsure (1)..(349): unsure at all n locations
tgtgctaagatttacttaacttatcttctacgttactaatggtatnttcctattaaaaatctttacacaagatgttcaaaatggtgtaattttcagctctatatctctttctatgaaggtctggataaatgcgaaagtcccttagtgcattttcttctgcttaagtatgcttctatcatataaacctgaatatgtttgtaatgaccttgctagaaatgaaagaaccctcatctctgaatggcacttgctgtatgacaaacatatttgtcttattacattcatagtgagaacttctatatccaattagataaaacaactgttagagctactgaatngccatttggtcatc

SEQ ID NO: 109987 - DNA, 281 bp, Glycine max
  unsure (1)..(281): unsure at all n locations
catgaaagcgcatgaagtagnggtnttaaaggcatttttgtcacttcacttaaattgctgggtgcacctagcaacacccaaggggttttggatgtgctcactatacccatcaaggcatccacaattcanattgagtaccttacaagttgtgtacaacacaaaaataacaactttttcattatctatgctctttcatgatagtaaccatggtaaatccgatgcttaatttcagtgtcttcattgtttctatttattcaatatatagtgncatatcgttgctg

SEQ ID NO: 109988 - DNA, 409 bp, Glycine max
  unsure (1)..(409): unsure at all n locations
gcngaatcngacatccgtgtgaaaagttatgaccttttttatttctcaagagcctccggtggtcaatgtcgagcctctcgacatattatgcacccgaatcggacatccgtgtgaaaagtcatgatcattngaatttctcgagagcttccgatgtgtaatttcgagcgtatcaatattttataaccgtgaatcggacctcagtgtgaaaagttatgaccatttgaatttgacgagagcttccgttgtntcaattcgaatatcactatatgtgatgcgcctaaatcggacattcgagttaaatgttatgaccatntggatttctcaagagattctgtngntcaaattcgagcctctcggcatcttatgggatcgaatcggacattcgtgtgaaaagttatgaccatttgaa

SEQ ID NO: 109989 - DNA, 534 bp, Glycine max
  unsure (1)..(534): unsure at all n locations
ctgcacgcatgcaagctntcctcttaggacctacanaataattatgtgcttatatagacataaaatgtatgtatattatggtaaatgagattcatcaccataatgtgagaaaattataaagagatactgacaatagccatgtgtagatactgtgagtaatacaggatgggtgtnttttttntttactntttatgtgaacatgcaaaatgttgttagtgattataaatttngcaatacccgatccttttaaacaacacttgactgtagattnttaaaaacattgtgactntggaagttngagtagtaaaatagtagctgatgtcattccttttacaaaatcaactgtatttagtaactattaactgatgcaatggctattgctgaacacagtattctggcttatcgtaacatctacacactacagatttcttcaggtcaattatcatttttctcatatnactagatttatcattatttanctcaactgagtaatcatgctntctgcattcaatttacgaatgatacatgtaactg

SEQ ID NO: 109990 - DNA, 316 bp, Glycine max
  unsure (1)..(316): unsure at all n locations
atatatgtgctcctccaaaaaaagtttgatttgaaagtttcttgtaacttcaggccaagaacattaaactttccatgaacatctaacttgtttacaatgtgctttagctcaaatgatgttaatttttacccatttcagatctgaaaatagtatagtccctcacaacttcaataaacattgtgatggtatcaaactccatcccaacctctaaatgcacttctncaaaactacttgtatgattgtattganggatacatgatttaacttcatcattatctgcaccatttgtaacttcaatttcaactctagcaacttc

SEQ ID NO: 109991 - DNA, 370 bp, Glycine max
  unsure (1)..(370): unsure at all n locations
cacatcaataacttataaactgaaaatcttataagttcaggacgcattaacatctataaaaagaaaagcttcattgcatataanattgaaatatcacaatatagtacatatattttaaggcacgtgtatactattattaataaattaatataattgaaatcttttctggaattcgtagagtttcgtggtcttaattcttcttctccacatctgttggtttgaaaactngtatctcattagtgttatatatagagacacatcgtaatctttaaagtgtgcaacgtataaaaagttctcttagtgtagtcgtgaacgtatgtacatacatngtatgttgaactatagataaaatnntgngtttctctctttc

SEQ ID NO: 109992 - DNA, 260 bp, Glycine max
  unsure (1)..(260): unsure at all n locations
gctaaatatatagtcggtggttgctttggaatcatctgaaagagtgttccaatctgcatcgttgtttccttcaagtatagcgggataccctttgatatgtaatccaanggttatggttctnttattgtacctcattaccctttcaatagcgtgccagtgctccatactatgtctactagtaaacctgcataataatcccacaacatatgctatgtcgagtctagtacaatctgtggcatacctaaggctgccaatgatac

SEQ ID NO: 109993 - DNA, 291 bp, Glycine max
ttttttcagaaggacacctgatacctccaagaaaattaacttaatctcttatgacagcatttgctcataaagctccaacctatatccgacactacaaagaatgtccattgctgaaaaaccagccatcacatggattcttacacacgaaaccatttcaaccatgtcttgaatttacccataaaaatcgtatataatgccaaaatgcaaaaaaattatggtttctaatcgatggataaacatagaataaatcacaatccgcatgaattctcaacatagtttcaaaataaaata

SEQ ID NO: 109994 - DNA, 311 bp, Glycine max
  unsure (1)..(311): unsure at all n locations
tgatgcgtggcaacattccttttttttggcgaagatcaatgtctcaatcacgttgctcagcaagatagttccacattggatcaagaccttagaatcgtctaattccacanaaatgacgactcaaaagattatgaacatctctcaacaccgtgacctgctgactacggtaagtttggaaggtaattggagaaacatacaaaaagaatacatcaacaatttatgtgtgaacgcctatgcaactcaattaaggacaggaggacggaggtagactacaaaaaattataaaaaattaattacaaaaaaaaatgaac

SEQ ID NO: 109995 - DNA, 423 bp, Glycine max
  unsure (1)..(423): unsure at all n locations
tgctccaaganatgctcaatatatctcaccaagtattcaaaaagagatattgtatattcttgctaanaaggtacgtgctgcaatacgtgaagagaatggtattcttagtttttgtcttattatcgatgaagctagagatgaatcaaaaagagaacaaatgacaataatgttgagatttgtggataaatatggacatgttcaagaaagatattttgatcctattcatgttgttgacacttatttaacattgaagaaagaaatttcaagtgttctttctcgccattgtattgatattcaaaatcttcgtggccaagggtatgatggagctagcaacatgcatggtgaatggaatgggttacatgctttatcttgaaggattgtcctatacatattatacccatttatcttgctcatcgctacaac

SEQ ID NO: 109996 - DNA, 209 bp, Glycine max
  unsure (1)..(209): unsure at all n locations
atttatttcaattaacctatattttaaatcatgtcttcgtgtctcaaatgaatgggctgtactatagaaacttacttgattgatcatatgctataataaaccttggatgcatttaatttgatcaaagtgaggattttgtggatgtaccgaaactgctttttttcttcttttttctcatgctttgttctctttngtacattgctcaggta

SEQ ID NO: 109997 - DNA, 354 bp, Glycine max
  unsure (1)..(354): unsure at all n locations
agctcgcattcattgtcttttttttatatactntctgctggattcttcttatgtcttgaagctattgtcaagttgagctacaagggattatagatggtggcggatatttgtgtggctgtcaatgtgcaatactctagagtaagacatgtactctatttctagttatggttggagattctgttctgtatttacaacacggctaactttatcattttntcangtccttagtgcctatgagttcgagcagcatgctggagcccacactagacatccaaattatcatatattcttataaaatggaagaccgatatatagtattatacatgaaataacaactgctccactcaatatact

SEQ ID NO: 109998 - DNA, 401 bp, Glycine max
  unsure (1)..(401): unsure at all n locations
gcgcgggtctgggagacanaggtcaagtgttctctttatgcgaagatgatgtttttagtacatngaatttggtacgaccatgcnctcctgatnttccagttgggaaatggcgagtggaggaacgccccggcatttacgcgacgagcataatgtaaacctttacggtttaaaagctctatagntgggcctaggctttagagtntttcctttggttaaggctttgtgtcttttgttggtgaatttataatacaaggatctttcttcatctgttcctacgtctctacccattctcattcattggcatgtntacttctttntctgaaacgacagatccgatgacgagtcccccgaaggtactaatacctgggacccgcctatcgacttcgagcaagaaatgaatc

SEQ ID NO: 109999 - DNA, 448 bp, Glycine max
  unsure (1)..(448): unsure at all n locations
gcttctgatgcaattcgctgagtgagtaatanataactcaagttatcatatgagaacagnntttatgtaattcagagccattcagatgaaatagtctaataaatntaacttcatatcaagtgcagccaagactcaatctatgtgccatcttaatatatcccctttgaaggagtataagtaattaacaagattcaccacttanggagcacttttcctgaatttgtgcatctacgttaatgaacatggaggatccattaataacaatcagttcagttgtctacattcttcaagtagaaactcaataagaatggcttactcttaggcatggaatataanaagggtttatgtgaacagtntttaattgtattgtattaagaatctgatacagtaggccaaactgtgatatatgatggtgagttcattgaccatgtaaactgtaattcgttta

SEQ ID NO: 110000 - DNA, 267 bp, Glycine max
  unsure (1)..(267): unsure at all n locations
tcctgactcaccatataccttgacccaggtgagaatgtcaatccttaccctcggaagcgaaaagaatagaagggaaatttccaatcaaagaaagggaaagaaggaagatgtgcaatctaagagaatgcaaataaagaaaagaagaataattccccaatcaaagagtgggagaaagcaaaaagaaaagaaaggaaattcccaatcaaagaatgggagaaagtaaaaaatgaagaataagaatgaaagaaagctcctgatcanggatcg

SEQ ID NO: 110001 - DNA, 475 bp, Glycine max
  unsure (1)..(475): unsure at all n locations
atcttaagtcaccgcggctgcagcttccacttagatcgagccgtatcagttccaactctcccgcgacgccgctaaggtcattggcgatgctttcccatgatancaccactgttttatcacctgatcgccaaccggatgcccncaggtgtcgttgactnttttgaagtggtcgatatccataatcatgacgcaataaaggcgtttttgggctgatgctgattgaactgtcagttcattaaaaaaataatttctggtaaatatattggttaagggatcgcgatgtgcaatgttctntgttactcgtagcgcactgaatatatggcacataaatattaccataacggttaacttactgactacttcaatagtgcgactaatataccaagtggacacgctatacctgctcataaataacagagagatattgtcagtacggacanaaagcatcaccgtcactcattcagatatcatacgt

SEQ ID NO: 110002 - DNA, 405 bp, Glycine max
  unsure (1)..(405): unsure at all n locations
aaaagtganatngagaatgagacannattgaagcatactctcacctcacacaagtctataacatcaatttaaacttgttcaaactggatgtacgcttaaaatctcaccgaatcaaatattgactcttccacacccaaatntgccctagaaatggctcttggttcactntggtcatntgttnttctctctagcacagtccaagctntctcataagtcctaaatgacatttcaagctaggagtaactcactctaacctctatatactaccaattccagatttggccttccagccctcaaaaattcactctttttccactcataacaccacattntcactttctgaccctagggtaatctaccattcatctctaacagnnttccataagcaatntcagtacatgaaca

SEQ ID NO: 110003 - DNA, 198 bp, Glycine max
tatcgagatgctcgaaattgaacaatggaagatcttgatcaattcaaatggtcataaactttcactcggatgtccgattcatgcacataatatatcgagacgctcgatattgaacaacgaaagctctcgagaaattcacatggtcataacttttaactcggatgtccgattaatgcgcataatatatcgagacgctcg

SEQ ID NO: 110004 - DNA, 341 bp, Glycine max
  unsure (1)..(341): unsure at all n locations
ccacttttgtgagtggttntattagcattntgttagttgaaataaaggcccaaactcgtgttaaagtggctgtcgattctcttgaaattaaagtttaataaggtgaaaactctatgaatgtggctgcctcttggctgaccaagcagttgcacatttttccatatgtttatgtgtcttaattctagttntaattaggtataatgacaccatcaattgttgttatcaattctagttttaattaggtgtaatgacaccatcaattggtgttattggtgatcatctcacttgtgtaaccaactngatgtcattcctatttataggctgcacattntctaataaaa

SEQ ID NO: 110005 - DNA, 356 bp, Glycine max
  unsure (1)..(356): unsure at all n locations
tgagtgtctggaaatgacttgatcgagcaaatgtatgaattgaatggatctggatgattggatgactgtttggatcaagtntgccgtcattaaaagtgaataagcatatgattggaattatgtctganaatgttagtcggttgtcagattgattgtgaatgaatgcattaaccgcatctcggtgagagtgtgttctctataagtttgagagatacgactatcatatagtgctgatgtttgcgtgaatctctgattatgagtgtgtgctgatttttgagaatgatgaaggccatgtttgattatgaatagctacttatccataaagctaaccttgtgattgaatgaattatcccttg

SEQ ID NO: 110006 - DNA, 380 bp, Glycine max
  unsure (1)..(380): unsure at all n locations
agcttagcgtcagtcgtgcactgagcctggctgaagtatcctgtngcgcttagtgcactgatctcacgcttagcgcacggctttgatgctgatgtctgccanattcttctgtcgcgctaagcgcgctgaagatgggcttagcgggggatgcgcgctcggcccactgatgagctaagctcaactgtcacttttggcacttcatgacttagcctctnttcacctgaaattgcacacatttcatcattaaatccaatggacatattctagagacagctttatccataatacaatttatttacaaaaatcactaataaaaataaccatagattggggaaatatacaacttttggaaaatgatttctatacaaaagttagtcgta

SEQ ID NO: 110007 - DNA, 410 bp, Glycine max
  unsure (1)..(410): unsure at all n locations
tagtgtaagagttagaagtggctatgatctatacttgtaacttngataagttactggaaacttggtggttgccaagaactgtgcatagtcttggtgttaagacaaaccaatataaattcttttgttgctttcttgtngtttaactgataaaggaatttgaatttatttttagatcttatatctntctttgtntttcaaagaanacggtntttctcattgtttgataccactttatcanaacctctctaagtattntaagtgtatattcattcaattttagtcttaaaaagatttaaatttctaaaacaaatcaaccccctcttctgtgttattgcttctcactacaacactcaaatactgcattccacgcctacaacatgtcatatatnttattatctactatctcttaa

SEQ ID NO: 110008 - DNA, 300 bp, Glycine max
  unsure (1)..(300): unsure at all n locations
caacctctttatgtcccttaacatcttcaaagagaatttgtgtgataaaatgaanactangaatggtccatgctacttctttggggctcccgattctttctatgacatgcttttcccaaatcgaagcctgcattntgtccattcctcttacacaaccttcaatggctatctaaggtaagtatgtattcattaaatatntttttatggaanatgtataataactnttacataatcacttgtagaaaagcttanatcactcctgataatataatttacagatgtgcaatatggtcttaaaaa

SEQ ID NO: 110009 - DNA, 432 bp, Glycine max
  unsure (1)..(432): unsure at all n locations
atctcctctagatagatgcttttatcatctgcaaagccaaatgagatgaatactgcacagtggggatgaaattanaatngacatcatccctgaggctgctcatatctctggaaaagtactccanacaaagcacatacagataaatggagagaggatccccttgtctaagaccctgcttgccctttgaagtggccataaatggatccattgactgccacactaaagaaagtggaagaaacattccatgatccaagtacataactgtgctgggaagccaatggacttaagcatcctatccaagaattcctangaaatggaatcataagccttatgcaagtcaattttcaggaggcatctcanagaggatcttttctgtgcatatntacgcanaatctcttgaactaagaagatgttgtcatcatctttttgtct

SEQ ID NO: 110010 - DNA, 293 bp, Glycine max
  unsure (1)..(293): unsure at all n locations
gatccttatcactcgctcactatctttttttgttttgctggtttggagatctgacggagaccttttaatatcacaaaaatgcccattataaattgaacattgagtcaaaaactctcaaagctctgatagaagagagttaaaccttaatcttcctaagtatatacatttgatttcagcttaaatattattgacattttctgaanggtgttgcatggaaacaaattgattgttagtacttagtccacaagatcttacataaataatanatggaagtgcaaatgtggtattaaatg

SEQ ID NO: 110011 - DNA, 249 bp, Glycine max
aatctaaaatgcattgtttgaatatctttctatgaagaatgtatatttttggaattgtaatacataattttaaacaactaaaatgtggattgtaattccttctaaaagtgagaaattaaattctcttcttatatataaccttccaaaatgttcgcgtatgtcctttataaccttcatgctctactccacctgaaagtttctgaaatctcattctcgaactcgcgactctgtcctcatgccgatgatcat

SEQ ID NO: 110012 - DNA, 292 bp, Glycine max
  unsure (1)..(292): unsure at all n locations
tgaatcaggagacagaaaaggaagagcctcctggatacctgagagactctcccaaattccttgtaaactgaagatctatgagaaaaaaagaggggaccaaatgaagagaaaggggaagagtgacttagtggttataacttatctcaatcgcaggtcactcttttttaacngagctctgaaactttgaaaactctgaagctttgaaactctggagcaactactccacaccttatactactactctggagctctgaagatctaagactaactactcccactttatatactactc

SEQ ID NO: 110013 - DNA, 498 bp, Glycine max
  unsure (1)..(498): unsure at all n locations
tgcagcttctccctatttcttaataggggagaggtgtaaggtanannatgtcacncntcccctgtattcgagaatcacttgannattagtgaaaaaattgttccatgaagaaaattcangccgaggcacttncattacgtttccgtaaccgttctgtgggtgatttcgcgaagattttcaaccgttcttcattcgttcttcatcgttcttcggtcttcaaccggtagttcccgaaatcgaacttttcaattcattctatgtactcgtaatggtcctcatttgtttcgcgtacatttattctcgtttcatatacttttcgtaccccttttgacgtgctgtagtcatttacttaagtcattttctcccctatcaaannataaataaatntccaccgatcatttgatttgtaatatcccgtattttcttgtaaatgaaatacaccattcgtcatccgtaccacattgtaatcaaagaagtaatatatatatatcaaattct

SEQ ID NO: 110014 - DNA, 216 bp, Glycine max
  unsure (1)..(216): unsure at all n locations
gatctctgacaaataaacgacaataattttactcggatgtccgaatgaatcccataatatatcgagtaactcgtaatggataacgaaagctctgagaatattctaacgacaatatacttttactcggatgtccgantgagtctcgtaatatatcgagaagctcgaaattgaaaacaaaagctctgagcaaattcaaacgacaatatacttttactc

SEQ ID NO: 110015 - DNA, 363 bp, Glycine max
  unsure (1)..(363): unsure at all n locations
ggctgcagcaccggctccgcttccctaactgtactggaggcggttgcggtggctttatcctctattggtttctggagttttaacatgacctccgagatggaagccatttgatcttttaaggccgatagatcggccttcatctgttcctgcacgccctcttcattatccatttttctggatcgagtgttataggggtgccttggtgtttcttanttatgatgaaattcctaaagaaataaacaacggtgagtatgccaccaaaacatgagtatgcatatggatgatccgagcactcggatccaccccaagattttagataacgtaatgagtccagaacttctcatttttataaaagaacaaagc

SEQ ID NO: 110016 - DNA, 232 bp, Glycine max
tttttttgatcgtcaaacgatctcgtttcaacagtccttgatgattaagatatgaacctttgatatcctgcactaaatacttaagagacttactcttgttgtccaacttatgtcctgaaattaaatcgaaggctttaagttaactcaggcattgatgctaattaagtttacttttattttacaatgccatcatatggtttaactatgtattctaaaaactgcttgaatgggc

SEQ ID NO: 110017 - DNA, 163 bp, Glycine max
  unsure (1)..(163): unsure at all n locations
cttattccttaatgganggcgcctnctctcacctattntcctttgtcttctgctgcatctgcatggtggaaaatcaccattaaaggaccccattgaagctcaaagatccagcctccatagaagccccacaagcaagcttccatcaagtggtaatcagagcaca

SEQ ID NO: 110018 - DNA, 358 bp, Glycine max
  unsure (1)..(358): unsure at all n locations
tgactctgttgtcttatatnggatcgacggtaaatagcaaaggtgagttgaatccgaattataggaacaaaaaatactatgatgtactatcattgtggatntaatataatgtatattctgcccaaaaaaaatccttaattctataattgctactggacgattgatacaactttttagtggattgtagtcatttattagtgtcttcgaacaaaacccctttgggtttttatattgaatctgattacacgtgtcataactctgtgattatagttaaattgatttgctcggcatctctgaaataaaatgaatggaatcatatttgtagaatctcattgtgaaaaaaaaacctgctgactat

SEQ ID NO: 110019 - DNA, 342 bp, Glycine max
  unsure (1)..(342): unsure at all n locations
acccatcaccaggtagaacgagataactgttttagcgcaatgctaatcaaanatcatactttcatctcaaagagtgtgcaatgtataaatcaatcatgcacaagagaagcattttagctaattggctatcttaaatccatacataggcttcatcatctacaatgtcacacattcattgcatactcagatattcatgcaaaaatcattactcaatgttagtcattctcccacaaataaagatcacactctcaccgggttgcggctaatgcggtccttcacaatcaacttgacaaaccaactaacattattagccatgatcccacatcatcttcgttctcttca

SEQ ID NO: 110020 - DNA, 382 bp, Glycine max
tctaatattaatttatacataagctatatttaatttatgagacaatcttatttatatcttgttggagattcttaacctaataacgccttcgtgttgttcaatgatgttacccttggtcgagatctagaacgatatattgtagttagaaactgagcgaaccacctatataactgtgtcatctggcagctggttaactttcatgttaactgtggaactgccaacataacctaagagtaactcaagcattgttataatgcactctaacacagagaaacaataattataataatctcgtctggtgttgtatttgtattaatgcagagcatatgcaggatgacatcataatttattctttatcatctttaaaatgcatcttcatttt

SEQ ID NO: 110021 - DNA, 342 bp, Glycine max
  unsure (1)..(342): unsure at all n locations
tctaagtgaaggtagataagattcttaatatttctcaggctcctgaatccgtttcatggcagaagaaccaagaataattcatagtatctggtgcagaattatggttgaagatcagccctctgtgaatcagatgaaaaagactagtagtcctatatatggctctgatgatgctccatgtagcattggcaagcttgctgatggaacagaaacagatgtattcccatataaaatcaccaattctactatttacccagtctacgaatcaatgatgaagtagtcttctggtcttaatgaagtacaganagtctaatgatatatgacacaatgagaatcaaagaaatc

SEQ ID NO: 110022 - DNA, 393 bp, Glycine max
  unsure (1)..(393): unsure at all n locations
agctatggtaagatctgngacctaatcatgtccgtttttctttctgttgccatcgcttccctcgcccaatattatgaccagcctttgaggtgcttcacctttggggacttccagttaacacccacggtggaagagtttgaagagatcctgngatttcctctgggaggaaggaaaccatatctcttctcgggattctatccctccttagctagaatttctaaaatagtcaaagtctcgacacaagaattggaccgcgggaagcangtcgaaaatggggtgggtggtgtaccaacggaaatgttggaagcaaaggcgagagtctttggcagtcaatgcgaatgggccccgttcatggacatcctggcacttcttgatcttcgggtggtcttcttt

SEQ ID NO: 110023 - DNA, 318 bp, Glycine max
aacatgatagactgtggatcatttgtcttttggacgaggcagtgtgattcgaaatctgactttatgctaatttgctgtgaaatgtgcatagaatttggctgtcagaaatgatgtgttttgctggtgggaaagagtatacaattggttctggcttttatatcaatccacggtccaatgttatttatgtctaggacctcagtatatttcagtcgtcaacggtacgaacggaacgaagaagttatgggtattgataaaaagttgtggttggttggtgttggaaatttttgcctgcctgtttgttggttgatatcatgatgt

SEQ ID NO: 110024 - DNA, 360 bp, Glycine max
  unsure (1)..(360): unsure at all n locations
agcttcaagaatcaagatcaagaggcaagaatcaagactttgatcttatcaagatgagtatganaagggtntttcaaaaattgagtagcacatggcattttctcacaatatgtctaccaaagagtttntactctctggttatcgattaccagattgttgttatcgattaccagtagcaaaatgaatttgaataagttctcatatgaatctacaacgttccaattgatttcaaaaatatgtaatcgattacaatggtttggtaatcgaatactcagtgccttgaaccgtgaaattcaaattcacatgtgaagagtcacattctttcacataanagctttgtgtaatcgattacactgattt

SEQ ID NO: 110025 - DNA, 396 bp, Glycine max
  unsure (1)..(396): unsure at all n locations
agctntataagcgcgggtctgagagacaaatgtcaagtgttcgcgatatgcgaagatgatgttccgagtactttggatntggtacgaccatgccctcctgatntccagctgggaaatnggcgagtggaggaacgccccggcatttacgcaacgagcataatgtaaacctttacggttntaaaagctctatagttgggcctaggctntagagtttttccttttgttaaggctttgtgtcttttggttttgaatttataatacaaggatctttcttcatctgttcctggtctctacccattctcattcatttgcatgtntacttctttntctgaaacggcagatccgatgacgagtcccccgaaggtactaatacctgtgacccgcctatcgacttcg

SEQ ID NO: 110026 - DNA, 254 bp, Glycine max
ttgatgcaacatctggagaggttaatgatacatcgagatgatgcgctccatgatatgtcggatcaaatggagaatagagatcatactgaataatataggatgagaagaaggaatgatggtgttcctatacataaccgaattgatggtgtataactcaacattcctccatttaaatgaaagaatgatccataggcctacttggagtgggagatgaaaatagagcatgtgttctcatgcaacaactatgatgatga

SEQ ID NO: 110027 - DNA, 195 bp, Glycine max
  unsure (1)..(195): unsure at all n locations
cacattatntccatgacacaaatgcaaatatgatgaattggaaacttcatgcaaaacttgtcatgcatgcatctatgctgacactcaaatgtcaaatatttatggtcatgtgatgctatggctcaggattcatatcctctatttttatatacccaatgcttccaaaatatgtactgttatcaattcgtgcattca

SEQ ID NO: 110028 - DNA, 265 bp, Glycine max
  unsure (1)..(265): unsure at all n locations
catggcttaattcctagagaaaggggccttctctcacctcttctcctntgtcttacgcttgcatctcatgggggaaaaccacaaattaaaagatctcattgaagctcaaagaatcggccttcatataaagctcacaagcaagcttccattaaaaatgcaagctatctatgcgtgttgacaatggaaggtaaaggaaataagctatgaaagtaagcaagacatgctaactangcgaaatcctaaagtatgtggatgaaccacatta

SEQ ID NO: 110029 - DNA, 235 bp, Glycine max
aatctcgattcattggctcatatccatcgggtgtcgtataagcgtgtaagtatagttgaacacaaataacatgtgtttaattgtcgtacttaacatgtagtcatatgcatgcatgcattcacatctgcatctgatcgtcccgcgaatagaatgatcagtaaaagacatgttgggtgatggtcaataccatgacaaaatcaaaatgaaggtaagtgaagggtagtatcagtatttt

SEQ ID NO: 110030 - DNA, 279 bp, Glycine max
  unsure (1)..(279): unsure at all n locations
acctagagcaattccataaaaataatggagaagcggagaaggagatctttgagaccttcacgaaagtagaggtgaacatacctctattagatgtcatcaagcagattccaagatatgctaagtttctaaaggagttgtgcacctaccaaaagaagnttcagggcaatgaaatgattagcatgggcagaaatgtgtcagcattgataggtaaatctatttctcacattcctgagaaaagtaacgacctatatactttttgtataccttgcattattagaa

SEQ ID NO: 110031 - DNA, 312 bp, Glycine max
  unsure (1)..(312): unsure at all n locations
gaatacatggttttattgacacaatntttacttgaatagaccgtaagaagaaaaccataaacccaactgtcaacgaattaatgtcctgcgcagcatgtatgtataaccagattaatgcggtcggcatgtacgtgaaagagtcaatttatattagcgaagttgcgtttcaaatggtgtaactatctgcgaaccagaatagtaattcaaataaatgactctctcgctaaatagcaaattcctatatttcttaaggagcacatttatngttgtttctcattgaattcaataactataccgctaacacatgaatac

SEQ ID NO: 110032 - DNA, 329 bp, Glycine max
  unsure (1)..(329): unsure at all n locations
acatatctgcaaactcatcaagctccagaagattggacatctcgtgcattntcctccttgtcttagctttgacccttcttgcaaactttccggccttcttctttttcttcaaagctcgaatctataagaaccagcaaccaatgatgatacatagttagaaagtggaaagcntgngaaattataaatatagatggaaaatatattggtnagtacctgattcgggacacatagagtggattctcgtataaagtgggcctcanaactgccccaaatatttaattgtgtcaagcgaatcgcgggccgcctaaacagagttacaccaggtaaat

SEQ ID NO: 110033 - DNA, 355 bp, Glycine max
  unsure (1)..(355): unsure at all n locations
tcaacaagaatcaagccaaagctattgtgccagcaatcaatggggaaaaacacaccaaatgattatgatgatggatggctcaaattctcacaaagggtaactcatcactttcaaattgagctntcanaactatcatgacatgtagagaagaatcaaagatntcaagtcacaaaatgtcaagaactttattttcaaaacaantacccatttctngaacatatcctataattcaaagaanaacatgcaaattcgtacgtgcacacaaaatngacccaaaatattaaactgaaaatccgacgaagctaacaacattaacanattaacacaacttacanattaacaaaacccacacaac

SEQ ID NO: 110034 - DNA, 256 bp, Glycine max
ctcctatactgagtgatatgagagatgctttttttaatatgcacaaaaattcatgtgctccagatggacagaactgctaaaagtcatatgacaagcggcatgaattttcacccgtatcacttaccgttagacgttactacatgttaaccataggatgctttcggacacctcactaggacacattctgttcagagaatagcccgcgtggacatgttactcatgcattttatcataatatctgatttacccatgctgc

SEQ ID NO: 110035 - DNA, 411 bp, Glycine max
  unsure (1)..(411): unsure at all n locations
agcttatagtgttatgtaaattctacagactatcaccctctcactttttgtatagtattaccttggaggaaagtgtgatctggtcaagtntgcccacactgttcatcaggctgggatgtacttgattcttcgaataggcccatttngtgctgcagaatgagaatttgggtgagtcccatcatcatctttgtctattttttttggcaacattaggagaggtggtatgtaagagactaaactgagctataagtttcagtagtgtatgttggaggaattaattcatattaaccacttctactaagttgatcgcgattcataattcttaacctagctatatgttacagtggtgtaccggtatggctgcattatgttccaggcacggtattccggacttacaatcagccctttatg

SEQ ID NO: 110036 - DNA, 248 bp, Glycine max
  unsure (1)..(248): unsure at all n locations
agtacaagtgaaccaagcctttatttcatggtttccgcatcgactcctccttcctccccaccatcgacatcgtcatcggcgagctcttccaaaacattcacacaatcaatttctcaatagatgcatgcgaagaactatcttctttggattcaacatgtggaacctgtcattcacagtcatcatcttgaatgctacatcattaatccgtaaattcctgctaaatatgcgtcantngaagatcacaattc

SEQ ID NO: 110037 - DNA, 395 bp, Glycine max
  unsure (1)..(395): unsure at all n locations
agcttngtggtntaagctcacataggcatctcccgcattattttcggacttcangtaaagcagtctgcaaccacgttgcataactgacgacctaaatatgtngtcatgtcaaaccaaatttaaaaactaaaatantaaataaatttaactaatttcgtcctattcaataatatcatatgtaaaaaaccttattcaccaaacaaaatatctaanatatccttaatttaataagaagtttattnttaactacgttnttttcctgtgcagttaaatgtaaatgatactntaagaaaataattaattnttaaatgagactattaaaattaaatgatgttaacttatttntttaattagcatgtatatttnttttcttcttatattntagtcttctcaat

SEQ ID NO: 110038 - DNA, 297 bp, Glycine max
  unsure (1)..(297): unsure at all n locations
atcaaacaatcgttgttctacaaaaatagctaaataataaaatgtagtttgcccaaatatgtgtgtgtatactaaattatatagtaacatctaatttattctctttgaatgctctctctgacttaaaaagatagaaatttagtttctcttgagttgttatctcanaaatactaacgtgagcaacttacaactgtgttgtaccattgtttttagaattgtgatacatcaacaaagggattaaagatgttgaagaattggagaagcgcgtttaatgcacaaatgcatgctcatcgcaag

SEQ ID NO: 110039 - DNA, 272 bp, Glycine max
gcgtgattgccaactcgttccttcagcgctattatacggactatcgcatcggaatagtatgcgtgaatgccaacttacatcattcgactcggattatacgactaatccatccgataaaagtatgtcgttgattgctaagctaaatcattacgacgtcgattatacggataacaacatcgataaagtttgcgttgattgccaactcggttcattcagcttgattttacggactaacgactcataaagtatgcgtgattgtaactcactcattg

SEQ ID NO: 110040 - DNA, 441 bp, Glycine max
  unsure (1)..(441): unsure at all n locations
cttctaatgctcctcttgaaatgaaatgcacaatgccttaatctcattattggttatgagaaattctatctttgntccttcattcctcattcatcgcattttttgtgaaaaaaaaatgtgtgttgctctgatcggctngcgggtctatttctttaccaagcgtgttcgcactttagtgaaagtgtttagagacatcaatgtctcttgtctttacatttccaagactccaatgtcttctatcttttacatctacaagacttcaatgtcttgtgtcttntacatttcaaagacttcaatgtcttgagtcttttacattacaagacttcaatgtcttctgtctttacatttaaagacttcaatgcttctgctttacatttaagactcaatgcttctgtcttacattacagacttaatgttctatctttacattaanacttcatg

SEQ ID NO: 110041 - DNA, 248 bp, Glycine max
  unsure (1)..(248): unsure at all n locations
gtcatgaactaatgggttcttatgtaattcattatccatttatatagcaaagatactagaataaccgttatataataataatatattttcacaagnttntantagtattatcatttcgctatctctttatcacactcttcattgtatctcataagtctctttcctctttctttcggttccctcgtgtaaaagttgtgagacaattatgtgantaataaacatttctaaggatgaaatgctgattcatt

SEQ ID NO: 110042 - DNA, 420 bp, Glycine max
  unsure (1)..(420): unsure at all n locations
gagacttatgttcgtttatgcctttcacatttttttctctggtgngtgtgaaatatangatattctancttttcaagttttatgttctaataacgcataattaagtggtagactcagctgtaaaatgttgttctttcctttatatggagaattatctttcagattaatgtgacttgtaataaaaccttgtgagcaaaactgacttgtgttataaatttcagatggatgtgcggactaattctctcgtcatgccatcatggacatgtgacagagataatgataagctacggattgccaacaatggtgtcgttcatagtgaagaacgaaccttacctattggaggtgatggttgggaaaagtcataaatgaagaagaagcgttcctgatcatactagatgtttctccaagtacaacattgac

SEQ ID NO: 110043 - DNA, 431 bp, Glycine max
  unsure (1)..(431): unsure at all n locations
agcttctggtgtgacatctttgacttgctttcaatcttacattcaccacagattctgccttcttctattntcagattgggaatgcctctaacagcacctttgtcaatgattntcttcatgcctcttaagtgcagatgtccaaatctttgatgccatattctgacttcatcttctttggaggatagacatgtggaggagtagctggtttcttgaggtgtccataagtaacagttgtcctttgatctgctgcccttcattagaacttcactcttctcatttgtcaccaagcattctgactttgtngaagttacattgaatccttcatcacacaactgactgatgctgatcanggttgcagtcagtcccttcaccagcagtactttgttcagactangaagtncatcatgaactagcttttccatccaatgatc

SEQ ID NO: 110044 - DNA, 522 bp, Glycine max
  unsure (1)..(522): unsure at all n locations
tgcagctgcttctcaatctcccnctttaatgatgacatcttctgtaatcaaganacacacacacacacacacatttttnctagtcgatcactcacataaatntacattctccccctttgtttttgaattgtgcttcacttaaaaataagttaattactcatgtgangtatgcttcacttnaaaataaagttaatactcatgtgnagttcttgattaatccctatttctctccccctttggcatcaacaaaaagccaaagtgcgtaacaagtatgaaacatacaaatacaactaatcattcacacaacaatcatggaanaatataaactaatcatgaagcaagaaacatggactagataaatatatagaanaatcacatagtcatataacataattcataattggtcaaacacaccatgcaaataaagaaatactaaatgtcaaatgtataataaatgtctgcaagtgattagtattacaattctaaacacatcactttagacatgactctataaatgatgct

SEQ ID NO: 110045 - DNA, 241 bp, Glycine max
  unsure (1)..(241): unsure at all n locations
ctcttcctttttcttccttcaatttcgtgctccccactctctctttctctacctctttcttttcctacattgatgcatccttccaagcttcttatccaaagctcatcttggtggtgaagctcttttntccatggcttattccttaatggatagcgcctactctcacctcttctactttgtcttacgctgcatctacatggtggaaaatcaccattaaaggatcccattgaagctcaaagat

SEQ ID NO: 110046 - DNA, 300 bp, Glycine max
  unsure (1)..(300): unsure at all n locations
tcatcataagacagcagacgcgcagacgattangattaaagcaacacgaaacataatattgagttgtataatataatacagtggataaaataagctcgagtattatcaagggtggaatccactttataaataaaagtggatagtcgaggaaatcaataaaatttacagtaacatggtattttttaatgcacgataaaaatngtcttacactctacaaataaagtttaagaacttctaatctgctntaagctnttcttggcgtagacaggaaaatacggttcctaaagcaattctctcatc

SEQ ID NO: 110047 - DNA, 324 bp, Glycine max
ttatattttaaaaccatcgttgattggaaatatttttgatacagttatgacacatttactgatagactaaaaaaaccataccacttacaattatgcctccacagtagttaccgataagcgtcgatgtcgtgaaagtaattaattacaattcgttaatgggtacatctgaaccaatatattaataagacttcctatgaaatcatatttaagaccatatttgtttatgatcatacttccgtaccgaacataatgatattattataagttaatttaataaacatgttaaattaataattatttattttaaaaatgctgaaaatttta

SEQ ID NO: 110048 - DNA, 361 bp, Glycine max
  unsure (1)..(361): unsure at all n locations
acacggagaagtcaacgtctganggttaccgtcaacgtttaattgacgcgtccgggaccaacattacattggatttataaataaggcggaccatatttgtgattaaatatcggtggactaaatgcgaaattggaacacaagtgggggaccaatagtgcaatcttgtcaatattaaaatataaacattggaaagtgtgaagaggagaatataaatgtgaaacatcacctaagttatagtcgtttaccactgaatatattctttttagatgagaaataggaataaacacaacaaacataagcaaactaagttctaatatgaacaactctttatttatcaactataatcaatagagctaactga

SEQ ID NO: 110049 - DNA, 329 bp, Glycine max
ttttttcatcaatattagttgagctaatgctttccttacagtaatggtggatgaaatagtaaagatatctagatgaaatgtgacaacatatgaatgttagtatataattaggtcaactatattcaatgtatttatatatgtgaatatgagttatatcttcaaattagtttgataatgtattttggtagtatgtaatctttgcttttgtcgatgaaaacatgttatataaggatgcttctagtttatttgatgagacgaaagaatatgcaatgaagcaatatcaatctcaatacaagaataagcgttatcatttaatcaagcttatctta

SEQ ID NO: 110050 - DNA, 151 bp, Glycine max
ccacaacccgggggtggttgcttggacatgctttccactcgaaatgactatgaacgtgatcagattcaggattactgaacagaaagaaagcatctcccgaggcttcatctaaaatgggctttctgtatgttttacaaaggattcctgctat

SEQ ID NO: 110051 - DNA, 86 bp, Glycine max
tatgctgctgtgagctcttggggctgatcttgagcttaatgaagttctcttttggttgatttccaccatggagatgcatcggaaga

SEQ ID NO: 110052 - DNA, 444 bp, Glycine max
  unsure (1)..(444): unsure at all n locations
gtcacctgccgcatgcaagcttcgtatgccctaatggagctcacttgtcgattcctatctccactcaagctagctgaatactttggaatntcggacaaggttntcaaatatgatactatcccagacaacccatcacctaacattggaaacgctgtaaccgtacaaccaaatgttcttaacattacccatcgcaacttcatcgaaatcatctttgagaaccctganaaaacaatccaatcatatcacttggatggttattcgttcttcgtactcgggtgagtaagcattcattcattctntacatatattgattgcacgagccccacccaccacttacataaatatcatcgtgcatgcattttcaacaacgaatatatatgaatgaatgcttaattaataattaattatatntcttanattctcattttttatatntacagcata

SEQ ID NO: 110053 - DNA, 226 bp, Glycine max
  unsure (1)..(226): unsure at all n locations
ttaagttagtatttctaatctttgtgaatgttcactcttttattcaatcctattttcaattttcatgattatgattatgtttangattgaaaacggattaagttatggattcatttcctaatttcgaaatttaataacaaatttgtttggatgatcttccaacctaatttacgatctcaaccaatttaaagattgattcgatngaactatctctaatgcatttgac

SEQ ID NO: 110054 - DNA, 119 bp, Glycine max
  unsure (1)..(119): unsure at all n locations
agtgccatgtagtntatgtagaaaaggttcatgttggtggtttctgggaggacgtaagcgaaattactgtattatgccttcaacatttcaagactaaagaattgagcttgggaaccaat

SEQ ID NO: 110055 - DNA, 375 bp, Glycine max
ataagcaaccagagaatgcaactcacgctataaatatattcaattgtatgtatgacttagtcaacacaaaacggaattaggtcatatatatttataacatacatagaataattgtaaagctgatatgattaaaaatatctctaaccttaagaaatggtgtcatgatgaccatagatgagttgattgtatgtgtgtgtgaaaacataaaattagatataagaatctattcatggaacacaaaagataagaggggttataatatgaataaaatggtaaaatagaatctcaattaaatagtagagatataattgagaagacaaaaatttaatgggttataagttatcttattcttcataatgtacttcgagtagctta

SEQ ID NO: 110056 - DNA, 373 bp, Glycine max
  unsure (1)..(373): unsure at all n locations
gtgtcatgaaanctatattaccaactccgctagctggtgatggtgcatcatagttntgctatgtcatctacctttggtctcatctctttaccttacaattcaggcaattatatcattaccctttntcaatatatagaattggcaacatgccaacatatctaatccaggaaattccaccactaatagtcagcctataatccataaccaatgaagtcccgcatctccaatttatttcatcatctaatattattgtagtttgtgcagatttaaaataagcatttggtccttcatttcaacatatatctattgtttagnttataattcacccaattcttgctttagtcattttcaacatgcagaactatcaacatgc

SEQ ID NO: 110057 - DNA, 119 bp, Glycine max
tttttctcaccaccaacggggctgaaaagaataaaattcatcctgggtctacagggtataataaccttattaacctgggtactattaatgctcctaaaccttccaaaaacctaaaaaat

SEQ ID NO: 110058 - DNA, 170 bp, Glycine max
  unsure (1)..(170): unsure at all n locations
gggtattcattttgcacaatatattgactctccttctaacttcatgagatatcccttgacaaattctncaagntctttttcatgtttctctcctccttttcatatggcccaattaactacaatacaatttggtatgaatggatagaaagtgtttggaatggggttttttt

SEQ ID NO: 110059 - DNA, 158 bp, Glycine max
aacgaatgaagaaatgtatttacactctttgtgtctagatttatacatactacaatatctttacactcaataccttatggagagttgaccattaccaagttataccaaattagtgtttaccgctaacaactcacaattacagttgttgtctaagtaaa

SEQ ID NO: 110060 - DNA, 197 bp, Glycine max
acctgctctgtctactactttgcctactagtgattcttatgatgcatagccccatagagagacactcgctaagctctgctaaatatatatgtgaagatttttctgaaaaaaatcacggtgatagacaatgcattatatgtggacaggatgaaatttcagttattttcttgccatgtgcacaccatgttatgtgtgct

SEQ ID NO: 110061 - DNA, 204 bp, Glycine max
tgtactctgctaacatttataataaaaatctaccattttgttatctattctacaccaaacaccaaatgtaagtcttctaagaaagaaaataatatatattatataagtatggtatacataacaaagtaaaatattataaagcactataattaaaacgcaagtggtatacattatataaaatgcataacaactaaaacactatcc

SEQ ID NO: 110062 - DNA, 425 bp, Glycine max
taatgaaaacttgatcttaataattgcactatctcattataaatacagtttatacataatttattaataataatatgccaaaattcattgttcactagattcacatagaatgctgcaattgcaaattcttatagcggtgtcacttgagtgtgataataagaatattttgttgagaatacattcaaaatgctctcttattttttaactctgataggtgtggtcaagctgtgtttcaatttctttcattctgcagctctggttttttaggaaaggtgctcatttattcttaataaattgtacttgcttcctgatttgatcaaggggtgctagagtggtggaaaaccatgtgaagctctgaactcatgtggactctctgacataattatcatattcttgctctaaaaaaatatgtaacatgacctcat

SEQ ID NO: 110063 - DNA, 332 bp, Glycine max
ttaggtatgtgacaaatatcgttgcaccaaattacacctcataatataacactaattttatacaatattggatgtggagccttcaaacatgttcaatttcccatgttcggggttttcaaattatgccgagtcgctaataattgacaggcctattctatgttggcgtcaagatgcaaaatataatatcgtggggttccccgatatcactaaattattccgaattaactatttgattgtgcctcacatgttaatacctgtcagggtttgtaatatcgtagcgctaatattggagcctttttattttgctcaaaaccgattgtactacctacctg

SEQ ID NO: 110064 - DNA, 312 bp, Glycine max
gctattattgaatgctatcattctctcaatgaatggcgcattcggtgtactatgacaccaataataataattatacttacattttaaatttttcaaaaaaattaagcctaatctctgatttatttttgaaaaaataaatcctataacttattctctaataatttaatatctctttcaataaagctaattattttcaatatctaatgacttttcattaactcttattatctactctcttttaaatttattacatgtggcccggccaaaattggtagatatttttataaaataaaacttgaataaaagtcttta

SEQ ID NO: 110065 - DNA, 304 bp, Glycine max
  unsure (1)..(304): unsure at all n locations
taccatggagatttttaacaaataacaagtcttatctgactctcgatcttagtttcttgatcttgaattaaagctagaagcaaacttgatctctgacatcatcaaaaacctgtatacatacattcacaagacatacatttctatttgcaggcaaagtcaaacgttcaatgtggaaaaagatcacctatattgaccattctaccctttctgatcgctagagggtgcattaaagataagcgtttcattnttattttgttgaggcgagtgcaacgctcgcacattactnttgcacacatgtcacaca

SEQ ID NO: 110066 - DNA, 261 bp, Glycine max
ccgattgagccatctaacacgcatactatcatgattctctacctgcatattagaaataccactcctagtaactcctatggctatcctcatgacataactaaccacatctgtaccgaggaacacctttgactggaaaaccatttgattatgaccatgccaaatgccatttatagccaccatatacacaatgctcttcaatggcacccgttctatatgctatcccgactatccaaattctcattaatccatcacccctagctc

SEQ ID NO: 110067 - DNA, 259 bp, Glycine max
  unsure (1)..(259): unsure at all n locations
catcacatatagagacgcacgaanatgaacaacggtagctctcgagaaattcanatggtcatcactcttcacactgaggtctgattcgggcttataatatattgatatgctcgaaattaaacatcggaagctctcgagatattcaaatggtcataacttttcacacggatgttagattatggcgcatcacatatagagacgctcgaaaatgaactacggaagctctcggganattaaaatggtcctaacttttcacact

SEQ ID NO: 110068 - DNA, 257 bp, Glycine max
gttcaatttcgatcctctcgacatattatgcacgcgaatcggacatccgtgtgagaagtcatgagcatatgaatttctcgagagtttccgatcgttaacttcgagcgtatcgatatattattaccctgattcggacctcagtctgaaaagttatgaccattagaatttgaccagagcttccgctgttcaacttcgaatgtcaatgtatgtgatgcgcctaatttggacattcgagttaaatgttatgaccatttgaa

SEQ ID NO: 110069 - DNA, 149 bp, Glycine max
gcacctttatctagcttgcaaactggattgaacaaaatttcgttaattttttaatatatgcttggcttaattttaattggattttttaaaaaattatgtccatcggacactatccgatgtttttttaaaaaaattggtaattaaaaaag

SEQ ID NO: 110070 - DNA, 413 bp, Glycine max
agtcacctgccgcatgcaagctgctattaacctgaaatgagagttttgatttttttcacacaaaacagaattctaagttgtattatctatcttcaacaaaagaacttatacactacataataccataattggaggagtgtgaacaatttacacaagttttatacacataagttaatcatattcaccgactaacaactgcttcaagtttacaattttgcttgtcctcaagcaaataaagaacagagcattggtcctcaagtgacaaaaatatgcagtgtatatgtacaaaggtgtatgcagcaaaagtcactcattgcatgatacaagaatggagcaaaattctctcatcagtattctctcacacaatatgcaattattcaaagagaagaataaaatgtaacctgtacaattag

SEQ ID NO: 110071 - DNA, 219 bp, Glycine max
  unsure (1)..(219): unsure at all n locations
atggtcatttctccgggagcgacgcgtccagctcaatgacgacgagtatactgatttccangaataaatatggcgccggcggtgggcaccactggttactcccatggacaagtttgatccatatatagtccttgagtgttatgccaatgcttggccaacatatgaaggcgtgcgtgacatgagatcctgngttatgggtcagtggatcccgttcgatgc

SEQ ID NO: 110072 - DNA, 393 bp, Glycine max
  unsure (1)..(393): unsure at all n locations
cctgccgcatgcagcnntaattctcaactatagtaacagattaacgttgatgttattcgtngncaacaaaaagtgtggttcaatatacacttacaatntcttaattcttgtgcagtcttcccatattngcacttcttagactataggttaaaatatgttttttattttcataaatatgtaaatatttaaaattcgtttntataaaatatttgatctgtccccacccgttggctttctccaacacagtttaaacagttgtttctacttttaaatttttggaaaaaaatttcgttagtgacattttggtattgttaaaaatggtactgaacaactaaagattatactntgtgattttatcgacattgtaaaagacccaagtagtgtttcacttta

SEQ ID NO: 110073 - DNA, 334 bp, Glycine max
  unsure (1)..(334): unsure at all n locations
aagcttcttaacacctgtgatatcggacgattagttctaacaactacctagtgttcttggaaatatngtcatagtcgtctcatcgcatgtagcatagctagcgaaaattttatatcatatgttatcgggtctcggcattgtgcaagaactaacttataaaataaattcgttgtggggcttctccgtgctcttgaacggcggtcgcattgacggcttcaccatagaccaatgggtatataatcagctnttcttggtggattggctnggctaaaagtggtggtgtggctaacattatctttagtgctggaaaggcatccacacattcgtgatccca

SEQ ID NO: 110074 - DNA, 270 bp, Glycine max
  unsure (1)..(270): unsure at all n locations
cgaacatatcgagacgctcgaaattgaatgttgaacttcttgagctattcaaacgacantaacatttatctcggatgtctggttgagtcccgtagcatatcgagacgctcgaaattgaatgttgaacctcttatcttattcacacgacaataactcttttcacggatgtctgttagagtgccgtaacatatcgagaagctcgaaattgaatgtttgagctctgagccaattcaaaaaacaataacttntttctcggatgtctgattgagt

SEQ ID NO: 110075 - DNA, 333 bp, Glycine max
  unsure (1)..(333): unsure at all n locations
tgtcaagcgtctcgatatatatgggaccatttcttctttctattanaagtattggcggtagaatnggctcagagcttcaacattcaatctcgatggtctcgagggtctacacatattactggactcaatccgcatccgagaaaataattattgtcggttgaattggctcacacgctcaacattcaattctgagcgtctcgatatgttctggaccaatcagcatacgattaaagctttgcattgattgctcaaaatctcatccattcgagtttcattataacgaactcacaacatcgataatttattgcgttgaatgctaagtcaacacaattc

SEQ ID NO: 110076 - DNA, 263 bp, Glycine max
cagagcgatgtatcttctcttcaaccaactcgtggccatcaagtccctggatctcgatctgtgcaacatcaatctcgactacctgcgtaaggaggcccataccatgagcctcatctaccaccccaacgtggtgagggcccactgctccttttgcgtggagcggagcctctgggtggtcatgcaccttatggaccagagctcctgcctccacctcatcaagaatgctctcttccacggcttccaagaggacgctatcggatcca

SEQ ID NO: 110077 - DNA, 126 bp, Glycine max
gatcttatacgcgctcacttaataagttgttgaatcttgtgggggggggcctgggaggaagggtaataaaatgaagccccgacggactggttgtcgggaggcattccctcaatctataggctcgcg

SEQ ID NO: 110078 - DNA, 143 bp, Glycine max
tagtggtatctcacattgatggttttgtatcaattggcaggaacgagttattacagatcaaatcatgatagattaaacatatactgttcacttccctggtatgtaccattattgattaaacattaatctataatatatagtgt

SEQ ID NO: 110079 - DNA, 226 bp, Glycine max
  unsure (1)..(226): unsure at all n locations
cctcatcggcaatgaggatacgtatgagcaaaagccccgcttttgtcgaccaccccaagagatcgttaatggtccaacgccttaacgtntctcttctttcaaaaccaagagatcgttaatggtccaacgccttaacgtttctctcctttaaaatcaaaaaatcgttaatgatccacgccttcacgacttttgtcagttaaatatatcttgcgaaaagataaaacac

SEQ ID NO: 110080 - DNA, 365 bp, Glycine max
  unsure (1)..(365): unsure at all n locations
taagctctcgccacaatggatacctccaatccgacgcccgtccatcatatgttgcccactcagccacataggccgtccacacataactcattttccgcacaatcttgtcccaccgacaactcctatcctatcacatgcgccagtccaggaatgaattttccagtaaagaagcttgtggaattgactctgatcccaatgccattatgtgacttgctaccatccttgatcactaaccatatggcggtggtggacctctagaagatctaccaatctccatttcctcgatggtacaaccgcaatgcaacctatgcctatcatggtgtggtctcgggcattcaatagtgcaatgtgtggctntcaaacac

SEQ ID NO: 110081 - DNA, 376 bp, Glycine max
  unsure (1)..(376): unsure at all n locations
agcttgtgcattcactatcctgagtgngttgtcctatgtnctaagactggactaatacatatgctgcccaagtttcatggacttgcaagtgaagatcctcctaagcatcttaaggagttccatattgtgtgctccaccatgataccccccgatgtccaagaaaatcatatttttctaaaggctttttcttattctctagagggagtggcaaaagattggctatactaccttgctcctacatctattttcagctgggatgaccttaaaagggagttcttggagaaattcttccctgcatctaggaccactgccatcagaaaagacatttcatgcatcatacaacttagtggagaaagcttgtatgagtactggaaaa

SEQ ID NO: 110082 - DNA, 379 bp, Glycine max
agcttgctgacatcaacaacctgtttcctttcaactttctcacctgtttccatgccatcataaacatcaaacaaagctgaagtaattctctcaaaggtgggtagcctctgaatttcagcccattgtaacgcttctccggcgttgttatcaacttcttgttgcacaggattgatgcttgaaacgctctggaaactagaggcatgacttctaaatgaggaccttatgctccttcctatctctgctaactcatttctcagagactctatctcatccgcacctgccagctgtgccatctcaacacaacactaaggggattaaaactcagatatgtgtggaatgcatcatattttgatcctcttctgaacattatatagaaact

SEQ ID NO: 110083 - DNA, 363 bp, Glycine max
agcttgttcgatgggtcgtcaaggactctttcattttgcaaaccaaagcacagcgcatgcagagctgtattgtatccgggccagtggcacaaggagaatggattatctaaatatgggatgaagggaacatatggaggcgcgtcatcattgtcatcatagacagctttcacgaaaatggtaaataggatgagacaaagaactcttgaaggataagtgttcgacgaatacaaaggtagttttaaattacctccttccttgtcaaatgacaatgatgtgatggggcttagtggacttatgccgtgtttttgacaccacccctaaaccattttgaccttattaaaaatgcccattgttacaagaagc

SEQ ID NO: 110084 - DNA, 365 bp, Glycine max
agcttgtaagaagtatagtaatatatgataatgtttttggttgattgataaggacttacattttaatcatgggttaaggagttgtacaactgatggagatatattacacttatctagggatgcttttgaaaatgagaatgagataaatgtttattttcatcatgaagtaaatccaattttagaataagtcccacaaatgttgcacttggaatgtgatccaattccaaaagctgctgataatgaggatgatttaaatgatgtacctgttgctggccctgaagaaggtaaattttaattcatctgtacttggtcccacatggtttccattattaattaatatgatctaattttaccttatcaccatt

SEQ ID NO: 110085 - DNA, 367 bp, Glycine max
  unsure (1)..(367): unsure at all n locations
agcttccacaacatccaagcaaaacaacattcacatgnttcaagccatcacagccaaacaaaacaaagcaaaggcagaaaactctgccaatacaccaaccaaaaatcacagctgttgccactcaaagaccccagtaacaattccttcgatccaatttgttaaccgggggatcgactccaaaattttactggaagtctatagtgcataagcctacattttgaccgatgggatctactagcaaacatgcagaactcattctacattactctttccaccaccagcaaatacatggattcttctgcacttgtgcagaattctgctgcacaattttacagcaaaatctgcacaaagagtctatttgtaaaac

SEQ ID NO: 110086 - DNA, 377 bp, Glycine max
  unsure (1)..(377): unsure at all n locations
agcttggaacatacaatcngttattttatgtcctcttaaggacttagtcaaaatatctactggctgatcattagaaccaatgaactcagtgacaatctccttggacagaagcttctctcaaatgaaatgacaatcaatctctatgtgcttagtcctttcatgaaaaactgggtttgaggcaatgtgaagagcagcctgattatcacaatacaacttcattggcagctcttcacaaaacctcaattcctgcagaaactgtttaatccacatgagctcacaagtaactatagccatagatcgttattcagcttctgcactggaccgagcaacaactgtctgtttcttgcttttccaagaaataagatttcctccaatga

SEQ ID NO: 110087 - DNA, 367 bp, Glycine max
agctttaccgctacaaaagcttgtttttatcaattgacggcaaccctcgaaaatggcgattcgatgcaacaaacagtgacctatgtgccgaacgtcgcgaatgctgaaatcacgctggcagcctcgaaagatccggtgattgccgacaataactatctcacgacactaacagcaacagtcgctgatacagagggcaatgcgatagccaacactgaggtaacatttactctgccggaagatgtgaaggcgaacttcacgctgagcgatggcggtaaagtgattactgatgctgaaggcaaagcgaaagtcacgcttaaaggtacaaaagcaggcgctcatactgttacagcatcgatgactggcggta

SEQ ID NO: 110088 - DNA, 360 bp, Glycine max
agctatggcctctcatattcatctttcttgaaccttttctcaaaaaatctgataacctcctctttgaccctatttggatattccttccattcccctcctaattgggtgcctatcaccacattttttcttatcccccaattcatgattgaggaaaacaactttgaattagataccccttattttaccccacttcctcttgacttttgctatagagaagactcataattttttcagctttccaaaactctttatgtaggagtatctttctttcaaagatttactcattcaaaattcacttgtccttcaacaagcaaagctgaccaaatccttgaccctctcggttctgcttactttgaaaca

SEQ ID NO: 110089 - DNA, 271 bp, Glycine max
  unsure (1)..(271): unsure at all n locations
gcagctttcaagggtccacttattttacctttcacttnanaaaatatactaagcttgggatttgccgcaaagaaatacgcttatcctaagtcagctcggcttaacgcccgacttccaacaaaaaaattgactaaattacctggacttagcgattcaaccttcgttagccggaggtttcccagcacgaagatgagtattctttcctcaaagatgaactcttctagcgcagtaagcgcgcttagcaagttctgccgagaatgcccactttcaa

SEQ ID NO: 110090 - DNA, 350 bp, Glycine max
agctttacattgttgttttataaaagacaggaggcaaccttggtcttcatatcaaatgataccattgaacaacatagtgttatgtgctttagcttctacttgagtctttaaaagaatcggcctaaagattttgttgtaaacattaagcaacttataccaatgaaagaaaagctggagttgctgcacatgatgtccaacgttatgtcaaggaatcaaattgggctccacaatgcacaaggcaagataaaatgtcaaatgaaaacatgaagctgtaggatccaccatttcggatacaatgtccaggacatcctgccccgaaatactggacacataaatctggtatattttta

SEQ ID NO: 110091 - DNA, 363 bp, Glycine max
  unsure (1)..(363): unsure at all n locations
agcttaagactagtcatatancattttctaattgttttatggccggcatggactgttatgatggacctactgtntaaggggaacttcatagtcaagtggggggtagacactatggcacccaaagtatttaaagacggacaaccaataagtatattgtaagaagtgtgggcatgccctatcacatattaaatttttaaacctttctgttgtggcccctcatgtacaaaaatagtgaataattatatacatcccttggttcctactttttctccaatgaaactgaataatgggttgttatggggaaggaactatgaatccggtatacctaactgcttgaaagggttccaaaatatgatttcaatc

SEQ ID NO: 110092 - DNA, 378 bp, Glycine max
agctttcacactgatgtccgattcttggtcataatatatcgagacgctcgatattgaacaacggaagctctcgggaaaatcgaatggtcataacttttcacacgaatgttcgattcggggacataactcatctagacgctcgaaattgaacaacggaagctctcgagaaattcgaatggtcataagttttcacacggatgtccgattcgggaatataatatatcgagacgctcgaaattgaacaatggaagctctcgacaaatttgagtggtcataacttttcacacgaatgtccgattcggggacataatatatcaagacgctcgaaatggaacaacggaagctgtcgagaaattcgaatggccataagctttcaca

SEQ ID NO: 110093 - DNA, 381 bp, Glycine max
agcttggtaacaacgaaactatctttttctttgcccactttcaaacactgtgagtgcaactgtgggattgatatcttactgcagcaagtttctaatagcttgactaaaagatccctcctcttcatgtaaaatgactgattgtaacctttacaagatcatctgaattagttattagctctcaatcatattctatttatgcaatcagcttcactttttgtggctttagcagcatatctgttgaggaaaccatagaactgaaacaattagttcagaggcatttatttaacattcttttgttgaatcaaagaacacatagagaaactggactaacaaagctttagttacaaagttaactgtaagtctgtaacaaataaagataat

SEQ ID NO: 110094 - DNA, 371 bp, Glycine max
agcttataagaacaaaattgcctcaatcatttccaaatatgcatgtgaattaggacgcatcaacaagaatcaagccaaggctattgtgcaagcaatcaatggggcaaaacacaccaaatgattatgatgatggatggctcaaattctcacaaaggtaaactcatcactttcaaattgagctttcaaaactatcatgacatgtagagaagaatcaaggatttcaagtcacaaaatgtcaagaacttttattttcaaaacaattacccatttcttgaacatatcctataattcaaagaaaaacatgcaaagtcgtacgtgcacacaaaattgacccaaaatattaaactaaaaatccgacgaaactaacaaca

SEQ ID NO: 110095 - DNA, 317 bp, Glycine max
agctgcaagccagctcgtacgaccttgcttttttattgagatgccagatatgggggggaaagttatcacaccctctgggtgaatgtttaaccactgagacattatcatacgacaataactctatacgcggatgtgtgattgatggctgtgatataaccccacgctcgcaaatgtatgttgaacctctgagccaactcaaacgacaataactttttactcggatgtccgattcgaggtcgtaatatatcccgacgcttgaaattgaaatgtgaacctctgagccaacgtaaccaacagtaactttttactcggatgtc

SEQ ID NO: 110096 - DNA, 318 bp, Glycine max
agccacacgccctgcggtcatattgtcatgaagaagaagaagacgaacaagaagaagaagatgaaacgatggccgagaacggcctggtgaggattggggacccgcacaccatgagaacagcgaagacttggaagagatcagtcgacgaaaaagatgccaacggccgcggccaacgaggcacaaaaaactccaccggagactccgggcggcggtgctcacactctacctcactcaaattataacagacccaagacacttgcaaatcctcgcggggaggcacggcatgaggagaactacccctatcttctgagtgccgac

SEQ ID NO: 110097 - DNA, 411 bp, Glycine max
  unsure (1)..(411): unsure at all n locations
gatacagtagagccgaccggctggcagcctggtttgaatgaaaccccaattgttttttcttccanaaaacaagcggcgcgtggcaacacttggaagattgcttcatgccccaactaaagttacatgattcacacaatttatagtcgatttttatttttcataataatgactaaccttttatctgctcaaggatacatacaaaaaatgcatgaaacttgcatgcatgcatacagagaacttccattctgcaactattgcaccccctaaatgttaattttctcccaaaaccgttcatgaaccaaaaacagatcgttatggctgatgacgtaagcaaatggtaattatctttatatctgaaggaaaagggttttgcccatggattaacttgggtgtgtagataaagtaaagaaa

SEQ ID NO: 110098 - DNA, 364 bp, Glycine max
agcttgggaggattgatggtgacttcttgttgacagaaacgaggatatgggctacgtgggagtacctgagctcagatggaggtgggccacaggggatggtgggtttatgcgcgctttgtggatgtggaaaacttgttgtgctccataacgcgaccgccaccttttaccacatgtgatgggtaccccatatttccttcaagctaaagatgaggaagtgtataagggtgaaacttcctgtctttattttttgaccacatataggttcccttgaatatgtcctgtgggttaagagacctttgggacgttatgtggggtgctattgttcaaaacccaatcttgtacaatcctgtccacccttcggcct

SEQ ID NO: 110099 - DNA, 368 bp, Glycine max
  unsure (1)..(368): unsure at all n locations
agcttcagaggaaggatctgtatgttgagatatagaggctntgccggagcgtcggggttagtaagcaagtcttcaaagtttggatgcttaaccatgagaactcttgctccttctccttctttacccccgacagagtctcctccctcacccagtaattcattcttcactctcttgcattgcacaacttctttatctcttattaaaaattatcagccatctcctttcatcattttttcacgctaactacccccaaattcttggataattaaaactactctactaatttaattgaattctctacgaaccaaatgaaattcctttctgaggattatgcatgtatgcacatattatcaaattgaatattgtaa

SEQ ID NO: 110100 - DNA, 364 bp, Glycine max
agcttaagtcatatacaatgatattctattatcctaagctacatgcaagaaaaatagaattaaaaatgactgggttgcctcctaacaaacactcttttaatgtcattagcttgacacatcttcctgttatccagggtctaacaaggttcctacttccagaacctttgtctcaggtctcttttcatccatcagatgaaccttcaaacaaacattttggtcaggcggatctttatcctcatggaataaatcaaagctgattttttgatcttgtatgcccatttgcagcatcttctttcccatgtctaccatgcagcttgcggtaaacatgaatgggcgtccaagtataaaaggaatataagaatcc

SEQ ID NO: 110101 - DNA, 51 bp, Glycine max
tactacacttaaaactaagctgaacttactcatctaacctatttgaacatt

SEQ ID NO: 110102 - DNA, 129 bp, Glycine max
accaaagcatctgcaggcccacaggaagagataacgggactacttggtaaacacctaaccattgagaccaaggaggggcggctcttggacaaaatgaattacctaccaaacactaactgttgggaggca

SEQ ID NO: 110103 - DNA, 355 bp, Glycine max
  unsure (1)..(355): unsure at all n locations
agcttgcgcggnatttatttaaactttcagnnctcattattaggcatatccatccatattgtaatatggcgggaaaagccccttcatattgtaattacccttttccgggtgtatttgcatgtgtatggataaattttgataatcttgattttctaaaattaatttacttaaaaaatgattttttttgtacagaataaaaaatgagtttgtttatgttcgagtatatatatgtgaaaagtgatttttccgttgcctcaacatgtattttaataagcattcttaaattatttcaaatgctaattatataaaactgacttctaagtacctatgtgggaaaagtgaatgagtgttattt

SEQ ID NO: 110104 - DNA, 380 bp, Glycine max
agcttgtcggcctgattgggcccaccattgaagaagtccttgaccttgaaactcatcgagctcatcttcctccccacttccacgcctccgattttcagacgctctccatcttctctaatctccgtctttctttatgcaaatccagaggtttcccaaacaacgcccaaggactccgtaaagtcttttttttctctctctctctcacttccatcattataatttaatatatgctattttggtccattaccctctctcacttcactcttcactctcattattccctacccaacaacaatgatcccagaacactactccgactcatctctcttccaccgctccctccttaccctctttctaatcgcaccccccacctttctctc

SEQ ID NO: 110105 - DNA, 378 bp, Glycine max
agcttcacaagatatcaagagcattttcttctatgtgatgttcttttgcttcctctatctttttgttcagtcagttgactttaattccttgttcttcatattattctccttgtatatactccattgtattgtggtttggtgctgtttagagttgattcaaaaaaaataaaccgattaaatcttagatctacacttgttcatgcatttcgatggttcaaattttatagatctactcttgaatcatgtttttgtgttgattttaggttctatcattttcactcataatattcttgtgctgaaactttagatctaaattttcttccaaaatattgattagaaaaaaaaacacaaaaatctaagtgtaaatcacttaatcca

SEQ ID NO: 110106 - DNA, 366 bp, Glycine max
  unsure (1)..(366): unsure at all n locations
agcttgacaaacctacaactctcgctcnattttgggngnctccctgttacactaccgtaataactcctacaaacaaggaactgaagctcccatccaactctataaatactaggttctatttcacctttttcaatctcattcacaactcattcacatatttacttgagtgtcggagacttttgttttgtaggtccctcctattgttctcctaacagaggatacctacagtcagacatgtgaaatcgtggagttcatccaggctacttctatcctgacgttagtcagttgcagattttggtaaatacaccatgtttcttcaatacaccctgaatcacatttctattcatagctagggaacaagttaat

SEQ ID NO: 110107 - DNA, 338 bp, Glycine max
agcttgaggatcaaaatggggtgattcttcttgagagttgatggtgtctgtttggatgggaactcaagcagatgaagcttttcctgaagcttggcattcagatgcatcagaaactagtggtgaaaacattgctcacactcgttccaaggtatatatttctcccaggctttggtaccttaaagttaatgtgattcaagcccacgatttgttgctaaaaaatagtaatgatttgtcgctaaaaaatagtaatattggtaatgactccggaattgttaactcgttggcaagtgtaccaaatcggcacaagtattaaagttttccgaagtccgaatgtcgaa

SEQ ID NO: 110108 - DNA, 276 bp, Glycine max
agctagaccaaacccgaccttactcggtcttagccggtcagcgagaacctgtgatgtacctaaacaagcgagctcctggcatccaactgataaaacgaaaacaagaccaacaaacatggaggctcgaggcggctggccacctgtgaatttttgtgcgaactgggagagttggcctctgggaaacgattaacaaaggggggtaattcaacacaaggcttaaaaaatgaatgcacgacaccaaagatggctcttggaaaacgataccacgggggggaa

SEQ ID NO: 110109 - DNA, 372 bp, Glycine max
agcttgaccaatcccgacctctctttggcatagtcggtcagtgagaacctgtgatgtacctaaacaggcgagctcctggcagtcaacagataaaaggaaaacaagaccacaaagcaaggaggcttgtggtggctggccacctgtgaattttgtgtaatatgtggatggtggcctctggtaatcgattaccaagggtgggtaatcgattacaaggcttaaaattgaggacaggaggctaagatggtctctggtaatcgattaccaaggggtgtaatcgattaccaggcttgaaaacgaaatcaggaaacttaaggagcctctggtaatcgaataccagcctgtgtaatcgattacacacaggaatgggtcact

SEQ ID NO: 110110 - DNA, 373 bp, Glycine max
agcttgtaaaccattctttgtcaatatgcatctttgaaagatggaagattgtggtgtatttttctgtgaagtggacgcaaaagtctccttaatttgtttttcattatttgttgggaaaagtttggctacaccaaactctattcaacacctataaaagaaaagagatagaagtgtatatatgatagttgatacagtatgatacaaaaaaaaaattagaaaaaaataatagatattgaagaaatgtatatgtaatatataaaaggtgtctacatcattcatcaatcttaacttttctttcaatcttcttgtaattttatacttagaaaaatggtttattttttaatttgttccttgtaattttatatataatgat

SEQ ID NO: 110111 - DNA, 354 bp, Glycine max
agcttaacaaacttagaaatcaagtgatcatgaattccgaaatatagggggagtaaacgaatgcacattttatctatatacaattgtttgttgcttgcttgaatcttgatttcaggtattgtattgtcatcatcaaaaagggggagattgtcaatgcaattggctttgatgttttgatgatgaacatgatgatgtgttgcaattgatgccaatgggctttttatgattaaaaatcatgacaatacttcaagattacaagtctcaacatcaagatgatcactagaatattaggaatggaatttctaaacgaattatcaaaggtttgggccagtgattttaaattaaaagcgtttc

SEQ ID NO: 110112 - DNA, 375 bp, Glycine max
agcttggagtttgcagttccaaagtcaaggaggagtgttaagatgtgactgttggaactgtctaacaaactatagtagataagatttttatgctattttttaggaaaaataaaagtcatgttgactaataggataaagcagttttgatcctattctctaggcatgatatgttagtggtgttatctttctgttagtgatgttatctttttgttagcagttactatcttttccatgtttttaaatacgttgtttcatatcataataaaacaaacctttgcagtctcaatttctttcttttatgctccctctcattctttaatatttttgtctgctgttattaactaaaaacaacaaatttcacatttccatgcatta

SEQ ID NO: 110113 - DNA, 356 bp, Glycine max
agcttgaccaatcccgacccaacccgttcttgtcagtcagtgagaacctgtgatgtacctaaacaggcgagctcctgcctgtcaaccgataaaagaacaaagaccactaaacatggatgcttgcgtggtggctggccacctgtgaatattgagtgatatatgggatatggcttctggtaatcaattaccaagggtgggtaatcgattacaaggcttaaaaacgaaatcaggaagctaagagggcttctggtaatcgataacaaaggggtgtaatcgattaccaggcttaaaaatgatactggaatgttgaaagggcctttggtaatcgattaccagtgctgggtaatccattacac

SEQ ID NO: 110114 - DNA, 370 bp, Glycine max
agctttgcggatttggtcttcgccagtgaaaggatcgaagtggatctgaaaagaggcaaatttaatcatcatgcttagacgaatgagaaaactggggcaaataaagagggtgaggatgagggagaaacccatgctgtgactgccattcctgtacggccaagtttcccaccaacccaacaatatctttactcagccaataacaaactttctccttacccaccacccagttattcacaaaggccatccctaaatctaccacaaagtctgtctaccgcacttccaatgacgaacaccacctttagcacaaaccaaaaacaccaaccaagaagtgaattttgcagcgagaaagcctgtagaattcaccccaatt

SEQ ID NO: 110115 - DNA, 377 bp, Glycine max
agcttgcacacaagattctcctttcctggcacttcaaaaccttctggttgggtcatatagatgtctttctctaaatcctcatgcaagaatgcagttttaacatctaactgctctaagtgaagattctctacagctacaatactcagaataactctgatggtagtcatctttacaactggagagaatatctttgtgaaatcaattccttgtttctattgaaacctttcaccataagtctcaccttgtatcttcttctaccgtcagattcttcctttagtctatagacccacttattctgtaacactttctttccttttggtaatttaattaaagaccaccccttattcttctgaagggatgtcatcttatttttcatt

SEQ ID NO: 110116 - DNA, 371 bp, Glycine max
agcttcaaaacacaacaacacagattctatgtgtctcatacccctcaattcaatggattttctaggtttgagaagtgaaatttataatgaggtaaatttgaagcaaaccctcatctcacacaagtccataacatcaatctaaacttgctcaaactggatttacacctaaaattccaccgaatcaaaatttgactcctcaacacccaattttgccctaaaaatggctcttggttcactttggtcatttgtttttctctctagcacagtccaagctttctcataagtcctaaatgacatttcaggctaggattaactcactttaacctccatttaccacagaatccagatttaaccttccaactctcaaagcc

SEQ ID NO: 110117 - DNA, 362 bp, Glycine max
agcttgaaagctcatagagacttatgtttcattggttgtgtaatgcaatgaagaagtcagcatgctcactggatgaagagaaaaaattcacgacatgatatgtaatcaacaaataaaggataagatgaatgttgcagacatgaacatctgcacaatgaacatgacatgaagaacaacattgtttcaacacttagaaaggattttcatcaacaagatgagttcattttgggcattgtatctcgagtttcaaaaatgcaattgatctattcttgatggctatggaaattttgcataaagagcttttaatatcatgaacaaggtgtggtctaaatcaacttggatcatggtcaaaattgagcatg

SEQ ID NO: 110118 - DNA, 367 bp, Glycine max
agcttcataaatatgctaactgattctttttttgcgacggactgaaggaacttacgagaacccatggcattcacgaaagtgttgtcatgcattttgttgcatgggacaaaaatactactttcagtgtggacgttgtgggacctcttcatagacaaacacaccaaagggcagccacaaccactaggcgccatgtttttaccattgatgtctctgaggatatgatacaacacaattatcaattggtaggtattcgttaatataatcataatcctttatattatttattgttgacatcttatctttaatcactgtgttccttctaacctatgttctgccaccacaggctttaatatatttaactgcataa

SEQ ID NO: 110119 - DNA, 373 bp, Glycine max
agcttttgttgtttttcttacccatttttttaccaaaaatctttattttgttattgctgaagttattgttttagttgcttttgatttgtaaaacaaggtccggcaaccatatacttttatttttggcctaaattatacaggaggacacgcaaatagtttttaattgttcttccttgagttatatggtttactgatcaaaggctaacaaatatattttatgccttttggccatatattatgatatacgtaacaacctaatttagctatttataaaatgcggaatttccgagttttgaagagccaactggtactattctgcctggtctaatcccatagtttttgcacagaattccgattatgatccacccttaca

SEQ ID NO: 110120 - DNA, 369 bp, Glycine max
agctttgacaactgagaagccacttggaggagtcggggttgattatcttatatgttgtttctgtatttgaaacaacttgaaggcagaagaaatatgttgttccaccgataccatttctccccgtacccttgctaggggttcaaaatcatttaatttgtgtaattgattatggaagattagtaataagaacttggtaatttttatttttggttttatattttttttgtgtttttgctttatatatttgaagtggaggaggaagtagtggtaggttctatatttataatttgaaaaaatattgtagactaaaaattatcataaattaattattttaaaatttaaaacataaagagtgttaataataaatta

SEQ ID NO: 110121 - DNA, 355 bp, Glycine max
agcttcttagtttcagatgatgcattttggtttgtagctacctcatgcactcctctaatgactatggcatcatttttggcgctaaactgctgggagttggaggccatcttctcaattaaatttctggcttcagcaggggtcatgtctccaagggctccaccactggcagcatctatcatacttctctccatattactgagtccttcataaaaatattggagaagaagctgttctgaaatctgatggtgggggcaactgatacataatttcttaaatctctcccagtactcatacaagctctctccactgagttgtctaatacctgaaaaatccttcctgatggtggggtcctgga

SEQ ID NO: 110122 - DNA, 374 bp, Glycine max
agcttgaaggtaaactagatgccttggttaacctggtaacccagctggccttgaatcagaaatttgtacctgtcgcaagagtctgtggtttatgctcccctaccgaccaccatacagacctttgcccttctatgtagcaacctggagcaattgagcagcctgaagcttatgctgcaaacatttacaatagacctcctcaacctcagcagcaaaatcagccacaacacaacaattatgacaactccagcaacaggtacaatcccaggtggaggaatcatcccaaccttaggtggtcgagtccttcacaacagcagcagtagcaacaacgacaaccttattttcagaatgttgctggcccaagcagaccatgcgtt

SEQ ID NO: 110123 - DNA, 375 bp, Glycine max
agcttgtctcgttaagtggaaattcacttttggtgctaagcgcgacttttcacgttgagcgcaattcctctcgagttgggatttgcactgagtgagacaattcacatcgagtgcaatttctattgcaccaagagcgacatttcacgctgagcacaattctctatcgggttggaattgcacttagcgcacttctcacgctaagcgagatgtgagaaattgttatttttgaaatcccattggctaaaacatgaagacgtgggttatgaacctacagtccaaatttgaaggtgatccaatggttgacgaatttgggatcgcgattttacctaaacaggttgaggtaaaacttaaaatctcataattttgacttaagtc

SEQ ID NO: 110124 - DNA, 369 bp, Glycine max
agcttgtaagataattgttacaatttttaaccattttcagtttatacctgataagattgtaagataattgttcaggaaaatatagtgttcttatataggttaaatccccaagtaatataactggttgcatatcaagtgaaaaacagtaagatggaaactttggaacccagctaccccatgtatgcattatgactcttaatgggtatgaaaaaatacagcaaaaaaactggctcagttactcaagtgaggtaggcttggtgactagaaattacatatctcaaatagccatcacagcagttcaacattgatgtaggcaagacaaagcattctcagaatgtgaacataccaacattaacgtacatgatcaac

SEQ ID NO: 110125 - DNA, 369 bp, Glycine max
agctttgaaaagtgtgggatttcatcttttcgctaagccaatatgctggcttaacgagcgttcgccaagcgcaacactcatgggctaagcgtgaggaagactctggaagaaaatgagcttgtcaggttcgctaagcgcaccgcttcagttcatctgctaagcgagaaaggcgcgctaagccgaaaatcactaatgtgcactaagcggtccataagtgcgctaagcgcacgagcacaaacaaggccacctatttaagcctgaaatcatattttagagagagagtttggactgggattcccagctttgcatgtctagggtttcaagagaaaaaaaggtccaagttccaaaaaggtttgagagattttgctg

SEQ ID NO: 110126 - DNA, 354 bp, Glycine max
agctcgtaagtcacatgttgaaccttttttgattctttcacacaaatcaaggtcctggaagttggactggaccaaagagagggactgatgttcaacttctgggttatatctgccgggttcctcttcaaagcttaagtgaaaatccttattctatgccttccatctgaactgcttgatgatcaacaaagttaaagaaggcctcctgtttgagaggataacgtgttatctttagtttaatcacattactattgaaaataagggtggtgtttttgtacttactaatccctttcaggggaagcgacattcactaatggcctggcttatcttcgctcgaataattcaacctcttaaaac

SEQ ID NO: 110127 - DNA, 369 bp, Glycine max
agcttgatgtgagaaagcgtggattatttattcttcctacttttcttgttgaccacagagtggtacctggagatatgttctgggggtcacgagaccttggggacatcatgtggggtgctattgcccaaaaccaagcttgaccaatccctacccaacccgggcatatttagtcaatgagaacctgtgacgtacctaaacaggccagctcctggcagtcaaccaatataagaacaaagtccacaaatcaaggatgcttgtgtggcggcttgccacctatgaatcttgagtggtatctggaatttggcccctggtatctattaccaaaggtgtgtaatcgattacagggcttacaaatggagacacgatgtt

SEQ ID NO: 110128 - DNA, 332 bp, Glycine max
  unsure (1)..(332): unsure at all n locations
agctatacagcagatnttatttattatccctctaacctagaattaaaataacttaatgccattaacctacggaattaaaacaaacttaatggctgagtgtaactgaaattgtggcaaccaaaagtcacccccaacagccaacaagtcagccaccatttggtcttccaaaaggctgatgcctacgttgccaattgggcccttattacaacttgaactaaagcccttttaattgattaacccaaaacatatttttggtcagccaaacttacaaggattgggccattatttttacaaacaaaacactctaaaattgaaattaagaggtgttattt

SEQ ID NO: 110129 - DNA, 216 bp, Glycine max
agcttgtataggtccccaatttatttttattttgtagcgacacgtggaaataaatcttactttatggtcaatgtcgtctcctaaacatttcctttggatttaatgttgaaatctgtgtcttttcaggtgaaaaagaaatcaacgtttgaatcgcaaaatgtaccagttgggctaaccgcatatccactactatcagcagcttcatcttgcttagcg

SEQ ID NO: 110130 - DNA, 359 bp, Glycine max
agcttgctctaaatttacattgatgtttgtatttatgggaggaggttgtatgccatttttgttttaagagtagtgtcccactggtaaaactaactttccaaatttttgccttcgcacgaaatggccccgaggaagcttgcctcatagaggtccaggaaggacaaggcagccgaaggaactatttccgctccggagtatgacagtcaccgctttaggagcgctgtacaccagcagcgcttcgaggccatcaagggatggtcgtttctctgggagcgacgcgtccatctcagggacgaccagtatactgatttccacgaggaaatagggcgccggcggtgggcatcactggttactcccct

SEQ ID NO: 110131 - DNA, 368 bp, Glycine max
agcttatgctgcaaatatttacaatatacctcctcaacctcagcagcaaaatcaaccacagcagagcaattatgacctttccagcaacaggtacaaccctggatggaggaatcaccctaacctcagatggtccagccctcagcaacaacaacagcagcctgctccttccttccaaaatgctgctggcccaagcagaccatacattcctccaccaatccaacaacagcaacaaccccagaaacagccaacagttgaggcccctccacaaccttccctcgaagaacttgtgaggcaaatgactatgcagaacatgcagtttcagcaagagaccaaagcctccattcagagcttaaccaatcagatgggac

SEQ ID NO: 110132 - DNA, 287 bp, Glycine max
  unsure (1)..(287): unsure at all n locations
agctttaacctaatcgtctctcactttctttagnatagggagccaatccagtccttgtgttcggactcttagccacttatgatagccgccgatgatcccattactgcttcccctaagctctctgttctttcttcacgccacatcccatgccttgcgaactccttggagtaccctcgcgttgtggtcactgaaacctcgtgcgatgaaaggcgggatgctttcctctgatggccctcccctcatgggacatccttcgcatgaagatagaatcctgattctttcttcct

SEQ ID NO: 110133 - DNA, 371 bp, Glycine max
agcttcacctgcaactccaacccgtttttttatctaacaacaggtgatctttatgtttaactttaatgtttgtccgacccataaaatatgaattatgtacaacaaaaatgttaagaatcttttatactgttcaccattgaaaatgctcttaaaagtgaacatatttagcatatataattatgttaccaaaatataaattttttacaaattaaaggtttactcataattctttaagacaattgtgggaagggttttgtcatgcttttcttccttgcaaatccaatacatataagatctctttccatataaagtaaaagtgtttttgagagtttttttaataaaataatttatatttataatacacaaacttt

SEQ ID NO: 110134 - DNA, 364 bp, Glycine max
  unsure (1)..(364): unsure at all n locations
aggcatgcaagcngcgacttgagtcaacaaaattttatttatatgtgaccatggccggaagcccaaagacaatgaatcaagaatcataaatcatctttgaatcacctatgttccaatcttaacaacatcacctctcaacatctttcaatcaatctttcaacaacagcctaccaaaattccagaatcatcactctttcatattctcaaaaagtctctatcaacaactatccctccaagaaacattcttcgttcaaaaacatgggcgaaatatattattcatcaccttccgccttcgccaacaaaacaaacgactgacccgcctcaaattatacggggcgctcttctccctcacaaaagatccaaa

SEQ ID NO: 110135 - DNA, 374 bp, Glycine max
agctttaaagactaaaaaaacactcattttatataaaaacaaacttaataaaaataaagagtcttaatataaacaattttactaaaattaaaacaagcttggacttaaaaaaaaaacttaattaaaataaaaacacacaaacacaataaaaatagaaaacacactcggtaaagacacactaaaaatagaaaacacacaacacacacaaacgcacattacacaaacccacaacacacaaactttttttctttggagtgttagccgccaccacaccaccgcccaactacagatccactcttgttcttggtcgcggtcgcaaatccaggctcatgtggccaaccacgccaaagatccgcactacataacacccccca

SEQ ID NO: 110136 - DNA, 382 bp, Glycine max
agctttccttgccccttgatatatttgatggactcatggtcactatgaatgacaaattccttgggataaaggtagtgttgccatgttttcaaagcccgtactaaggcatacaactccttatcataagttgaatagttaagggtaggaccacttaacttttcactaaaataagcaattggatggcctttttgcatcaacacagccccaatcccaacatttgaagcatcacactcaatttcaaaagatatttgaaagtttggcaacccaagtatgggggcattagttagcttttgcttaaaaacattgaaagcttcttcttgtttctctccccatttgaaaccaacatttttcttgagcacttcattgagaggtgctgcccatg

SEQ ID NO: 110137 - DNA, 361 bp, Glycine max
agctttgtcagtaagaactcgtattttttctttatgaaaaatacttgtacttgggggcatgtcactcggtttggaacttccttgagactcaagttgatcaccatgggggggagttacttgtgcatgacagggtgaccttgacacttgctgcctagttttcctaagtgagagtgtcatgtggacacgcttaggctatttcttgataaatggtaccacattgcattttatagttgagttaggtacatgcatcattctgagcatatatgatttgaattatagaaaagttgatgactacttgttaagtgttccttgaactgatgggttattaagaatgattatgggcattgttattgctttcttg

SEQ ID NO: 110138 - DNA, 345 bp, Glycine max
  unsure (1)..(345): unsure at all n locations
tatcttttataatgganaatgtattttgtttatgacgcttctttaaagtcatggactacaacaattgatacatccttcttgccggtccttaacattagtcaaaaacgcaggggaaaatgactacagccaatcatgaattttatagatagagacacgatggatataaaagccaccctaggactaaaatgactgctgcacacaatatgacgactaaagcaaccggatcactctttttctttttcgacggggtaggggaaattactttatatgtcttactcgccatagatgaaaaatatgcttacttcgcgttcgcatttacttgccaggttcgaactccatcttgta

SEQ ID NO: 110139 - DNA, 363 bp, Glycine max
agcttttatgtgaaaggatgtgacttctttctttaaaatttgaattacatcgtcaaaggcactagtaatcgattaccaaaacattgtaatcgattacagcttttttgaaatcaattggaacgttgtaaattcagttgaaaacttattcaaaaacattttgctactggtaatcgattacaacaatctggtaatcgattaccagagagtaaaaactctttttggtaaacatgttttgagaaaaattcatgtgcttctcagttttataaaaaaccttttcatacttatattgattaaggtttctcttgattcttgaatcttgatcttgatcctggaatcttgaaacctgaatctgaatcttgattc

SEQ ID NO: 110140 - DNA, 356 bp, Glycine max
  unsure (1)..(356): unsure at all n locations
agctttgaacctatatgcaaggattatttattggggactgtttctaggtgtattcaatgaanaatgattgagggttggctgattgacattatacaattttatactttctagttcctgtattttttgacaatcaaccttctctaattgcctttttttagagtgttggttgttctaaattgcattttgtgcattccaaatttggttctttgcaattttttgatagttgcaatacttggaaattattttatctgacttgggaggatgggagttgtggattgttggccactgcgaaacacaagttgtgaaaaccatgattattgaacttagactatttgtaatactaaatgtgcatttga

SEQ ID NO: 110141 - DNA, 356 bp, Glycine max
agcttttgaccacatcattgctatttttgcacgatgctgcctactagtaatacattggttctgcacccatcaacaactcttgttctaccataaccctcaataataaacaaaacttaaaattcattccaagcacaaacatattataaattaataaaattagcataaaatttcttgtaaaagatatatatcagaatgacaactctagtagcaagtttaaataaatgcctagaaccaattatgtagaataaaaaccttatattgacacaaataacaagcatgaatcttatgcattatctctacaacctcgattttcacaggatgacgactccccaactctctcttcgacagctagacca

SEQ ID NO: 110142 - DNA, 365 bp, Glycine max
agcttgttactaggatgagagaatgtatttcatgttttttgttagcaatttttcctctgggaattaactaatcaatgcagtattgacccaaggtttaattgtagctaaaatatttctttgttgcagctaggaatttacattcacttttttttttgctaattttgtagttatgcactgtattgtatacttattaatgtgtcatgttccttccttaggtagcatgttgagcaaaagtaggaaagaagtatcatcttcctcttaagggaataattcctaaagaatttggagtggtaatgcaatgtgttgaaagaactccgttacaagtagtcatggaaaataatgggatatgttgaaggtccactttg

SEQ ID NO: 110143 - DNA, 371 bp, Glycine max
agctttttgatcatcatcaaaacaccatttatcttctacaatctccttctacaatctccccctttttgatgatgacaatccctgaaatcaagacaagctatatacaatatgatagcacgttcacacaacccttactccccctatcttttggcatgtatgcctaattttacttaattctaattgatttctaacccaagctctctcaagttttctccccctttggcaacatcaaaaagaactatgcaatacaaacaaaatccaaacatagccaaacatgaaaccaaaataaatccacacattgttataacgaaccaaagcaaagtcctgaaatataaaaatagtgcaagagtacgataactagagcaacaaaa

SEQ ID NO: 110144 - DNA, 355 bp, Glycine max
agcttgtatagtacactcaagactttcttttgtgaacaacagttatgctttagccgttataaacccgtactggccgttgcccttagagagttagacatgtgattggtttgcatttaataataaaaaaaaatctattattcgcacctacaatagaattatagaaacaaattagttggggataaaaaaaaaaaaagaatgtttgaatccaaggcgaacgtggtatcattagaagagagatacatatcgcatcttataccacacaaggttggtcccaatatctgttttagccaattacggctcatacttccataccttgatattttcatttcttttctctctcattctcattttttct

SEQ ID NO: 110145 - DNA, 359 bp, Glycine max
agcttgtaaaaaatgtgaaaatctttgtattattttacagatgcgtggaacctaatataaaacgatatggaagggagtaaaacagtgtacagactcctacaatttgtgaaatattctagagaattaatctccatcctaggatacaagtaatattcatcattcattctggaggtggaataatatatataagggtgggggtcttcattcctaaccatccaaataagagtgaattcactttttagaatgagaaaactataaagttagactgagagagaaaataaatagtttgggaagttcctatcctaaaacttgagtgagtcaccttatagtgagtcacttgagtccattttgtaaacaat

SEQ ID NO: 110146 - DNA, 357 bp, Glycine max
agcttgcctgtccgatgctttagttatgatgttcgagttatgttggggaacggttacgaacccgggatgggtttaggcaaatacaacggtgacataactagcctgataaatgccaaaggaaatcgtgggaagtatgggttaggctataagcccactcaggcagatataaagagaagcatcgtgggaaggaagagcggtagtcaaaactcgcggttgagacaagaaggtgaaggaagcccaccctgccacataaatttgagctttataatcgcgggtctgggggacaaaagtcaagtggtcccgatatacaaaatggtgttctgatacattggatttggtacaacatgccctcctgat

SEQ ID NO: 110147 - DNA, 353 bp, Glycine max
tgcttgtaaaccattctttgtcattatgcatctccgaaagatggaccattgtggcgtatttttctgtgaaatggacacaacaaactccttaatttgcttcacattattagttgggaaaagtttggctacaccaaactctattcaacacctattaaagaaaagagatagaagtgtatatatgatagtggatacagtctgattcaacaaaaaaattagaaaaaaataatagatattgaagaaatgtatatgtaatatataaaaggtgtctacatcattcatcaatcttaacttttctttcaatcttcttgtaattatatacttacaaaaaaggtttattttttaatttgctcctt

SEQ ID NO: 110148 - DNA, 368 bp, Glycine max
agctttagtattgcatccttcaaataagataatcaaatgtttgatatttattaactctatatccaaatacatgcaaatgatataaattacaaagtacttaaagccataaaaaatataaatgattctctgttatgcagtattagttataagggagagtttgtttctaggaatattatttctataaacatgtttgtttacaatagtaatttttaaaaaaattaaatttatttaattaaaaaataaaagttagaaaaacaaatgcggtagaatgaaacgaagataggctgtcattgtaaaaaataactttcatttctatgggaatccaaatacccacaatcatgaatattttttttttatataaaacttgt

SEQ ID NO: 110149 - DNA, 360 bp, Glycine max
  unsure (1)..(360): unsure at all n locations
agctttgaattcattctatgcacccttttgtattcattcttgcttngcatgtcttcatcttcattcttctaccgacggaattccataaatttgttttaaacagagttgcgaccgatcgctttaaccgtgttatcacttaatcaatgatcgaaatgaattcccctgatcgatagcgtagtaatctcctttaatgggcctataaaataataagctgccgagcagtcatgcatggtccttcgaattgaaaaggatattctaagtggttcttaactttgaaagatcattattgtgtatgagaaaaacacaatgaagcgcaagctaaagcaactcactaatgatctttgtcaaaataaaaatatt

SEQ ID NO: 110150 - DNA, 373 bp, Glycine max
agcttcatgatgatgaatcaagtttattcaagaagttttgataatgacaaagatgttgagaaaaatcccaaagaatgatttcaagattaaatcaagaacaaattcaagaataaagagaagtttgatttcaagattcaagaaaagatgaattcaagtttcaagagaagaaaccaagacgacttcacaagggaagtattgaaaagatttttcaaaaaacaacatagcacagttttgtttttcaaaagagtttttctcaaaattttctaagttaccagtgtttttactctctggtaatcgattaccagtttcatgtaatcgattatcagtggcaaagtttgatttcaaaagcttttaaattgaatttacaatgttc

SEQ ID NO: 110151 - DNA, 365 bp, Glycine max
agcttcacaagatgatgacgatcgaacttttcctaaccgacatcatgcaaaattcgttcacggattaaattgaaaactcaatagccgactgatatgaaccctcatggcacaagggctgacttaagatcgtctatgattaaaccttgatggaaaatacagaaattgattaaggatgaaaaataaggtggttaatttcgtgggtcttaataaggtggttcttggcataaaatggattaatgggatggtaaaatgtaagttaagtggtggcttgacagaaatatataaattggaataactcaagctacttggctccaaatgatgtgattccaaatcatgtgaaaggtctcgttttgaaaatacattta

SEQ ID NO: 110152 - DNA, 369 bp, Glycine max
agctttttcagaaagtttgaaattttatagatgtaatcgataaccacttgtctataatcgattaccagtaacaaaactacaaaaattcaaattgaaaagtcatgactcctcattacatagttgtgtaatcgattaccaaagagttgtaatcgattaccagtgaggaaattttaaaagttactctaaaaagtcacatccattcataagtttttgaaaagccaccaaggtcctataaatatgtgagttatctacaaaagttttttttagattttttcagaaccttattgtcttatcctctaaaaaaaaatcactggccaaaaacttgcaaatcaattaaggattcttctaagaacttcatcttgtatcttc

SEQ ID NO: 110153 - DNA, 366 bp, Glycine max
agcttgccggaaaactggaggctctcatctgtatcagagaggcatatatagataaagagttcagagcatcatcgataaacagtgttatgtgagagagaaagaaagggagaggagggtgacttgaatgagaggtggatttgtaggcgggagaaggagccggacactgacacgtgtcggttacggattaggggcatgtgtacgtttgtttgttagggcgttttttattgtttttgttgttggtttgtcacaagtgttgtccgagaaagttagtgacatggcaatccttatccagtgttggctcgagatttgttctcctgtgacgcgtaccacagtatcatgtgactatgtttgttttgttcagcataa

SEQ ID NO: 110154 - DNA, 363 bp, Glycine max
agctataaatacatgtcaaatattatattagataaataactagatactcgcttgaaagttgaaagctaacagtagtaatgtgttccaattctggatcgttgtaattaagtgaatgttgtcacatataacttacattttgcatctcatatatcctattttgacatacataagtcaattttccttaacagatacatccaacactacaggataaataagaagaattctaaatcatcttataatatgttcatacataagtcaatctgcctgcttactaaaagaagaaacaatattagttgaatattttgtatatttttaagacattaaaactatttttttttattctgcttatcattgggatgagaa

SEQ ID NO: 110155 - DNA, 373 bp, Glycine max
  unsure (1)..(373): unsure at all n locations
agctttccattgcagaaccttccttttgtttattgacnctcaaagtcccttccataaggagggaagtttgctttaacaatactcaattggtggttattattgccaacatctacaattgagtccccaaatgtgaaaattgcagggactagaggctgcccattagtcacattgagcaacacagctagaagaaaagaagccaataaagaccttgaataccccatacttgacatttttttttctcttcagcaatgagcttcttgttcatgcaaaaagacacaatagacaaagcagactctgaagatgggttgcagttttgggaattgataatctgaacttagtcttatgctttgaatctggtgcatacagtatatta

SEQ ID NO: 110156 - DNA, 378 bp, Glycine max
  unsure (1)..(378): unsure at all n locations
agctntactatgcatggaataaccatatgaaaattccttcatctgacttagcatcaaactttcctaagttttcttttccattatttaatacaaaacatttgcaaccaaaaacatgaaagtgtgaaatgttgggttttctaccattaaacagttcatatggagttttctttaaaatgggtcttattaaagccctgttcatgatatagcatgcagtattaacggcttcagcccaaaaatattttggaaaaggagtgtcatttaataaggttctagcaatttcttccaaagatctatttttcctttcaacaactccatttngttgaggggttctaggtgcanaaaagttatgttcaatgccatgcttatcacaaaataatt

SEQ ID NO: 110157 - DNA, 364 bp, Glycine max
agcttctatgcaatccatgttgattttgcctcaaagatctttgttgttcgaatacaagcgtatttaccataatatgccttgatttggtaggttatttttttcgaggttagggatgcatggatcctctaggtacatcctttagcatcacattgagaagtcacccttaacgattcatttttaaccttatgtaactcaaatcgttcttgaatagcaaaatcactgtggatttcccaaaaatgagttacattcaagaacaatttcccctttttcaaacttcatcttgtcatctacttgcctctcaaaaggtttccccaaaatacctctctcaacatatatttcatttatatcatcatttgagtgcact

SEQ ID NO: 110158 - DNA, 364 bp, Glycine max
  unsure (1)..(364): unsure at all n locations
agcttgtcaaagcccngaatgtagttgttataatacncggggaagctatgactgcacttgcaggggggatcttttgtttataagggaccaccatacttgcataagtgagttaaatacacttgatatccttttacttgcatggcatttgaattgcttggtttcatttatttacaactgggtatcctgcaagtaaaactgccagtcaggagggaagaacaacctcggctgctttttgggttattctaattggcttaatcgtggctgctgcaagggcataccttgtgtacaaatacaaaaataagggaagcctcgtcacattttcaatttggtgatgctattaaatatatagatgcccttttttatt

SEQ ID NO: 110159 - DNA, 105 bp, Glycine max
  unsure (1)..(105): unsure at all n locations
taacaacatgatatacatacagagtaaatctactttctatactaattggaatagtccattaacatgagatgatgcatgatgctntaacatatacctacattctac

SEQ ID NO: 110160 - DNA, 272 bp, Glycine max
aatttgtgtgtacaactcatcaatatgtaatctacaagggtacccacatatacttgttttaaatctactataaaaagcaattacatgccataacatgattttcaaacgagtacataatgcggacataatgaatatggttcgtaacatatttaaaaaaaccatgtacatgaactaatggtgtaataatcagtacgtccataattgtaatggtttatgaacagtgactattaaatttaccacattgtagcttttttcggcctattgcttttttt

SEQ ID NO: 110161 - DNA, 332 bp, Glycine max
catatacacacacatacgtttgacattgtgtcaatgcatattactcatccatgacagacacatgtgcaaatgaacacgagaggagttatattaatatgtgtgttggagaaatatatatcatattttcatcaatcttaactttgagattgatatacagcaactctctgagaccatatcaattaagccaatataaaggctcgtattaacctccaccaaccactattataaaatactaacaagtatatgtgtatacgataatgattcatttgattcatacaccgttatgattgactttaatctctattcgacagactcgtgcataacctacaaca

SEQ ID NO: 110162 - DNA, 417 bp, Glycine max
  unsure (1)..(417): unsure at all n locations
tgataatagaaacaagttaacgacgtatttgtaatgttgtataacatgaatatacaaacaatgtgttaaccaacttacataggtcaattgagtgcaggtgtcaacccaagatcatgactttctcgttaggcaagaacttggcggggtcaacattacaccaaagttcccaagcctaaaaaatcaaacacatttataaatgtgaatgttttactataagagttattgtgtcacgcatcacaattctcatggctgtattttgcaaactcaatatgaagagatcccatgtagtacttgtagctcggcattnacctcccacggcataacagtgcacaaacataatcaagaatgatgagcatgcagaataatgacattgcagatgtgcgaaatagcatacatcatacatgcagaggtatatat

SEQ ID NO: 110163 - DNA, 508 bp, Glycine max
  unsure (1)..(508): unsure at all n locations
gcttctntggccgtcgttgcgttggatatcttanatgtatcttcatccaccgattgataaatgagaaaaagagctntcttgtctctctntcttgactccttcaacgtctcctttacaccttggcttagcgaggcttcatcttgctcctcgaagccattctctacgatatcccacacatcttgagctcctagtagcgccttcatcttgatactccaattatcatagttgttctttgtgagcatcagcatttggaaaggaaaacctccattctccatcttttgaggatcttgaagctctgataccactttgttggaaataaagctttttattgttaggaaaagtgtttaggaatattggagactctgaatagaaacttgatacgaaggagaattctttatggaggagaganacttcgtattttgctcgatacacatgtgtaagattacatctctatttatactactcctaggagaactctagacacactaattctagagagttctcaact

SEQ ID NO: 110164 - DNA, 229 bp, Glycine max
ttctaccattctatgtcgtgctccccgctctctctatctctcactctttctatatctccaatgaataccctcttcaacttcttatcgaagctcatattgaggggaagctccctctccatggctattccttagaggaggcgctactctacctctcacctttgcttcgctgctctactgggaaatcaccttaaagccttttgaactcaagaccttctcaataacccacatc

SEQ ID NO: 110165 - DNA, 363 bp, Glycine max
  unsure (1)..(363): unsure at all n locations
actctagtaggactaagcccaatngagatacccttcttatgtttagactaacttaatctgagtgtcatctgcagatccctcttgtaccaatgccaaatagtactctaacaggagattctttggtggaagtagtggattataccatcaagacaagagagcagataacaggagttattacttcaccacaacttgcttcgcgcccaggaaagaatgaaacattatgctgacctcaaacgagtggacaaggagttcaaatgtggagacctagtctatttaaaaattcagccatacaagcagcttactttggcaaactatgctttccacaaattgcagccactagcggtctatgtaaagaaacatcat

SEQ ID NO: 110166 - DNA, 185 bp, Glycine max
  unsure (1)..(185): unsure at all n locations
ctgaatcttgatcttaaaaatatngatgtcactattgatgataaggatcaaggcttgttattgctatgctctttgcctaagaagtactctcatttcaaagagactatatttgttatgaagagactctgtttctcttgatgaagtgcatgctgctcttgattcaaagaattgaatgaaagaaagga

SEQ ID NO: 110167 - DNA, 282 bp, Glycine max
atggttaacgccgcctctagaacatcttccattgatttaatgatgaaatctgcgcattctcaagcgataaaaaacgctaagtcttgaattgcgaaaagtagcagttgggctaagtgcttatccactgctaagcgcagtcttagagcgcttagcacacaggagaatctggcagagcattatcatcaaagtctcgcactatgcgcatgatcagtgtgctaagcgcaacagttttccttagccaagctaagcgcgagactggtgctaagccacaatccacttact

SEQ ID NO: 110168 - DNA, 326 bp, Glycine max
  unsure (1)..(326): unsure at all n locations
aagactggaaagcagtntctaatgactcctctgcggcttccacataaggcatagaggatgggcagctcaccaagatgtctccctcgcctgatacgaatatcaactcttggtggagttgtgagggaacaactcctactgagtggatccaccggcgccccaacagacagctgtatggggggttaatatccattatttggaaggtaacttgacatgtgtgatggcctatctgtactgggagatcgatctctcctctaacctctcngcgggtgccgtcgaaggcacaaaccaccattgaactttgctttaagtgggaggcattgaatggt

SEQ ID NO: 110169 - DNA, 411 bp, Glycine max
  unsure (1)..(411): unsure at all n locations
tactcagcgtctaccaatggacttaccttgtcttatttcctgtgatagcccttttgagcctcgtntccctttacttgtatcgaagctcactacaaaccttaagtgaagaaccatgatatcatcatatccttaacgaatcttggagctatggaattgtattgagaataagtgtgacggtttttgtctcattggataacactgtttgttggccatgcttcatgatatattttaagccatacttgatgtacattgcatattggttaaatgtaggacatgctgaatgagatgctgtttctcaaatgctacagagtaaaaaataaaatcggacaagagaaagaaaagcagtaaagttgagtgaataagatcttatatgacanangtatgatgaggctcttggttctactctttatg

SEQ ID NO: 110170 - DNA, 437 bp, Glycine max
  unsure (1)..(437): unsure at all n locations
atcctgtnnaaataaatttgtgcacacanatctactttcatataatcagatgagatacacatgctcaggcacaatatattctaaataagatcattctgttcacatctatttcaagatgaaataaatgatattctgatcatactaatcatgcgagatgcataagaagtctaccacacaacactataggagtgtttggcaggtggtagacgtgaaaattggaggaataagaatgaaactgagtatctggtgcttagacttatgttgtgctgaactcccatcaatttcactccactttcctcttccatatatctagcacgccagtgttatgttaacaaatcaataaccctatgtgctattttttaaattgactctcaccccacaactgtcagacttgagaatatttgtatatttaatgtgtgaactaacacacctttgct

SEQ ID NO: 110171 - DNA, 458 bp, Glycine max
  unsure (1)..(458): unsure at all n locations
catcttactttnctgctgcatanatagaaagatataatgacagaaactatggaagtatagttagtatcataaaaataaagcctaattaagaatagaatatccacttaaaaatgtaaacatcacgagtcaatataataaaaacatgtatcaatagtagaatgcaacattatatggccacctttagaaacactgtaattgcatgacaggtgacaagtgcttctacagttacaatagcggctataatgaaaaatactcaagcaactctggtaggatccaattgctaggtatgagacttgggtcctacattgaaagcaagggattctggtctagtgtntataaggccaattacaaaactaacttgtaatggccgtctctagatgttcttctcaattggtgtcaaaatctttcaatatatctcttagttgctaacaagcggcatgagtgggacatcagtagaa

SEQ ID NO: 110172 - DNA, 239 bp, Glycine max
tccatcaagtggttatcatagcacaagagctttatgttgtgctccttatatccttcactaatttgttgctctaccttctcttccatagttatttcatcatgtatcttctcgaatgtcttgtgctaaatgtagtcacatgattcttacagttttacccactaaacctgctatagaagctagcatttatcttctatgagtgcaaattcttgctctcgtgcttgaaccaagaattgtgttga

SEQ ID NO: 110173 - DNA, 435 bp, Glycine max
  unsure (1)..(435): unsure at all n locations
aaagctatatgatagtcatatataattctctagatgctcttttaagggaccactanaagcttaagttatacgaagacacatcatgaatgatgtgttacatctttaacaaaccctagcacacaagagccactctagcttcgaagcctatataatgcgcatgtgcttctatcatgtgctgatattgagttttgcgttaaaatagtgaaggctattangtcaacacacgtgaatgatttcatattacatctttaacaaaaatacgacgctcaagctaaagacatgnttttatatatcttgttacactggaatttggtaacaaccgctagtctaagtaattgcttgcgagacaactagtgaatctcacgtcatgtcacttgtgtattttgcgtctaaatataaagctttgaatggcatcgttgcacanacactactggt

SEQ ID NO: 110174 - DNA, 290 bp, Glycine max
  unsure (1)..(290): unsure at all n locations
aactgaaatttatagaactgatacagaaacactgaaattaaatgactgaacataaatcataaaataactcanaatactaaaatgttcaaaatgcactacattaaatgtcctgctcttgtgagtgctcctatgcatgctcatngagatccaacaccggagcagctggtgaatcctaaaggataggctgctctagctcacatggtatggcatcatcaggtatatgtactggggatggctctgggatctgtgttgtggaagtctnctnctcttgagccatgtgtacacctgca

SEQ ID NO: 110175 - DNA, 347 bp, Glycine max
cacatcttgtttaatacctagtatgaattttctttagagctggcctcgaccgaaggaggttctcaagaagacgtagcctctaatctgtactatttctcctgcacagccaaagaatacaccataatgaggctataaagtatcatgtgagacttcaagcctcaagaataatttctagtacaatatattcgatgtgctaccttggtcaatgatgaccctggacaccatgatagtggcgattacgatggagacaaccatcgtgtctgcctggtagatagtgtcgaaccctcgacagctctatcggcgaaagtgatatgaaagagacttcatggtgatggaacgtcacacag

SEQ ID NO: 110176 - DNA, 419 bp, Glycine max
  unsure (1)..(419): unsure at all n locations
agctcacagagcgtggtctttctttctctctntaatgagctggtcacgagggaaggagacnaccatttcgttcttcttccaagctgtatcaagtgttcttgaatccttcttccaccaagatttgataaatgacctccattntctattctaagcttgattttcacttcattatcttgctttattctcacttctagtgtcagaatcatatttttacactcttgaaggttggaaacttgaatctaaactctctcattcttctttctaaaatttgtggagcatcatcaatgtaaaggggatctctgcaactcttgaaccctaatattggtgtaaacctctttgaatatgttggtgnctngaaataatgtattgctatcctattctcgatctgtatgcttaaatgtggttctctatattttgat

SEQ ID NO: 110177 - DNA, 261 bp, Glycine max
ggcacttaccattatgtcctttactccaacgccaaaaactttaatattaagagtttggagaattttagttttatattcatgtattaaatttaattttaagttataaatagaattaagtttgtttattatttaaaaatcatatttttattatgaaaaagagcattaaacattcattcttttaattagaagatacatttttttataaagaacattttcaaaaatgtggatcttatattaagtgagttcttgataactacactt

SEQ ID NO: 110178 - DNA, 269 bp, Glycine max
  unsure (1)..(269): unsure at all n locations
tactaagtttttattacctacacttaacagaatatacttataacattacaaaataaccataaatggggagagtttgatacaatttatacaagtcttatacacaaaagttagtcgttntcactgactaacacatacatgttcatagtccacacatattctttcatacaagacacctattcactaaatatagctttaccatgtaacacaagttccctgagagttcaatactccgttcttactcgtttatactactcgcacgatctggtgga

SEQ ID NO: 110179 - DNA, 354 bp, Glycine max
  unsure (1)..(354): unsure at all n locations
catgatacatgtcagggtttggttnggttcattgttaaatggatgccccacattatttccatgacttttatgcanacatgatgaattggaaacttcatgcataactggtcatgcatgcacctatgtggacactcaagtgtcaatattttatggtcatgtgatgctangactcaagatncattacctcttttttaaatcaacccaatgtttccaaaatatgttcttttattaatttgtgcattcattcaactccatttctggcgtccggggaaatttcacagcattcatccctcatgtgtagacacatatttcaataattggttatgatcaatgaattattttcaaagaaaagtt

SEQ ID NO: 110180 - DNA, 253 bp, Glycine max
cttgcacctaagtaacatggggagatgttttcaagggtgtgtagatatgtgtgaatatatggcatataaataccttgcaaagtgaatgaatagtaaataatgcatctcataaaatgtatatttgtggataggtagcgtaaaaatgcctttcaaatatgtatatttgtggatggtagcataagaagcctttcaaaataatgtacccatgccgaaatggcacacgaatgcttcccaatgaatatatgatgtggaa

SEQ ID NO: 110181 - DNA, 349 bp, Glycine max
  unsure (1)..(349): unsure at all n locations
tcttactgagtatgttttatatttttgatggaataccctcacttacccacaactttatgttagaaattnttgtngtgcacacccatattgttactgatacttgtagccgtatgcatgaaacagaagatacaatatatccaatcatgatcaatatttcgattggatatggctttacactaagtgtgtgttatttttgtaagatagtcgaagtagtaagtaccactaccaagactgatctaataaaatgatcatcggaacatgtcacaagactttgctattttaacatntaatttctaattagcagggtaatacgatattccaagaaacttgttacagcttacccttcccc

SEQ ID NO: 110182 - DNA, 226 bp, Glycine max
  unsure (1)..(226): unsure at all n locations
tggtgcacaacaagatttccacatccacaaatcgcgcataaactcaccatcctctggtgcccacctccaactgagctcacgtactctcacgtagcgcatatacttgtttctctcaacaccgagtccccatcaattctcccaagctttcccaacatncaagttatacaaaattcaaacagcacatgctatcacagccaagcaaaacagggcatagggcagaaactct

SEQ ID NO: 110183 - DNA, 368 bp, Glycine max
  unsure (1)..(368): unsure at all n locations
aaactaagcccgctttactatagggtaatttagtgtgttgctcacaattaatcaatctatgcatgactatctggatgcttcatcatggcctcacaacatgcagctttcaagatagaacatatgtctaagccacactgaatagctagtagaatgcagattcaatgaggatctaaccaaacctcccgcattgttcataagctaagggtgggctatccatctaacactacacagtcaaccttgctttattctgcctagaatacaccaaccgatcgaagattctagctgatgagtggctgcacaatatgtttctggtcaagcttgattagaagatcatctaataacttatntcttatgcccccacttccttt

SEQ ID NO: 110184 - DNA, 314 bp, Glycine max
  unsure (1)..(314): unsure at all n locations
gatccttaagcacctgcngcatgcaagcttncttctacttctgcagctcctactccatttctcatttagtagtcccttctctcccaactcagacacaatctcagtgctttgaagccatgctccagagcattcatcanggacagatctatttactatagagattacaaatgatgtcacctccagactctatttctacagtagagcagattaatgagatggtagcctggcctgcgacccaaccttctcttatatagaagacgaangtctcacagcccacgttcctcagtatattgaggatgagtcatctgagacca

SEQ ID NO: 110185 - DNA, 444 bp, Glycine max
  unsure (1)..(444): unsure at all n locations
tctgcgcatatttcactacaatcgttctcttgcccaagacattctattaatccgacaaaaatgcacccatatacaatcaaagcagctgtgttacctagattatntacacgtacttccatggtgtatgtgttacttacatcacacacatctccttggctaaattcacatgcatgcatactccaagcattttggggtaccaaaaattgcacatgtgcacatcttggtatttctaatacctatacatacacaaacttcatgatgaatcttgactatctacacaataaggtgctacatttcatgcctgttttcaagtttttgctacctaaagccgcatgcaaattcaagcattatttcctttgctgactaaaattgtatacaaattatatatatatctntttcgaaatatgtnttntcacataacattccacatatattatatatatt

SEQ ID NO: 110186 - DNA, 390 bp, Glycine max
  unsure (1)..(390): unsure at all n locations
atcctcanagtcacctgcggctgcagcttcgaacggaccgtctgtacttctgattctatatattntgagggtaagaatccgtcatttttactacaagcttccgtgctgattctctctgnaaaataattttcagaatttgtntcattcttatgtgaccaaagcacagcttgcaaattggccactttagatgtatcacacaatcaaataaaggggcaactcccagattgtnggaaatcagtaaagcaattagtgtttcttgatttaagcagcaataaatggtcaaggaagatcctatgtncatgggcgcnctctgtaatatggaagccttggtttactaaacaatggttaatgggtgaagtgcttcttctttgagaattgcagcagttatta

SEQ ID NO: 110187 - DNA, 434 bp, Glycine max
  unsure (1)..(434): unsure at all n locations
cgtaagaccacagtaagagtagtgttatagcagtggagaacaaccattcccctcttatcttttccatgttcacgccctaattctctctctcacacacacatatatatatgtatatgctccctcttatctnttccaaaccaaacatagcagcctcctgtcctaattatagaaagccactaatcaatttcttatttcatcatattatataattagttaatagggagggggaatgaatccatgcagagtcaaacgaaccaattcaagacaaataatatcattagcaatntataactggtggggaaagatgaaacattgtgcagacaattccaaaaaaaaaataaaatggaatgctataaaanaaatattatctaataaatggttaatggacagatattntcttaatagggtctttctaatggtattcgagtaataat

SEQ ID NO: 110188 - DNA, 300 bp, Glycine max
  unsure (1)..(300): unsure at all n locations
atgattgttataaattattccaaacacttataaagacagtctagttcctttcaaatgttttaagtgagtgagagaaaatacaaccctttgtgggctccacatataacattatgaatttttaatcatataatatagtgatgttaattaaaatacaggaaataataaatatatttttaggttattgaacaatataaataaagtggatgactatttatgtcatgtgtgagatatgggttaggtgcatatntgcatactaatcacaatcgactttagctcccaaaatactatgaataatttaaa

SEQ ID NO: 110189 - DNA, 384 bp, Glycine max
  unsure (1)..(384): unsure at all n locations
ctctatagcgctggtctgggagacgaaggtcaagtggtcgcgatatactaagatgatgtntcgagtacattggatttggtatgaccatgcccttctgatttccagcttgggaaatggccgagtggaggaacgccccgacatttacgcaacgagcataatgtaaacctttatggttttaaaagctctatagttgggcctaggctttagagttttccttttgttaaggctntgtgtctttngaatttataatacaaggatctttcttcatctgttcctacgtctctacccattctcattcatttgcatgtttacttctttatttctgaaacgacagatccgatgatgagtccnccgaaggtactaatacctgngacccgcttataa

SEQ ID NO: 110190 - DNA, 320 bp, Glycine max
tgagctaatgcgcaagtccattcttgttagatctttgcgtatgtataaccctgtctgtatttattattacactattataaaactaaacagttgagggtttttttatctgatcaactaatattttcggctctgcagcatttgccattgaggggcaagagaaggagaacaattagtggttctcatcactgagagacttgacgacgaaattgaaagtactgatatcttaacacagttgagtgacaaacaaatatataagggtaaagatatatttataacatgttaatcaatttcatcgcatatattatgaaaatggaacacat

SEQ ID NO: 110191 - DNA, 449 bp, Glycine max
  unsure (1)..(449): unsure at all n locations
cttgtctatacctccattacacttcatttgtacctgagcttgcttccctatctttaattaatattgtcatgnttatgtgtgagttgaatcttccccgcgaggaccagaagataaaaaaattggaatataagaaccacaatgaatgtcttaaactatacggactaaaacaatatatcacaactataaggactaataggataattaaatcataataaaatgaactagagcagaataatggtggtgtggtgaggcactctaacctaaatgtctcttgagacatatatacctctacatatgtgtcatantgcaccccaccttagtggataaaatttaatgcaaccttcatggattatctattagcatgtagtaaaaacaccggaacaaaatgtgatcaactttcgctcttctttatgaggcattcactatgtcttttgtatgcatgacacttc

SEQ ID NO: 110192 - DNA, 285 bp, Glycine max
aacacgatggtgttcagtcggaggtatagtcctcaagcttacccttatggcttgcctccagactacactccccgtaccgctccggacgaattgaaccaagcccctaccttcgaggagcaatctcattcttatgccgattatcccctgcaagaagacgatgaagaagatgcccgtctaggccctctactgcccctcaatgatccgtgcccccatgaattgctccaccaaacatagtctcgcatgtaccgtctcacccgcacacgttaaagaatccgttctctttgc

SEQ ID NO: 110193 - DNA, 289 bp, Glycine max
tgaactgcaatgattagaatttttttcctcctctggagctcaaagcacctcctactctatccagatctacgagagtctattgaagcccaaagttgctatgtgatagattcaagatccttatctctaatgttgccatctgacatcttgacctcctttgaggatgtgggttccatgggagccgctttgaaagtccaacagttctagtttatgatatgttaggaatgatactctgggttcttttgcaggaaaccccacaagtgttgtgatcaatctggctccaaatgaattg

SEQ ID NO: 110194 - DNA, 485 bp, Glycine max
  unsure (1)..(485): unsure at all n locations
gcttccgtctacgaatttcagctgactntccagcttgcacatgattgttcttctacatagccaatatgtgtttaaaaaaatgtattacaaagtatattctcgacatttctttaaaataataacattaaaaaatcatctttaaattgtatcaaacaaaaatatactaatattagtttggtaagacattttaaaaaatttctaactttttttactagctaaaagtcttatttgattattttgtaaacaagtgtttttaattacattctaatattgtttaagacatttcttaagataactttttttaaaatattaactcttatctctaaatgtttattatctcgattttgtctttgaacatttactaaatttcctttgtaattgtttatataaaataaatttgtattattattattctttacctaattttacattcttcggatatgttaacattgattatgttacatataatatcattaaacatttat

SEQ ID NO: 110195 - DNA, 353 bp, Glycine max
  unsure (1)..(353): unsure at all n locations
tgtcaaccctcttggtgtctaggattcacttaanaatagtgagaaaaattgtttccgtgaagaanatccaagccgaggtacttccgtaatgcttccgtgacctttctgtgggtgatgttgcgaagattttcaaccgttcttcgtcattcttcagtcttcaacccggaagttcctgaaatcgaacttatcaattcattctatgtacccttagtggtcctcatttgtttcgcgtgctgttattntcatatcatttactatccgtaccccttttgtcgtgcttagtcatttattaagtcatttctcgcctataanaataaataaattcaccgacattcgtttgtacatctttaatt

SEQ ID NO: 110196 - DNA, 241 bp, Glycine max
  unsure (1)..(241): unsure at all n locations
ccttctttctatgtgcacccttttcttctccggcttaagaaaccttcttctccttagtggctcgatagcataactctcatatttcctctcgattacactttgactctctgatgaagcttcttcgcataatccggctttgcttgaccgtctatatgatgtanaacagatacattatgcatctgcgcatgatcaagatgagttagtggattacaaccattacaaacttctacaggagaacaat

SEQ ID NO: 110197 - DNA, 270 bp, Glycine max
  unsure (1)..(270): unsure at all n locations
gctagagcttatctcacacacncctctcataactaagctcacctccttgagaagatcctaaagaagctagagnctagctacacacacctttctaatagctaagctcacgctcttaagaagagaagctagagnctagctacacaccctctataatagctaagctcactcccatgacanaatacatntgtgatatcctaaaattcatccgggattattactngatgacattgcaaccttgtgtagccgctatgagatacttgacgtcctttg

SEQ ID NO: 110198 - DNA, 306 bp, Glycine max
  unsure (1)..(306): unsure at all n locations
ctctctctcgaaattctgatganaatantccgtgaagaanatcaagccgaggcgcttcgaacgtttcgtgagtattacgcgaagattctgaccgttcttaagatcatcgntcgtcttcgtttcttaagcttcacgggaagtacttcaatcgagcttttaattcatttatgtacccgtggtggccacattttgttcatgtattttattctcgtntcatttgcntntatacccncttntgacgtgcttaagcaatttatttaagtcatttctcgccaaatctaanaataanatanattccaccgatcg

SEQ ID NO: 110199 - DNA, 252 bp, Glycine max
gtatatactcgacatttcttgaagataatatcattaaataatcatctttaaatgttatcaaacaaaaatatactcatattagttaggcaagacattttacaacatatctaactttttgtactatctaaaagtcttattcgattatattgcaaacaagtgttgctaattacattctaatatttcttaagacatttcttaaaataactttctgtaaaatatcatcttaatcttataatttctttatctcgtttt

SEQ ID NO: 110200 - DNA, 238 bp, Glycine max
  unsure (1)..(238): unsure at all n locations
cttaaactggactgattcatttgcttccanagtttcatggccttgcatgtgaagacccgcacatacattgaaagaatttcacattgtctgctccaccatgaaacccccagatttccaagaggatcacatatttctgaaggcttttcctcattcattatagggagtggcaaaggactggctgtattaccttgctccaaggtccatcacgagctgtgatgaccttaagagagtattctta

SEQ ID NO: 110201 - DNA, 350 bp, Glycine max
  unsure (1)..(350): unsure at all n locations
ngagatgaggaagtgttgaaaggtgaaacttcctgctnttattgntgtccacagagtggtacctggagatatgtcgcgggggtcaggagaccttggggacgtcaggtggggtgctattgcccaaaaccaagcttgaccaatcccgacccaacccgggcatagtccgtcagtgagaacctgtgatgtacctaaacaggcgagctcctggcagtcaacagataaaaggaaaacaagaccacanagcatggaggcttgtgtgtggctggccagctgtgaatttgtgtaatatgtggatggtggcctctggtaatcgattaccaacggtgggtaatcgattacaacgcttaaaa

SEQ ID NO: 110202 - DNA, 332 bp, Glycine max
  unsure (1)..(332): unsure at all n locations
atctctgagtcacctgcggcatgcaagcttctggtgactangaagcacgctattctgttgnttctatatcggctccttcgccaagtatgngnatatgtgtatatatgtattatattcgctgctctgggtgttgatcgtatctcgntctgcgcagatgaaaaatagaagaacatgtcgagatgagagtcgtcatcacgganagggcaagacggacgaaatcagtgtcctatcttttctttcctcttatctccgatgagaggtaagataagatgggcaactctcatactctaatttcgtccggggattatttcttgatgacatgcaatatatga

SEQ ID NO: 110203 - DNA, 127 bp, Glycine max
  unsure (1)..(127): unsure at all n locations
ctgcatngtctgcatagtcatttgcctcacaagttcttcgagggaaagttgtggaggggtctcaactagttggtgtnnttggggctgctgttgtcgttggattggtggaggaatgtatggtctgctt

SEQ ID NO: 110204 - DNA, 344 bp, Glycine max
  unsure (1)..(344): unsure at all n locations
gataccttanagaaatccttaaccaaatctgttggaggaactgaaaatcttgacaaattgtagagatatatattcatgatgaggatatngttgtttgttatttctgtggcaaagtatgacacatgacgtccagatgcanggacttacctaagaaggggtgcatctaatgcattcagaactaacaagagaagaccagaagttntgggtacctaacgacaagattatttattnttagatgtccttgataacangaaagacacatcgatcatggtacctggatagtgtctgctcacgatacatgatagaagaaaagtgtatgatctaatgcctaacccttatgcatg

SEQ ID NO: 110205 - DNA, 123 bp, Glycine max
gcacgcgctcactgggagtccgctgtggccaaggtgtggttaccccgggtgaaacgatgcttctctctttgcctgtgccatcttggatccattggagaagatcaattcttttaatccacttat

SEQ ID NO: 110206 - DNA, 312 bp, Glycine max
  unsure (1)..(312): unsure at all n locations
gagatgctcgaagaaacactatttcctagttaaccatgcattaggtaccatgttcaattattttgtttggtggtgtgtgttttttttctttttttagaaatgggtttatgatcccaacatggttggctcatggtgcctaacacatgcaactaagaatgtagtgtgaagtttcacgcttccccttttttgttttgttttgtagaggaaaacgcaaggatgagcaaacatganaacaaatggtatccaattttgcagatcanaaagtttgttgaacgcatatgcatgatgatgccatgactcatngcaaatgtg

SEQ ID NO: 110207 - DNA, 481 bp, Glycine max
gcgtctcgatatattactatctcaatctgacatctgaggtaaaagatattggtgtttgtaatttgctcagtgctttcgtttcaattatgagattctagatatattacccgatgcactcggacattcgagttaaagatattggcgttgaatttgtcagagctcttgtgtctattacgacaatctagatatattacgtgagtcactccgacatccgagtaatatagtattgtcgtttgattctgctcagagggtctgttttcttatacgagcgattcgatatatgacacgattctatttggacatctagtcaaaagtattgtcgtctgatttgtcagagctttgtttaatttgtcctctcatttacaagctcatcgcatccacaaatgtttgtcgtgattgtcagctttgttaattcacgtcctatataaaaccattgcgcttaaaatgatgtgttattgtagcgctcgttcaatagattttt

SEQ ID NO: 110208 - DNA, 382 bp, Glycine max
  unsure (1)..(382): unsure at all n locations
agtcggatgttcgattatgtcccgtatgatatcgagacgctcgtaatngaatacggaagctctaagaaaagtcaaacgacaataactnttgactcggatgtccgatatagtctcgtaatatatcgagaacgctcgtaatgaaaaccgaagctcttagcanattcanacgacaataacttttgacacggatgtccgattgagtctcgtaggatatcgagacactcatcattganaatggaagctctatgaacaatcaaatgacaataactttcaattcggatgtctgatngactcccgtaatatatcgagacgctggtaattgatactgaagctctgagcaaattcaacgacaataactnttgaatcggatgtctgattgtgt

SEQ ID NO: 110209 - DNA, 365 bp, Glycine max
  unsure (1)..(365): unsure at all n locations
gcttctctaagtcctaatgacatntcanactatgatatactcactctaacctctatttaccactgaattcagatgtagccttccaactctcaaagcctcactctttttccactaataacaccacattcttactctcttaccctaggataactctacccttcatctctaagcagtttgcatcagcaatttcagcacatagacatcacaagcatcatcttaaataccctaaaactgaatgtgtgagctcgactcacaccacacataggcgagttcaacacactctcaacaaatctcttcaccataactatcacaaagcatataccaagtataactacccattcatatctccaaagccccatacccac

SEQ ID NO: 110210 - DNA, 407 bp, Glycine max
  unsure (1)..(407): unsure at all n locations
cagagttgttcatagcactcctaattgttctcctttngaattttgnnttatggtttaacccactaactcttgttgatctttngcctatgcataatgtntatgtntttaagcataaagaaggtcaagcaaaggcggactatgtgaagaagcttcatgagagagtcaaaaatcaaattgagaggagaaataaaagctatgctaaacaagccaacacagggagaaagaaggttgtcttcgaacccgaacgttgggtctgagtgcacatgagataagaaaggtttccggaacaaaggatatcaaagcttcaaccaaggggagatggaccatttcaagtgcttgaaagaatcaatgacaatgcttacacagttgagcttcccagtgagtataatgttagttccaccttcaat

SEQ ID NO: 110211 - DNA, 323 bp, Glycine max
acaagctctacgtagctcgttatgccatctagaagtgatcctgcaataacaaatacaattagtgactatgttcaatgattatttatataacaatcaacaactcaatttgcattatctgactagagtatgtacatagttagctaatgcgtgcacatactgcggcctgtatgggatgggcgataaatgtacaggaccacgtggtgtgtaacactcttaattaaactaaccccttactaacgagaatatacagtctcaaattatattagtctgtaaaacatcatgtatataaataaagtcaataagtacgttctacatatattaaa

SEQ ID NO: 110212 - DNA, 443 bp, Glycine max
  unsure (1)..(443): unsure at all n locations
aagcttcgctggatgcttaccctgctgctgtccacgaattccgaattccttcttaagctcttctaggattgcattcttattgtcctgtacaatttgatgctatacatgcagtgctggttgatgtcagtatacatgttagnttactgaaagctgcatcgacggcacccaggtttgcacatttaactaatttcagtatgaatcaattagacttttattttaaaatttctatttcttctgagaagtatacttaatatactccctcctccgctcctttttaattgtcggatntttaaccaaaatttgttcctatttatctattggtatcaaagtccaagataacattaatattatctgtcaattatacccttattccaattaattatttacactttntttataaaattgaataaaaaaggagagaaatgcttcaatagagaacataa

SEQ ID NO: 110213 - DNA, 403 bp, Glycine max
  unsure (1)..(403): unsure at all n locations
tattacaatagacctcctcaacctcagcagcaaaatctaccacagcagaacaattattaccttntcagcaacagatacaaccctggatggaggaatcaccctaacctcagatggtccagccctcagcaacaacagcagcctgctccttccttccaaaatgctgctggcccaagcagaccatacattcctccaccaatccaacaacaacaacaaccccagaaacagccaacagttgaggcccctccacaaccttccctcgaaaaacttgtgaggcaaatgactatgcagaacatgcagtttcagcaagagaccagagcctccattcagagcttaaccaatcagatgggacaattagctactcaattgaatcaacaacagtcccagaattctgacaagctgtctt

SEQ ID NO: 110214 - DNA, 296 bp, Glycine max
  unsure (1)..(296): unsure at all n locations
ctctgcttaatcatcatgggcttcctttgtgccacatttgagatttccacctttatgacactntcaggtctgcttccagtgtttgagaagccaccttctgcttccagatcatagagctccatcaaaataggggctgtcactgtcctcttcttctcatgtcatcaaattatctcccacactcacttggattcagtgtgctctgaaccaatgaatctatccagggacaagttacagatgtacactcacctcaaacatcgtttgttgtctctgacagatacaattatacacataattgt

SEQ ID NO: 110215 - DNA, 355 bp, Glycine max
  unsure (1)..(355): unsure at all n locations
acttttcttagagcttccgttttcaattttgagcgtctcgatatcctaccggacacaattggacatccgagtgaaatgttattgtcatttgaatatgcttagagcttcaaatttcaattacgagcatctccatatattacgggactcaatcngacatccgagttaaaagttatttgtcgttgacttttcttagaagcttcgttttcaatttcaagcgtctcgatatattacagggctcaataagacatccgagttaaaagttattgtcgttngacatttcttagagcttccgntntcaaattcgagcgtctcgatatattacanggctcgatcagacaatcgagttaaaagtatt

SEQ ID NO: 110216 - DNA, 211 bp, Glycine max
tgcagctctgatccttacagttactatggcaaatatacccaaaatggcgggtttgcctcattgctgaccctgtagaccagaattaatgaaagaaagaaggatttatttaatatgataactactctctatatctaccctcttattgatttatttttgagaccaaaaccttatgagaagtcactccaccaataatttatatcaataattctat

SEQ ID NO: 110217 - DNA, 267 bp, Glycine max
ctgacacagttctctggggaatgagttgcaaataatgccatgcagagagaaacacatgatcagcttgatacaacaataaggccacaagcacttggaaaatgtataaacagaatcattcaacagaatgtttattaccaagtttgaacaataacactcaaattaaaccaatccttggttatttagaacgggaaccattgaatgtttggacttcacataagtgatagttatgaagaagaccacatctcaacttttaatagatcttctcac

SEQ ID NO: 110218 - DNA, 417 bp, Glycine max
  unsure (1)..(417): unsure at all n locations
gagaaatcccaaagagagaacgtccgattgatctntcgctctattntactcaaagggatctttatattattatattattatattacctttgcttttattttccacgtggttacggcacgaccgaactgacggaattcatatttaccacacataacggatgatacaattcaaacgatcggtggaaacttattttatttttacattttgcgagaaatgactcataataatgacttaagcacgtcacaatgtgtataataagcgaatgaaaacgagaatataaatacatgagacaatatgtggaccaccacgggtacatataatgaattgaatagcttcggttgatgtacttactccgtgacgactgatgaaacgaagacgaacatgattttgaagactgcgagaatttcgcgtattact

SEQ ID NO: 110219 - DNA, 313 bp, Glycine max
  unsure (1)..(313): unsure at all n locations
tagaattcaacactatccctctcatagagctgaaagatggtatatctctggcaagaacttgtgctttatgaatannggttaagtgttgactttattttttattattccatttgcaccaacgatatcctccaactgatagtcagagactatattctttccaggcgtagacatcaccaaaatgagttgcctctttcatagagnttttccatatacatcataagaatcaaccctaacacatgcttagtgggttatgtgttgatgaagatgaagatctncactaaatatagttttgatcagataattaacttacctt

SEQ ID NO: 110220 - DNA, 498 bp, Glycine max
  unsure (1)..(498): unsure at all n locations
tctgttacttcatgacagagtatatgcaaagtggcagagcaactgttatttctgatgtgtatagcttnggngtgttgacacttgaagtgctgagtggaaagcggccaacagacgcagcattcattgaaaagggtctcaatattgttggttgggtatgtcattcacacaaatattggaatttagtataagttatgatctcgttctacgtttttgttttttaaataactaaatattttatattttaatataaacacacattgagtatcttttgttaactgagactatacgaccttatgttttacaacgggcttccttatggctgtcactaatcagcagagtgggttgagtgagtgttacatggtaaaataatctgaatatattatcatcttcttggcgttgggtcttttacaaatcattccacacttcgagggtaaaagttggcgtaacatcaataattgtgaatntaacaatntcataacttgttaacatatgcatata

SEQ ID NO: 110221 - DNA, 339 bp, Glycine max
  unsure (1)..(339): unsure at all n locations
agcttctcacatatgatgcgcccgaatcggacattctgttttgataattatgaccatctgtatttcgcgagagtgttcgatagttaatctcgagcgtatcgatatattataagcctgagccggacatccgtgtgaaaagatatgaccatntgaatatctcaagagcttccgttgttcaatctcaagcttctcgacatatgatgcgcgccaatcggacatccgtgtgagaagttatgaccatttgaatntctcgagagtcttcgatgttcaatgtcgagcgcatcgatatattataagcctgagtcgacattcgttgaaagttatgaccattgaattcta

SEQ ID NO: 110222 - DNA, 147 bp, Glycine max
taaccgctatattcgccctcactcctggagcttggattaatgcaacttcaccgagtcatcggcctattgcggagctgactgatgcaaagctttcaaattattggcatacttctccctgatgtcgatcagctattattatcgcccgct

SEQ ID NO: 110223 - DNA, 444 bp, Glycine max
  unsure (1)..(444): unsure at all n locations
cgcttgtggagcttctatggaggatggatctttgagcttcaatgatgtccttcaatggtgatntttcaccatggagatgcagcggaaggcaaaggagaagaggagaggggaggcaccatccactanggaataagccaaggaagaaggagcttcaccaccaagaattgccttggataagaagcttgaagaggatgctttaatggaggaaaagaaagagagaaggggggagcacgaaattgaaggaataaaatatggagagaagtggaactttgaagtgtatctcataagactntcattcatcanagttacaacaagtgttacacatgcttctatntatagactangtagcttccttgagaagctttcttaagaaaacnttcttgagaagcttctttgagaaaacttccctgagaaactagagtntagctacacacacccctctca

SEQ ID NO: 110224 - DNA, 262 bp, Glycine max
agagaggtggagccaactgatgaataaagaggagagaagggactttgaatagttcacagacttattatcaagtacacaagggcactgttcattatgacaggagctccttggagcttctataaaactcttaaagcttttgtaaactcttggaactgacttctcccctcttaactaccctttgcatctaaaaaaaaatcttcaaactcaaaccgaacaggtaacttctttaaggccaacggcaaaagaaccttttttcaaaagg

SEQ ID NO: 110225 - DNA, 461 bp, Glycine max
  unsure (1)..(461): unsure at all n locations
cgcttgtggagcttctatggaggatggatctntgagcttcaatgatgtccttcaatggtgattnttcaccatggagatgcagcggaaggcataggagaagaggagaggggaggcaccatccactatggaataagccaaggaagaaggagcttcaccaccaagaattgccttggataagaagcttgaagaggatgctctaatggaggaaaagaaagagagaatggaggagcacgatattgaaggaataaagacggagagaagtgaaactttgaagtgtatctcataagactttcattcatcaaagttacaacaagtggtacacatgcttctatttatagactaagtagcttccttgagaagctntcttaagaaaacttccttgagaagcttctttgagaaaacttccttgagaagctagaagttagctacacacacccatctaaaactaagctcacctcctt

SEQ ID NO: 110226 - DNA, 195 bp, Glycine max
  unsure (1)..(195): unsure at all n locations
taaatgaagaccnctacagtaaatttgcctatcttgcctatcttaagacatcctctttatactctacacgtgatctgtcacacatggattatttttatatctcgagaattatcaatctgtagcctacccaattcaagaactaatcaccatgacagatatgctgcaagatgtagtaatcatatgtgtctattaatt

SEQ ID NO: 110227 - DNA, 393 bp, Glycine max
tacaaggctcctagcgatttctaattatgtgggccattaagtctatcatatgctgacaatacccgagaagcccatgaatttcttctggggcggagtaggagtgcgccatcgccttggccttggctaacaataggagaagctcttgactcccgttcaatgtgagagcaaaccgatccatccacacgagtgcctcttggtgtaaagagtccatcacccttcctctatcctacttttacgcgtatactcgggcatactcgtgcgcgaccctatgctcttgggccgtggctagacctaactcttcttgttcttggcgatgaagctaccatgttgtctccgttcgcattacactaaacaagctctttggacttgacagacacaaccccttttaaaaca

SEQ ID NO: 110228 - DNA, 319 bp, Glycine max
gattgacgcacgtttgacctgtcccacacgcttagcctaaggatgtcttttcgagcgacctcactcaaacttaaaacctctagagcacctatctttgaacttctgtattgacatttatgagaccccatgtctgatcgggataataaacaaccaccgaagagctcctacaatttttgttgtagatgaaacctaattctctgtacaaaaactcaatttattttgttagtaaaacttatgctgtgtacaaaatctcaatttttgtttagtaaatctaattcgttacaaatcttcaattttttttgggaaactgttctgtttt

SEQ ID NO: 110229 - DNA, 438 bp, Glycine max
  unsure (1)..(438): unsure at all n locations
gaggatgcttcaatggagganaagaaagagggagaganagagagtatgggggagcacganatngattgaagaaaaagggagagaagttgaactntgagttgtgtctcacaagactctcattcatcanagttacaaaaagtgttacacatgcttctatttatagactaggtagcttccttgagaagctttcttgagaaaacttccatgagaagcttctttgagaaaacttccttgagaagctagagctntgctacacacacncctctcataactaagatcacctccttgagaagcttccttaagaatattcctaaagaagctagaagctagctacatatacctctctaatagctaagctcacttccttgagatgagaagctagagcttagctacacaccccttataatagctaagctcacccccatgancaaatacatg

SEQ ID NO: 110230 - DNA, 335 bp, Glycine max
  unsure (1)..(335): unsure at all n locations
cgataccatatatgtgtaatcgattacatattgcanatcttgaattcaaattttaatactgttgttaatcaattttggccactggtgatcgaatacatcctctggtaatcgattaccagagagtaaatttgttgaaaagactttttaacttaaatttcttggccaaaccttttgctacttcaattggaattcccttcctatctaatatatcctntctaagactctagagactgtcttgatcatccatcttgaatatctttaatttctctgtcttgaataaagncttgaaacgcatgtgaaaactttggcatcatcaaaacattccgcttgatcct

SEQ ID NO: 110231 - DNA, 289 bp, Glycine max
cttatatgacatacaagaccacaacgtatcttaacttgtctgtcttggatctttaatcattattcgtcttatcttagaccaattgatccatatccatccaaagactatcactataaagacctggatgcttccaatgttcatcctctgactatagttaggcgagatcatacgattcataatcatacctgtcaagcatctcactcaaaagatagatgtcttctatgttcgaacctcttcatatacgatttttatcatgattgattaaagcactacctttcatacattaaac

SEQ ID NO: 110232 - DNA, 299 bp, Glycine max
  unsure (1)..(299): unsure at all n locations
gcttcattggtcantatcgtgcgtctcgatatattattctcccgaatctgaccttcgagttataagtgatgatcatttgaatttctcgagagctttctgtgtagaagttggagcgtctggattattatgtgccgaatcggcatccgattaatgtataccgttgaattttatagcttcgtgtcatttcacctctgattatatgccctgatctgctcgagaaagtatgacttcattccgaccttcttgtaattcgcgtctttattcgctgattgactcggtgagtatacattgatttcaag

SEQ ID NO: 110233 - DNA, 319 bp, Glycine max
  unsure (1)..(319): unsure at all n locations
atcaccactttgatactcctcacaatgggtatagtagcnnctcaatatccaagtcatgacatggtacctnggtcacgcctgcgctatgacaatctgaaaagatgttggttgtatgggtgagcttccggtctatgcacaaaccaccaaacagatggtccttaaagtatctttgaatggagaaatttgatagggtaattcaatcttttaaaggatattattacttttcaattaaataagatgcttggataaaaatctgaatagaaattgaaattggagtatcttgataacggaatttagttaacttatatattatcctctc

SEQ ID NO: 110234 - DNA, 114 bp, Glycine max
  unsure (1)..(114): unsure at all n locations
ctcagctgtgtctacatcataccgttctttngttgctttagtgttgatacttctaagttatggttaataatcagccactctgattaataatgattaaaattcttctactttact

SEQ ID NO: 110235 - DNA, 461 bp, Glycine max
  unsure (1)..(461): unsure at all n locations
catccttatcattatntcttccaatcacgcctgaagctcaacatgggaattagtcatntctgtcctntgcacaagtctgtgatcaacatcaatcctctcaagaccaaacttgttcccatcagctgctatcttatacaatctactgtctaacatttttatttgatgagcaatcctaagacggaaaacaagagaattgaacgaagaatagaagtggcctaccttcatccttgtgctgcctaatgcnttgacaactngctttctaaaggtttggcactcaaatccacccaagatatcttcagcatctaagcatacattttgaatctgcccgagccattcgcgcaacccatgcttgtgctccttcttctnctcagcatccaacagcacacctttcacaatngacagagtgtactttgatgcctttacatcctcatacagatcataagctcgagaagcttcttcat

SEQ ID NO: 110236 - DNA, 341 bp, Glycine max
ctagtattattatgggtgtcattctaaaagtctccattaccatattcacctcctcatttcctaaggtgaaggtccttccctttttgtcataactaactacctttacttgtgatgagtgacattgtgcatgtttgattctctatctaacatgcttctgcacgaattccaatacaaatatgactgttcaacgcacaaaagaatggtatggatgcttttgccaatgtccatttgcatcaacaagtggttacacaaacatagtcattgatgattgcactggttgaagaacaagaatgagaagtgccttgggaaaagtgaacgtcgtttctgaaagaaataaacaa

SEQ ID NO: 110237 - DNA, 263 bp, Glycine max
tttatttattataccatatataatcatgctttggaaataactaagttggacaagtatgtgactaagcaatatactaatgaatcacatgaaaaattgagagaaaagaacagtgcgatgtgtactttccaagagtgttaacaccgaaaacatatattcaagaatctgtgtgcttctattaaatgatgattattttttcctaatcaattttgctgagcacattgagaaacatcaattaaaccgttctagctgcaaagaatctaaat

SEQ ID NO: 110238 - DNA, 445 bp, Glycine max
  unsure (1)..(445): unsure at all n locations
gtcacctgcngctgcagctataggacaaaatgcctaatcattttctatagcatgtgaattaagacgcatcaacaagaatcaagccaaagatattgtgcaagcaatcaatggngcaaaacacaccatatggttatgatgatggatggctcatattctcacaaaggtaaactcatcactttcaaattgagctttcataactatcatgacatgtagagaagaatctaggatttcaagtcacacaatgtcaagaacttntatgttcaaaacaattacccatctcttgaacatatnctataattcaaagaacaacatgcaaaatcgtacgtgcacacgaagattgacccataatattaaactataaatccgacgaaactaacaacattaaccatataacacaactaacatattatcataaccaacaaaactagcaaaatccaagaacact

SEQ ID NO: 110239 - DNA, 283 bp, Glycine max
  unsure (1)..(283): unsure at all n locations
actacatgtagcttcttttgcanaatggttttctggtaccatatgtatatganaaagaganaataacatcgcattgcatagtgcattattgtgagttggtctgatttgtgtgattgatgatgtggatgcctgaatgccttaggttgttgttgtgttatgtatgaatggttccatccttagttatgatattttgtgatatgaaactattgtgatgacttggaacggatgagatgtgactctttaagagcatagagagagatctatctagaatgacactatgtga

SEQ ID NO: 110240 - DNA, 261 bp, Glycine max
  unsure (1)..(261): unsure at all n locations
caacttatataatcacaaggatatttatactttaaataatctatgaggtcgtgactattataagaattaattgaataatagtatcacttatatgattaaacacattaatttttgtgatttcaacttttaaaaaagtattaaaatttttccactgagtcgcatgaagaactactattgataacaacaacctttgggcactttatattatcctacggggcagcaaacaaancttagtagatggaataattgaattgtgttaat

SEQ ID NO: 110241 - DNA, 499 bp, Glycine max
  unsure (1)..(499): unsure at all n locations
tctgaatactgcttcttcatcactgtgttgcttctagaaagaactgattcagataagatanatgtctcaatgccgacaccaagtagaaactttgttgaaaagtgtanggagcaattacaaagggtcagattaatttcaaaaattgtatttatgtctagcactaccagattctgaagaaaagaaaatcgtacaatacatataacaattgaacatgtgtaaactgaagcagaagtaaaaaaccaaagacagtttactgttattgaacttagagtggcaaagttttttactagtcagcaagttttaatcaagaagaaagaggtggaatcttaacaagaagtgcttccanaattgcaactttatcaaatctcattactgttgcaacggagagggtacctctgaaataggatgttgaggactcttggtcncaatgcttatcangctcatctccnagcgncacccttctaatgataccgtgatagaaattatcaaaacaggaata

SEQ ID NO: 110242 - DNA, 424 bp, Glycine max
  unsure (1)..(424): unsure at all n locations
acacccattgctctctccactcagtgcctcagctcgctatctcaatatcactaactcgcgcttatcggccagtctcgctaagcgagccttanaaatcttaaacgtcaatgagcctctaaaccctgnagtggcanagaaactatagaggagtcgatatactgaccaagagagaagctatagcgacataaacaagcctcntatatagtttatattataggagtgagattatggttctagatggtgaagggacatcctcaaccattcttagctatattcctccctcacaattatcttttgtgttgaagttcatacttgtatggaaagtaacctcttgtgtggagtctgccgaactttgatgaaactctctactatctattaatggtgtcttatgtgtgattgctttatctatgctaatttgcatgct

SEQ ID NO: 110243 - DNA, 384 bp, Glycine max
  unsure (1)..(384): unsure at all n locations
tggcttacattggcaatcanccccctagactctntgaattacctggcatttacattagaaaaaaatatctgcccnctccccccacaactaatattgatcttaagtattaaagaccattgcatcccatganaacatacatacaactcattattgcatctgtttttaaaattttgcatgacaaatatttattttgtggttcctctttactttacagaatattaaatattacaatntntgtgaaaatatttgctcccatcgtttgttttttggtatgtccccagtctacccaaaactaccttcatactattaaatatttaacatcggttatattttactttcaacatcnatttttaaccgatggtgaagtcaccgatgttaacatta

SEQ ID NO: 110244 - DNA, 230 bp, Glycine max
ataaatacaatgtggaaagaatgcacgggatatcactggaaagttattcaatgctgtcgattcttgatgtgcatctttgaaagataactggccacctgtgtcgtaaaaaaattaaccccaagattgtgggttgagaaacttgtttaccacatgacctgtttataataatacacccatctacgcgaagttttacaaatgaaacaacctatacataatattctcagacacat

SEQ ID NO: 110245 - DNA, 446 bp, Glycine max
  unsure (1)..(446): unsure at all n locations
aatgttataattttgtggaattgttgagttgccctcaaaatgtcatgtntgaatgtatgggtaaagtaattgaaaaaaataacttaaaatcataagggttacaagtttgattgttagcattttaattgcctatgcttgtacatttgtgcncaacttggaatgaacatgatactgtatatataataccattaagttgctagtagctattctccgtaatgaagtttcaagaccctattcaagtagcatagtcggggttcctcttgcanatgtttctcgttaatggtgatcattaagatanacatgatatataataccatangttgctgcactactctctgtgtaaagaatggttatatttgcatgtacttaaagtattctcctagttgtgtgggacacattntttatgacaaatacactaaagttcttcattcatttgaatgtgttac

SEQ ID NO: 110246 - DNA, 423 bp, Glycine max
  unsure (1)..(423): unsure at all n locations
catgatacatgtcangggttggttnggttcatttataaaatggatgccccacactatntccatgacacaaatgcaaaaatgatgacttggaaacttttatgcanaactggtcatgcatgcacctatgtggacactcaagtgtcaaacttttatggtcatgtgatgctagggctcaggattcatttcctccaattttaaatcaacccaatgtttccaaaatatngttctttattcaattgtgcattcctccaagtccatttcgggcatccggggaaatttcacagcattcacccttcaagtgtagacacgntttttttcanaaactagctatgatcacgcgaattttctttnatagaaaaagtgtgaaatcatctctttcanaagcatgtcgatattttagctagacaacttantgttctcttt

SEQ ID NO: 110247 - DNA, 379 bp, Glycine max
  unsure (1)..(379): unsure at all n locations
gctttgtggtgcctaaaataggtattattaggcacgaaatctctatgatatgtggtatagtgaatgtgtgagtggccaacactctattgaaaacactcatgccccacatcttatgattgtgtcatatggactcataggtaggttgtcttatttttgttcaatgctacctagtgctcatgtggacacctacgtttgcgaattgtttatgataatcactgaaataaaaaaagatgatattcatgctcctaactttaaaangtcaggcttcatgacctaagataagcattctaagcctctcactaataaaaattgggtaatttacaacttcaaagtggctatttttctgacacccatggtggagactatttttgaaaacaaa

SEQ ID NO: 110248 - DNA, 135 bp, Glycine max
  unsure (1)..(135): unsure at all n locations
cgcataatatatagagacttctcgatatagaacgcccgaagatgatgagaaatntccatggtcataacttatcacacagatgtctgactcatgccaattatatatagctatactcgaaattgaacaatggagctc

SEQ ID NO: 110249 - DNA, 464 bp, Glycine max
  unsure (1)..(464): unsure at all n locations
aagcgacgagctgcagctgacacagtttgacaaatgaaatctagtttagtgttttcccaagcatgaagtnagntcttaactaactatctaacactaatatatagagtgctagtaactaactaactacgtacctaactaacaagctggataactaactaagctagtatacaaacaaagccctactcgtacctatcttaagtcagagtttgacttcagacattgcctcagaaaaaatggcaagctatttaacaataagagtttctacttcaggaactaccttcattgggtctgagatctctcgcctcacagcaatagcagtagccaaactgaaatagcacatttcattaagtcatcttgctagaccaactagtagggaaataaagcaaagagtatgactaagaaaaatatactcaatgtttctgacatataatcaattctatatctcatatcaaatagcttgcaat

SEQ ID NO: 110250 - DNA, 354 bp, Glycine max
  unsure (1)..(354): unsure at all n locations
tgagaagctctcttgtganaacttncttgatatagattctntgaganaaattccttgagaagttatagcttagctacacacacctctctaatagctaagctctcctccttgagatgagaagctagagcttagctacacacccnctataataggaaagctcacccccattccaaaaatacatgaaaatacaaaanaaaaaagtccctactacaaagactactcaaaatgccctgaaatacaaggctaaaaccctataccacttgatggaagcgtgcttgtagagcttctatggaggatggatctttgagctttaatganggccttcaatggtgattttcaccatggagatgcagt

SEQ ID NO: 110251 - DNA, 267 bp, Glycine max
tctggatgaaacaataacttgaagaatgtggagtaatcctcgatcaaattctcttagaatatgatagcgcaagtgcgatcaatctaactaaaatcctgtcgtgaattctacaaccaaacatatagagatgagacatcattttcttatagatcatgtttcaaaaggagattgtcgcattgagttcattgatagtgagaatacactagtagacatcttcactataccacttgctgagatatgttcttcttattataaatgaactatgca

SEQ ID NO: 110252 - DNA, 437 bp, Glycine max
acaatatggaccgctgcatggttttcctgaacctcagtctatactcttagcaaaggacagacgtcaagaatgtcaacaatacattcaaacgcgggtcaaggaatcacaacgactagtgtacctaggagcttatctgaatcagtaagtgaatttgatgttaaacaatgttcacaaatttgcattataattgcgtaattaatggttttcatcttcagggcacattggcaacttattgttctgtgtccataggacaatattgttgttgggtatgttctttgcataagaagcctaatgttaacatcaaggttgcagttaacaagttaccttctaaatttagagtcattataccaattgtagtggtgaaacaaaatgaattttatattatatacgttaatgggattttaaactaatgcaatgaagacataaccactactttg

SEQ ID NO: 110253 - DNA, 221 bp, Glycine max
  unsure (1)..(221): unsure at all n locations
cactctgatttgttgattaatatgcaaatcaaatatatcttaacaatatgttgtgctatgtctgcaaaacatacattaagcgtgcacaccgacagaacttggcttgtgaatcgtattctgttgaacaatntgtttgaacacaggagtatacttgaagctccccagctctgatttcatgacaataactacattaactatgcttgaaggacatgcgtcggtca

SEQ ID NO: 110254 - DNA, 158 bp, Glycine max
tggcaacgcgctatattttggtttacagttgtgaccatttgttttagtattttccccttgacaaccatagcttaccactcttccaaattgtctcgcacgtagagcaattatgatcacatgactattgttcttctcttacataagatgattaatttaat

SEQ ID NO: 110255 - DNA, 515 bp, Glycine max
  unsure (1)..(515): unsure at all n locations
tctattgattntctcccatcttgaactgtggtatagatgcttaattttttgccattatgaaactgcgcaaaattgttggtaaagaactgttccgatggatttccagcgatcagtataggttcctgttccagtgttcatctcttcctctgcanngactctaatcatatttataaaaaagggcagttttacggaatagtggtaagaaacaacttaatccaatcaaacaattaacaaatatcaaaaaattattttaacagtaaatatcaatcaatataacaaaataaatattaaaaaaatatagttgtgcataaattttcatgaanaaaatcaacaaaacctcttttatgttttaaataattaaagaatacatgattaaatagttaaagagatatcaccatgttncaaatatctctattctcaacatttattatgcgtaagttagtctctacgatataatttttgtaactgcccgtgagcatttattagcttgnnncttgtaatatatactctcccac

SEQ ID NO: 110256 - DNA, 374 bp, Glycine max
atatgctatacttgatcacatatccactcaataattcagatggagccataaccccaaccaaagttcctcaacctccatttttctgaggatacgactcgaacgcaacgtgtgcttatcatggaggagccgcggggcattccattgagcattgtatgaccccgaagcataaagtgtgaagtctaattgatacgggctggctgaaatttgaggagaatcgcttgttgaatcctaacattgacaagcaacaccatacatggtgcaattctggaagctgttgttatgactcatcaagagtttcaatgttatgccatacaccacagctactatgctaaatgatatggagtaaatggacatcctctcacgaacacatcttt

SEQ ID NO: 110257 - DNA, 371 bp, Glycine max
  unsure (1)..(371): unsure at all n locations
tgctcaatngctcccggttgctgcatggaaaggcaaaggtctgtatggtggtcatcaaaagagcacanaccacaaactcttgcgataggtacagattttttattcaaggccagctaggttaccaagttaaccaatgcatccagtttgccttcaagcttcttaatttcagatgatgcagatgggtttgtagctacctcatgcactcctctaatgactatggcatcatttctggcgcttaactgctgggagttggaggccatcttctcaattaaatntctggcttcagcaggagtcatgtctncaaaggctccaccactggcagcatctatcatacttctcttcatattactgagtccttcataaaaatattg

SEQ ID NO: 110258 - DNA, 267 bp, Glycine max
  unsure (1)..(267): unsure at all n locations
tgcagcttggatcttcttcctaaatagggcatgcacgatggcccttaacactatatctcactcaaattccatatgtnggaaagtcattaatggtacaaaataacatnttacgcaactcgaatgtctcattttgatacccatcaaacacagcaaaccnctcgtccaacaactntgtcaagtcttcaatcaagggactgagataaacatcaatgtcatttcttggttgtctgggctcgatatatcatatacaacatcatgtattttcac

SEQ ID NO: 110259 - DNA, 254 bp, Glycine max
  unsure (1)..(254): unsure at all n locations
tactcagctttagccaatggacttaccttgaattaattcctttgatnagccctttgagcctatgttcccctttctttgttttgaagctcattacaagccttaagtgaaaaaccatgatatcacctttacccttaaggaatttggagcttttggaattgtttgggaataagtgtgtgggggggtattgttcattggaagatatgatttgtggccatgcttaatgttnntatttggccatgcttgatgtatatata

SEQ ID NO: 110260 - DNA, 114 bp, Glycine max
tcttaaaatggactctgaatgtatttaaatcatcctggaatcataccataaggtatcatacacatcacaatgtactcttttttgaatttgaaattaaacataaacttgtatcat

SEQ ID NO: 110261 - DNA, 429 bp, Glycine max
  unsure (1)..(429): unsure at all n locations
tactaagcttacgcagatttagtatgaccactacctagaataaaaatacttaatgccattaacctangggaataaaaaaaacttaatggctgagtgtagctgaaatngtggcaaccaaaagtcacccccaacagccaacaagtcagccaccatttggtctcccaaaaggctgatgcctangttgccaattgggcccttattacaacttgaactaaacctaactaaagcccttntaattgattaacccanaacatanttttggtcagccaactttacaaggattgagccattatttagacaaactaaacactctaaaaattgagacaaagtggtgtcatttagtcctcctccatttgggccatgatacaactcacaaccttggacttttctccttgaaacttgngcttgtattcaaatagtatggacaac

SEQ ID NO: 110262 - DNA, 398 bp, Glycine max
  unsure (1)..(398): unsure at all n locations
catggttacttgattatctcctgtgagtccatagaaatctccgagntttgtccatccaactagtatnagttgggttcacacagatcttatgttggacgtaacatagtgcatgttgtcattactgtctagcagatagccaagttgctctaattggtccttccatcttacaacanaggacctactcacttcaccatacggctacatttatagtaaactaatataagcaatactgatgtattatatcatgtcatgtttgtgtatttgagaatagtcttgaaactcctaactngatccttaatatgaattgggtgaacacttcctctgggttgtgtcaattatcatcattggtctagccatatcatatcaattcttttgatcttcattcatcgtttctaact

SEQ ID NO: 110263 - DNA, 465 bp, Glycine max
  unsure (1)..(465): unsure at all n locations
atattttattggttatttatantttaataaataattataaaattgttattttatcttattgattctctgttcataaaattttgaattgaanaatgtgctttntttcactttnttttacaaaaatttgaaagaaagaaatatcttcaaataatgcgatatttatataattatttataaaaaacatgaagtaaaaaaatatacttaaagttaatattgtttggttcttaaaagaatgaaaaatactacatattgaccagagaactatctgctatcgttattgatatttgtataacattcctgctgaaagaagacaaaatcaatctggtagagtcaaatcaacgcaccttgcaacgttatatctacagtacaagtgtctgtgtgttatattaatcgatcggtcccgtacanaagtgataatatactattgtttactagatagagagataaaaaattatataattgtga

SEQ ID NO: 110264 - DNA, 295 bp, Glycine max
  unsure (1)..(295): unsure at all n locations
acttttgcgatgacatanagctcaaagatcaatccgagaacaactcctgtgaatctgagatcaatccaagaacagcgtcagtcaatcgagaagagttcttgactccagaagaacgtttagagtccagaatcgagagtcaaggtgcaggatctccagaatccagatcaagattcaagactcaacattcatgaatctagagaacgctcaatcacgataagtgtaaatacgttttctcacggatggaatagcacatgattcttctcaaaacatgtttaccaaagacgttttactctct

SEQ ID NO: 110265 - DNA, 400 bp, Glycine max
  unsure (1)..(400): unsure at all n locations
cacaatgacatcgactgggctagagatgaagatgatcagattagtactagtggatatatgtttttcatgggatatacaaccttcacttggatgtcaataaagtagtcgatatatagtcattctnttgacttgtaagccaaaatacgtagcagttgcttcatgcatttgtcatgcaatatggctcaagaattnngtaaaagagttgggcatgtcacaagaagagttgaccaagatctttgtcgataattaataagtcagtcattgctctagcaaagaatccaatgttccatgatcgagagcaaacatattgatacccgttaccactacataaaggagagcacaacatgaaacgatgtacatgcaggatatgtgaagtctcaagaccaagtagttgacatct

SEQ ID NO: 110266 - DNA, 337 bp, Glycine max
  unsure (1)..(337): unsure at all n locations
atctctagcacaatattccatgtgcttttcattggtgatgatcatggtaagctcaccacttaatcaatccttggatccacattaagcaagattgtattngagtcatggtttagtatttctaatcttcgtgaaagttcatcttatctcttcatcctatgttngatcttcatgatcatgattatacttatgattgaagacggatgtcgttatcgattgaatctattagacatgatttgcactctatatttgtataganctattacttcatctttgctgttgagatctacattcctcaccatcgctacaaatatttatgaactcccctcgcattttaatt

SEQ ID NO: 110267 - DNA, 425 bp, Glycine max
  unsure (1)..(425): unsure at all n locations
cttagagtcctctctctttgtggaggttgagccatgttctcagaatgtgcaaaatcagaatgctcagaatcagaatgctcaaaattataatgctcaagatcaggatgttcaaaatcaccaataacagaatgcacagattcaccagttatggaatgctcagaatgatcaaaaggtataaaatgatgcctaaataatctatgaaatgtcctatctatctcacgatcaaagggttgtaagtcagatggattgcctctagtcatacactacattcagcatgcacacaactagttgccttgtcatgtaaataaaggtgtaggtttgaactacagctaccctcaaatgatattcaaatgactttgaaatttgnacccaccttataaatgatgagatgatagcacacaaatttagacaaaattcaagtctac

SEQ ID NO: 110268 - DNA, 296 bp, Glycine max
  unsure (1)..(296): unsure at all n locations
ctgcagcttgggagcngatgtacacctatagtgattattgttataattcaatgaccatgcttaatggctatctatctacatggattatgcttggtatcactttgctctggaatggccccagtctaaatccttaaaatgcaagtactatttgtgatcatacaacttctgtctcacggtgtttattttagctttggttctagaagggtaagacaacattttttctggtctgaagcacattctttcatcatctgcaaagaagactaatggtcataagcagtcttgccatgacaactttt

SEQ ID NO: 110269 - DNA, 447 bp, Glycine max
  unsure (1)..(447): unsure at all n locations
tacacacacatgtgtaatcgattatgatcttcttgtaatcaattaaaatagagttntaagcacaaaagagattttctaactttagaacctttctttttactcctacatgatgatgcatgatgcacatatggaaagatagagactaagatgcaacacataatacaacaattaatacaaatgccactcaagagagttaggcatgtaaaagacaaaacttcttcaatcttcttcacgcttcaaggctaagtcttcatgtggctcctcctatctctaataggtagttggctgccgatccanatctcgagtattagagaattagtatgatataagagagttcaaatgggatgatatgagaaagtgcggatcanatctctctaagtagcttatggaaatacgatctgataactaggagataccttgtatttggctatataatgcatctataca

SEQ ID NO: 110270 - DNA, 116 bp, Glycine max
atcgtgcatgcacgtatcaggaagtcacaatccagtgtgctagcacctaccgtagtgatccatggaaccacattgataagatgacgtgacactctatctggtatgtcatcatcagt

SEQ ID NO: 110271 - DNA, 414 bp, Glycine max
  unsure (1)..(414): unsure at all n locations
atgccccacttatntcatgaccacatgcaaaatgataaattggaattttatgcaaactggcatgcatgccctatgcggacctcagtgtaaattttatggtatgtgatgctnggctangattcatntctctattttagtcaatccaatgttccaaaatatgttctttatcaatttgacattcatccgagtccactttgggcgtccgggaaaatttcacagcattcacccctcaggtgtatacacatttttttttaaaaaaactagttatgatcagtaatctttttcaaagaaaagttggaagtcatctcttttcaaaagcatgtcggtgtttcagctaaacaacttatntttcttttctttttcctctcctttntcttacttgctctcgtcttcacattgnttgttatattttat

SEQ ID NO: 110272 - DNA, 324 bp, Glycine max
  unsure (1)..(324): unsure at all n locations
tgacacanatgcaaaatgatgattggaaatntatgcaaactggcatcatgcactatgcgacgctcagtgtaaatnttatggcatgtgatgctnggctcangatcatttctctatttaaatcacccaatgttccaaaaatgttctttatcaattgtgcattcctcaagtcatttcggcgtgcgggaaatttcacacattacccttaggtgtaacacgttttttcttcaaatcggtatgacatgaatttttttttntaagaaagtggaatatcttttcaaagcttcggtttcactaacactatttctttcttttatatgagatttg

SEQ ID NO: 110273 - DNA, 409 bp, Glycine max
  unsure (1)..(409): unsure at all n locations
tgaggcaaactggatgcatnggttaacctggtaacccagctggccttgaatcagaaatctgtacctgtcgcaaggggttgtggtttgtgctcctctactgaccaccatacagacctttgcccttccatgcagcaacctggagcaatngagcagcctgaagcttatgctgcanatatttacaatagacctcctcaacctcagcagcaaaatcaaccacagcagaacaattatgacctctccagcaacagatacaaccctggatggaggaatcaccctaatctcagatggtccagccctcagcaacaacaacagcagcctgctccttccttccaaaatgctgctggcccaagcagaccatacattcctccaccaatccaacaacagcaacaaccccagaaacaaccaacag

SEQ ID NO: 110274 - DNA, 348 bp, Glycine max
ctcattgagcaagatctttgagaaacaagaaccccaccatgacatatatatcttcttccattacttctaatatgttgtggataaccacttctaggcagatcggtgatggtgaaaatattaatttctggaatgataaatggctcactgattctacaatcaaattgatgtcaattccagatcatctccaaaattctctctcaacttccattaagaacttcattcataatggcgagtggctgattccttcttctctcgctaataactattcagctatagctgctcatactatagatactatatattctctctctctcgacacacactacgtgatgtgggttcacatgactc

SEQ ID NO: 110275 - DNA, 378 bp, Glycine max
  unsure (1)..(378): unsure at all n locations
actaacttcttaaaatcctactcattactctcaaatgcctcgatatacaaggctaaaatcctatactactagaatggccaaatacaaggcccaaacgaaggaaaaacatattctaatatttataaagaatagtangcacatacttagcccatgggctcgaaatctatcctaaggctcatgagaaccctangggcttcccttggatctctggcccaatctacttggagtcttctatccaatgctcttgcggngtangatngcatcattccctccacctttgaaaggaattgacctcaaatcttgagattcttcatactctgngctccttcccttcaacacctatanaagaaaacatatgtattagtggtgtttggtatg

SEQ ID NO: 110276 - DNA, 252 bp, Glycine max
attctttcgcatggctgctcagaactacaatcaaatatcacagcaactcgcgttgcagatgttccatgaatgtcttatgatgatatatcacttatcttcaccccacaggcctgtgaatgcaaatccacaaaatatatctatataagttcctatcaagctcggagtaacatctaactcaaatgtgagatgtatacacaacacacaagagagtgatacatatcagaattttatataatacatatataataacaa

SEQ ID NO: 110277 - DNA, 269 bp, Glycine max
gaccttagatactcagctaaaaaattgtgaatattttattggatttcacttctttcttactacaaagtatgcggaaagaaatttgtatattgaagatgttaaccaaatatgctggtgctgataactatagacaaggcttgtaactgtcaacaaaaattgtttagaattttactaatggaataagtttatgaatgaacacgattcagaaaagattgaaccaaacacaatgtgctctgtgccagcctagcgatcataactccctcttttcc

SEQ ID NO: 110278 - DNA, 421 bp, Glycine max
  unsure (1)..(421): unsure at all n locations
ttaaagaatgaagtcttaanaagtcaacctcatgatgttgtaaaacacaatgaggagatggataccttaaagaaatccttaaccaaatntgttggaggaactgaanatcttgacaaattgtagagatatatattcatgatgaggatatcgttgtttggtatttctgtggcanagtaggacacatgacgtccagatgcagggacttacctaagaaggggtgcatctaatgcattcagaactaacaagaaaagaccagaagtnttgggtacctaaggacaagattatttatttttagatgtccttgataacaggaaagacacatcgatcatggtacctggatagtgtctgctcacgatacatgatagaagaaaagtgtatgatctaatgcctaacccttatgcatgttggaaactgtactttt

SEQ ID NO: 110279 - DNA, 448 bp, Glycine max
  unsure (1)..(448): unsure at all n locations
ctgttcagcatgttttgagcaggatgaggacattaatactatatgttggaagacccaacagaagctgacacagtaaacttgcatatggaagaagagggtgatattctctgagcttccatatgtggctaatctagatgctagacattgtattaatgatatgcatgtggagaanaatgtgtgtgatattgtaagcaacccatctcttaatatgataggcacgacaaatgatgatttgaatactctgcacaatctagctgagataggtatacttgaccagttacatctaatgtctgatggaataaaatatatctgcctcaacatgtcatactttgcaagagatgagatactagtttcgtcatgctgaagttggaattgcctaagatcacttaatataaagtntggcagtgaaactaacatggccttaagattgatgcacactattacactt

SEQ ID NO: 110280 - DNA, 402 bp, Glycine max
  unsure (1)..(402): unsure at all n locations
gtgacatgttcaaggaaattcaacaacaagcacatggttcaggagttggagagactctccttacctcttgaagaactcacaaaatcttgaaggagaatgaagaatattcaggtttttcaaggtttcctttcatgagtaaaacaagtgatagttccaagttaatagaaaaactagaacaagagaatgaagaggaatcaagtctaggatgaagaatgaagctcatttacctaaacttggtgactcaagtgctcaagaacacaaagaattagcagggaagaagaagaagaagaacaattgatctccctcacctcaagctgtaatttcgtgcaaaanaattgaagggataagactacaaaagaaattttatttgcanagactcaacccagtgattcttgatgtagt

SEQ ID NO: 110281 - DNA, 504 bp, Glycine max
  unsure (1)..(504): unsure at all n locations
tagcgtacattatatntaagatatgtgaataaatcacatgacattattaatatattaacaaaaaaatgatagatatgtactttattttacttaggagtacttggtgaccactggcactgggcgttgtaacttgtaagtatgttcggattgaaatatttatgacttataaatatcattattgataccaattattcctggttttattttaccattggatgtggtcaaacgtatctggcaatatgcgtacttaggtgcagaactgtaatacaaattcttagggtgaaatacagattttaacggaactgctactgatttttctgaacatatatttaacagctacttttaacatttcaacgagtttggaggaccaccatctccttcatatcttcaatgccattatggtgaaggagttctgtcctgaatttgcattaaacatgacagaatanatatatacagcttttgtgaaagctatttaaatacattgaaattagagtatacacaaac

SEQ ID NO: 110282 - DNA, 207 bp, Glycine max
aagcacgcgctgcactacgaagtgacatatttttttcactttgcatttctattcacaacccgcatatgttatacacactatttctgtattcctaagaagtaccacagcccttgtttcgggaccaacgcctgttcgcacttgctcctgaaaagcaaaaaatccattggaaaacaactacaacgataaacacctccactcgcaaaatat

SEQ ID NO: 110283 - DNA, 407 bp, Glycine max
  unsure (1)..(407): unsure at all n locations
gcttctcaaacattcctcatgccttctatctcctgcaccctctccaatctattcataggcactacgagtttattaatgaccctctgaatctgcagaccattcccaactatctgaaatctgttgttggattttaaattctgcaacatctttgagaaaattagctgctgaggtaatttcactgtcaaacaaggctcttctccacgcaaagttccactcccactccctatctcgaaatattcccatggatctaatgagctggtgctgctgcattgaaattgaatacagcctatggtacttcactgcatttgagaagataactgtgtntcgcatctgccaaatggaccaaactacaaccatccaccaacattgccatctcttgacccttatgccatccacctgaacatatg

SEQ ID NO: 110284 - DNA, 276 bp, Glycine max
  unsure (1)..(276): unsure at all n locations
tctcgagagcgttcgctgttcgaattggagcgtctcgatatattatgtgccggaatcggcatccgagtataagtatgaccgcttgaattcttatagcttgcgttgtcaatgtcgagcatcttgatatattatgcgcctgaatctgacatccgaggtaaaaagtatgaccatntgagattcacgagcgcttccattgatcaatntctagcgtctctatatattatgcgcgtgaatctgacatccgagtataaagtatgaccattcgaattcttgaga

SEQ ID NO: 110285 - DNA, 435 bp, Glycine max
  unsure (1)..(435): unsure at all n locations
tcaccacaatgatactcctcacaatgggtatagtagccctcaattatccaagtcatgacatggtaccttggtcacgcctgcgctatgacaatctgaaaagatgttggttgtatgggtgagcttccggtctatgcacaaaccaccaaacagatggtccttaaagtatctntgaatggagaaatttgatagggtaattcaattntttaaaggagtttattacttntcaattaaataagatgnttggataaaaatttgaaaagaaattgaaattgtgagtatttgataagggaatttagttaacttaaatattatcctctcggttctcttgaatccgtggttaacccctttcaaccaaccctggctactgaggccatgggtgctggcagcttcacgctcaacatttcacgcgttaacggctctgtcgcaatcaacact

SEQ ID NO: 110286 - DNA, 262 bp, Glycine max
  unsure (1)..(262): unsure at all n locations
tgaattctttagttcctgaatgtacaaccttcacattgttgctcgttcctctctttcttttctgcagaaagcatatcaaatgctgtctaaacatggatgaagtccttagaatatcactatctaagaaaacattgattgaatctctattgaaaagcacaactacctatctttcagagtgctttggttgaattgtcttgtctccttatgtggggcggttgtgttatataatcttattacttttgccgtccangaaaaacttatc

SEQ ID NO: 110287 - DNA, 477 bp, Glycine max
  unsure (1)..(477): unsure at all n locations
tagatcntagcctgaaaaataaatatatatggtctcaaatggaaacttatttaattcanaaataagactgagagaatttataaaatgcacacggntaatataaaataaatagaggtcactaaatcataaactaaaattttatagtttatggggcataatgcaaaatcattatttatatggtaggctctgtgcatataaaaatggagtcacagattaattttaattgtgaccagttcttttataaagatacagctttgaaggaggttcanaatcaagtttttcaaaataatcactttctcaaatgccactggaccagtgataggggaataaccaaaactgtgtacatgccaaacaaactataaaactgttgtctacaatgacttccataaatctcaaaattaccttgattaaaactttccatggatctgctcccatccgatcaagtttgtngataaatgcaagtcttggaacttcata

SEQ ID NO: 110288 - DNA, 284 bp, Glycine max
aataacctggaaatgactcccccagaaggctgataaactggaagggctctgagaaaaagaagaagagagaggggactaaatgatgaagagtgacttgagttgctacgacttcttctcaagtcacagtgaccatctctttaaactagacttctgaagctttgaaaactcttgaaatcttaagacttctgaagctactactacatccctaaactacttctctataactctgaatatctaaaactgactactcccactttatctactactctgaataactgagtctc

SEQ ID NO: 110289 - DNA, 410 bp, Glycine max
  unsure (1)..(410): unsure at all n locations
tcaagaatcaagatcaagattcatgaatcaagagaagacttaatcaatataagtatgaaatgtgattttcaaaaactgagtagcacatgtgattttcacaaaacatgtntaccaaagagnttttactctctggtaatcgattaccagattgctgtaatcgattaccaatagcaaaattgtttggaaaaagttttcaaatngaatttacaatgttccaattaatttcaaaaagctgtaatcgattataatgttttggtaatcgattaccagtgcctntgaacgttgaaattcaaatttaaatatgaagagtcacatcctttcacgtaaaagttntgtgtaatcgattacactacattggtaatcgatcaccagtgattggttctgaataaaatcaaaagatgtaactcttc

SEQ ID NO: 110290 - DNA, 224 bp, Glycine max
  unsure (1)..(224): unsure at all n locations
gccttggagaacagacgctcaccacaggtgaaccttatgtatgattagcccttggagataagaataaagacgcgcctgtcctgtggttntgcgagattcaccaatggcgggtcttgtgtgttgctagcctctggagaacttagactcaccaatggtgagacttggtttgatgagcctttggagaagtgagactcaccaanggtggaccttgtgttttgtgagcc

SEQ ID NO: 110291 - DNA, 389 bp, Glycine max
  unsure (1)..(389): unsure at all n locations
cgagttgaaggcggtgagtgatgtgtcggcgagttatgcggcgctttataggaangctgagttgtatgagaagttggtgaatggagagttgtcggatgaggaggatcaagagaagtattgtggtggatttttccgcaagggaattgagcatgatgagttgccgccaccgccactgggccgtgatgtgttgctacaaaatgaagatggtcctgttaatgatgatgatgattcattgatgtttaacatgaagcctgttgggcctgngcgaacagctggagctgttgacaattctgattataaacgcaatattaggtatgagatnntatgttttgcgttatacggttataccatgttatgtgatgaanagtctattgttgtagactagatag

SEQ ID NO: 110292 - DNA, 335 bp, Glycine max
  unsure (1)..(335): unsure at all n locations
ntacagatntagtgtnntgtggctataggatcgaagtgggtatgagtataagcaaatctcttatgctgctatgatgaataagaagcctatggtcaatggagagaataaagaggagggagaaacccatgttgtgacaatcggtcctacatggtccgatgtcccactagctcaacaattattatactgcaccaatatcaatccttctcattacccaccaccttaccagccaagaacacccaatcatgcacaaaagctcgccctaaatcagcaacacaacacacccgctgcacatatcaaagccgaacaccatccgttatacagaccaaaacaccaac

SEQ ID NO: 110293 - DNA, 128 bp, Glycine max
atatgactttagcataatcaaccagtggggaatattaattggaggacatctccacacacacatctcttaaagtgtgccacacctagtctctcttcacgccaacgccaaaacaagcgtgagtctctact

SEQ ID NO: 110294 - DNA, 350 bp, Glycine max
ctcatctagttcagactatacaaaggtgttacaagagaacctaacgattcctaattatatgggccatcaaatcaatgatgtgttgatagtaattgattagcccatgaatctactcggtggccgtacacacttcggccatggcttttgctttggctaatagacgcggggaggtcttgacttccattcaaggtcaaggcgaacttatccatccacatagtcgcttcttgatgcaatgcatcaatcaccctccctcttgcttctttttcggcgtacacttgtgcaaaatcctccactagcttttgttcatgggccacagactggttcaactcttccttgtattgccctatgat

SEQ ID NO: 110295 - DNA, 321 bp, Glycine max
cccgctatgggacttgtgcaacggcagggcaacacttccactctcataaagaacactccatgccactaatgctactctctacagcctactgtcttacacggtccataacctcagctcaatatcagaatcattcaattagacacctaacagaacaggcaagcgaacttgccaaacatcaataacctctactaaaccagacattctcgtcggcgtacatggacatgaattatgagtcacctaattctttgcatggacgtaaatgtaaccatttcactttctacacatgcactttgttacaattgccaattaactttctgcatg

SEQ ID NO: 110296 - DNA, 377 bp, Glycine max
  unsure (1)..(377): unsure at all n locations
cttctntgtgggttgatgaactctatcgngcagaatggcatgatcgctggctgacatattctcaattagctcagttgcctctctagggagtcttcaactctattttccccctgctgaagcatctggcagttgcttggtttgtggtctcagcccatctataaacatattcaattgaattggctctgagaatccatgggtgggagtctttctcaataaacctctaaacctctccaacgcttcacttaaagactcgtcaaggaactgatgaaatgaagagaatgcagctttcccttccgcagtctttgactctgnggaaattttcttcagaaaactttcaacaacttcttcccaggttttcagattggtacccttaaatg

SEQ ID NO: 110297 - DNA, 344 bp, Glycine max
gacctctaagacacctgcggcagcaagcttgcatgattacatcttttctttctttgcaaattcttcttgatatcatcaaaatcttcatgatttacaggatattcaggtattttagttttcatctttcattttctttattagtcgaaattttaaatttactaacaataaaacctaatttattgttggcaaggctgaatttgatatccctgaagcatctgccagtaggacaaagaagaaaatacttcagactgccgaggagcggtggagacagtttaaatctgatttgaccaggaaatggacacttgtagccgacaaggacagtgtggatgcactgtttgtgaaaa

SEQ ID NO: 110298 - DNA, 333 bp, Glycine max
ttgcttttttgggctggttgtggaactatttttatctctgtagagagtttacaataaattacatattctactcaatcaactaagataaaacccttgacatgtattgtgaatttagatatactcattaaatgttaaagcttatttatgaaacatagaaaagttgtaagaggtggaattagttgatgtgaccaacaaagggtccggtcattatttaatagtcttaacaacaaggattaatattgtgaatgaaaacaaaattaaggaacccataagttttaaaacaatatagggagattaaatataaaaaagtgtgaaatattaagtagctaaaac

SEQ ID NO: 110299 - DNA, 319 bp, Glycine max
agcttcatgattgaatcaagattgtgtcatgaatcaagattgattcatgatgatgaatcaagattgattcaaggtattttgatgataacaaaaatgatgacaaaaagcccaagagaatgatttcaagattgagtcaagaacaattcaagaatcaagagaaatttgatttcaagattcaagaatcgagtttcaagtttcaaatttcatgaatcaagattcaagactgaagattcaagaatcaagaaaagactcaatcaagataagtactaaaaagtttttcaaaacattgagtagcacatgaagttttcacaaaagcttt

SEQ ID NO: 110300 - DNA, 329 bp, Glycine max
taaactaattaggaaaaagccatagaagtcattgttacctcagagtaactacgaaagaaaggattgagagcttgtttctctcccgaatcaaagcattcctctccgtacggtggtctggcggctagcaatggtagctcgtggtggccaccggtggttatgggtggtagaaaagaaggtggcaggctttctggaggatgtttagagagaacgagggggcaaaatgcatattttcatatttttgggtgtatttataatctgcagatctcacttagcgagtttgtctcgctaagagaaaatcaacttttggcgctgagcgtggcctctcgcta

SEQ ID NO: 110301 - DNA, 341 bp, Glycine max
  unsure (1)..(341): unsure at all n locations
ggaccctaagncacctgcggcatgcaagcttgttgaatacanncttccttttataaacaaannatnnnggacatcatcgaaacctgcatgaattacacatgggctaagtatgagcccacttatctttgtacatattagattaaggtttcattattttttggccatgtatttagggctccataatgtaggtagggtaccctacaaatataggatttttcagcccttgtattttaaggcacctaaactagttttttgtattaggggtagttttataatttcacatgcattaagtgaatatttgatgtgtgtgttgggaaataaatttaattgaattgggagaa

SEQ ID NO: 110302 - DNA, 315 bp, Glycine max
tccctttctttggccaatgctggatttgctttctttgatttccttggcaattagatgctcagaaacagcaatatccaccactccttcaattggtctgcccaggtatttgttgattacagcaggggagaatctaatacattttcctctgacaaacactttctgatactcatcactctttctgtttgttatgtcagagggaatgttgacaatgaattccctgactagactttcataacaatctcccaacttggtgacagttttcagcagtccagcagccttgatgaggtccatgatctccttgcaatccaaggcatc

SEQ ID NO: 110303 - DNA, 315 bp, Glycine max
  unsure (1)..(315): unsure at all n locations
agctttatggaggctggancncttgtgctttaatgagggccttcaatggtgatttccaatcatggagatgtagtggaagataaaggagaagaagtgagaagaggcgtcatccactatggaataagccatggaaggaggagcttcactaccaagagagtgtcttggataagaaacttagagaggaatcttcaatggaggaaaataatgagagagagagaggggaaggggggcacgaaattgaaggagaaaaagagggagaagcaagagcttaactatgcacacccctctaatagctaagctcacctccttgagaag

SEQ ID NO: 110304 - DNA, 327 bp, Glycine max
tgttagagatttaggttcttcaaagattgtgttttctatcaaacatgggttaactttttcttcatcttcattggacttgtagtacttcttcttgtcctgagacttctccagttttggacattcaaatttgaagtgtccatgtttcttatattcatagcaaattatggagctattttatttgtctattttccttgaacaccttttttgaggaattcttctatctggatccacctttgcttttccacatcttgcggatctttcatgagatgaaggcgagcccatattcatcagacaattcctcatattctttatcaagggattctttag

SEQ ID NO: 110305 - DNA, 240 bp, Glycine max
cccgcccgccgggggagaaatcattgggcaccgacccaaccgtcccccaagggaaccgacaaaaacccgggcagaaactgccagcagaggccgcgacggaagaggccaacacaaaaacacaaaggacaggccacgccgaaaaagcaacggaacgaagagaagccacgaccggcccgaacgaaacgtagaaagaggaagtcaaaaacgcagcagcccggcagaagaaacgaaacgcgagag

SEQ ID NO: 110306 - DNA, 320 bp, Glycine max
  unsure (1)..(320): unsure at all n locations
agcttggagaggangcttcaatgtgatgtttagaaagagggagagaaagagagaggggggagcaccaaattgaaggaataaaagaggtatagaagtggaactttgaagtatgtctcacaagactctcattcatcaaagttacaacaagtgttacacatgcttctatttatagactaggtagcttccttgagaagctttcttgagaaaacttccttgagaagcttctttgagaaaacttccttgagaagctagagcttagctacacacacccctctcataactaagctcacctccttgagaagcttccttaagaagattcc

SEQ ID NO: 110307 - DNA, 327 bp, Glycine max
tgtaataagatttggaataacgctcttgacttctgtgagtatatatattattctgcccaattttaatttcagagcttaactttttattttatttttatttatttctaaggtactgacaaagaatcacactctcatcccttggcaaaccaacctcttgcagattagtttttccatattcgaagctgcaggctatgaagcttatggtactgaaactcctaactttcgtgttcctttggttgtggtggagtacttgtattcatgttaaagcagaaaatgatcgtttaaagcctggtgattcactgaatttttcacaatcactaatttcta

SEQ ID NO: 110308 - DNA, 315 bp, Glycine max
agcttgtatagtcgacttgtttgatgtacgaatttccttgcttggttcactacattaccacaagcttccatttccctttaatctacataactaaaccttcaacccaacaagaaaaaccttttgaatccatggcacccatagagactagatttttcttaaactttggaacatgacgaaccttagttaagtttctatcaatcccatcatacattatgatttgtatagaacctatatcgactgacttgcaaggagcattgttacccatcaaaacattaccaccagacttctcctcatatgttacgaaccaacttcttt

SEQ ID NO: 110309 - DNA, 325 bp, Glycine max
ttaaaatttgaattaaaacgttcaatatttactggttatcgattaccatatatgtgtaatcgattacacagtgcaaattttgaattcaaattttaatagctgttgtaaatcatttttggccactggtaatcgattaccagagagtaaatctcttgaaaaagactttttaacttaaatttcttggccaaaccttttgctacttcagttaggaattcccttcctatttaatatacccttcctaagaatctagagactgtcttgatcatccatcttgaatatctttaatttctttgtcttgaataaagctttgagaagcatgtgatcc

SEQ ID NO: 110310 - DNA, 314 bp, Glycine max
  unsure (1)..(314): unsure at all n locations
agcttctaagaaggcaactgttggttttgttcttcgnaaccacaacggagctgccatctttgctttattgttgatattggaaggtgtgatgtgctggcggctgagtttgatgcaatcctccctagaaagggactagtcactagagccatgagcaagaggctccaagaggattgggctagagctgctgaagaaggccctaggattcttatgaaccttagggtagatttctgagcccacgggccaaggttgagtccaattatctttgtacatattagactaggatgtcattatatttggtccttgtatttagggct

SEQ ID NO: 110311 - DNA, 319 bp, Glycine max
aaaccccccccgcacccaaagagcaacaaggacttatttctgaacacaaccccgaccaagaccacagccccgacaacaacactcgaacccaaccgaggcaaaacgaaacactaggcaaaccagggtgccaaccgacaaaacacgaatcccttgaacacaactgactaaagaaaaagtggaccaaaaagaaacagtaagggaaaacccacacaacgcaacaacaagcagaagctcattgcacacaatacatacttaactagaaagggggcaccgatgcccaataaaaaacaggacaaagggcaccccaaccaaccaaacc

SEQ ID NO: 110312 - DNA, 328 bp, Glycine max
  unsure (1)..(328): unsure at all n locations
gaccggcaggcaagcaaacaagagagcnggcccccctacccacaacctgaaaaacccagcagggcaaagcagatggagagagcaaccgccgaagaaccgaaacgaagggcaaccggggaaaagaaaggcgggaaaaacgaccccaacccaaccagaggcaagacccgcgccccgagacggccgcaacaaccacgagggccccgaccaaaccaagcaacacaaggagaaaccgcccgccaaagcggcagaaaaagccaaagaaggagcggagaggggggtaacccgccaccacgagaaaggtcaaaacgaccacccccggccaaaaaac

SEQ ID NO: 110313 - DNA, 315 bp, Glycine max
  unsure (1)..(315): unsure at all n locations
agcttgnnngngatgatcattttcttttgtatacacaaaanctaatttttatatatcacttgcagcaataattttattatgtatttatgtatacctcacaaaaagtctccttaaacaagccaaatttaattatttaaaagtgccaactgccaactcattcacgctcattagacatggaagctgatttcttcgacttctcttctgccgttttccttaatcctccattctaggtaagaatgaccttcatttggatttaccaaatagaaaaactaaatttgcaattaaacttctcaatatcaaactttgtaataatag

SEQ ID NO: 110314 - DNA, 335 bp, Glycine max
  unsure (1)..(335): unsure at all n locations
ccccgggacctctaaccgacctgcggctgcaagctcacactttttttgttactgagancacaccaagggccaagccaaggactaataatatcatcccaactatggtagttaaaattatcctactattaaatgtatttgttccttcacgccttacaactcatttattttttatatagaaactagaagctcgccatattttaataatgtctagtttctagaggtttgaaatatgatattgcttccaattttttaatccatatgattagcgtaacattcatagacaaatacataatcaccacatatgggattaataattgctgtaaatgtttctatgt

SEQ ID NO: 110315 - DNA, 327 bp, Glycine max
  unsure (1)..(327): unsure at all n locations
agcttcaatgaaaaaanngcctttttataattatttagaaagaagcaggaagaaaaagaaataaaaggagtgggctatcgctcaggaaaatagataagagaaaaaagagcctttgctttttgtgtttaagccataaagaaaaaaactaaaaccttacttgttttataggctattgtttagggtaaaaataattcaaattttgaattaattcaagtaaaatataattaaaatggttgtgatctaaccattaatgaaacatgattagatgtcatctaaaaccgtgcttaaagatataatgataagggcaagcatggtgcaataatttgc

SEQ ID NO: 110316 - DNA, 330 bp, Glycine max
tctccgaagggcatggttattttcagcttcctgttttatctaaaaatctcgccagatgacgatctttctctttcttggaaggtaccacaggatatggtacttccacaccttcatccacagctttttcactcctactcttctttgcattcttattattctttttcttctttttcatttttttcattttctacttctttttctttttcttggacctttaattctttattcttgaccattatttgttcctctttttcttgattactttcacctctcacctcatttttcttgccatcagtacttttgtcagtagttttcttcttatgcacaaca

SEQ ID NO: 110317 - DNA, 318 bp, Glycine max
  unsure (1)..(318): unsure at all n locations
agcttgtttaaacctanagtcttttttttgcgacacactaagtgttctttcccaagttctacaaaaccttctggttgctccatataaatttcttcctctaagactccatgtaagaatgtcattttgacatcaagttgttcaacctccaagtcttgttttgcagctagactaagaattgctctaatggatgtcatcttcaccaccggtgagaagatttcttcaaaatctatgcttttcttctagttacatcctttcatcacaatgcaagctttgtaccttgggtttgagttgttatcttcattcttgagtttgagcacc

SEQ ID NO: 110318 - DNA, 331 bp, Glycine max
ttattatgattttttctgttctaatatgattttttttcttcaggttagtccaagttaattgattcacatatttatgcaattgcagttgagaagctatcacatctatttgcataaaatattcatttgtatatgttaatatgtatttctttatgtcattgtaatcactagcaacaatgaagataaccaagtaatggttttgaggtaaagacattttcttcttgcatatatgcttgatcattttaaaaatttgttgcttacttagttcatgaatgtgtagatcggtgattacatggatgtggctattctattggttatcctgaatgttggatat

SEQ ID NO: 110319 - DNA, 321 bp, Glycine max
ttccaaccttttaagggggggaacttttttattttaggggggggggaactaaactctaacttctcaaaggaattttctcaaaaaaacctctcaaggaaattttctccaaaaaacttctcaggaaacctcctagcctataatagaagcatgtgtaaaacttgtggtaactttgatgaatgagagtcttgtgagacacaactcaaagttcaacttctctccctttttcttccttcaatttcgtgctcccccctctctctttctctccctctttcttttcctccattgaaacatccttccaagcttcttatccaaggcccatct

SEQ ID NO: 110320 - DNA, 328 bp, Glycine max
actcaagccccaatcggacatccgtgagaaaagatacgatttttttattttcaccagagctatcgctgaacaatttccaatgtcacaatatgagaggcgccaaaaatggacattctgaatagatgttatgaccgttagaatttctccagagctaccgctggtcaattctgagcgtctagttatgagagtcgccagaatcggagctccgggtgaaaagctatgaccattaggatatgtcaagaactttcgttggagaatttcaagcgctttaatataatatgcgccctaattggacatccgggtgaaaagatacgaccaataagatttt

SEQ ID NO: 110321 - DNA, 197 bp, Glycine max
gggaaaaacccccgcaaaccaaaggattataggaggggggctttttttttcccaaaaccacaggggccaaggaccccaaacccagggaacaaccacaaccccacagcgacgaaccagaccaggcccatcaaaccaaaaagacctccaactatgtcatgagtaggatgggcagaaaattaaagaattgccagtcaaag

SEQ ID NO: 110322 - DNA, 345 bp, Glycine max
  unsure (1)..(345): unsure at all n locations
cccggatcttaagtcacctgcggcttgcagcttttatggaggctggatcnttgattcttcaatgagggccttcaatggtgatttccaatcatggagatgtagtggaagataaaggagaagaagtgagaagaggcgtcatccactaaggaataagccatggaaggaggagcttcactaccaagagagtgtcttggataagaaacttagagaggaatcttcaatggaggaaaataatgagagagagagaggggaaggggggcacgaaattgaaggagaaaaagagggagaagcaagagcttaactatgcacacccctctaatagctaagctcacctccttgagaagc

SEQ ID NO: 110323 - DNA, 327 bp, Glycine max
tgttagagatttatgttcttcaaagattgtgttttctatcaaacatgggttaactttttcttcatcttcattggacttgtagtacttcttcttgtcctgagacttctccagttttggacattcaaatttgaagtgtccatgtttcttatattcatagcaaattatggagctattttatttgtctattttccttgaacaccttttttgaggaattcttctatctggatccacctttgcttttccacatcttgcggatctttcatgagatgaaggcgagctcatattcatcagacaattcctcatattctttatcaagggattttttag

SEQ ID NO: 110324 - DNA, 320 bp, Glycine max
agctttatttaagacaaataattattttatattcaagatggatgatcaagacagtctttagagtcttagaaagggtatattaaataggaagggaattccaattgaagtagcaaaaggtttggtcaagaaatttaagttaaaaagtcttttacaagaaatttactctctggtaatcgattaccagaggatgtaatcaattaccaatggccaaaactgatttacaacatctattaaaatttgaattcaaaatttgcattgtgtaatcgattacacatatatggtaatcgattaccagcagtttctgaacgttttaattcaaa

SEQ ID NO: 110325 - DNA, 327 bp, Glycine max
ctaatttattcttttattgaatcgaacttcttttttctctgacaggctctgaaatgcaatatttaatctatcattatattatgctgatgcaactttattttctagcttaaatactttcttcttgtacaaaggttataagaactgtgtgactgtgatttgggtatgatgcttgtgtcatcacgtggaacattcgctctttattcgctgctctgtaggcatgccaagcttaattcttgcgtagctttgaggctatcactaaaccagcgaggtagttcttgcatattgtctatctcagtgattttcccctctgaagccacaaattgctac

SEQ ID NO: 110326 - DNA, 318 bp, Glycine max
agcttctagccaaatggactttccttgttttaattcctttgatagcccttttgagccttgtttccctttccttgttttgaagctcactacaagccttaagtgaaaaaccatgatattaccatatccttaaagaattttggagctttggaattgtattgggaataagtgtggggggtttttgtttcattggacaacttgttttgttggctatgcttcatgatgtattttgggccatacttgatgtacattgtatattggttaaatgttggacatgctgaatgaaatgttgtttctcaaagtctaaaaaaaaaaaaaaaa

SEQ ID NO: 110327 - DNA, 319 bp, Glycine max
  unsure (1)..(319): unsure at all n locations
tcacaatntggtttagttcgatacttatttttatttttaaatatgcncccgggccttaaaatatacttgaatcttgattttcatccctattaaaatatttcgtggcttttcatccttgaatttttgtcgttaggattaatctattaagtgttgagatgacatttgaattttttttaaatgatttatgacaattcttaaaattgttagtattgatttaaaaaactaaattacaatttcaaatggttttaaaacttcacattatcttttcatgattcacactaatcaaggaaaccgactgacataatataagtagcgaact

SEQ ID NO: 110328 - DNA, 311 bp, Glycine max
  unsure (1)..(311): unsure at all n locations
ttcttcttataagctgttttctttttaanaaacacaagnggagttttattcagaaaattagagtttatctcttttatcttagtgagagtgattctcccaaattcttgagtgattcaagaacaccctgtctgtttcaaaggactttcacaacctttgtgtgttgccctcgctggaaagagagattctttccttcctatcatctccacccttgttctttcaaaccataattccagaaaatccacctctgcccaaaattatcttgtgaccataactcccattttgcacactcaaattaagtgattcttgagcct

SEQ ID NO: 110329 - DNA, 328 bp, Glycine max
actgaagctattgagggatccaaagtgactcttcacctatttatttgaagagaaacgcccagcgacattggtaataaattacccgaacatagcactcgcggaccgcctcttgaaaatatcaggaacgatgtatattcagaactaaaagtctctaacactcatttggctagaggtgatcaattacaacgactagggaagcgaataccagagaatcctaactctatggcaagagtttgataactacacatgtgctattagagaactcagaaagactgaatgataccacacacgatagagactataacaactcttgcatctagagagttga

SEQ ID NO: 110330 - DNA, 317 bp, Glycine max
agcttgtattgtcactcttatcttgactagttatagctttctaaataaaatgagtttatcccacgtttttactccaaaaaacagtgcgaatcaagtcactcccacattttatctctagcaggcattgtatgttggtctcgtcctttgtcacgggaagtcggaaggtccatataaccttcttaactgtacacatggggcactgcgcccccaaatgcgcaagtaagaagagataatcttccaggctctcgtgttcataaatgcattcatatcatgcatcgcataagcatctcttcatggcatcataatgaacatatcat

SEQ ID NO: 110331 - DNA, 322 bp, Glycine max
taatttgtaattttggttttggggtttttttctttttcttacttcccacttattccccattgctcctctattcctttgggttttagctactatcccatactttcatctaccttgtccttggccccattacaaccttaaaagacctttcgatcctcatgtgcatgtgtttgtgatgtggttgtcaattttagagtcttgccaagtctatgtggtgtttgttttcatgggtgctctgagagtaacagtagcctagacacttgagagataaagtgcatatcttgtgaggctttatcacttttcattcttgagttgattgactatc

SEQ ID NO: 110332 - DNA, 250 bp, Glycine max
  unsure (1)..(250): unsure at all n locations
cacccccaaaaagaacaacccgcagccacgcgaacacggacgaccnaacggagcgagacaaaagagnggnnngcaccnagccacgcagaaccccggcgcaaacaacaaagacagggggaggggcaagnaggcccacgcgacaaacaacaaaacaggnggcccaaaggcaagacgcgcacacccccagggaacgacaatnnggacagcagccgcacgccaagcaaacaagctacggaaaaacaccacccaa

SEQ ID NO: 110333 - DNA, 120 bp, Glycine max
tgcttctttgctgacgagtggctttttttttttttatgaacgggtagctccctaataaataccggaaacctaacctatcagccctataataaaaatgtaggggctttattaaccctctag

SEQ ID NO: 110334 - DNA, 296 bp, Glycine max
agagggaccaggggtttttttttttgtagcaccaaacactcgcgcatggatcaggatcccctgggaccgacctacttccacgacctactatcgaacaaggtccttgggccctataataccctttgaagactctcacataacggacgctactacgcccctgtgagcggatgggcacctttaagccccacccaatacaacgcgggagttcgatatgcagcgcggagatatacggctgttaaaaacaaaacctccttaagcttcaaggctacgttttaaggttgcccccccccccccca

SEQ ID NO: 110335 - DNA, 305 bp, Glycine max
  unsure (1)..(305): unsure at all n locations
atgcaaacttgcattgcaatccncgttggtgccttttctcaacaaaactataatnattgaaggagctttcctgctgatgtggattaccgctcataggaatctaattattaaccaaacttctttggggccccataatccggtgcatttgtaaaaagcacatagtattatgtgatttttgaatgttttaaaagaaaaatagcctatttgtatcaacggggctctatttaattgatggaatgtgataatgagtctcgtgtgcatttttgtattgtaaatgtgagcaaattatctgtttgtttgcccaa

SEQ ID NO: 110336 - DNA, 291 bp, Glycine max
agagcgttttctatttttcatcgctctaagtggctcctctatctcttgaaagggtccattccataacgaaaacattaaactaacaaaacaaaatttcttgaaacgtgaccaatcgaaaaaaacttcaaactgcaatactatataataagcttaagggagaaaaaccaaagaagctaggactaaaagacaaccattaacatccttgcaagctacctatgcccacaagcgagaagcatccatcacacgagccaatatggaaaggggtcaagggatcttacacgaaccatgcaa

SEQ ID NO: 110337 - DNA, 321 bp, Glycine max
agcttgccacccagctcgcccaggctgagcatggttgcttccttcagaattgttgcttctggaggaatcttctggagggcccaagtgggcctggttgctatttgcactcccctttttactaaatgcacccccttctattttttttgtaattctttttccgtaacgttacgaaacattgtgaatttcgtaacgatacttattttccttccgcaaggttacgaatccttatggattatgtatttactcttttttagctttcgaagaagttacggaaactcacggatcgtgcaagcctgcttctttttgatttctaagacgtct

SEQ ID NO: 110338 - DNA, 349 bp, Glycine max
gacctatgaatctcagcttgtggggtaagtctcacgattgtcacatgctcttgttacaattgttagccggggctataccaaacatcttggcaacaaagtcaggttaacaattacttccctgtgctttttcttccattctatatgtagtaaaagccattgatccagtcatgtttgatgaattggaaaatgaagccgccattatactttgccacttggagatgtatttcccccctgctttctttgacatcatgattcacttgattgtgcctctggtcaatgaaattaaatgttgtggtcctgtttatttacagtgggggtacccggttgagcgattcatgaagatctttaa

SEQ ID NO: 110339 - DNA, 327 bp, Glycine max
  unsure (1)..(327): unsure at all n locations
gcaggcacgcaagctcgcaagcaaaaaaaaaattttcggntttcccnccgaggaagaggaacgcaacaccagaatagaaacaatcaaccctctagaagaccaatccaaaccaaaaaagaattacgctcaaccaaaaggacaaataaacatggaaatcccaatacaaaacctcataaaaaactcaaaagcacgaagacctaagtgcggataaaaagatgccgaaacacagatgcacaaaggccataactgttggggaaaacaaaaaactctaggagcccgactggaaactaaagctgctggagcaactaccacaagtttggggggggg

SEQ ID NO: 110340 - DNA, 317 bp, Glycine max
agcttagcatgctgcgctaagttcttcttttagttttcagttttaattttttattttgttgaaaataaccctgattaatcttgttgtttgatcttatatttttagatggcttcaaacaaaagaaaatcatctgctccttcatcttcccaaattagatttgacagatcaagattccattcacaggaagcttgggatagatataatgacattgttgtacctaggaagctgcttctggaaagaaatgtggtagtatactacacaaaatttgatgagttcaaggatgagctgatgagaaggaaatgggatgaggaattaac

SEQ ID NO: 110341 - DNA, 341 bp, Glycine max
acacttgaatactcagcttaatgcagaaaacatactcatgactgggttctttttttggttttagaattagaaaagcatgaaaatagggacttgtttgtaagaatttgggctgccccatgattggtactttgcacctatgtaacgtgggaaatgcttttcaatggtgtgtaggtatatgtgtaaatataaggggcataaaattcctcgccaagtatgaataaattgttttcctaaatgaatgtatgatagtatggaatgcccttttgaatgcaaatgtgtgcaggatgtaattagctttccaatatgcatataaataaatatgagtgaaacaataaaaattg

SEQ ID NO: 110342 - DNA, 315 bp, Glycine max
agcttgtcctctgccaaccaattttccaacagatttttcttgttctggttcacaaccaaccgggataattctaatgattcaaaggcattcagctttccccttggtaaaagtgttccaaaatactgcaacagaagaggagtttgcccagcttgcacaggaacactctgccacgtaaagcagataatggcattttaaacattataactaattgaccaaacaaaaggacaccacctaaaggcaaacagtaaacaaccagaaaatgaatctctgtgaataaagtggctaaaaaagcaagagacaattctcagatagcaa

SEQ ID NO: 110343 - DNA, 327 bp, Glycine max
tataaggtaaaatagtgtaacattatcatcttatttctttttaccttcaaaagtctaacaaatttattataaatatgttaaatttttttatatcaatgcataatcatttattctcaatttcatttgttataaatgttgataaaggctcttgatatcacttttaatcattttaaatttataaaaaaaaataaagttaacaaaaatatatatttaggaaaataagaggaaatagaacattttttttacgaaaaagcaaaatttacgtgttagtcagtctaaagtgtaaacgacaatgggttccgcttaactcgcattccatttatgttt

SEQ ID NO: 110344 - DNA, 319 bp, Glycine max
agctttaatatgaaataacctttttctacccataatgggtataggtaatccatgatctcaaaccaaccgaaattgacccaattagtttggttcaaatttttttagcttaggtcaaacccaacacaacccaatcctgcctgttcaatttacaagccaagtaagatgttttgtttttttaactcgtgacccaacccgtaacatataattaaattcattatatatataattaaattattaaacacaaaacactataacttttttctaacataatttattaaattaaatcaattatacttttttctttttcagttgttctttt

SEQ ID NO: 110345 - DNA, 211 bp, Glycine max
gaactttttttgcccccaacggaacccgcaaaacaaaccacaggagcgccaaacccaaaagagccacaacataccggaaggaaaacaagcaacgcagccgaaaccaaaaagggacaacaacaacacggaaagaaaaaaaggggcaagacaaagacccgaaaggacaggaacagtgcggaaagaaaatcccaccaaaaaaacacaaaaggag

SEQ ID NO: 110346 - DNA, 316 bp, Glycine max
agcttcaagtacaagcattatatatcaatattatgagttccaccttctaatgaattaatgcttttgtacttgggttggaaattccacatcttaagctaagtacgtatgttattccaaacagcatctttctttaaaaagttcgaccttcattttcccaataggcttaagttgaaccaacacgagttttttatccaatgaccaccatcactccaaggtttttttttatttagggtggtgccgaagaaaaaaagaaaagaaatagattttatactaaccattttttgcgattattaacgaccaaagccgtcaatattaa

SEQ ID NO: 110347 - DNA, 341 bp, Glycine max
gggacactatacaaactaagcttgctataaactgcttgaactcaatttttttcttttgtcataccagtataaatcaaatcatcattgtaaatgctaacaattaatatgttatctcccatgccttttttgatgaacaacgtttgttcatttggacattttagaaatcctttcttcacaaaatgagactctatacggctgaaccaggctcttggagcttgtctaaagccatacaaggctttctgtaacttgtaaactttgtgctcttttccctttcttcacatatccctttggttgctcaatgtacacatactctctcaattttccatgaagaaatgcagatc

SEQ ID NO: 110348 - DNA, 312 bp, Glycine max
  unsure (1)..(312): unsure at all n locations
agctttaagtcagngncttcttattttatacnnccggattatgaccttataagactttctccgttaaagggtcattattggactgtgccaacttttcaaactacactatcaccttctatctatcttctccggcatctatgggcacatacgataatagtcactacaagtgtagatcaacagaaatggtttcaattttgaattttaatagaaaaataaataaacaaaaggtactactacccttgttagcaaaggccaaaagttttcattattattattggaccaaccaagcatatagtgttagattgcctttac

SEQ ID NO: 110349 - DNA, 174 bp, Glycine max
ggcagaatattttacagcggcaccgcaagagaaatcaggggcgaaagaaagacacggaggagggggaaagaacacccaaagcagcgcaccccacccaccgggaccacacacggggcaacacacgcgcgcagccgcccgaaccgaaccaaaatccaaacaagcaagccaggcgga

SEQ ID NO: 110350 - DNA, 314 bp, Glycine max
agctttgtgggtctttgagttttatggatttaatcattatttaattggaaactgcatgaatgggatccgcaaaataaggagaatatctgactcgggaaaaaggataaggataagtggtgaggaaattaaaagctaattaataagcagctaaatattaaaaaaaaagtaaaaaatgaaaataaaatatatttttttattttcttaatatgaaagttgattgtggaaggtggaatttgactaaggttagaaaaatcttgattcaaaaatttaagaagataaggaaagagagaagaaaactagtttttgactaaggg

SEQ ID NO: 110351 - DNA, 328 bp, Glycine max
ttggaggataaaggttccagctttgtttcttgtgtttgcgtggagattattaagagataggctgccgacaagaaaaaacttgcagagaagacagattcaactcacagattcactttgtcctctctgcaaaacccaacaagaggatgcatcacatcttttctttcactgcagcaaagttcaacccatatggtgggaaaccatgtcatggctgcaagttaagggtgcttttccattaagcccacagcagcacttccttcatcatttgggtgttcaacctcctggtgtaagaaataataaatggcattggtggtggctagctttaacctgg

SEQ ID NO: 110352 - DNA, 238 bp, Glycine max
  unsure (1)..(238): unsure at all n locations
tgccgcctatggtattagaagantttttatttttttatcccccagagacccaacataaatactgtctatcgacgtatgtctctgaacgccactgggagtcagggtacttttctaactccgcctattgatgatatcttgctcgcatctaactatcttcaccctcttcatacgactaaaaaatttctctctccaaactttgaattgaaagacctggctgaggtatgctttgttatccgga

SEQ ID NO: 110353 - DNA, 322 bp, Glycine max
  unsure (1)..(322): unsure at all n locations
agcttagagcattcacaatggtttatttattaagcaatgngttagaggaagcaacatgcttgtaatgcattccaaattctccaaatttacccaacccataaaataatcctaatatgacaaatttttaatatccaataccctatttcatcgatatcaatttcatatgactcaatcatgcatgagcacacatacaattcacaatgaatataacccaatattacatgggatactatctagcaaatggtctttatctcaaatgagcgatacttatgaaggctatcccaaggccccaaggcataaaagaaaattatttgttcaacat

SEQ ID NO: 110354 - DNA, 333 bp, Glycine max
  unsure (1)..(333): unsure at all n locations
tcttagtctcgcatgatgaggatgaaccngttgtttcttcatgcactcctctaatgtcaatagcatcacttctggcactaaattgcttggagtttgaagccatcttctcaattaaatttctggcttcagcaggggtcatgtctccaagggctccaccactggcagcatctatcatacttctctccatgttgttgagtccttcataaaaatattggagaagaagctgctctgaaatctggtcgtgagggcaactgacacataattccttaaatctctcccagtattcatataggctctctccattgagttgtctaatacctgaaatgtcctttc

SEQ ID NO: 110355 - DNA, 322 bp, Glycine max
agctttctcccaagtcctaaatgttatttcaagctagtattaactcactttaacctccatttaccacaaaattcagacttaaccttccaactctcaaagcctcactctttttccactcataacaccacattctcactttccaaccctaggttaactctacatttcatctctaacagttttccatgggcaatttcagcatacaaacatcataaacatcatcacaaaaccctaaaacagaatgggtatgtctaactcatccaaacatggcaatttcaacaagctttcaacaagtttcttcacaaataactatcatgaagcagaa

SEQ ID NO: 110356 - DNA, 332 bp, Glycine max
tcggaagaaagtgatgaggtacaagccctatttgttgagcttgaaagagcccgagtagtcgaagagaagttcaagtccatagccatcaaagtctgaaaagagtatgatgaacaaagggacgtcaatatggccaccgctgatgccttggaacgagaaaccaagaaggcccaaaaggaagaacacgtgccagcaaagttttgaggggctttatagggcagcaatagtaagctcaagctccgaagaggtgaaaggaatcatcacgggtcaaaggcatgatcttgaaggacgagctaaaggcttaccttaggtcgaaaagaaatttgtccccacag

SEQ ID NO: 110357 - DNA, 319 bp, Glycine max
agcttggagaaaagcttgaatatgttttgtcttttacatgcccaactcccttgagtggcacttgtattggttgttatattgaatgttgcatcttagtccatatcatatctctttttcatcatgcattatcatgagtaagtaagaagaaaaattaataagttagaaaagtttcttctgaaggcaaaactctttattttaattgattacaaccttatcataatcgattacacaagttttctgaagcttccaaagttatgtctcgtatcagtttaatcgattacaaccttatcgtaatcgattacatagttgtttttggaca

SEQ ID NO: 110358 - DNA, 342 bp, Glycine max
gacctataaaactcagcttgaggatatggggtacccaaacatgtgttttatgtggcggtcgagcgatggtgcaaaacgattctccacatccacaaatcacgtataacccaccatcccctgttgcccacctccaactgagctcacgtagtcccacgtagcccttatcctcgttcctctcaacaccaggtcctcatcaatcctcccaagcttccacaacatccaggtaattccacatccaatcatcatggactaacaaaaccaagcaaaacagggcaaaggtagaaaactctgcccaaaacacaactcaaaatcacagcttttcacatacaaataccccagtaa

SEQ ID NO: 110359 - DNA, 318 bp, Glycine max
agcttgaatcggacatccgtgttttttagtatgaccatttgaatttctcaagagctttcgttggttaatttccagcctttcgacatattatgcaccccaatcggacctccgtgtgaaaagtcttgaccattttgaatttctcaagaagttccgatgttaaatttccagcgtttcactatttaataacccctgaatctgacctcagtgtgaaaagttatgaccatttgaatttgacaagagcttccgttgttcaattacgaattttcctatattgtgatgcgcctaaattgtacattcgggtttaaagatatgaccatt

SEQ ID NO: 110360 - DNA, 320 bp, Glycine max
ttcacacgaatgtccgattcgggcgcataaaatattttcaacgaaagctctggagaaatccaaatgggcataacttttaacatagaaggctgattctggcgcatcacatatagagaagctcataattgaataacgaaagctatcgagaaattcaaatggtcataacttttaactcggaagtctgattcaggtgcatcacagaaagagacgctcaaaattgaacaacagaagctctcgagaaataaaaatagtcataacttttaactcggaggtccgattcaggcgcataatacatcgagacgctcgaaattgaacaacga

SEQ ID NO: 110361 - DNA, 314 bp, Glycine max
agcataaaacaaaataagttttttcttgtgggggtatgtcgagacaatcggcgcaattaggaaataattgtccattaatgaaattatggaaatttttctttctttccatgaattctataaatagattgattctaattcctaattttatgagattgattctctcaggcttgtatacaagaatgatactattatcatgaaataaacacatcattctttaatttcaacacttttaattgactgaatggttccctaattacaacatgagagacctatgcactgtctacactttaagaccaaagggttcttgcatgaag

SEQ ID NO: 110362 - DNA, 327 bp, Glycine max
tctaaatctcttgtatctgaacctaaaaaggttgttgtttatttcaagacaggatggtaccctgagctctggcaagcagactgcggatgcaaatactgtactgactgaggcgaataaacctgagaaggtagttcctaataaaaagaaaaaaacaccctgtctctaaaaagcaagaagaaactgcggaatccaataaaacataaacaccgtctgacaaaaaggatgaaaggagtgttgtggcacttcaagcacaagatgacacacaaagcactggcaagcagactgccaatgcagataccacagtgacgccagaagtgaaaaaaactg

SEQ ID NO: 110363 - DNA, 318 bp, Glycine max
tatcttccaagagttgaagatgcttttgtcaacatctccagtgtgaattttgcccgaccctaagagaccatttgaagtgtattgcgatgcaagcgggcaaggcttggggtgtgtgttaatgccagagggaagagttttggcttatgcttcacgccaattgcgtcctcataaagttaactatctgacccatgatttggaactggcagatgtggtctttgccttaaagatttggaggcattatttatacggcactcgctttgaagttttcagtgaccacaatagtctcaaatacttgttcgatcagaaggaactcaatat

SEQ ID NO: 110364 - DNA, 317 bp, Glycine max
  unsure (1)..(317): unsure at all n locations
agctttccctctttgaacatantcccctcagccaaatagaatccatcttgggcctttttcccacaactctcataaatgggagagaaatgttcatctaaagcatacaagtccctaatattatcaaatcctaaaatttgagctcctagggagcaaaacaatgtgtgtctcctaaagagggcatcagctaccacatttatttttccctttttgtatttgataacatatggaaattgctctaggttctctacccattttgcatgcctcttgtttaacttgctttgccctctaatgtacttaagtgattgatgatcactatg

SEQ ID NO: 110365 - DNA, 314 bp, Glycine max
  unsure (1)..(314): unsure at all n locations
agcttgtctcancatttttgctagacggaggccaacatgctagctatcatcgccaagtaccaagaagagttaggtctagccacggcccacgagcataggatcgcggatgagcatgcctaagtatacgcggaaaaagaagctagaggaagggtgatcgactctttacaccaagaggcaaccatgtggatggatcggtttgctcttaccttgaacgggagtcaggaacttccccgattgttagccaaggccaaggcgatggcagacacctactccgcccccgaagaaattcatgggcttctcggctattgtcagca

SEQ ID NO: 110366 - DNA, 325 bp, Glycine max
taacattttcacacactagcattaaagttctttttattctaaaaatatcaattcaactccaaatgtcaccaaaattgacattgacaggaatgctccataataggtatactccagcaacaaaaaatcttcataccaaaattcaatcaaaatatattttatgtacattccatataagaattgaataggctgacaaaattacataaataacctatattaaatttgtggccgtgtgtgtacttggatttgtattcttttaatcttatctttgtctttttttatatctttttcttttattttataaaagttacacaaatatttttttctc

SEQ ID NO: 110367 - DNA, 316 bp, Glycine max
agcttgaatcatttatcctatctccaacaggcaatgggtgagtcccgtccaagtagttccaaagaaaaccggcctcaccgtgataaaaaatgagaaggaggagctgattcctactcgggtgcagaacagttggagagtatgcatcgactataggaggctgaaccaggttaccaaaaaggaccattttccactgccattcattgaccagatgcttgaacgcctgataggtaaatctcactactgtttccttgatggtttttctggttatatgcaaatcactattgctcctgaggatcaggaaaagaccacattcact

SEQ ID NO: 110368 - DNA, 326 bp, Glycine max
tctcccctattttgctataaataggggtttttttttaataagaaaggggttcggccccttaggcacttctctctctctcgaaatggctgaggaaaattagttccgtgaagaaaatccaagccgaggcgcttccgtaacgtttccgtgagtaattacgcgaagattatcgaccattcttcaagattcatcgttcgttcttcgttttcttcagtcttcaacgggtaagtacctcagaccaagcttttcaattcattctatgtaccagtggtggtccacattttgtttcatgtatttttattcttgttttcgtctactttttatacccc

SEQ ID NO: 110369 - DNA, 311 bp, Glycine max
agctttaaccaattcagttttttcaggcaattgtaatgacatgaaaggtatgagacctaagttctgaaatgcttgaatgcaatcaaaactttcagcagaaaagaaatccatatctatgaacttaaggccgatagtggaacgagatgagaaaaggtttgagtaccgtatctgatgttcttcggaagaaaatagtgtggaataggataatgagggtggaattggtgttgtggatgcgctggtggctccggaacgatgagctcttgaagccgaagcggaggtggatgaacccttacatttctttgatgattctg

SEQ ID NO: 110370 - DNA, 345 bp, Glycine max
  unsure (1)..(345): unsure at all n locations
atctataaaataccccagcttgaaggtgtgtagcccaccatcttttcatattttattactagnaatgtgtctactattattgtcatcatttttttctccgtcattgaggtgccacttgagctgccaggtctctccacctttgggcgtattcttttgaagaattcgtgcgccctttttgcacatgttttgtagttgcatcctatccgaagccattataccgacactgtctaacgaaggcaaccattaggtcctcccacgaatggactcgggaaggttccaagttagtgtaccaggtaacaactaccccagtaagactttcttggcggtatggaataattactcccc

SEQ ID NO: 110371 - DNA, 313 bp, Glycine max
agcttccaaaaattatttttactttgtcatcaatattgtaggacgcctgccaaaggatagcagaaaatttggaacacattatcaacatgaggatgatcactgctggaattgaagcatacactctgaccaagcactacctaagattagccaggggtgtcaccaagcaacaaaatgtttatgttcggtcaagatgaaggagggatacacgggacacatgaagatagttgggattgaacaagtagagttgttgatcatcttgcatagaatacacaagacacatgacacatgaagatagttgggacacatgaagata

SEQ ID NO: 110372 - DNA, 326 bp, Glycine max
tttcccccaattttctataaattgggggagatgtgaagtacaaaagcgttcagccctcctgataattcagaatcacttaaaattagtgaaaaaaattggttccgtgaagaaaatccaagccgaggcgcttccgtaacgtttccgtgggtgatttcgcgaaggttttcgatcgttcttcgacgttcttcatcgttcttcggtcttcaaccggtaagttccctagattgaacttttcaattcattctatgcacccttagtggtcctcattgtttttacgtgctttcatttacatttcatttactttccgtaccccctttttgacgtgc

SEQ ID NO: 110373 - DNA, 310 bp, Glycine max
agcttgtaatcttttacacacttgctgtaatcgattaccagagaagtttttcagaaaatattctcaacagtcacatctttttacttgattcttgaatggctgtcaaaggcctatatatgtgtgacttgggacacgaattggagagagagattttgagaacaaaaaggtcttatcctcttaaaaagaaaatggtttttatcctcttacaaattccttggccaaactacttgtgattcaataaggaattatttgagtgctcaaattgttcaatctatctctttaaagagagatttcttcttttcttcttctt

SEQ ID NO: 110374 - DNA, 281 bp, Glycine max
tcccaagtttttaagttcttccttttttttgttctaagcaaagttcccaaagtcctattaacaacttccgtttgcccatctgtttgtgggtgacaagtggttgaaaataacaatttagtgcccaacttgctccacaaaaccctccaaaaatggcttaggaacttagagtccctatcactaacaatgcttcttggcaaaccatggagtctcacaatcttcttgaaaaacaaatcagccacatgggaagcatcatcaacttttttacatggaataaaatgagc

SEQ ID NO: 110375 - DNA, 320 bp, Glycine max
agcttggagaaatacaagttctggtcatatgagctattttgctagtttagtgttaagagtgtaaaggctttgtgggatcctctcacccgcagaccctttcttttgttcaaagggatgtgaacaaagtagctaatagtttggcttctttagcttccctttttgaggatagagtttggattgaggaagtttcccctcaaattctttcccttgtaaatgatgacttaggacctctagccattttcagttaattaatatcgtttacttcaagaagaaaatgaattgacaatatccatcctttgatgattgaaggagatacaaga

SEQ ID NO: 110376 - DNA, 321 bp, Glycine max
  unsure (1)..(321): unsure at all n locations
agcttcctcggatgtnggnccttttcattttaaatcaactaatgcatttcttgtcgataaatcaacaacgttctgctttcaactttctggcacgtaggtctgatttttaaaaatgcatactcgaacacaaagcattaaattgattgtcaatcgaattccaaaaataatcgatattataattttgtatagtctttacattcatatatatatatatatatatatatatatatatatatttgtaaataaatcttcaaatgtgaaaaaaaaactgaaataaaaataaaatacacaagagaataaatgcggtaataaattgcaaga

SEQ ID NO: 110377 - DNA, 337 bp, Glycine max
cccttcaaactgaaaaagtactgctgcgtggatattttattcttaagaggcagcccgagaatctgcggatattgagcaataatcgaagccaaacaatccctcccaacaccaaagctaatcaaacattccacattgggtttcacagtctcttcaagatcatagccaagaacataagctctcttctccaacatcctggccaaaaccttcttcggcagccctaaatcgaccaagtaatcaatcatcggctttatcacagtcccaactctcatccctaataaataaggatactgagtgaccattggaccaatatctctatggttcacaccaatactaacaa

SEQ ID NO: 110378 - DNA, 253 bp, Glycine max
  unsure (1)..(253): unsure at all n locations
gaagggccaccaanggccgcacaggccccgacacnaaaggaaaccccccacacaaaaccaaacccaagcagaaaacaacagcaaggggcgggaacgaccgcaaaaaagccacggagcgacaagaggccaccacaaaaacaagcccaaaaagaaaagacagcgccganccaacccacagcacgaaaacaacaaaccgcacccccaaaaggaaaagagcgccaaaccacaccgcagagcaaagaacaaacccaga

SEQ ID NO: 110379 - DNA, 313 bp, Glycine max
  unsure (1)..(313): unsure at all n locations
agctttagtgactgtgtgnctccttattttttatactgaggggtcacatggatatgatctacgattggttttgcatgaatttttaattgtcataacatatgattcatagaagtgattcggacattctttctttctaagccattggccaaacaactttcccaatatacattatttttgccatctgcaagccctatgagccagacacttgatttttatcagaacactaacctaggatgaaggtttcctaccttaccttaggatatgagagcatgggtgttttcaagggagatttctatcatttttgtggctagtc

SEQ ID NO: 110380 - DNA, 313 bp, Glycine max
  unsure (1)..(313): unsure at all n locations
tatgtgcccgaannaaatttctatttaatatcagggactcaattgagagatacaaacaatatagtctagggcactaactctctgagtggtatgcaggaccttactctgaggacgccgattggaatgggtgaacgaagagatgggctctactattgtagagggatgcgtcatgagaaaggtttcaaagaagatgatatgtcactataggatctttggcacaagcgcatgaggcacccttccatgaagattactcagtgaactccaaaaattgataggagtggaacaagacataaagcatgtgaagcaccgcaga

SEQ ID NO: 110381 - DNA, 317 bp, Glycine max
agcttcaccggatgacgctgatcttcatttcctaaccgacgtcatgcaaatttcgttcagggattgaattgaaaactcgttaggcgacatctgtcgtgaagtagcgaccgatatttttcagccgacattgcacaattctttttagaaaagctcgctggtcgataatggtctttttacggcagagtaagttttcttgttttggtgttgcataaaaaagttacaatgtacttcggctaggtttttcgtgcgagttcaaccgacattttgtttcggccaggaaaacattagcccacctctgcaaaaaaaatatttgctaa

SEQ ID NO: 110382 - DNA, 316 bp, Glycine max
agcttatccttatggcttgcttccggttttcactccccgggccgccccggaagacttaagccaagcccctactttcgaagggcaactcccaccttatgacgactatcccaggcaagaagatgaagaaggagatacccatcttggccccctgctccacctcaaagatccgtcccccaatgaactaccccaaccgaacatagtccgccatatcccggcttcacccacgcccataaaagaatctgttcccttcgcggaagataagggaaagattgaggcgcttgaagagaggttaagagcagttgagggccttggcaat

SEQ ID NO: 110383 - DNA, 338 bp, Glycine max
ctataatcctcagcttgaagtgtgtagccccctgatgcaattcttttttgcagggcattgaatagaaaactccaagtagattgggctagagatgcaggagaaggccctagggttcttatgagccttagggtagatttcgggcccatgggctaagtacgagcccacttatctttgtaaatattagattatggtttcattatttttgggtcttgtatttagggctccataatgtaggtagggtaccttacaaatataggatttttcaacccttgtattttagggcacctagactagtttttgtattaggggtagttttgtaatttcacatgaactaagtg

SEQ ID NO: 110384 - DNA, 291 bp, Glycine max
aactatacaaactcaagcttttaatatttttattacaatacacctcattatttatgtggccgaagccgaggcgcaggaccttggtggagggcttcgagaagcacgaacgacacctcgattcggggaaaagagccgccgcttgggctcttcacagtgatatagaagctgctagaacaatgagcatatggcgagcggggaagactcggacagacaatctgcgaacatgccctggccacataggagggaaggagagaaacgttccgcggccggtcgataaacatatgccccggg

SEQ ID NO: 110385 - DNA, 311 bp, Glycine max
  unsure (1)..(311): unsure at all n locations
agcttggtagcttgtgtttattacgagctcgagagaagcttanaagccgcgagtaccatgagccacgaccacgacccacgaggtgtttgctccatctgaaatatctatttcaggatcatacccagaggtttattccctactgtgaaaagtgtagtggcacaagtttataaacttctttccgtaaatctaaattcctaatgtctatgataattgataaatgatgttagattgttaggtacaggatgaactaggtgctctgtacgataaatacaaagttggatatgctacaactgatgctattatttcagttc

SEQ ID NO: 110386 - DNA, 325 bp, Glycine max
tgtccttagtaagatcgatcagacgatgcttttgttccttggagagcaacccgtcttggccccagaaagtgttgccaatgctctagtggaagtgatgaacgatcctttttcacacttaatcgcctgttgataaaattctgcaccaaatatccaaacaccattaaataaactaaaattcaaataattaattgtatggatggattaatcaaataaaaatttctattagccaagatattataggattttgtcaagtctatcacgtgagcagtgggcttagtgttcctttcattaggaaattcatgaaaattttgtcggccacaaaatt

SEQ ID NO: 110387 - DNA, 306 bp, Glycine max
gctatccttaggccttttctctaacttacccccccgggccaccccgggagatttaagccaagcccctacttttgaggggaaactcccaccttatgaagactatcccgggcaagacgatggggagggagatacccatcttggccccctgctccacctcaaagatccatccccacatgaactaccccagccgaacatagtccgccatatcccggcctcacccacacccgtaaaagaatctgttcccttcgcggaagataagggaaagattgaggcgcttgaagagaggttaagagcagtcgagggcct

SEQ ID NO: 110388 - DNA, 323 bp, Glycine max
tgtaactaacacgtgtataaaagtctactcttatgaaataaagtcaggccgaaagttaaccctagttcttaaggaggaagccttgccctcgaaattaaggcccatactctcttttctctctccctccctcactcgtcttcttctctctctccttccccaccatcagcgtctgtctctaacatccaatgtaaattgctagctaattgctcttgcataataaatacatataatcaatccaagggttcattcattttaaaattgagtaaaattaatttaattaatcattaaatgtagtttgaaaccaataaatgcatatattttta

SEQ ID NO: 110389 - DNA, 313 bp, Glycine max
  unsure (1)..(313): unsure at all n locations
agcttggangaccaacttggctaattttagcatcctagaaaactagcagctaagatgcttattaaccttatccaataagaaatcaagggttttattagtcaccttcttatgtaagatagggacccccaaatacttacctaaatcatcaatacattggaggtcgctcctactagataaatctagtttaatcttctagttaagatcgttggagaagtaaatgtgagttttccccatactaactttagccttataactctcacaaaataatttcaaagtaagctagatggcctcaatatgatcaataaaagcttct

SEQ ID NO: 110390 - DNA, 311 bp, Glycine max
agctttgatgctttatttggttaggttaatgaaacaacgagatgatgcgctccatgagaggttggatcaaatggagaatagagatcataatgaagaagaaaggaggagaagagggaatgatggtgttcctagacaaaaccgaattgatggtattaaactcaacattcctccatttaaaggaaagaatgatccggaggcctacgttgagtgggagatgaaaatagagcatgttttctcatgcaacaactatgaggaggaccagaaggtgaagcttgccgccacggagttttccgactatgctcttgtgtggt

SEQ ID NO: 110391 - DNA, 317 bp, Glycine max
ttgagccaaatcctgactcacttttttttttcccagggggagaatgtcaatccttaccctcggaagcaaaaaaagaatagaggggaaatttccaatccaagaaaaagagaaggaaaatttccaatgaaagcaaaaaaagaaaagaaggaaaattccccaatcaaagagtgggagaaagcataaaaagaaaagaaggaaaattccccaatcaaagagtgggagaaagcaaatagaaaagaaaggaaaattcccaatcaaagaatgagagaaagtaaaaaaggaagaagaagaaggaaagaaagctcctgatcagggat

SEQ ID NO: 110392 - DNA, 321 bp, Glycine max
agcttgaaagagcccgggtagtttatgagatgttcaagtccatagccatcaaagtctgaagagagtatgatgaactaatggacgtcaatatggccaccgatgaagccttggaatgagaaaccaagaaggcccgaaaggaagaacacgaccaaaacaagttttgaggggctttatagggcagcaatagtgagctcaaactccgaagaggtgaaaggaatcatcacgggtcaaaggcatgatctggaaggaagagctaaaggcttgccttaagtcgaaaagaaatttgtcccaacagttaaagtgagactgaagggaatatat

SEQ ID NO: 110393 - DNA, 332 bp, Glycine max
tgggaaaattccttaagattgattgattgatttttattcattcaagaggaaaattcgcaagaatatgtgttgagttagacttggaaaaaccgttggaatctcacataaatgttagaggttataagctataattggaatatgagggactccattccatttgctttcagtgcggatgtgttggtcatagaaaagggagttgtaaaaacttggtaatagtgttggcaatgacacaagatgttagatgggcaatgagtgaaggggttacagtggtgaacatgttggagaagttgaaggaaaaaggtagatatcattgtgacaaaagttgttgaaat

SEQ ID NO: 110394 - DNA, 321 bp, Glycine max
agcttccatcaagtggtaatctttatcacatgagcttcaagtaggtgctccttaaacctccattaattttttttctttgccttctcttccattgttgtttcttaatttttctccatgtatctcctcacatgtcttgttctaaatgttgttaacatgattctttagagtttccaccgattaaacttgctatagaagttagatttgattttctatggttcaaatttcttgttcttgttcttgaaccatgaattgtgttgagtttaggttcctttgagttttgtcttgttattttttgtggctgaaacctaaaccataaaattt

SEQ ID NO: 110395 - DNA, 332 bp, Glycine max
tttgagttagatttagaaacacataatggcatgactctgaatctatcatgtgaaacctactatgacctaatttatttcaagtttttcccatgaagtaacaaattaatattaaaaaaattagtgtttgatcaagttttttaagaaaataagaatctactgaaaaaaatgatttctgattattttgagaaactactttgagtaatagttcctatttttgttgttttttatctacaattcaaatttagggaatttagggttttatatgaggatactatcctagcctctactaaagactgaccatttttcattaatttaattagggtcatttctta

SEQ ID NO: 110396 - DNA, 318 bp, Glycine max
agcttttagcccgacagaactttttataaatgaagcactcatcaaccgatagagaaagtgccaattacaccccgagtttcaacccatgcaaattactaacaaaaagcacacttcgaaaggaccaacgcactaccattaaataacttcacaccacatcataaattaaccaccgcaactgacgcattctatcactaaagcttttacaaatttcaagcagtattgttatctaaagaaagccaattaagaaaacaagtaataacagttgaaattgcaataaaatatataaatattcataataatatattttgtggaagacaa

SEQ ID NO: 110397 - DNA, 326 bp, Glycine max
tagcgtagaacgactcaacgttttgctctcttattttttcaacaatttaagcagcgttgttgaatggtttctgtgaagaagggatttttcgatgggtcatctcactcagagtagacaagttctttgaaatttctgagggtaatgtaaagaaagaaagagtttgaattcaagtttctcaaaactgaaaacgcaaaatcaaaattttgaaaattttcggatacgcgccgcgaaaaactttggcgggtttgcttgatgattcgtaatttcgctgtgaatgtgatgagagaattcagaatactgtgcggggaggtgtacggtagtggaat

SEQ ID NO: 110398 - DNA, 321 bp, Glycine max
  unsure (1)..(321): unsure at all n locations
catgcaagcttgagatgaggaagngncttatgtttaaacnccccgcgccgagcgacgaccacagaacggaacctggagatatgtcgcgggggtcaggacaccttggggacgacatgtggggtgctattgcccaaaaccaagcttgaccaattcccgacccaactccgggcatagtaatgccactgagaacctgtgatgtacctaaacaggcgagctcctggcagccaacagattaaaggaaaacaagaccacaaagcaaggaggcttgtggtggctggccatctgtgaattttgagtaatatgtggatggtggcctctggt

SEQ ID NO: 110399 - DNA, 318 bp, Glycine max
agcttgtaggaattctatttgtttggtttcgcaacctacccttcggcaggagggcgacgcggggctcatgagtgcgtcttccaagaaaggaaaatgcgtggagtctccaccaacgtttatttgaggaaaacatctaaaaaaccggaaaaggtgtggtctacgaactttaagtgtgaaaggttcgggagttgtttttacgcacgggaaaggtattagcaccccacgcgtccgttacaagggacgacaacctttaattaagtgtgcaaatatgacttcaaaatgttttattttccctttttttatgtcttttggtgtttt

SEQ ID NO: 110400 - DNA, 53 bp, Glycine max
aagccagcccaccccccccagaagagggatgaccctgaactacgaaaaaaaaa

SEQ ID NO: 110401 - DNA, 315 bp, Glycine max
  unsure (1)..(315): unsure at all n locations
agcttcaggtatccnntgtgttaccgtcatcccctacgaaagccctacgacgtgccatgcctggagaaaataaataaaaaaataatcaacaaccaataacaataatctctctggcacaatttggcaagatgatcaaacacaaaatcagcttgtaaattagtcttttgtgcaataccaaaacatatagagaaaatgctcaccttttgttttgtaactatttttttttttgcagaaaaccaaaatcgcctttcccacccaaagcacaatcaccaaatgcaatacgtatctaaacagagaagcaaaaccagtcacgta

SEQ ID NO: 110402 - DNA, 334 bp, Glycine max
ggaactataaatactcagctttggttaaaggtgcttctaagatttttttttttattccccttatactagtgggtcaagggcaccttatgatttccattgagcccattgaactctataatatttgtccctctcaccagtagagctgggacttcctagaacttggatatatgttgacagagtgcatgttgtcacttgagtgtagcaaatgccaagtaggctctaattcatccttccattttacaacaaatgacctactaattttaccgtgaggttacattaacaagcccagtaatatactcccaagaatatactattgttcgtttatttcataatg

SEQ ID NO: 110403 - DNA, 311 bp, Glycine max
  unsure (1)..(311): unsure at all n locations
agcttacaaatcagacttttttgcccttatatgtcaggnggccccaatacaaaaatacagcccaaaaaccaaataaaataaatctggacgacaaaaaaaaatggctgctttctttaagtccaanccggttcaacccaattttggaacccagcccaattgcttataattcttttgaaactaaattaaaacacagaattagtcaagtaggcccaaatgataaaactacataattaatttgacagttaaggctaatcagtaattaaaatggtgacataaaggggtaagaaataggagaaaataatgacacatca

SEQ ID NO: 110404 - DNA, 354 bp, Glycine max
acactatacaccactcaatcttttgagtaaaggaaaagacatcaagcttttttttttttaataatcatccacagaaatacctaagccctttcactcttcattatagcctctgcatttttggttgggatatatgagacactcactctaataaggatttctattaattctacgatgcgcatgatgacaagaagcacatgcatgcatgcttttgattaggaagtttaagtgcgctaattaaatagatgttatttttgttcaattctatttaaatgcttacgacacccctttgatggatccaaatggctctggattcagtgggacaaattgaaagtgtaagctcttaaaaagtaaaaa

SEQ ID NO: 110405 - DNA, 311 bp, Glycine max
agcttcaagaataaatggccttattttacttcttatttccagaaggaaattcaatcaatagacctccaatgtttaatggagagggttaccactactggaaaacccgaatgcaaatttttattgaggcaatagacttaaatatttgggaagccatagaaatagggccttatatacccaccacagtagaaagaattacaatagatggaagcacatcaagtgaaagcataacaatagaaaaacctagagatagatggtctgaagaggatagaagacgagtacaatacaatttaaaagccaaaaacataattaca

SEQ ID NO: 110406 - DNA, 328 bp, Glycine max
ttcactcttcaagcccatcctccctgttttttatgacacttctttcgcaacaaactttgccaacaagcttcatagcttaacaagtgctcagtttcctgccaatgtaccccagaaagttgatgagcacttcttcacagtgggccttggcacaactccctgccctcaaaatcaaacttgtcaaggacccaccaatgcaacaaaatttgcagcatcagtgaacaatgtctcttttatacaaccaaccactgcacttcttcaagcccacttgtttggtcaatccaatggagtttactccccttactttcctattagtgcattggttccattt

SEQ ID NO: 110407 - DNA, 313 bp, Glycine max
agcttcattagtttttgcatttctctattatggcctcttatagaagaatgataagtatatcttgcattgtatacttgcttcattgttgcacaactagtggtattgtgctccttcaatatcagaagaatattttttggtttgaccattgactttgtcatttaactaataataatcttctcatccttattcaatcgaccagcatatggatgtccaactaatgacttagccaatgcatgattaagattcccacatattaacttcaccattcatccttcacctcctaacactgattttactcgtagcttaaagtgac

SEQ ID NO: 110408 - DNA, 307 bp, Glycine max
  unsure (1)..(307): unsure at all n locations
agcttgaccaatcccgacccatccttggcatagncagncagggagaacctgtgatgtacctaagcaggcgagctcctggcagtcaacagataaaaggaacaaagaccacaaagcaaggaagcttgtgtggtggctggccacctgtgaactttgagtttatatgggatgtggcctctggtaatcgattaccaatggtgggtaatcgattacaaggcttaaaaatgaagacaggaggctaagatggtctctggtaatcgattaccacggggtgtaatcgattaccaggcttgaaaacgaggtcaggaag

SEQ ID NO: 110409 - DNA, 286 bp, Glycine max
cctctactgcgagagagacgaagattttttcgttgtcacctcacggaatccaccaacgacaacacccatcactccttgcaccgacctgtcgggagtcgaacaccaccgctctcaatcacactgctagccccacaacgggccatatcaccaagagccccgctactggcaccaacaaacataccacgtctccatgacgcgaatcccccatagaaatactgcagaaagaggtgcttaaaaaaatggcggcgaaggcagcctacacacaatctccagaaacccccccact

SEQ ID NO: 110410 - DNA, 317 bp, Glycine max
  unsure (1)..(317): unsure at all n locations
agcttgtagagttgagccntgtttttgngttattgacaacaactatctcataatcgaatacactgctgtttgagacaataactgatttattcaggagcctcttctttaatcgattaccaagtggattaatcgatcatttctctctcgtttaagtgttcagaggtgaacaagaacaatttaatcgattacttagggcatctaatcgattacattgttcttgagttatttccagatgttgggataaacactttaatcaattacttagataatataatttcgattacttcattgaattaatcgattaccttatagattta

SEQ ID NO: 110411 - DNA, 330 bp, Glycine max
  unsure (1)..(330): unsure at all n locations
tataatgaatcatgattgattcaaagagcnttgatgattacaaagangacgacaaaaagctcaaaagtcaagaacacttatgataacaaagattatgatctcaagaatcaaagaatgagttccagattgaatcaagtacacttcaaggatcaagaggaaagttgaattcaagttccaagaatcaagatcaagattcaagaatcaagagaagactcaattaagataagtattaaaaagttttttcaaaaactgagtagcacatgaatttcaaaaccttttaccaaagagtttttactctctggtaatcgattaccagtagcaaaatggttt

SEQ ID NO: 110412 - DNA, 312 bp, Glycine max
agcttaaggtatatataggctttctttaacaagcgactatagccactaaacaggtaaaattcttcactagagctcgggagtgaagaatatgactgatgaagcacttaatgcacgtactccctcatgtaacaaaaccactcttccgaactcttgtgtggatcacttctgcaaaaaaactcttgctttaagacaagttgggctatcacccgcaatgtgcatttatggatggagtcaggcaacttctaaatcatgaacttcatttattgttttgtaggaatcaacatattctaggaaaaaggatacgcaaaatga

SEQ ID NO: 110413 - DNA, 350 bp, Glycine max
  unsure (1)..(350): unsure at all n locations
cggacacttnnatacacagcctacgagagggggaagaatcaaaaccctatttttttttccgcactgactcatgagaatcttattgacttagggaatatgaggggcgccaatgggacatggaatcgagagcgacattggctgcagagtgagcggccttgacagaaagtgtaacattactgtggggtctctaagaccttgccgcttaagttgatagtggcccttgaaccttaccgcatgatcgggaccttttctgaatagacctttttgaatgcaggttgaaacagttccgttgggctatctcttgaagctggttcttgaacattttcaacaacaactgcttttctttttag

SEQ ID NO: 110414 - DNA, 319 bp, Glycine max
  unsure (1)..(319): unsure at all n locations
agcttccctaaatcttacnatttcttactcttttctaaaacacactaatgaaataaaatttattaaaacataaaaaagaacaaatgtcctaataaattaaaaaaaagttaagcaataaaaaacaaagaaatattttcctattacattttccaaataaaatatcaacaaaaaacagaaaaaaataaaaaaaggagctgtcaaaatataaaaaaacaaaaatataaaatcaactaaatttgttgctactacattttaataaaaactaacaaataaaattttaaaaaaaaacacaatagcaatataaaaataaacattaaac

SEQ ID NO: 110415 - DNA, 323 bp, Glycine max
ttggttatcacattcactaggtgcggcgattttctttctcccaggaaaaagaagaaacattcttctaccttcgacgacattctcaccctcgccgaggattctccatgtgcgcttttttttctcttacatatcatttgtcgctgaatttggcaatgttgctgaggaaatgttgatgcaagttttaagatgctgatctctgggtggcaggtaagattaatgaaaacgaggccttgcgtgagctgttcaagaagttgagtagttctatcattgatgatggactcatccacaaggtagctagcttcctgtgaagactaacgaaacca

SEQ ID NO: 110416 - DNA, 316 bp, Glycine max
agcttgtgacaccaggctacatatttataaaaacaagtaactatggctaatagagtaactaaagcttttgacaataccaataactatggctaacactaactatttacttttaaacaaaacaagccatatatcctggtcaagaaaacatatactaggagtaattttctttataaatgattatgaaaatgaattatccgcatctccatgttcccctcctatccatcaaaaggaataagacaaggaattttgttggtcaaacaaatatcaaaataacaatgtcaaaacaacaattatgtacaatgatttataatttagt

SEQ ID NO: 110417 - DNA, 315 bp, Glycine max
taagttgtaagatgatctaattctttatctattttttttattgcattttctaaatctgaaattgttttcttagaagatgaaactaactttgcaagtttgattgattctctatgcaaatcagcaaatgcatcttgtaattcatcaaaagaaatggataagttgttatttgaagatgttacctcgtcatcgctttcataacttttagccattagacacaggtttatgtcttcattttctgaatcttcaaatgattccctatcattggcatcccatgtgattgtagccttcttcatcttcttttccctaaaaatttcc

SEQ ID NO: 110418 - DNA, 313 bp, Glycine max
  unsure (1)..(313): unsure at all n locations
agcttctatagcaagnagctagacctgtctactatcatgagncgacagcttgtagaaccattctgaggtattctttttgaggttcccattttgaggaacctttctaatgagcattctgaaggatcattgcaatagactttatgatgtgtgctgacaaaaaaattcatacttgatagattctgttgatgaagttcaggttgataaacctttatgaagtagtacaacttcatcaaacttgacacttcttcatagctccaaacatttagaagtagattgcttccaaaacacttagtgaagattcaattgttggtgt

SEQ ID NO: 110419 - DNA, 324 bp, Glycine max
  unsure (1)..(324): unsure at all n locations
ttgttgcaagggtccaattcataattaatttttttttgtttgntgcgtgtaggtattcattgttcaatcacatgcactgataatgtgcaaagacccacgttaataaaaaaaacacctttaattgatctcatagggttcttcgattgtgtgcagttgttcactatgcggtcacatgcaatgatacttggcatgcgaggctgtcttgcgcatggcttttgtttgaatgtgaggccttaagattccaaaggccattaaaaaaccatgttattgccatgcctcatgattccaattgccattaaagtgaaaaccttactgtaacacctc

SEQ ID NO: 110420 - DNA, 325 bp, Glycine max
  unsure (1)..(325): unsure at all n locations
ggcacgcaagcaagagacagaaggtgtatttattggaatacaaangaagnncgcatcgcaagaaaataggggaaaccaggacacaggccagggaatacagggcaggcaagcgaagccaaaaaaggggagggaaaccacagaaccacaggcaaaaaggcacacgacaggcgggggacagcacagcacaaaatacaaaaagaggggctggagacaacgggcaaaagaaaagcaaaaaccgactatacggacaaaacgggaggcacgaaaacggggagcattcaaaccatcatcgggaacaaggtaaggggaaaaagggaaaaacaca

SEQ ID NO: 110421 - DNA, 315 bp, Glycine max
agctttgcctttagggcttgttcctcatcactttcttccgaagctttaacctcattgtgtctcacagtctttagatttgggagccaatccaatccttgtgtccggactctcagccacttatgatagccgccgatgatcccattactgcttcccctaagctctttgtcctttcttcacaccgcatcccatgccttgcgaactccttggagtaccctcgcgttgtggtcactgaaaccccgtgcgatgaaaggcgtgatgctttcctctgatggcactcctttcatgaggtagccaagctgtcttattgcgaggacg

SEQ ID NO: 110422 - DNA, 294 bp, Glycine max
tgagatgatgaagtgtacaacggtgaatctttttgtttttataccgcagaccacaaagggggacccggagaaatgttgcgggggccaagagaccctggggacgccaacgggggggcctttgcctaaaaccaaacttggaccatcccgaccccacccgggcatagtcagtcagcgagaacctgcgacgtacctaaacaggcgagctcctggcagtcaacacaataaaggaacaaagaccacaaagcaaggaggctcgcgtggcggccgggcccccgccaatcatgtgggatatat

SEQ ID NO: 110423 - DNA, 303 bp, Glycine max
agctagacaccactttttttccttttcgaatagaaggggcgagccttctatgaagttgtctgactggcctgtaatcttcatccatcattatcttgcgcatacaataagcagggctgcacggatggactccctctattcaaatctacaaaactggtcccccatacaggaataatttcttcacaatataagtcttccaagcaagcccttagatccttctcctcttcactggaaagacaatctacaacattgattaaagctttctccaccgaagtttgtgtacttgaaagaacaccaatgtcttct

SEQ ID NO: 110424 - DNA, 310 bp, Glycine max
  unsure (1)..(310): unsure at all n locations
tagatagcgtaaatacacagcgtgtattattttctctgtgcatgancaaacgcgcttactccttgatatgtgccactaacaccattgtcaaggttaacaaactagagccttacttcttttggcaaaagcaaagaagtcctttatgcctaatcctatcttaaccatctatggcaacactttcagaagggacactagccaaaaatggctagagctatacaatcagcttcactttctccctccatcatatactccctcattcaaagacactaggagacaaggggaagctcaaggaccaatgaccactagaaac

SEQ ID NO: 110425 - DNA, 314 bp, Glycine max
catctagatcacgctggactgttctgccacattctccagcgacgtcaccaaagaagaaacgtctgttttccgtcccgtcttcaccgaagaagacgcaccacttaatctgcaagaagaggaagagaaagagaagcgcaacacagcgcagaagtacagagaaagctactacctgcaactcgcgtttacgaagaggctatcttgcttggcaagcctcggctccgaaccggttctcactcttgacgctggcactgaaacctgggatgctgaatccgtttcgtatcgtctatgggtaataacaactaaacaaaccaaaa

SEQ ID NO: 110426 - DNA, 324 bp, Glycine max
tgtcaagtagcaaacatggtaacggagttttgtttattgaccaatttcacatattttttaaaatttgaggatcaaaaccaatgaaaaataaagattaagggccaaaacaaaatttaatcaatttttttagaaccaaaacatatttaatcgtataaattattttaaaaaacttaaaaatcatcaagaccataataaaaaatttaaaattacatttaattctattttaaaaaaatatatatgtttaagccttatttaagtttttgcccaccaaaaaaaaatgttaatgtgatttttatctatcatcaatttagccctctattgttg

SEQ ID NO: 110427 - DNA, 282 bp, Glycine max
acacaccaaagaaagggaggcgagaacccacgtgacgacacaccaagaaagacacacacatccaagaaaaaaagatggcccaaaagaggcacgcaacaccaaaccacgcaccaaaagagaaaaaggcgaactaacaacaaagacacaagacgacaaaggaccatcaacacacaagcaaacaaaaccaagaccacgagcaccacccaacggccggccataaagcccaaccgcactgggcaaaaaagaaagagggccagaccaaaacacaagacccaacagagg

SEQ ID NO: 110428 - DNA, 323 bp, Glycine max
  unsure (1)..(323): unsure at all n locations
tcagcttgcttgacattacatctttaagtctttttattttttcaagcncacattccctactgttgttattaccatttcacaagctttattctttttttgaaaattggccatgttcttgacatgctttgatcacagaaaaggtaacctacttaccactaggaataaaaaagctgtggcatgctaaacatctgaaaacttctggttcttcgtggaggttgattattatcagcaaatggttctggactaagaataccagattcacgccttatatttgcatgaacaccttgcttggcttcaggttgtgcacaactatttggcagatc

SEQ ID NO: 110429 - DNA, 313 bp, Glycine max
agcttgggttacattcaatcctcacccttcaagatgagattccactaacacaatcaaccattactggaccaacaaccactcaaattgaacaacttgccattactcccgctagacttccaacctagactcaactagactagcaacactactggatttcaataatgtcatccactggtggactttcaacaataaaggggttctatgtgtttgggattgcacaaacacaaatttttaccttacaaagggtttccactcatgaaaatacaatctctcacttctatcttagatctattacaaagtacaagctcaatac

SEQ ID NO: 110430 - DNA, 312 bp, Glycine max
ttctccataagttgcctgagcctgttagttttttctgatggcagcggacctagatgcatggaagaatttcttcaaaaacactctcttaaggtcatcccagctggagatggatctgggagttaggtagtacaaccaatacttttgccattccatccagagaatatggaaaagcctttaggaagatatgatcttcctggacattaaggggcttcatggtggaacaaaaaatatggaactccttaagatgcttatgaggatcttcacctgcaagaccatgaaacctaaggagcaagtgtgtcatctctagatctg

SEQ ID NO: 110431 - DNA, 336 bp, Glycine max
  unsure (1)..(336): unsure at all n locations
cttaagccacctgctgcatgcaagcttgataggtatctnatttttttttttacaagagatcatttaccacattgatgctcttggttcatgctttttccactcaagagtattttctggttttctcttttccaaatgttcctcattttttgccttatgcttcttacacattgtaggattctgataaaaatagggatcttttatggacatattgagataaggtaacctcgcatcattgtgaatttcagttatattcaagatatatattgtgtgctaatattcaataatatgtgtagctctccgtagaataggcaaaggaagttgtgtcattcaagaatg

SEQ ID NO: 110432 - DNA, 323 bp, Glycine max
tgagaacatgttagaacatataacgtatgctttctttctgtcagttcattagaactagtttccaagttttctcttattcaataccaaattaacatattctatctcatattataatgcgagtctcaatatttttaccttattattgaaatcttggtggacaataaagaaattagtgtatatgctgaaaattatagaagaaccataacttcctacttttttttttcaatatataaacactggagagacatatatattcaaactcagattttgctcttctataatacataatgtgaaaaacaaatccctgacaaccatttgggaaa

SEQ ID NO: 110433 - DNA, 315 bp, Glycine max
  unsure (1)..(315): unsure at all n locations
agcttagataccaccagcattttgttttatggcggntgatggaacccctccaaatgcaagcctttcccaagatttacggaaagatcttaaagttgaccatagcagaaatatccataaaaaccattgcatcactcacccaatactacgaccagcctttgagatgcttcacgttcggagacttccaattggtaccaaccattgaagaatttgaggaaattctaggatgtcctctcgggggaagaaaaccatacctttcctccgggtgtctcccctctttgagcagaattgcaactgtggtcaaggattcagcaagag

SEQ ID NO: 110434 - DNA, 328 bp, Glycine max
ttagcttctcaaggaagttatctcaaagaagtctttccagaagttttctcatgaaagcttctcaaggaagctacctagtctataaatagaaacatgtgtaacacttgttgtaactttgatgaatgagagtcttgtgagacacaactcaaagttcaacttctctccctttttcttccttcaatctagtgcacccccctctctctttctctccctctttcttttcctccattgaagcatcctctccaagcttcttatccaaggctcatcttagtggtgaagctccttcttccatggcttattccctagtggatggcgccgcctcttacct

SEQ ID NO: 110435 - DNA, 316 bp, Glycine max
agcttagcatctattaatacttttatacaattgtcatccataaagcgccagaggaagccttcgttattctctgcaacttttaacaacgcaggggaatgcaaatatcaaagttatccaagttacatacataatatggttcactttgtcttgtaaatgaggtatttgaaacacgtaatgatggttaacattgtttcttaagtggttatgttaatagttaacctaaccatgtccttctgcttgagcttgagtatttgagaaggaaaagaaaaatgcattaaccatatgttagaatcattggaacatttttcaagaaact

SEQ ID NO: 110436 - DNA, 326 bp, Glycine max
tctacttatgtggcagggcgggcttccttcactttcttgtctccaacgcgagctctgaccactgttcttccttcccgcgatgcttcttttcatgtccgcctgagtgggcttatagcctaaaccatacttcccacgatttccttgggtttttatcaggctagttatgccgccattgtctttgcctaaacccatcccgggttcataaccgatccccaacataactcgggccatcattaccggcgcatcggacaaacaaggttgcccaaagaaggagtccacggaggaaatgctgaccacctcaaaagactggaaagcggtttctaatg

SEQ ID NO: 110437 - DNA, 316 bp, Glycine max
agcttttctccaagcttcatattttagtcttcatgttggtcatgttgctccccctatctctaacaatatgtagaaaagtgttttcattttatattttgttcacacccctgcactaagacgaaaacatgattctgcatataaaatatgaaatgaaatcatgattccatttcatattttgtatgcagaaacacattttcgttgtgtatttgtttcagcttaaacaaatattcattaaaaacatgattatgcatacaaaatctaaaatagaatcatgattccttttcagagtttgtatgcaaaatcatatttttgttgt

SEQ ID NO: 110438 - DNA, 326 bp, Glycine max
ttgatgatatggtcttcaccgatgaaaggatttattttttctaaaaagaggcaaatctgatcatcatgctttgataaataccaaaaaaaactagggcaaatgaagagggtgagaatgagggagaagcccatgctgtgactgccattcctatacagccaagtttcccaccaacccaacaatgtcattactcagccaataacaaaacttcttcttacccaccgcccagttatccacaaaggcaatccctaaatcaaccacaaagtctgtctaccgcactttcaatgaaaaacaccgcctttagcacaaaccacaaacacctaccaaga

SEQ ID NO: 110439 - DNA, 322 bp, Glycine max
tctagccaaatggacttaccttgtttttttttctttgatagcccttctgagccttgtctcccttttcctgttttgaaactcacttcaagccttacgtgaaaaaccatgatattaccatatccttaaggaattttggagctttggaattgttttgggaataagtgtggggggtttttgtttcattggacaacttgttttgttggctatgcttcatgatgtattttgggccatactcgaagtacattgtatattggttaaatgttggacatgctgaatgaaatgttgtttctcaaaggctaacgagtaaaaaaaaaaaaaaatc

SEQ ID NO: 110440 - DNA, 333 bp, Glycine max
  unsure (1)..(333): unsure at all n locations
ccgggaccnaacagccaccgcagcaacaagcaaagacaaaaaatcttatgccaacnagaaaaccgagcaagcacaggcaaaaatcaaagcaacgaacggacaagaagagactaacgacaaacacacaaggccacaaacgcacaaacgaggcacaagcacgaacgcaagcgcaagcacacacacagaaaagaaaagaccaccagcaaacaaaaaaaagagtgcataaagcacaggaaaccagaaaaaaacaaaaaagggcagaaacaacaaaggcaaacaacgacgcacgagcccgcaaaaaaaacaccaaggacccacaaaaacaagacaaac

SEQ ID NO: 110441 - DNA, 353 bp, Glycine max
  unsure (1)..(353): unsure at all n locations
atcctatnagctcacctgcaagcatgcttgcttgtaagacaacggtgtacctatttccggaggnaccaggcggccggtctggcaatggtgcactacatatttttccacatgcacaatgcgcgcattaatcccaccattcccttgttgaacaccttcgtattgagtctcactttactctacatgaagcccatatccatagtgttttcttagacaacgtgtcccttatggaatcctcccatgctgtacacaatcgttccaagctacaacaacatttataacaggcacatagctttcatcagccttgcaaatacagggctaagctcagaaaactctgtctcaacacactcaacaaa

SEQ ID NO: 110442 - DNA, 304 bp, Glycine max
agcttgcttatgaagcttttattgaggctggatctttgagcttcaataaggtccttcaatggtgatttttagccatggtattgcagcgaaagataaaggagacgaggttagaggagacatcatccactagagaataagccatggaaggagaagcttcaccaccaaaagagtggcttggataagaagcttaaagaggaagcttcactggaggaagagaataccagagagagaggggggggggggggggccctaaatttaataaaattttcatctcttcttatacattttactttgcaactttttt

SEQ ID NO: 110443 - DNA, 324 bp, Glycine max
tctcaaggaggtgagggtagttctgagttgtgtgtttgtgtaactaaactctaacttctcgaggaagttttctcaaagaagctcttcaaggaagttttctcaagaacgcttctcacggaagctacctagtctataaatagaagcatgtgtaacacttattgtaactttgatgaatgagagtcttgtgagacaccactcaaagatcaacttggttacctttttcttcctttaattacgggctcccccctctctctttctctccctctgttctttcctccataggagcatcctctccaagcttcttatccgaggctcatcttggtg

SEQ ID NO: 110444 - DNA, 326 bp, Glycine max
accgcagcaacaaaaaaaaaaaaagtttttatcctcagcgcgcccaaagaaggaacctcttccgtcaaaaaacaacagggggaaaagcgggggaagtctacaaaagggctcaaaacactacaattatagcgaaacaacaagactgaatgcagagcctgtatagcccaccataagaagcccaaagaggcaggcgaagagcaaacacaaacaacaaaaccttacgagccaaaaagaaacagccgtgactatcgaaaaaaaaaaattggattacaccaaacatatgggagaagctgatccataagagacagaagtagctcatcgcccga

SEQ ID NO: 110445 - DNA, 299 bp, Glycine max
agcttgaaggacttttttgtatttatcacatgtgggactaggcggcggtcgggcgatggtgcacaacaagttttacacatccacaaagcgcgcataaacccaccatcccctgttgcccaccaccgtttgagctcaactttctcccacggagcccatatactagtttgtgtcaacaccgggtccccatcaattcttccaagcttccacaacagtcaagcaaaacaaaattctatcagcacaagctattacagccaaatttaacaaggctagggctgatagctttgtttatcacaccaacc

SEQ ID NO: 110446 - DNA, 276 bp, Glycine max
  unsure (1)..(276): unsure at all n locations
acacatagaacacccaagctncaaactttttcaagagggattctcttattttatccgncggacaagtagccccacacttcttaataagggggggatgaattcccatataaaaactcaattcccctattaaaactctacttcactcactattcaagagtataaatatccttactaaacaacttcccaaatcttgaaccaaataagaacaattcgatatcgaatatttcaccataattaatgaattagttcaatacaagagtaaatgccaactcaaat

SEQ ID NO: 110447 - DNA, 308 bp, Glycine max
  unsure (1)..(308): unsure at all n locations
agcnagggcancttctactngtctttgnaggatagcttcttggttgaattatattaattagtggaagtagaaatttgagatgcatagtctacgcattatgtaatatgctggtgatatagagtttaggtggatagaaggaatataacaataatttaatagacttttagcaatatgatatttagattgatagatataatacaattcttaacctaatggtcctatttttatactaataattagatcgaatcgaacactagcacttaaagaggttgagagaatttgatagagaagaagagattgagattgaa

SEQ ID NO: 110448 - DNA, 322 bp, Glycine max
tgcttgagaagcttctatggaggttggttctttttgcttcaataagctctttcaatggtggtgttcagtcatggagtttcaatgaaagataaaggagaagaggtgagaggaggcgccatccactatagaataagccatggaagtagaagcttcaccaccaagtgagtgccttggataagaagcttagacatgacgcttcaatggaggaagagaatgagagagagagaggagggggggcatgggatttgaaggagattatggagagaagttgaactttgaagtgtgtctcacaagtttcttatttatcaaagttatgaacaag

SEQ ID NO: 110449 - DNA, 338 bp, Glycine max
cgctggacattcctaaattatgttaaagactattcggagagttaggattaaacaggacacggttttactacataccttaattaaggagatgattttggcttataattcgatggggaaactggatttttcggatcttgaatgtgaacgagtttacttatcattaatttaacttgttgttttgaaagggtcggaactttacttatattcgatattgcctcatcaaaaacgtgagaaacagtttattgcttaaagtacaatataagttattttgactgaagatgtctatgcggaaaataataccagtacctttcatttactcatggatcatacattaataa

SEQ ID NO: 110450 - DNA, 427 bp, Glycine max
  unsure (1)..(427): unsure at all n locations
gagccttagtactgacccacctaaaccttgattatggtgagtatgtcnatccttaccctcgaaaaaaaaaaaaggagaaggaatatttccaatcaaagaggaagcaaaaaaaggagagaaggaaaatttccaatcaaaggaaaaaagagaggaaaggaaattcccaatcaaagagtgggagaaagcaaaaagaaaagaaaggaaattcccaatcaaagaatgggagaaagaaaaaagagaaggagaagaaggaaagaaagctcctgatcaaggatcgaaagaaaacagaagaaatgtgcagagagatctctggaccagacaatatctgaacaaatacgaaattgtcaccaaatgaacaaaagaaagaaaaggaaaccataacctaaaagtggtcttctccctttgattaccaaccaaaatcctgtgc

SEQ ID NO: 110451 - DNA, 380 bp, Glycine max
agactcaacataaggatgcacaggccaaagttgagtatgtgaaaagattgtatgaccaagtgaaggtgcaaattgcaaagaagaatgaaagctataccaagcaagccaacaagaaaaggaaggaagtggtacttgaacctggtgatgatcctggacatttgagggcaaatgttttccaagaaggaaggaataatgagaatcctaaaattggccaaatacaggctaaaggcccaagtggagaaggacaaagcccccgagtggagaaggatgaatgcctagaggcagagacactatcaagactattaattgttgctgaaggcccagattaatttgaaggcccataataaatatgttctatttttatcaataatttttattta

SEQ ID NO: 110452 - DNA, 99 bp, Glycine max
agcccaaattttctggacaaacctttatatgggttcaccatacgtatcgacattgcgctttgacaataatattgaataagggtgtgatgaaaaagggct

SEQ ID NO: 110453 - DNA, 405 bp, Glycine max
  unsure (1)..(405): unsure at all n locations
gagctctatttgaagaacctatattatactcgttagaaggggcnacagaaaagtgttagngggaccacaatatgcattattattttgggggggnnagncataaggctaatttgaacatgagccacctttgtagccttgatagtttccttggaagttctattgagggcttgcttgattctatatataatgggcctcctcttcctattgacaatgctgaatagtggccattctgatggtgaccaccacagaagtcacatcttagaactcgttgaacttgatgagcttggtgtgttttttgtgatccaccttattcatattgttgagggagttaacctatctgcttggttaaggcctctatttgttgagtcaagagtttggtttgagccanaattgcatttagagtat

SEQ ID NO: 110454 - DNA, 289 bp, Glycine max
tgcattaccgtgtgtgaattagtgaacatggagaaatagagaagatctagctaactaggtttgttttcaggcggtgaaatatgctaaggtaatggaattattaatagctagaaattaagggtgagacttgagagttttaattgaggatatgatatgatgtagaaaaacaaaagagttcagagaagcaaagaattgatgatgggggaatggaatgagatgaaagaggtgaaaagaaagggttttaatggtcgtgattatatcatgagtgacttatgatttgtgttggtga

SEQ ID NO: 110455 - DNA, 405 bp, Glycine max
  unsure (1)..(405): unsure at all n locations
ctaataataatcatggcttgagcaagcctcctgntcttggatctaaagnttcatgatgttatcacttcatttgactctgaacagaacatcatggatcaatgtatataccaaaaggtcagtgggagtaagatttgctttcttgtgtcatacgtggatgacattttgcttgcaactaatgataagggtttgctatatgaggtgaaacaatttctctcaaagaactttgatatgaaggatatgggagagacatcttatgtcattggcattaagatccatagggaaagatctcgaggcattttgagtctgtctcaagagacttatattaacaaagttttagagagacttaacatgaaagattgttcaccaagtatatctctcatcgtgaacggtgaccaactccgtttg

SEQ ID NO: 110456 - DNA, 419 bp, Glycine max
tgtaatcgattacacacatactataatcgattactagaagagattttcagaaaatattctcaacagtcacatctttttatttggttcttgaatggctatcaaaggcctatatatatatgtgacttgagacacgaatttgagaagagttttttcagaacaacaagtgtttattctctcaaaaggcaaaatcgttttatcctcttaaagaattccttggccaattcaattgcaattcattaaggaatcatttgagtgctcagattgtaaaatctatctctttcaagagagattcattcttcttctctttctaattcactaagggattaagagaccgagggtctcttgttgtaaaagaattctaaacacaaaggaaggattgtccttgtgtgtttagaacttgtaaaaggaatttacaagat

SEQ ID NO: 110457 - DNA, 392 bp, Glycine max
  unsure (1)..(392): unsure at all n locations
tttagtgcgtcacgtttaataccgagctcttggtggtgccagcctttgatggtactcggcgggtagtaangggggaaatcgatattcccattcagataggcccccacactcgcaatgtggtgtttcaagtaatgaatataaatctcgcctatagctgcctcttgggaagaccttggattcatgccctgggagtggtcccttcaacgcttcaccagaaattgaagttcgcagtaggtggacttttagtgatagtgtcgggtgaagaggatatgttagtgagctgcccctcctccgcaccgtacgtagaagcggcggcagaatcattggaaacggctttccaatcctttgaggtggtgagctgcgcctctttggaaccaaatccgtcgctacct

SEQ ID NO: 110458 - DNA, 388 bp, Glycine max
  unsure (1)..(388): unsure at all n locations
ntctttatcagaaaanagtntattctcttggttcatgccctggagcttgctttatgccatacaatgccttatacaatatgaacactttatcttccttgactttgatctcaaaaccaagaggttgtttaacaaacacctcctcttccaaggtaccattcangaaagctgactttacatcaagctagtataaggaccaatctctattgtgggctagtgctattaccaaccttatggtttctagcctagctactggagcaaatacttcagaataatccaaaccaactttttggaggaaacctcttgcaactaaccttgctttatgcttggctacagatccatctggcttcagtttcagcttgaatacccacttcacatcaatgggagactt

SEQ ID NO: 110459 - DNA, 355 bp, Glycine max
  unsure (1)..(355): unsure at all n locations
ccttgtcctgtactgtgtatctgtggaatgtgctcatacacttgaaatatacaggttagggtagtgctcatttgtcaatgtaccataccttatttccattgttttgaatttngacgttattatatgggttttgataggcaagaaatgttgaagcttgatgacaccttatgagcaccacttgtaaccaannagnnnnatnngncattacatgaaattgcaaggcagaattgctgtatagcatcagcatgtttgctgtcgagaatcttactcacttggtttggatctccaaaacttagattgtatttgaaggcacatttggtaggaagaaaaacaaagtggatggggaattgctttc

SEQ ID NO: 110460 - DNA, 409 bp, Glycine max
tgaatataatgggggactatttgtagtcacttttttcagatcttatatctcacacgagcgactagtgtacaatcaaataacgacagggtacgacgactaagttattgtgatattgatttttggaagttctcaaataatcaagaattggtaatttgccttcttttttctaactcatcctggattaatttggtcaagtttctttacttcttaaagatagcttcattgattcatttcctgcaagggaccagccattcattaaggtaacaaccttattcttttagcgaaaaccatacgaaattttccctctacacaagccttgaaatgaatgttacatataattgcttcgttgcctccctaaatagatatatatttgactgtttcatatccatctcttaactgatatcaagaa

SEQ ID NO: 110461 - DNA, 276 bp, Glycine max
  unsure (1)..(276): unsure at all n locations
tttttttttttccacnttagggttttgtcttttttctcctctcctttgcatatttatgttttataaatttttttaattggtttttatttctttttttttttttctattttttatttaagttttattttttttttttatttttttaattatggttattaatttatgtttttattttttttttttattttttattttattttttttttttttttttgttttgtttttttattttgtcttttttttttttttgttttttttttttttttatattttttt

SEQ ID NO: 110462 - DNA, 281 bp, Glycine max
  unsure (1)..(281): unsure at all n locations
ntctcgctgcagaattcacttcttagttggtgtttttggtttgagctaaaggtggtgttcgtcattggaagtgcggtatacagactttgtggtagatttagggatggcctttgtggataactgggtggtgggtaagaagttatccattatcctacctcccttcctttgtattcaactatagcaagttatcttattacctccctctaccttcctttgcttgatggattgactttctttctacctatacttttacttcatatattataggaagggaggaggga

SEQ ID NO: 110463 - DNA, 424 bp, Glycine max
  unsure (1)..(424): unsure at all n locations
agcttatatgcccgacctcgatcggacatctttccaggttgaggtcgaccttcatttttttcgatgcatttcggtgaataatatttttttgccgacaccgccaccatgccagttttggtcgaataaatgggaaaatgccagtttcggccgaaacgaaaagtcggttgggctcgcacaaaaaaacctagccgacctacattttaaattttttatgcaacaccaaaacaagaaaacttcctgtgccgtaaaaaaaaaacattacatgacagcgagcgttttgaaaaacaaaattgtgcaacgtgggctgaaaaanataagtcggggctttatcactaccgatgttggctattgagtttttaatttaatccgtgaacgaaatttgcatgatgtcggttatgaaatgtacgatcggcatcatcctgtg

SEQ ID NO: 110464 - DNA, 408 bp, Glycine max
  unsure (1)..(408): unsure at all n locations
ggtgaatggctagacatgatatatgtcatggcttggtttggntcaaggagaaaagggatgccccacattatttccatgacacaaatgcaaaaatgatgatttggaaattttatgcaaaactggtcatgcatgcacctatgcggacgctcaagtgtcaaatttttatggtcatgtgatgctagggctcatgattcatttcctctattttaaatcaacccaatgtttccaaaatatgttcttttatcaattagtgcattcctccaagtccatttcgggcgtccggggaaattttcacagcattcacccttcaggtgtagacacgtttttgttcttcaaaaatcggctatgatcaatgaatgtcttttttcttttaaagaaaagttggaaatcatctcttttaaaagcata

SEQ ID NO: 110465 - DNA, 396 bp, Glycine max
tggtgttttcaatttgagcatctttgtatattactgtgactcaagcggacagccaagtaaaaatttattgtcgcctgaattctctaaaagcctctgttctgaatttcgagcgtctcgatatactttaggactcaatccaacatcggagtaaaaagttataatggcttgaatttccaatgagctgtcgttttcaattacgagcgcctcgatatattatgggactcatacggacatctaagtaaaaaattattgtcttttgaatttgctacgagctctcgttttcaattacgagcgtttagatattctacgcgacacaatcatacatccgagttgaaagtgattgtcgcttgaattagctcagagcttctgttttaattgcaagcatctcgatgtatt

SEQ ID NO: 110466 - DNA, 278 bp, Glycine max
agagaagaacaacatttttacctggtgttggtaataatacttgcatttttaatgggtttaggctagacttaagttaattttgttctaaaccatcaattatcaatgtttctttcaacaatgtgttatttctgaatttaacccagtgtaatactagttccctgagtgtgatactcggatttatccattttaattttaatacttgaggatatggtgtgctttttagcgaatcagattttccttgaacatatttgtattaaagaaaattgggacataaagta

SEQ ID NO: 110467 - DNA, 156 bp, Glycine max
tatgatggatcgaatgccaatacatttcttctataaaactcgttcccatctatgtctcgagatataacttgttgttttaccgggaaacatccatgtattcctctcttggaggatttcattaatgattcccgctctacagggagttctctgcctcgg

SEQ ID NO: 110468 - DNA, 309 bp, Glycine max
taattgaaggtatgtacgagcactgtagcttttacaaaaataagcactgcagcttatttaaggcacaaattgtgaagcatctggagtatgtgggtggaaaaagggtgggagtggaaatttaaatggagaagacacttgttagaaagagagcttgagatggaagattgtttccgtaatgatgatggtggcagttgttttctaatttacaaaatagatgaatggagaactttgaatggactttggctttttatatagttttgggcgctaacataggatcggatttggtttttaaggtggtggaaggattga

SEQ ID NO: 110469 - DNA, 377 bp, Glycine max
tacaatatattacacaaagcatgatcgattagagaaacatctttatatacatcagcttgtttgttagaaagacccaacacttttatctattgctgtcaatcttacttacttgtattctttactgtttttagcctagacttagtttaattttgttctaaaccatcaattatcaatgtttctttcaataatgccttatttctgaatttaaccctgtctaatactagttccctgagttcgatactcggattcatccgttttaattttaaatacttgacgatccgatgcgctttccggcgaaccggatttcccttgaacatatttgtataaagaaaaagtggaccaaaaagcaacttcaggggaaatccaacaataagaaa

SEQ ID NO: 110470 - DNA, 403 bp, Glycine max
  unsure (1)..(403): unsure at all n locations
aaccaaaggattcttaccttgctaaggttatttcccttttcaagaaganngggcaaccagcccaagcactctcatcaaggttactcaaaacaccaacaattctacgtaagtagccaatattagcatttccaggaaacaaaggttgtagagttaaaatttctgctagatacatcccaaggacctcaaatcaaactccaattaaaaaatcaatataattatgcatacattggctaaaacatttcaatagttagagggttatggatttgggattgttgagaatgagataatctgtccaaaagtagtgaacttgaggaggtcaagttcagaaattaagaaattagatggcccctaatcatggaggaggaccatgttgccgtgataggcgtcgaggccacgcgaaatc

SEQ ID NO: 110471 - DNA, 88 bp, Glycine max
ctggtgatatctgtaaaaaaaaggtgactaatcttagtaggactatacactgtaattagactcttacttgagaagccacaaggccgcc

SEQ ID NO: 110472 - DNA, 202 bp, Glycine max
attaatatttaattaattgagggtgagactaaaatttatagtattgagtgattaaatttatttaaggtaaatattatagattaatatatatgatagaaaaatgatttgatgtattatggaaattatggaaatttggcatgtgaaatgaaattttagatatttagtaaataagataatgattatttttagaagatgttatggt

SEQ ID NO: 110473 - DNA, 418 bp, Glycine max
cttcaaactcagctataaattatataaagaacttgacattgttgagcatcttgggcctttgatgagtctaatgccattcttccaaggaagaattttttagatgatatttcagattccttagaagatacacatattcatggaaatgactctaaagaaaaagatgaaggaagcaatgaggattctcaagataatggagttagatcaaataatgaacttccaagagaatggaaagcctcaagagatcatcccctcgacaacattattggtgatatatcaaaaggggtaacaactagacattctcttatagatttatgcaataatatggcttttgtatctatgattgaacctaaaaatataaaagaagccatagtagatgataactggatcattgccatgcatgaagaactaaatcaatttg

SEQ ID NO: 110474 - DNA, 421 bp, Glycine max
  unsure (1)..(421): unsure at all n locations
tataacactaganaagtggagattccagaaaggttcacctttgaagtaacgcaacgatgccaaaaacagttgtataatgtgcggaacgaggagtatacataaatggactaaccaagtgtactgtgaggtaaatgagactcccattaatctacttgtgataaagtatcaaatcattatccaaggtggagtactaattaataacggtggaagagacaacatgcaaaattaagcatatatttggtggagtactgcttctggtactcgtgaataaattaaatttctttaattttttcatagaaaaattatcattaattagggttctatctagtgagataatgaatcaaaatttagttcacataggaataaatttagtccttattataggaaacaccaattcatggtgatatgatatttcatctgg

SEQ ID NO: 110475 - DNA, 196 bp, Glycine max
tttgttacagctctctgggaccctaactgactgacctcagataatgatttaggccttctttgtaaaaaatcccgtaatattatttaaaaatgacgtaataagtggaagttgaagataaaaaattttttatgaaacatgatgaagttttgaaaatatttaaaaactgcaaggaattactgtaaacatcattgtgtaa

SEQ ID NO: 110476 - DNA, 421 bp, Glycine max
tataaattattaatgaagagatgatcgactaagtttttgttgaaagtggataagctaagtgatttaattaaaaatatttgataagactaattcacaaatgtcaaataacgcaccatgataatttaaatatttttgtatttaaacatatttctaataactcattcttaaacagtaggataacaatttttaaattttgtattataagaaaatggtaaacacttggtgatttaactcattgtttaaactcaaatttttctttcttttttcaaacatccaagatttaatgaagtacaatttatcacaatcatattgtttaaaaatcacttctgtacattctaatactttattaatactattattttaaaacgaaaagaagttatttaaaaattttcttaaacatatatttctttatttatacaaa

SEQ ID NO: 110477 - DNA, 409 bp, Glycine max
  unsure (1)..(409): unsure at all n locations
tagaatacctgctgccaattcagttcccaagtcttacaacaatntcatttccattaaatctgtattgtcttgtaataaagaagtcattgatatttggcatttccgtttgggtcatccttcatatgataggatgcaagtgttgaaacaaacttatcctatgttgacttgtgataaaacctttgtttgtgatacttgccataaagcaaaacagagaaaacttccatttcccaatagtgactcctatgcttctagtcctttctctttgatacatgtagatatttggggtccttgtaccacaactactttgaatggacataagtattttcttacaattatggatgatcatactagatntgtttggatttttataatgacttcaaaagctcagactcaaactcatttacaagcc

SEQ ID NO: 110478 - DNA, 410 bp, Glycine max
  unsure (1)..(410): unsure at all n locations
tcctcctatctatcatcaattatgtttcttatatatatatcttggngaatattaatatttttcttgtgaggctagctcttaaggattggagttaggtatagtttggaagaaacaacttcatggagaatgtgttaaaataaaagcataggaagttggtttcttagggaaacaattagtaaagagattttataaggttttatgcagttatttagtgcataaaatagttgattctagaacttgacatcttgtggaatgtgaaaaactaaatactgagaaaatagtgacacaagtttttaaataaccatttttttatgtgaatcagatttacacctgtgtcaatctgttcaatttatttttctcttgaatgatgctatatagnacttggatgtgatccaacagagggcaaaatc

SEQ ID NO: 110479 - DNA, 91 bp, Glycine max
ctacccgatactaagagggtgatgacactccatggtctgtgtcaacacggggatggtcattcgtgagaatcagaccttcctgttatgatat

SEQ ID NO: 110480 - DNA, 400 bp, Glycine max
  unsure (1)..(400): unsure at all n locations
gataaaaaactcagttcctaacactttgattactaaccgctaaataacgatgattatcaacgctctgacgttattgttganggttcatttccttcctcatattttttacatgttgtgttgatcttcttatttcacgaattacagaaattgttggatgtcttaaaacattcacattaattactatgtacagatctttgtgtggaatttcttagtctcatgttgaatgagatgcaagacaacatttcccttgtatcattttctagttgactggcctcataggtttgtccctttgaactctaaacatgtactttaatttagatgtcttcctcatattcaaagcttgaaaacaccctgaatggtatgaataatttcatgacttcatctngttcctgcaatttca

SEQ ID NO: 110481 - DNA, 399 bp, Glycine max
ctggatctttgttctttaatgttgtcctttaatggtgattttccaccatggagatgcagcggaagacaaatgataataggtgagaggaggcgccatccattaaggaataaaccatggaagatagagcttcaccaccaagatgagccttggatagaaacttggagaggatgctctaatggaggaaaagaaagatggagagaaagagagaggggggagcacgaaattgaaggaataaaagaggtatagaagtggaactttgaagtatgtctcacaagactctcattcatcaaagttacaacaagttgtacacatgctcctatttatagactaagtagcttccttgagaagctttcttgagaaaactcccttgagaagcttctttgagaaactttcttgaga

SEQ ID NO: 110482 - DNA, 427 bp, Glycine max
  unsure (1)..(427): unsure at all n locations
tcaaatcatgattatggaaggtgcctgctgagatataaaattgcctcattctaaatccaacaagtgcttgccaatggagcatcttcacagatggaatttatactgattaatagcatccatgtgtgtggggtcttgtcttctcctccgacatanaaaataatattgttggaatagtgatgtgcattacaagttgactagctcagtaagatcaaactgtatccatatataaatctatacagattttcatttcatttcttaatttcatttatatcaccgtagtccctcgttgaggctaactatatatatgcctacatagtttatgtttcttatatatcgaacttagaggtgataaaatagaataagtttatcaaactagatcgacttggattgaaaaactattggtccaaataaaattaaatgtatttgg

SEQ ID NO: 110483 - DNA, 422 bp, Glycine max
  unsure (1)..(422): unsure at all n locations
cgcanttgtgcatgataatatgtataatcagcattttattataatgcacgagtgtgtcatagataatatggtgtggaacgtactgggcctgggttaccatacatattcagtgcaaaaagctattgggcctagccttatatatacccttgggtttgcttagttcatagatgtgaatgatacttgacttcagctgacaaagcctcaaacatcttaaagggtgatgaagttctttgatcttcgctgtcgatctataatggaaaatgtctgatcaacaatacatatgttatcctacattcctacctctagagagaaagaaataagagaggaaaaagtataatacgatttattatgtcaaagaaagagagatttagaaaataaatgagagatgttcgtgaaatgttttaatgaaaagtgtatatgga

SEQ ID NO: 110484 - DNA, 436 bp, Glycine max
  unsure (1)..(436): unsure at all n locations
ggacctataaaactcagcttaaacctctacaaaggagaagactaatgtaagtttgtgtgtctccaaactctaagaggtgagtttgaatccttacatatgacagagtcagagtccatttctganttattttcaagaattctcactatttcaaatcaactaaaaagaaatggtgagaagtcagatgatgtaagaattatggagaagatactatgcttactagattccaaatttgagcacattgttgtgacaatcgaggaaaccaaagatttagaaaccatgatgatagaacaacttcaaggatcactacaagtttatgaggagaagcataagaagaagcaagagatcactgagcaactcttcaagatgcaactaaaggagaaggaagaaattcaagaaaatgagagaagtcaacgagactgatgtagagggtgttgca

SEQ ID NO: 110485 - DNA, 418 bp, Glycine max
actcagcttcacaacatccaagtaattcaacatccacccattatgaactaacttaaccaagcaaaacagggcaaaggcagaaaactctgcccaaagctcaaaccaaaaatcacagctttttctcacttaaagaccccagtaacatttccttcgttccaattcgttcaccgttggatcgacttgaaaattttactggaagtccctagttcataagtatacattttgaccgttgggatctactagcaaatatccagaaccccatatgtactacccttttcacaaccagccatacacaagcatttttctgcacttatacaaaattctactgcacatatcaacagcaaaattctgcataaagtgcagatttcgaaaaccactctttccctcatccaattttgcccaaatcgaatcctacaag

SEQ ID NO: 110486 - DNA, 420 bp, Glycine max
  unsure (1)..(420): unsure at all n locations
tcgtctcaatccgtgcgaaatccattcgtacgatctatcaagactgaaatattttaacagagaaaagagcatatttattagggctaattcgaatgaaatgttttttcttttttactgtggaatgaatagtttttttactgtaagagagcatgttgataactaacttttaatttaagtagaaaattaagccggttagtttttatttcaattaaatgttattcacaaacataattcatttgactaattgttatacgtgcttaatgatggttaattggtgacaccaaaaaatatcaattgtgactaagctaatatataaacataaatagtgtatatatcaataatataaaatatttgtatattatcatttaattacaaattattatatatatntaatttattaactntgataataaatacttt

SEQ ID NO: 110487 - DNA, 419 bp, Glycine max
tctcaagcttgagatcaggaagtgttgaaaggtgaaactccctgctcttatagttgtccacacagagggacctgtagatatgtctcgggggtcaagaaaccttgtggacgtcaagtggggtgctattgcccaaaaccaagctagaccaatcccgacccaacccgggcatattcggtcagagagaacctgtgatgtacctaatcaggcgagctcctggcagtcaacagattaaaggaatacaagaccacaaagcacggaggctcgtggtggctggccacctgtgaattttgtgtaatatgtggattgtggcctctggtaatcgattacccaaggtgggtaattcattacaaggcttaatattgatgacaggatgctaagatggtctctggctatcgattaccaacggtgaaattcattac

SEQ ID NO: 110488 - DNA, 398 bp, Glycine max
  unsure (1)..(398): unsure at all n locations
tataaaactcagcttcacagtatgtaaatacacaatatccaaatcatctatatacctaagttttctttttggaaagatcaactatgagacgaccgtctggcaagataacagttaccaaattactcgttcaacattcctatatcctgcaatcatgaggcagtgagccacacaattcagtagtgcttttagaaacaaagtacaacaaatcctcctaccaaatcaataaaaaattataagggtaatgtacccacacacaagacaaaaaaggcacagcaaacaaaggtatactagatatgtataatcttagtgtggcatagcttgcttgactaattactaaatgtcacaatagcattcttaactnttctaaataaacaacacttactctacaatgacacatg

SEQ ID NO: 110489 - DNA, 408 bp, Glycine max
  unsure (1)..(408): unsure at all n locations
ctaatanatctattatggcttataacaagcttctcgtcagtggtaccttaagtttcatgggataatttcttcatttggttttgatgaaaatcccatggatcaatgcatataccacaaggtcagtgggagtaaaatatgttttcttgttttatatgtagatgatattttacttgcagccaacgatcggggtttgctacatgaggtgaaacaatttttctctaagaattttgacatgaaggatatgggtgatgcatcttatgtcatcggcattaagattcatagagatagatctcgaggtattttgggtctatcacaagaaacctatattaacaaaattctagagagattttggatgaaagatngttcaccaagtgttgctcccattgtgaagggtgatanggttaattt

SEQ ID NO: 110490 - DNA, 382 bp, Glycine max
  unsure (1)..(382): unsure at all n locations
taaagaagagcttgactaagttcttgctttccttctcaacactctttagtggcatttttattgattggtgtattgcgtgctgcatcttantctctatcatttcatatatgcatgatgcatcatcatgtcggacgcagttgaagactcttaaaggtagaaaattttctttataaggtgaaactgtctattataatcgatcacaaccttacattaattgattacacaagatggattaatcttgcaaagaaggggctcgtatcggattaatcaattacaagcttatcgtaatcgattacatatcactctttgagacaatgatcgattntcttaggaatctctgctttaatcaagtaccatgtgatataatcgattacttctttta

SEQ ID NO: 110491 - DNA, 415 bp, Glycine max
  unsure (1)..(415): unsure at all n locations
ttacactctttagttcttcgtatttttatttgaattatntnnnntccctggccgccattgatcacacttcaattatatataacagtggtaaaaaaatgaatgattaagtaaagcggatatacttttgaacaaccctagatatgattctatatatatgctgtctcctcctctcaatagacgatttgggaaaattgagtggctttaaaaggtctacatgtacgttttaaatcatcaggcaattaaatacttgtatagaaatttgatctatttgaaaacgatttttaattttggacataattaagttaaaatgacttttttttataaaaaaaattagaatggagatatttttctaacacaacacaaaatctcttctactaaaatagtcactcttaacagtttaaaggatataatttct

SEQ ID NO: 110492 - DNA, 182 bp, Glycine max
tttgacctgacttacaatagaaaatcatgtaatataatttacaggcttatgtgaaggtggctgtgctgcagttgttgactcgggcacatcattaattgctggtccaactgtatgatctcaaacattagtatcctatcttgatacggtattttgtttactttttgtttgctgttattttcttt

SEQ ID NO: 110493 - DNA, 428 bp, Glycine max
  unsure (1)..(428): unsure at all n locations
ctaatatccactntcacaaacaagtttgaaaacaagttacttgaattataagacaacttgtatgtttgcaaagccaaatttctctttccaaatatgataccaacttctcttattagaatgagaatgggcagaaccaagggttgtgtttatgcagcaaatagaaacacccttgaataagtttttggcaaacaagtcttgaaaaccaattaagttttagtttctcaaggagaatgatctcaccaaaaagttttcaaaaccttttctttttggaccaaaaacaagctatatgaatatgcactttcaaacataagttaaaaataccatattcaaatacaagctaataaaaaaaatataacaatgagagaagcatcacatttatcaaaaaatgaactatattctgagcacccaaccctcatcaaacaagtaaa

SEQ ID NO: 110494 - DNA, 417 bp, Glycine max
tctcagagtagtagacgacagattactgggtacattactttattatagtcagaatttgtgtttgtaatatgttaaattagattatgatgtaaatatattttttttatgtgtatttgacattgatctatgttcatctgatgtttctagtgttggatatattagcactttcctagtgttcatgactgcgtcactgacgatccgtatgatgagacatccccacgtgcctatcggtggcttacgacaaaggcttatatcaagggattacgagcaccggtgtaccagacatgtttagatgctttgacgatcattgacatgtgctggatgccctatggtgaccaccgatgagtcagggggtttgagctcatttcgtgcttctagggccaagttagatggggtcctattgtggtcacagttcga

SEQ ID NO: 110495 - DNA, 440 bp, Glycine max
  unsure (1)..(440): unsure at all n locations
gacactatcgaatacccccgctntacattaacatacatttgcttttctttcctaacttatattgntacttgagcgttgaagtcctttattttgcaagtccccgctcctatcaaagatacctctcctagccgacgtatgaagttcggaacctcactcagccacatccaccttgacgtgttacggttctaaattttggtaagaacatttggcgtccactgtggggccacggtaaaacataccccacgacctctcatcaatcccctcacactcatctatggttagcacttagtctgccctctgatgtgagaccccccctaacgaactcccatctttgtccgacagttatgacagacacaaatactctacaacaactccaaaaccgcatcgcagggagcaacaccatgaggaagagttgacaaagcttataagttgaccatgac

SEQ ID NO: 110496 - DNA, 423 bp, Glycine max
  unsure (1)..(423): unsure at all n locations
tctntgagaaaacttccttgagatgctagagcttttctacacacacccctctcataactaagctcacctccttgagaagctntcttaagaagattccttaagaagctagagcttagctacacatacctctctaatagctaagctcacctccttgagatgagaagctagaacttagctacacaccccctataatagctaagctcacccccatgacaaaaaacatgaaaatacaaaaaaaaagtccttactacaaagactactcaaaatgccccgaaatacaaggctaaaaccctatactacaagatggccaaaatacaaggcccaaacgaaggaaaaacctattctaatatttacaaagataagcgggcttatacttggcccatgagcttgaaatctaccctaaggctcatgagaaccctaggg

SEQ ID NO: 110497 - DNA, 406 bp, Glycine max
  unsure (1)..(406): unsure at all n locations
tgacatgaagagggtgagccattattagcaagtctccataacgtntcttttgccatttatactccagacggaatggtttcttgagtgctgcatcaccagacacagggtaagaagaactgaacttgtcaagagttgcaacatacttggaaccagaatcangcaacgctgctatacgaatgatgccggaaaatggcttggatgtaacctcagaaggaacatggttcaagtagattggggaggaggtgtatatgatccatgtctgagtgttgttaagcttaagggtgtgcttggtgttggaatcatcggaagacagagaaactatggtgtgcactgttttgatcgaaagaggtgttggctttgtgacagaagcagttatataagggcttcctctgacaagaaagaacct

SEQ ID NO: 110498 - DNA, 275 bp, Glycine max
tcttaaaagaagagatgaattttctcctcatgtgcttcttcacaacatttctagcacccttctttatccaagatccatcatgctctttaacatatccaaaggatgctatgactgaagcgcctataaggaatgatctcttgattggaacataaggttcagaatcaagagggatgttgaagtgttgaacgaaaagggttacacgatgaggataatgttatggggcattcaatcgcaatgtcttatgcatgcgatattaacaagatgtgcccaatcaa

SEQ ID NO: 110499 - DNA, 208 bp, Glycine max
taacattgcacccatgttcgatcctgaatacatttgtcttcaaagtagatggcaaggaaaagttctgtaaacggagtactggtgttatgcttattgcatcctttaaagtttggaaagcaagttatgccactggtgtccagtctaagtgttcctttttataagatgaattaaatgggctgtgattgttgcatatactttgttaaagcac

SEQ ID NO: 110500 - DNA, 405 bp, Glycine max
  unsure (1)..(405): unsure at all n locations
acagataggacatgcatgatgcttctttacattgtatccacttaaatntccatatgctagaaagtcaataacagtacaaaacaccattgaccgtaacctgaagggctactgcagattcccatcccacacatcaaccccgtcttcccacaatattttcaagtcttcaattaacagagtgagatatacatcaatatcattccctagctgccttggacccgctatcatcatacataggataatgtattttcgcaaaatgcacaaccaagaagggaggttgtaaatcatcagcaaaacaggccatgaattgtggtttgtgcttaagttaccataaggattcattccatccaaagcaagaataagccttatgttccttggctcttctccaaaatttggatacaaacaatc

SEQ ID NO: 110501 - DNA, 342 bp, Glycine max
cttctcaaagaagttttctcaagaaagcttctcaaggaagctacctagtctataaatagaagcatgtgtaacacttgttgaaaactttgatgaatgagagtcttgtgagacatacttcaaagatccacttctctccctcttttattccttcaatttcgtgctcccccctatctctttctctccctctttcttttcctccattgaagcatccttccaagcttcttatccaaagctcatcttggtggagaaactccttctttcatagcttattccctaatggatggcgcctcctctcacctcttctcctatgttttccgctgcatcttcatggtggaaaatcac

SEQ ID NO: 110502 - DNA, 230 bp, Glycine max
gcttcttggtccaacatccctactgtaaagtttcttgatgactgactcaactgtgctctcttcttctgtcagacaaaccctgggttcagaatcacagacccagcaacaagtgttgagctgaacaacaactttgttgaatatcaatagggacattccatgacaccaattatccagcggtttctttcacaaatctgcatgccattcatcaacgtttctaatgccacctcatg

SEQ ID NO: 110503 - DNA, 328 bp, Glycine max
taccaaagggtgtcacccagcgatctaagattgacatgaataaagaatgatacgctgaacccaatgaatcagatattcgaaattggtttaaaggcatcagagacagtgggtaagtgtgcatatcttatttctatctttcatttataatttattatctgctgtccaaatatgattggtcttccccttcaatattgattttgcaccaaatctctagaaaagacaaaataaagttccttgtaaaaagataattctgtatctatgacatctttattggtctttatgcacatttaaatttttttactaaatcctttgttatatgaacagatat

SEQ ID NO: 110504 - DNA, 420 bp, Glycine max
tctattgcaaaataacaacacagtttcattgaattcagcatcataaagcagaacaagaaataagcaatggatcaaagttgacaatcttcttaatgaaattaaacatcaatttacacaacctatacgacaaatagatatgagattaaacatcaattgtttaatttcatggattgatcaatgagcaatctaaatcaagcaacaacattatttagcccacaaacacgaaaccaaatactagaccaataaccaaaacagacgtaaaagaactagcaatactcaatgaaatgccaaaattggatcaactaataaacaataatgaaaaagataatagcagtaatatcaggatcctaaattttttatgtttcagatcaataatagagactcgtttctgtaagatcaaagtatcagacctaaaactta

SEQ ID NO: 110505 - DNA, 419 bp, Glycine max
  unsure (1)..(419): unsure at all n locations
agcttgaagcgtgtgctggtgtccaatctgtttggccttgttggacggttattctcaccatcgtcacagttccacatgaatggatcagtgattacaatgtgtggatcagcatagctaacattgtgaacattgtatctcccagaaggggttctgacttggagttttccggagtcggaacaaaccangatgtaacggtagtatgggcttccacacccatcgtcaatgccaaaagggtattcgatgggaatgtcaccacaagaagttctgcatggcgtggattgagtgatcaacaatgagtgaatcagcaatagtagtaataataacattggtttttggttgtgggtagtaagatgcacacccatcagagactatgtagcacgaacaactagatggtttatgctacaaaagtggtcaaatca

SEQ ID NO: 110506 - DNA, 416 bp, Glycine max
  unsure (1)..(416): unsure at all n locations
nttcgcaatgcttacggtaaaatctgggacccagttatggaagaggtctccatagaggccattgcctccctcgcctagtattatgaccagccgttgaggtgcttcacctttggggacttccaattatcacccatggtggaagaatttgaagagatcctaggatgccttctagggggaaggaaaccttacctcttctcaggattttatctctctttagctagaatttataagatagtccaaatcctggcgcaggaattagaccacagaaagcaagtcgaaaatggggtggttgaagtaccgagaaaatgtttggaggcaaaagcaagaatcttggcaggtaaaggcgaatgggccccgttcatagacatcctcacacttttgatcttcggaggagtcctctttccaaatgtggatgg

SEQ ID NO: 110507 - DNA, 280 bp, Glycine max
ttgtggtttctggagggattatttttttttctataaagaactatggcttttttaaagtaatttttctactctttggcttataaactcatttattatgcaggtctgctgactgccatacgtaaagaatgtctaagagttatggattataaagagttgctttttaacgattgtggtgatcgtgttgcttagttgttacatgctcagttagttaccccctttgtacaaaacccaaaaggcaatgttccccaagagtttttgattgtgaacacccacttgtttt

SEQ ID NO: 110508 - DNA, 408 bp, Glycine max
  unsure (1)..(408): unsure at all n locations
tcaggtgcaaatntagtgaatgatagcggagaattgatttttgagctnttgagggaacatgctcctaagggaaattgtgcacaaagctagagcaatattactgcctttgtagagggtggataacgataggagaatttggtcgagaaatcgtttaggagatttttgagtggctagtgcttatcataaattgaatgacaacttggaggttattaacgataatctttggaatcagatctgcaatttgcaggttgctcgtacttttatgtgactcgtcatgtaagaattaatatcttataacaacgagatagatatgtaaaactaataaataaataattaataattaaagattaaattataattgagttgatatttataagatattttcttaaatggaaaagtgaaaagtgt

SEQ ID NO: 110509 - DNA, 312 bp, Glycine max
  unsure (1)..(312): unsure at all n locations
aaaatatgcacaaatgccattgaggcatttcaccgaaaacttggtgggcgcatgttaaacatgaaaatcaaaggaatggggacaatgtggcatgccccattatctcagaatgcaccataggcctagggctatcccctacaacccctcaattcatcaaaaacaagcaacaatccaaggataaatccctcacgtttttgagcaaatacatgcaatttagagcaccaaaatacatcaatggaaagctagagagccaaagaatgaggtacttacttgttggagatgaataatagagcaaaacggaatcaanaaatt

SEQ ID NO: 110510 - DNA, 403 bp, Glycine max
  unsure (1)..(403): unsure at all n locations
accctaaattgcttatatgatttttatgnanaantatgtaaagtgatgtcagaatctttttcattttctcgtctggctaatgagcgtttttgtagtagtgtgaatagtttcnggggttccttagtttgattaatttgttggattattcttttagctattgcttacggtttaatttcatggaaaattgattgtctctaatattttattgctggaatggtcttcaaaaagttaaaaacaaaatgcagaaagaaaagacagcgtttttaattcctcccttgatagtaatctcatttgttctgtgattttcttttatatattacagaatgctagaattgtgattgtgttacgttattatgttttttttatgtgtagtcccattctgattgcattgcacttattgaaa

SEQ ID NO: 110511 - DNA, 398 bp, Glycine max
  unsure (1)..(398): unsure at all n locations
ctttatgtnatctatttatgaactttattggagataattgaccttacatagaattaataatgaagatagaggctctaacaatttaaaaaagagcatcacacacagaaaaaaaaatgaaaaaaagaaaaataccatgataatttaaaaataattgtgaacccataagaacgagattcatattgaattgctagctttggggaaattaagcagtagctcgattgtagaaagggaaagccctttttttaaggaaaggccattataaggaaaagtctctccttttaatatgtttaaataaagatatcctgccctcctaattctttggaataatcttttctttgccttaatttcttcttttgtataataataataatggtctttaataaataaataaaaaagtg

SEQ ID NO: 110512 - DNA, 425 bp, Glycine max
  unsure (1)..(425): unsure at all n locations
catcagatcatataggataaatgtgtncatgctatctgcagatatatcctcccaaacgtcaaattcttcgcctatatatgcaaccttttccatcactggaacgtggagtgaatcttgctccatggtgcaatattaaagttatattgtcattcattccacacaatcagaaaccataaacattgccatatattaggaaataaaaaacctaactcaaacataggcgcatcacacaacaaaatgcaatgtcatctataaaaacagagcatcataaatcaaaataataaaggactataaacctcactgcgaagtgtgaagacaatgcaaatgataacccttcaacatataaaaccccaaatgaatccacagaaacaatgcaaacaaaaacaaacacaaaacaaccacaaacctgactgccaagcgcaaag

SEQ ID NO: 110513 - DNA, 432 bp, Glycine max
  unsure (1)..(432): unsure at all n locations
actcagctaggaccacatagtgttctctatgcaacctntaatgctaacattctatttgaagatgcaatattcactctatggacgtggctcangcactttgagaaagattttactatccattttaatcaatggtcaagtagcattagacacggcttttgcatcagtagaggatacatatttttgactaatagatgtacatttactgtacccatatactggttccctctcagacctgttttgtctgactttggaaccatttctatggtacccatactgctgtaatatagtacctctggtaactctttacatatctataaaataatatctttgctgatcaaaataaaaattgataccattggttttgttttcatatagtgactcaaaaatatattttaacatatcatcataaaaatcttatactttgtagcttca

SEQ ID NO: 110514 - DNA, 431 bp, Glycine max
  unsure (1)..(431): unsure at all n locations
actataaaacccagcttttatccaggctcatctggtggtgaagctccctctccatggcttatgccctagaggatggcgcctactctcacctctcctcctttgtcttccgctgcatntncatggtggaaaatcaccattaaaggaactcattgaagctcaaagatccagcctccatagaagccccacaagcaagcttccatcacaaagtcctcgcctttatttttcataggactcaaagtccccgcctgggcgagcttcaagaccaccaagtgccctcatttcctataaataggcgtgagggaggctgaggaaggggttggacctttagtactaagagtattttgagagaaatcagagagaagaaaaagaataagagaaaaatgaggtcgaggcgctaccgaattgcgaccgcaatcgacttctacatcgtt

SEQ ID NO: 110515 - DNA, 420 bp, Glycine max
  unsure (1)..(420): unsure at all n locations
tgagatgaggaaatgtagaaaggtgatacttccttcttntattcgttgaccacagagtggtacctgaagatatgtcgcgggggtccggagaccttggggacgtcaggtggggtgctattgcccaaaaccaagcttgaccaatcccgacccaacccgggcataatcagtcagtgagaacctgtgatgtacctaaacaggcgagctcctgacagtcaacagataaaaggaacaaagaccacaaagcaaggaggcttgtggtggctggccagctgtgaactttgattgatatgtgggttatggcctctggtaatcaattaccaagggtgggtgaacgattacaaggcttaaaaatgaagacaggaggctaagatggtctctggtaatctgataccacgggatgtaatccaataccaagcttgg

SEQ ID NO: 110516 - DNA, 58 bp, Glycine max
ggggcggggggattatgagccgaccgctgatcccttatttttttgataatgcgcgtac

SEQ ID NO: 110517 - DNA, 385 bp, Glycine max
tactctagcgtggactgcgctagagagaaaaatatatgaccaatttgttcaaagtttctttctaaggcaaaattgggtgttgaggatccaaatattgattcggtggaaatttaggtgtaaatccagtttgaacaagtctagattgatgttatatacttgtgtgaggtgagagtttgctccaaattaacctcattctaaatttcacttttcaaacctagaaaacccattgatttgaggggttttggacacctaaattttgtgttactgtggtttgaagtttggctttggtttagacatgtttgatacatgatttgtgacttgtaggattcgatttgatcaagattggatgagatgaagtgtgattttcgaaatctgcacttatgca

SEQ ID NO: 110518 - DNA, 412 bp, Glycine max
ttcataagtgatatcatgtgcatccatctccctattagtcctctcacgagatggaagttgagccatgttctcagtataaaaattagtggtggaatgctcaaaatcagaatatttataatcacccatcaacagaatgctcagaatgcacataatgaccatgatgcacactatgcctaactaatcgatgaaatgtactatttatttcaggatcaaagggttgcatatcacctggattgcccctagtcatgcgctatatgcacaaataatgtgtttctcaacaaacacttaacaagggggttaaactacagctgtactcaaacgatatcaacataatctgaaattgtgtgaggaacaccctactatcgtgaaaagatagaacagagaaatttccacgaaaattcaaagtctaact

SEQ ID NO: 110519 - DNA, 408 bp, Glycine max
taaataggtgggttggtccgtgctcgcacgcttatcacatattggaatcgcttagcgtgcataagtggattttggcttagcgcacttctctcgcttaacggatgagatgaagcggtgcgcttgatgacttgtagcggtgcgctcagcgaacctgacatctcatcttcttctggattcttcctcgtgcttagccactgagtgtcacgcttagcgaatgcttgctaagccaacagattggcttagtgagaaggtgaaaacaacacttttgccaattttcctaattaacctgaaattgagagaaattgattattaaacacacaaaacaaaagtgtaaattatctattacctatatttaacagaaagtacttataatattacaaaacaactataaatgggagaagtttgata

SEQ ID NO: 110520 - DNA, 287 bp, Glycine max
  unsure (1)..(287): unsure at all n locations
ccttgtgccatgagggtgcatatctattggtaatcagaagctcggtctaggataacacttcttgttgaatattggtaacatctgcttattcttttgccatatatattaccttgttattcatattnttttaagctgaaccattgcaaaagttaagcctcttgatctctttgttataaaataaaagcagaatttcttattagcaaaattaaaaaaaaatgggctgaatggttcatgcttgaagaactttaaaataaaaatctctttaaggtaatatattggttgcatga

SEQ ID NO: 110521 - DNA, 416 bp, Glycine max
  unsure (1)..(416): unsure at all n locations
gtcttccnaattggcttaagaacttaaatctctatttgatacaatgcttcttggtattccatgtaggtgcaccacctctgtagagagcgagtctactattgcacaagcaccatccatcttatggcaaggaataaagtgagccaacttttagaacctatcaaccacaaccaaaatagagtcattgcctttctttgaccttggaagactaagtacaaaatccatggatatgtcggtccaaggagaggtgggaataggcaaaaaggtatacaatccatgatttaagaccttagatttagctttatggcatacaatgcatttgacataatatttgttaataacatgtttcattttagggcaaaagaaatgctcttgcaaaatgcccaaagtcttgtcaaccccaaagtgatgcatcaacc

SEQ ID NO: 110522 - DNA, 289 bp, Glycine max
  unsure (1)..(289): unsure at all n locations
taccagatcttgnggaaaatatttaaagttagaagtagagattagctactttatctcaatccttgtggaagacttgaccaacacttttgtacacatattaagaaaacttatcgcaaccctctgttgatagttaatttgctattcaagtctaagcacatcatttcaatgtaaatacctagctggcaccaaggtgacaacagagctcatattatgtctgaagagatgaaccagaaccatcattgaattaaatatacatcagctgtcttgaatctgtagtgagaacactact

SEQ ID NO: 110523 - DNA, 142 bp, Glycine max
  unsure (1)..(142): unsure at all n locations
gtctatcgcacttccaatgacgaacaccacctttagcacaaaccaaaaacaccaaccaagaagtgaattttgcagcgagaaagcctgtagaattcaccccaattccagtatcctatgctgactngctccatatctacttgat

SEQ ID NO: 110524 - DNA, 183 bp, Glycine max
ccctagtagggcccacatatggacgaaatacaagccggttctttgtaatccacgccgcccaagggataaacctttccgccggccaatggctactgcttagaacttgtctgcacaaaatttccccgcccacattcgtcaactaatggcgcgatccaccatcaccaggacttcctcggtgaaaac

SEQ ID NO: 110525 - DNA, 428 bp, Glycine max
actcaagcttgtgtacctgaagaaattatagattattttgaatagttagaacaaaagactgaataatttaatattaattgaaagcgcttggctagccatttcaattagaggtgtttataaaaaagcctatatttcactggcttatgcaacttatatggcttcactttgctttatgatatatgttagtttttgccacaaaataatgtttacccttgatattttgtagattctatgcaagtcaatgaagggtgtgggaattgatgatagtagactaataagggtaattgtaacaaggattgagatagacatgcattatataaaaataacatattataagaaatatggaaaaccattaactcatgctgttaagtcagacacatcatgccaaagagtagagtaaccagtttatcacatgattatgttctata

SEQ ID NO: 110526 - DNA, 417 bp, Glycine max
  unsure (1)..(417): unsure at all n locations
tgtccatcatcatcgcatatcatatcaaatgtgtctcagagntntatttatgggttacgggtcatatatattaatctgcctttttctttttatccaaacttttcaaaagactaaagggggtttgaactttgaagagttgtacattatatagggaatatgggattgggaattgtgcaattcttctgtctgttgatacggtcacggtagctttaacttttaatttgcagaccttattatgacaataattgagaagtgctgtttgaaattatgcagatctcaccttatagaaaaactacatgacctctctgcttagaagttgttttcaattttcatatcaatgtaagttttgataataatatgcagttttttctttctttggaaactattgtatatttgttcgtccatattgaaataact

SEQ ID NO: 110527 - DNA, 415 bp, Glycine max
  unsure (1)..(415): unsure at all n locations
nggcatttggcaggaggctgctgtcagtgacgtttataggactactacttgggagcaacacatgtatgctatgttggtgcacatggcaagtttggatcatcagtactcaagctcctatcctaagagtagcacacctaaacatccacactatcaagattatatggacaattatttcttggatgacaatgagacttgactagagatatttttgttctatattttttgtcttttttcttgtgtactttgactatcatattacatagatatcgatgagcataattgttcaagatgaattgttccgtgtctttctatatactatatatcttatgtctttgttatgtgtaataatattaatgtaaatgtctaggatctataatatatcaattataatatatatcattttaaaaaaattata

SEQ ID NO: 110528 - DNA, 413 bp, Glycine max
  unsure (1)..(413): unsure at all n locations
ntgagccaaaatcctgactcactataaaccttgtctccaggtgagaatgccaatccttaccctcggaagcaaaaaagaatagaggggaaatttccaatcaaagaaaaagagaaggaaaatttccaatgaaagcaaaaaagaaatgaaggaaaattccccaatcaaagagtgggagaaagcaaaaaaaaaaaaaaaaaaagggaaaagaaggaaaattccccaatcaaagagtgggagaaagcaaaaagaaaagaaaggaaaattcccaatcaaagaatgggagaaagtaaaaaaggaagaagaagaaggaaagaaagctcctgatcaaggatcgaaagataccagaagaaatgtgcagagaggtctttggaccagacaatatctgaacagtacagaattgtcaccaaatgaac

SEQ ID NO: 110529 - DNA, 407 bp, Glycine max
  unsure (1)..(407): unsure at all n locations
gacaagacattacacactgctgtcttggncatttagtataaacagagaaatctattcttaagatacatataattataacccataattataatactccccttcaagctggagcatataaatcgtatgcaccaagcttggaacatataaactgaatcctaggcccccttaaaggtttagtcaaaatatctactggctgatcattagagttaatgaattcagtgacaatctctttagacaatagcttcttccgaataaagtgacagtcaatctctatgtgcttggtcctctcatggaagactggngttgaagcaatgtgaagagcagcctgattatcacaatataacttcatttgcaccactttgcaaaaattcaactcttcaagaattgtttaacccacataagttcac

SEQ ID NO: 110530 - DNA, 379 bp, Glycine max
tatcaataaacacaagttgtgtttattcagaaaattagagtttatctcttttatcttagtgagagtgattctcctaaattcttgagtgattcaagaacaccttggctgtatcaaaggactttcacaacctttgtgtgttgccctcgctggaaagagtgattcttcccttcctttcatcatcacccttgttctttcaaaccacaattccagaaaatccacctctgcccacaattttctcgaggcccttaccttcctttttcccctccaattaaatgaattctgagcctaaattgaatttcaaaacgagacctttcacctcgttttggaatcacctcatttggagccctgttgcttcagttattgccatttctatatttct

SEQ ID NO: 110531 - DNA, 390 bp, Glycine max
atatatctccactggtttgttctctcacaacaagtcaaatcactctctattcatctatagaaaaggcactcatatggcttacattcttctgtatgtggatgatattatattaattgcctcctctaattaatgatcttcgctagtctatcgagtcacatctaagttcaaaattttccatgaaagacttggggccattgagttatttcttgggtctatttttatctcagaaaaagtatgtacaagaatcatcgaacgggcttgcatgtctttttgtaagccaactatgacttcggtagatactaaattgaagctgagtgctacttctagcacaccttatgctgatacatcacattattaagctttgcaagtgccccctgtcgcaacctaccc

SEQ ID NO: 110532 - DNA, 451 bp, Glycine max
ctgtaggattatgggatacccatcacatgtggtactaggtggctgtctggcgatggtgcacaacaagttttccacgtccacaaatcgcgcataaacccaccatcccctgttgcccacctccaactgagctcacgtactcccacgtagctcatatcctcgtttctctcaacaccgggtccccatcaatcctcccaagcttccccaacatccaagtaactcaacattcaaacagcaaaaattatcacagccaaacaaaacagggcaaaggcataaaactctgcccaaaacaccaaccaaaatcacagcttttctcatttaaagaccccagtaataattccttcgttccacttcgttaaccgttggatcgactcgaaaagtttactggaagtctctagtacttaagcctacattgtgaaccgtgggatctactagaaaacatccagaactcatt

SEQ ID NO: 110533 - DNA, 69 bp, Glycine max
ttgtggttgttgcaggtttaatgtgggagggttggtataggatgctggtactggggagaagtgttacta

SEQ ID NO: 110534 - DNA, 427 bp, Glycine max
gcaaagctgctacgtaatttgttgttgtcacagattagtgatgcatttctttgtcggtgatatttgtaattttgtacagtctagatggtataaagagaatgcaaactatgcacactcgtcattcgccaaaataacagatttcttttaccttgtgaatactgtctgtctaatagtgtaatagtgtcagtcagtatgtttatatctcacctcactgatttttgtcctaaacttccttatctctgtaaattcatttttgttggagtaatttactttgtttacttgcccccattcctgttatttatatttactggatttgttttaggtgatccatttgggtttcgctttacactcttttttcctgctgtacagatgtattaaaatagcactcgtgcatgatattgcagagggtatgtctgatttcctctga

SEQ ID NO: 110535 - DNA, 461 bp, Glycine max
ctaagcttaggctgctcaattgctccaggttgctacatggaagggcaattgtctgtatggtggtcagcagaggagcacaaaccacaaacccttgcgacaggtacagatttctgattcaaggccagttgggttaccaagttgaccaacgcatccagtttgccttcaagcttcttagtttcagatgatgcagatgggtttgtagctacctcatgcactcctctaatgactatggcatcatttctggcactaaactgctgggagttggaggccatcttctcaattaaatttctggcttcagcaggagtcatgtctccaagggctccaccactggcagcatctatcatacttctctccatattactgagtccttcataaaaatattggagaagaagttgttctgaaatctgatggtgggggcaactggcacatagtttcttaaatctctcccagtactcatacag

SEQ ID NO: 110536 - DNA, 418 bp, Glycine max
  unsure (1)..(418): unsure at all n locations
acctataaaactcagcttctatatagctgaaccatnttatcaataaacacaagttgtgttttattcagaaaattagagtttatctcttttatcttagtgagagtgattctcctaaattcttgagtgattcaagaacaccttggctgtatcaaaggactttcacaacctttgtgtgttgccctcgctggaaagagtgattcttcccttcctttcatcatcacccttgttctttcaaaccacaattccagaaaatccacctctgcccagaattatctcgtggccataacttccattttacgcactcaaattaagtgattcttgagcctaaattgaatttcaaaacgagacctttcacctcgttttggaatcacctcatttggagccctgttgcttcagttattgccatttctatatttct

SEQ ID NO: 110537 - DNA, 440 bp, Glycine max
  unsure (1)..(440): unsure at all n locations
tcttcattgttaagggtctattgtgataaaatgttgtataattatgttttcattttctgtgtgtaattaaggtcctccgtccattcctccttcgaaggttgaagtcagatgttgagaaaggtttgccaccgaaaaaggaaaccattctcaaagtaggcatgtcgcaaatgcagaaacagtattataaggcattactgcagaaggatctggaggttgtgaatgcaggtggagaacggaaacgtctcctaaatatagcaatgcaactacgtaaatgctgcaatcacccatatctcttccagggtgctgaacctggccctccctttacaacaggagaccatctcattacaaatgctggtaaactttgtttacagtaagagtacttcaaaagtcctttttaggctgatcaattagatctgtgattatatcanttttttctactt

SEQ ID NO: 110538 - DNA, 446 bp, Glycine max
tgtcggtaacttgaaaatccacctgcattaaaccctggtctgtgttgatttcccatataattcacctcctttgtagcatcatcaaggggtatacagcaaccagactcatgcgctcctccacatatgctgcaacctccaacctacaaaattgctgaatgtgaaggttgagttgcttgtaattgagttggcagcttactaagtgtccctatcaatgtctcaagttgcttagctagcaacttgttctgtgccaacagtgcatcttgtgaagaaagctctaacaggcttctttttgtgggtatatgagttcgaccacacaaaatagcatgatcactagcagccatattttcaataagcttcatagcttcttcaagagtctttaatttattttttcctccagcagaagcatccaatagctgcttggattgtggcctcaacccatcaataaa

SEQ ID NO: 110539 - DNA, 447 bp, Glycine max
tcaccttctggtcctcctcatagttgttgcatgagaaaacatgctctattttcatctcccactccaagtaggcctccggatcattctttcctttaaatggaggaatgttgagtttaataccatcaattcggttttgtctaggaacaccatcattccctcttctcctcctttcttcttcattatgatctctattctccatttgatccaacctctcatggagtgcatcatctcgttgtttcattaacctctccaaatgttgcatcaaagcttgcatttggaattgcgaaagccccactccatcattaggattagtacctgacatctcaaacaaacaaatcaaacgtaacaagacaattatagttgctgtttgaatacctcacccactcaagtgtatcacacaattatggcttttctctaatgaaacactcttgcctttaccactctaat

SEQ ID NO: 110540 - DNA, 355 bp, Glycine max
tgtgatagtgctctgggtcaaacacccacatcactatatgaatgagctgagagcatttctggttttacaaaggaatatcatttggaaattctgaccatgccaatgtgatcggggttcactgtaggttatgaaaataatatgcatttcatgaaaggataacgtttacaaagtctttttctctaaggtttttcaaaggaagcataatacatgcaatggcggttccaaagtcaaaaaaagatgcaaagacaagatgaaactaacaagaaacaagcgtagaaccatggttacctcgaaagacaatgaaaggtcagattacggtttcgttctctatcgaaaccgctagccaagtcggaag

SEQ ID NO: 110541 - DNA, 139 bp, Glycine max
ttccgtaccgaaatataaagcttcgtgaattattctgtgattatgcaaacatttttattgactaaattattgtgagtttttaaattattcctaatatgtttgtgcaatgattattcttatttttgagtagtttatttat

SEQ ID NO: 110542 - DNA, 418 bp, Glycine max
gtagttttgatgatgacatatagtccaaaagaatgatttcaagattgagtcaacaagttcaagatcaagattgatttcaagattcaagagaagaaatcaagaagacttcacaaggggaagtactgaaaaggacttttcaaaaaccaaacatagcgcagttttgttttacaaaagagttttctcaaaattttctaagttaccagagtatttactctctggtaatcgattactagtttcctgtaatcgattaccagtgataaagtttcatttcaaaagcttttaactgaatttgcaacattccaaatgatttttaaatggtgtaatcgattacaatatattggtaatcgattaccagtgtatctgaacgttgaaattcaaattcaagtgtgaagagtcacatcttttcataaaatgcatt

SEQ ID NO: 110543 - DNA, 435 bp, Glycine max
  unsure (1)..(435): unsure at all n locations
tccggcgataagttggcaaagctatgaagattcaactcatgtcttattatganggggattttgttacatctgtactttaggaataagtaaaacacatggtgattcgtgattgaaatttatcaactaaaatatgctagtaaataatacattcttgctttgatttttagcagagatccacatatgatgaatctttgaatatttgcagtgaactaaatgatactgttattgaggcacaactaaggacaagacaagttccacctcggcttccaaccaagactgcaattgaaagttatcagcagtcaactaatcgactgctcantttggtatgctgtctcacaatgaagctcgagacttctctgaatacatctttctgtttccttgtcttttactccttatctgagttctttctacaggatactgcttcatntctgaata

SEQ ID NO: 110544 - DNA, 120 bp, Glycine max
atctatctatctaaatattagattgactcatctagaattattcatcagatctatctatctatcagattgatttatttattatggcctggattaaacagattgaaccttgggcttaaaaaa

SEQ ID NO: 110545 - DNA, 464 bp, Glycine max
gacctataaaactaagcttaaggtcctatatgacaatgctgaatatagaggaaaacagggcatttaatatcctaattccacatgggcaacaaatagaaagccacaggtgtatttatttgattgggcaacaaggttaacaccaaagattgtcaaccttcaaataaactaatggcataacaaaatcaatacatgatatcttgcaccctataaaaacacaaccaattgcacaatgtgcttaacacatgataatgcctcttatccacatgataaaagttcctgtccagcctctgctattctgagaaaaatgaagagtgctacataaggctaaaaaattctatatttgtttatttttaagtacaacggatctttaaacattagtgctgaatgggcagagtaaaataagagaggacacagaagggaaatatcttatataaatataagagaaaaattaccctatacaaatg

SEQ ID NO: 110546 - DNA, 113 bp, Glycine max
tcgtccgaagctttattactttactgtttgctagaagatttttttttcttctttagtcagctttctccctccatacccaacttgttctgaacccgagactcacgacatcatgt

SEQ ID NO: 110547 - DNA, 445 bp, Glycine max
  unsure (1)..(445): unsure at all n locations
ntcgatgtaacattggagaggttaatgaaacaacgagatgatgcgctccatgagaggttggatcaaatggagaatagagaccatatgaattgctcaagagcttccattgttcaatttcgagcgtctagatatataatgcgcctcaatcggaccttcgagttaaaagttatgaccatttgaaatgctcaagagcttccattgttcaatttcgagcgtcacgatatattatgcacctgaatcggacctgcgagtgacaacttatgaccatttgaattgctcaagagcttccattgttcaattttgagcgtcacgatatattatgcacctgaatcggacctgcgagtgacaacttatgaccatntgaattgctcaagagccttcattgttcaatntcgagcgtctcgatatataatgcgcctcaatcggaccttcgagtaaaagttat

SEQ ID NO: 110548 - DNA, 431 bp, Glycine max
  unsure (1)..(431): unsure at all n locations
tgcaatgcctntcagcaatggtaattggtgcctcattntgatatccattgtgcttatgatgttttgcatttatgttcatcgtgttctgattgctttccaatgtttattttcacgtaaaatttcatggttgcagtgagttttactgttgtttcagagtcttttatgagtcagggcattgtttatttgacttctttttctcttggcaggtttggtttatggccgaattttcacatatttttgtagattttgatgacgtatgttataaaattaaagatgctccccattgaaatcattgtagccttttattgaagcttccttacatatgcaattgtaaatggttccccaactctgaatcattattgttggactangcatatctctgataatactgacgtgaaaatataatgcaataccttttagatggaaatatc

SEQ ID NO: 110549 - DNA, 290 bp, Glycine max
ctacttgtccgaattataaacttcctttccttttatatgtaaagaaaaatgactcactttttaggttgtggttggaacaaatggagagggtgggtatatgctaacatgatagtgtctggcccacaatgtggcccccactagtaagcaaaacctgctttttaatttcccatagatttttctgtctttccatttttcactgcacaataatcttttactgttgctacatcgtgactcttttccggaatacttttctttacccaatggagacctttctctgttgttcatgggtg

SEQ ID NO: 110550 - DNA, 430 bp, Glycine max
  unsure (1)..(430): unsure at all n locations
tctgcatgtctagagagttctagagagagaaaggtccaagttctatagagnttgagagattttgttgtgtgaagatctgtagagactaaagctggaaaaggaagccgtcttgagagcttgagatgagtttgtgagtgattgtgaggtcctagcagtggaggagacatccccaccacttgtatttcttcaatctttcatctttctcttctctttgttgtaaaggaagctttccaattatggagagctaaatcctctattggttcttccttgtaggtacttgatgtaaatacttgcatatccatttaatgatgttttgtgtgttcactgtgctatcagaacttcattctaccatgtttttgccttaatcacgtagatgcatgtgtttttaggatcattcaatagtggaaactggtttgattcttagaacttg

SEQ ID NO: 110551 - DNA, 244 bp, Glycine max
cgtcctttttttcaggtgtgtgctgatctatcagtgttgctctaaagggatgaatcatggtttgttatatactataggtcatgcaatggcttcaataatcgaatcttgatcagccactcaatatcctattagaggtctatatacaagtgcatataaataaggttaagttctttgatatccagttatatcatgcatctttccttaatgataattaacgatatccatggatatcacttacttatca

SEQ ID NO: 110552 - DNA, 426 bp, Glycine max
  unsure (1)..(426): unsure at all n locations
tctttnggaccttgaacaggcaactaactcctctntcatgactatgctatgtgctcgcgactggtccctctcttcccttcgcagcttgagttcactgttgctaccccacagagctccgtgaaatttgttacggccatactcttccttgcgagccctcttggtctcttgttcaagggctcttgcggtagttgcattctcttcccgtaatccggcacattccttccagatgtgtgtagcggctaacttgaacttctccttggcaagtttcgcctttcctaacttatttttgagagcttggacttcttcgtcctcttccggtgcttcgaaactctcttcgttgacgacttttaacttggcgagccaatctaaacctcatatatgaactttcagccattcatggtaaccaccaatgatgccattgcgaat

SEQ ID NO: 110553 - DNA, 177 bp, Glycine max
tttacaatctattactttctttcatcattccatctctctctcttttcttctttatatagactaagcaattttttctttttcttttgccatttttgtttggctttgacccttattcttctgagaaagagttggattgctttttcttttatggccaccatctgtagatagtcctatcct

SEQ ID NO: 110554 - DNA, 432 bp, Glycine max
  unsure (1)..(432): unsure at all n locations
ntgaacaatatactnggccttcatttaattgtttctgggcttttcggccacgctcaacaaagtactttcgacacctactgtacgttgatttgaccaaggctgttatgggaatgttgcgacaatccttcaaaaccttattgatacattctaagaggttggttgtcatgtggccatatcgacgtcattctctatcataagccatcgtccatttttcctttgaaatgcgatcaatccatgttgctatggctggacttagttcacgaaatttttctaaattttgataaaaaaaaatgtgcttgcaaggagtgtaggctgcataaaattagttatcaataacaattttaagtatatatggaagttaaataaacgtgaccattaaatatgaaatcttacccaacttcttcaacatttctntnntgttggcgttattga

SEQ ID NO: 110555 - DNA, 95 bp, Glycine max
cttcctttctgcccttccggccacgtctttctaaacgttttttggacgtccctaaatactcggtgcacgagcgcgcctctttctgagcccttttt

SEQ ID NO: 110556 - DNA, 436 bp, Glycine max
  unsure (1)..(436): unsure at all n locations
taatagaatgttcgttcctaatttctatacaattgcatcttctctcaatgagctggggaagaagaatgtggcatttacctgnggtgaaaaacaagagcaagcctttgttttgctcaaagaaaagcttactaaggcacctgttctagctctttctgacttttctaaaacttttgagctagaatgtgatgcctctggagtgggagttggagttgtattgttacaaggtgggcaccctattgcttattttagtgaaaaacttcatagtgccaccctcaactaccccacctatgataaagagctttatgccttaataagagccctccaaacttgggaacattactttgtttccaaggaatttgtcattcatagtgatcatcaatcacttaagtacattagagggtgaagcaagttaaacaagaggcatgcaaaatgggta

SEQ ID NO: 110557 - DNA, 453 bp, Glycine max
  unsure (1)..(453): unsure at all n locations
tactaagcttgctgattacatctccctatttctcaagcaaattcttcttgatatcatcaaaatcttcatgatttacattctccccctttntgatgatgacaaccacctgtaggttaggagcaacaacaaagaaaatatctatttgcatatagtttactcccccttggttttacaatgattgcttatatgagacaattgaagatttcatatttttcatatataaaaagttgtctcataaaacaatagataatttttcttactattttatcttttatctttctctccccctttgtcaacatcaaaaacaaatcatgaatagaaaggagaaagatgttaccacttgttgcaatgtatgagaatcaagtgataccaaaaggcattaaaacaatcattcaatattaatcaagcaaaaacaagtacaataacacatcaatcaaacacaatcaatcatca

SEQ ID NO: 110558 - DNA, 449 bp, Glycine max
  unsure (1)..(449): unsure at all n locations
ggttcttgattnttcctcagttctttaacaagctgtgaacaatatacttggccttcatttaactgtctttgggcttggcggccacgctcaacaaagtactttcgacacctattgtatgttgatttcaccaatgttgttatgggaatgttgcgacaatcctttaaaaccttattgatacattctgagaggttcgttgtcatgtggccatatcgacgtccttctctatcataagccatcgtccatttttcctttgagatgcgatcaatccatgttgttattgctggactcagttcacgaaatttttctaaattttgatcaaaaatgtgcttgcaaggagtgtaggctgcataaaattagttatgaataacaattttaagtaaaaatgaaagtaaaataaacatgaccatcaaatatgaaatcttacccaatttcttcaacatttctttttg

SEQ ID NO: 110559 - DNA, 449 bp, Glycine max
  unsure (1)..(449): unsure at all n locations
tgcactgaacttggcggagctntccttgtagtgcttttgatctttctaaattcctcaaaagggagtntctctcttctcatactttgatgactttgacactttcttttcatggattttgttggaaagaaaccatctatgtgactatgtctttcttccaaactagatcatagcgattgcagaagtttagagtaattattggcttttctatcaaatggacgtaaatttttttgtttttttagtttgtattgttcattttatattaatgtattgcgtcgnttttaatttaataattatttttattattaatttattagacgttgttaatagtaaattcctttatacaaaataaataatattatttcataaattataagttaatattagtaataaaatattttaatatttattttaaaattttagtttttaaaatataagtatctaaaataaaa

SEQ ID NO: 110560 - DNA, 463 bp, Glycine max
  unsure (1)..(463): unsure at all n locations
tatcacggacctatgaaactcagcttaggacaatggatggcttcaggtatgaatgttgatagcatatctttcggtctcaattaaggtgggatggagatgggtcccttattttctgttatctgcaaaggttcaagtgatggaactgtccgtatctgggaggttgaaactggcagatgtcttangcggtgggaggttggtgaatctgttagctgtgttgcttggaatcctctgcccaatattcatcttctggcggtttctgtgtaagtctaattttattttctataaaggtccatatattttttgttctataaaatatatatggctggattgtgaaaataaatccatggtaaatctttgatttaggggccaagatgtacttctacttaacacttgtttgggggatgacgaagagcagaaacagattaaggagcttctctgggttgactcatctacagcattggat

SEQ ID NO: 110561 - DNA, 320 bp, Glycine max
  unsure (1)..(320): unsure at all n locations
tctgcacgttaaacggatcatctagagaccggaactcatatacccctctactttataacgactncagtcaagtaattagaaaataactgaaaggcaactggtacaagcagtcaaactctccaattaccacatcttcagcattcttggtagtagtttttgaccataacttatcttaagccttttttatccggaatcaaagatgatattaaaatagcatgttngatcaatcgacttagaatggttaatagtttattttaagcttgatcgcatttattaataatattcatcttttggatttatntataaaaaaaataacaccc

SEQ ID NO: 110562 - DNA, 441 bp, Glycine max
tattaattattttaaggcttaaatatatatgtagttcttgatatttataataattatttttatagtccttaaaaataatatttttattagtcttcaaattttttaaaatttacttttaatccctcttaattcaatgtatttgtagtttcacaaattacaaggatttttaaccgccaatttttttttatattttttttagaaaattgacaattctaaaccgatgaaatatttaactcgtattgtttgatgacctctttttacatatttgttttttggttttaaagaagaaaaagaaaaagatagatgtataattgtcataaattttttttacaaattattattgttttaaattgtcacaaatcattttaaataaattagtttttttctaaattatgacagtaacaaattatcacaaattgtaacaccattaacaaaagaatg

SEQ ID NO: 110563 - DNA, 191 bp, Glycine max
aatgctttattgatgataaatatataaatagtggaatttttgctataatatgaatagggaaaattgtgaataatattaaaatttattctatgaaaatgataaaaactttacaatatttccactattttttgttatcttaaaataactgataaattccttattctacttggagcttttggggatcctaacta

SEQ ID NO: 110564 - DNA, 436 bp, Glycine max
  unsure (1)..(436): unsure at all n locations
tganaagtatataagatctgctggaatgcgtgattcctgcgttttgtattgcttcttaaattgggcaaatacttgttggaccgtttctgggaatatctctgggattggtccaaagaagtcccactattgcaaaaaccaattgggaaaattgtaaattgtattggtcttgaaatatatcaaccatgaatgctcgaagcgggtattttggtgcctaaacaccttattccaagcatcaacgtaatcccaataggtataacctaccgaatcaaatgggactgaaaatctctttcctttgttcaagtccgaaccaaagtgtcttggttgaagaacttttaatatttggatctgcgagtgggtgtttaatgtttggactcttggatctttgaaatgtgtgatagatactgagtttgaatctaccaaaatcaattcataaaaa

SEQ ID NO: 110565 - DNA, 313 bp, Glycine max
ctgcagctgccctgtttcgacgacggccaaagcttgaatctgtcatgattttctcttcgtgactcttgggactacaactatctatgggcgtattgacgtcccaatgtaaacaggtttaaacacttggctctgttcccatctactggtcgtacgtacttgactctaatgtcttaacgaccaccaatacgtctataggtgctataatcaaagctctgcttggcctatgccacccacctcttgtcactgagtcattcctggatgatgcctatcaacgcacaatgtaagcgcagctgtccctttcctgtgaaggata

SEQ ID NO: 110566 - DNA, 434 bp, Glycine max
  unsure (1)..(434): unsure at all n locations
tcttgataactgtatcatatatgttctcatttatttctctaagcttttagctnttggttttaagttgtcagttagacggttataactgacatctctccttgaagagcttctactttatattaggggttgtaatagtctaacagaagctcatcagttttgtacattttcaataaagtttcagttcagaattctctcttaaattacttcaataagcatttattcaattggcccatatcacgtgaacacttacgccataattttgaccatgaaacttttcggaaaaagctgagaagagcttattttgataagttacgcaaagaagctaaaaatggaagcttatgagagtcacaggctatatttataagttcaaataggctcttctaatgctttcttaatataaaaccatttatgtgtcttcaccttatagcttaagc

SEQ ID NO: 110567 - DNA, 168 bp, Glycine max
aatctacagggctgtgctctgttaaatgatttaaaatcttttttaattgcctctttccttgtgatagtaaaaatacctgctgatactcagtttattactacaaaaatggtaagctacactgttgatcttataaatgggattgcatttatcttctggttatttatggag

SEQ ID NO: 110568 - DNA, 440 bp, Glycine max
cgccatcaagggggtcaaatggtggtgcaggttctgattattctgtccatgagttactacctgggactaaacatcatagccaggttcagaaaattatgcctgattctgctggcattgcttctgatgaaaagaaagaaagaagttttcttagaccgaaaggtgatacaaataatgttgtgataaaacaagtagagaggaaacgtagagctgtttgcctttttgatgatgacgacgacgacaaacctaaaactcctgttcatggaggagctgcaaaaaatatgatatcgtcttctgtttcagaggtcaagaagagaaacattgtacactcagagaagtctgatgttgttcagctggctcacagaaattccagtgaacttgaggacacccatttgaaagagccgtcttcacaattacatgatgaccgcttgtcaattcagcag

SEQ ID NO: 110569 - DNA, 248 bp, Glycine max
tcttccttgactgcggctatacggtcacttttttattaatttaggttttctttaggtttttataagtgcttttctctttgaggagatctcagtgtaagatgtattgtcttcaagcccagtacggataatccttgattttcatttgacatgttgtaaaaatgttccctgacctaatctcatagatattgctgctgagtatgaattgaatacgccggctctttgggagtgggtatgtttgcaagaaagaa

SEQ ID NO: 110570 - DNA, 353 bp, Glycine max
  unsure (1)..(353): unsure at all n locations
tatctntcgttggggaagccttcagggacagagtgttattatctatttcaggaattacttttggaatgtcattcaataaacgtgattgctccatgggggtctaaaccttaatttttggatccatgtacttcaaaaagtgtttggaaatttagtcaaggcccaaactgccattctacagttttattaaactcataccgaataataccaaatgtatcaaaattcaagccgtaataacagatttcagcttattttacaactctcccacttttaagtaattaagagatagatatgcttgatcacaccattgaatggacaatccataatactttggccattacctactattctgaggc

SEQ ID NO: 110571 - DNA, 369 bp, Glycine max
  unsure (1)..(369): unsure at all n locations
gtattcagatacttgaatagtgaaaaatgttcgtgagaaatcagccaaccttcgtacattcgaatgttcatgggattccgaaacttcaacgtctcacgtcttgtcgtctcgcgtcttcgcttaaccatagtccgaacgactttcatcttcttgaccttgggcctattgntcactctttatttattattacttcgaccctttgcggcttagcttgctagtcttttccctataaaaataataattcacgacgttgatgaaatcgtatttgtaaagaatcacgtcgctgcgatcactgaacaaagagaaaatattatataaatttttgtaataataaaacatgacgttgtggattctttatcatgtatacag

SEQ ID NO: 110572 - DNA, 258 bp, Glycine max
  unsure (1)..(258): unsure at all n locations
ggctgtttacagacgctttccgctgtccggctaggtaaggacgacgacctaatggtagtgaccctagcctccttttggtccgtcncaagatctgaagtngaaacacgagggtggcaatctcgaccgcgtcattgtcttacctcgagttggttctgctggtttaactttgtctctaccccagaaggtagcttgaagaggatcctgccccggtttaacaccacaatattccatcctatgcgtatgcatgaatgttttcaa

SEQ ID NO: 110573 - DNA, 420 bp, Glycine max
  unsure (1)..(420): unsure at all n locations
tctntgggacctcggacaagcaattaactcctctgtcagaaccttgttatgtgctcgcgactggtctctgtcttcccttcgcaacttgagttcactattgctaccccatagagctccgcgaaatttgttctggccatactcttccttgcgagccctcttggtctgttgttcaagggctcttgcggtaattgcattctcctcccgtaacccggctcactccttccggatgtgtgttgcggccaacttgaacttctccttggccaatttcgcctttcctaactcggttttgagagcttggacttcttcggcctcttccggtgctttaaaactctcttcgctgacgactcttaacttggcgagccaatctaaacctcgtatatgaactttcagccattcgtggtacccaccaatgatgccatt

SEQ ID NO: 110574 - DNA, 239 bp, Glycine max
aggtgaaaaggtacgtatatgtgtctcttggaagtatcacttcacagcatctgtatcaacaaaattacatgaagattataagcataatttaataaattctaattcaacttatcacaacgtggtgtataatatttgccacctctctgcatttatatatagtattggcttttgtcttctatcctcttcctatttgctatggcttaaaacatgccattggtgtcctccagaaaaagttaatt

SEQ ID NO: 110575 - DNA, 446 bp, Glycine max
  unsure (1)..(446): unsure at all n locations
tagcacacaatcattntcagaaagcatgattgtgtatcacttttgattttataaaaggctacactgtgctttttggagggagttcatctagggcatgctttgaagcaaaaatatccactcgggagatcttttcttccatttctttgtttcattntcttgttttaagcctctgatgactatgagagactaacttactcactgttgggggcttgagtaccaaagactctgtaatgtaatgatttttactatttatttaatgttattctagtattattgcttcctttatttgtttattgctctgtttatggtttgatcacctatatacatatatattataggattttagtnattggaatttatttttactttaagagctgaaaggaacttctaagtaaccaatgtccaaggatgaaatgatgttagccttatttatgcatctttattct

SEQ ID NO: 110576 - DNA, 448 bp, Glycine max
  unsure (1)..(448): unsure at all n locations
nttagttgaatgaattttcttctcaaatgtgaaaatgtaaacctcttgattctttnttttttctctttnttaacaatcacaagtgtgtgtgtgtgttccatttcaaaatccaaactcaaaagaaaaattagtccttccttgatccacatgggctttattgggcttgtaacgtagtcaagggttaagaggactatgaaagaaaaggtcagagaggctcaaagagtatttaagggttacataggataaggaccttgagcgccttgctcacactgttattcatttcaactttttgggttgggctctactccatttgtcttatacgttgaccatcattacacttttgtgccttccttgtgaaatttggagaacttttgtctctttttacttcactcacctttggcaaatttgttgtctttaacatcattgnggcccaacctagagcttagta

SEQ ID NO: 110577 - DNA, 230 bp, Glycine max
gcgttccaatcggtaccagaactgaaaaatgcattataccacttttataccacatatttgtacaaagccctacaatattggacacgctatgtacctaccacagacctaccgaaaataaaggtgatgataactttgtgattaaaagcatcaattaaattgtgaatgaacactaagcgttactaaattagagaacaagagaactcctattattttgttttgaagttgttgac

SEQ ID NO: 110578 - DNA, 169 bp, Glycine max
ttgtctcatatatatttgaatctactgggtatgtattacgttatactctatctggtctgttaaaaaactaagtgatcaccagtgaataaccattttgatgattcttctttatctctgtgagaggtgtcatgtcatgaagatgaagctactgcacatgtattatcacctg

SEQ ID NO: 110579 - DNA, 434 bp, Glycine max
tctgaaaaggaactgaattgaattattaaattagccttgtttattaatcaacatccattaattatgctaaacaaaataatttacaattgtcgtaattgaatgtttagttaatgtttggggtggaaaaataattgaattcagttttaatacattatcagtgcaattttttttaaggaaagtgtaaatgtttttataccgttaaataatttcaaatcatattaaatatcgattttaaagtaatttttgtaatttttttgataaattattttaaaatttagttattcggcaatacataattaaataatgtaaaaaatatttatatggtaagtgtatataaagtttaaattggaagttaaagttgcttatttgacacattaacccaacgtacatacatctttttcacatgagaaattaaattgcacagatgttctatc

SEQ ID NO: 110580 - DNA, 51 bp, Glycine max
caccttgagtggtattttttttaaacccttttaaagaattatcttataatc

SEQ ID NO: 110581 - DNA, 446 bp, Glycine max
  unsure (1)..(446): unsure at all n locations
nttgcaaaatagaagaagataaatgacatgagtaacaaaaaccataattgtaatattagaaaaatattataaaaagttgctatatgaataatacaacacttaaacctatgatttcatcataatgtaaaattctatatttttcaaataaattttgaataagtctatttcaagatttttttaaaaaagggtttagtagtattacctcaatgattatatttttgaataagtctatttttcattttaacataatcatatcatttacaaacaacaatacgattatatattaaaaaaataaaatatttattaattttaccgataactaattttatatgttataaaaattaattttatcaaaaaatttaattaatcacctataatcattcattttatgatttggatcctttatagattctttcacttcttcatgtgtttgtggcaaaatattt

SEQ ID NO: 110582 - DNA, 345 bp, Glycine max
  unsure (1)..(345): unsure at all n locations
catgtgatactcagtttntgaaaaacttttaatacttatcttaatacagattctcttgattcttgaatattgatcttgattcttggaacttgaatcttgaaactcgattctttgattcttaaaatcaacattctcttaaccttgaagtgttcttgattcaatcttgaactcattctttgattcttgagatcatcatcttgtatcatgaagtgtcttgcctttgacatttgcatcaccttgtataatctgattatatgaactgctttaaatctcccttttgagatacactctgaatcaaaaccacccaccaccactttctagcacactacataattatttcccttg

SEQ ID NO: 110583 - DNA, 440 bp, Glycine max
tcttatccaaggttcatcttggtggtgaagctccttcttccattcttattccttaatggatggcgccgcctcttacctcttctcctttgtattccgctgcatctccatggtggaaaatcaccattaaaggacctcattgaagctcaaagatccagcctccatagaagctccacaagcaagcttccatcaagtggtaatcagagcataagagcttcaagtaggtgctccttaaacctccattaatttttttgctttaccttctcttccattgttgtttcttcattttttctccatgtatctcctcacatgtcttgtgataaatgttttaaacatgattctttagagtttccaccgattaaacttgctatagaagctagatttgattttctatggttcaaatattttgttcttgttcttgaactatgaatcgtgttgagttt

SEQ ID NO: 110584 - DNA, 489 bp, Glycine max
  unsure (1)..(489): unsure at all n locations
gctacaagctacctantatagtgacccattctttgtctctcatatagtttgcaggaattgaccncgatagcttattctcttctatatttcgttcatcgaaagacaatcatatgatccctctattctagaaatacaatatcaaatcattaaatatatattagtctgtcaatacacttacagatctaggtctcagtgagatatgctcggcacaaaccattaaactgtatctgaacatcctgtaatgagtagtgaaagaccatacatgtacaatccactgtgatgttcanacatatgtgtaacatactaactgataatatatgtgtagcttgataaataatgctactgttatgattattagtatatggacaatatagattgtcacttatgggtaatacatatgacagctactaactaaataaacgctatacattagtctcattgctaattcattagctctatatagtatattatttcatttacacctattat

SEQ ID NO: 110585 - DNA, 436 bp, Glycine max
  unsure (1)..(436): unsure at all n locations
gggccgcggcgcccncaaccgccgctgctttgcncctcctctgtcgccgcaccgttcctccgccccgggcggccgcctctccctcggctcctccgcccgcaacgctgcgaaggagacggcggcgccggcggtagaggagacattcagcctcatctccggcagtaacccgctcgcgttctcgatgatcattcgcctcgcgcccgacctcgtggaggagatcaggcgcgtggaggcacagggcggcaccgcgcgcgtgaagttcggccccaatccacacaatcccaccggaaacgtaacgcttctcattttgttttcaactttcgattggtttctgcaaggtgttgtctgcaaatcgaactttaacgccattggttattcatctctttttgtttttttagttatgctcatttaagtttaattgaaatagaaaaaaacg

SEQ ID NO: 110586 - DNA, 429 bp, Glycine max
ggaaggcaaactagatgcattggttaactgggtaacccagctggccttgaatcagaaatctgtacctgttgcaagggtttgtggtttgtgctcctttattgaccaccatacagacctttgcccttccatgcagcaaccttgagcaatcgagcagccttaagcttatgctgcaaatatttacaatagacctcctcaacctcagcagcaaaatcaaccacaacagaacaattatgacctctccagcaacagatacaaccctggatggaggaatcaccctaacctcagatggtccagccctcaacaacaacaacagcagcctgctccttccttccaaaatgctgctggcccaagcagaccatacattcctccaccaatccaacaacagcaacaaccccagaaacaaccaacagttgaggcccctccacaacc

SEQ ID NO: 110587 - DNA, 424 bp, Glycine max
  unsure (1)..(424): unsure at all n locations
cttgagttatctatttggtttatggtgtgaaagcttaccctgtctcttgattgcttgcaactagcatgcactggtacatgtgtgcatcatatgctttggttgcaaaatgaaattatggcatgttggttctctggtttaggaagtgtcaaatgaaatttgctagcagttttctgctcaggtgttggagcttttatgcaggctttggagcaatttctgctagcaatttcctctgcatctatacaatttctatgacagtaaggaactattgatatggactaggaccactattaaaccttacagtagcttgtagagtttgaaaaataatcacatgatntaatgtcatgtttcttctctttctcttataatttacacattgttttggagctggagcttcatgtatttgagcttctgattagagagagaa

SEQ ID NO: 110588 - DNA, 421 bp, Glycine max
  unsure (1)..(421): unsure at all n locations
tgacctccaccctatgcaaacccgccacgtgccgcttatagtttgtcctcgtcaacgtagcggcaaggaattacaaccatagaagagacccaccgaagaaactacctctccgaatccaaacttccttcgcttgtagtactgccctaattccccaaattcgggtcttttttttttcttttttttttttgttctttcttctcagatcccggtggccttttccctccctttctcaggaaaattcccccgattttctcgagaaagtgaaacggaattatgagctttcaggacatcgaggccgggcgccccttcggttcgaggcgcgggttgatgaatgggaagcaagaccccacgcaagcggtggctgccggcatanttcagatcaacactgccgtctccaccttccagagactcgtcaacaccc

SEQ ID NO: 110589 - DNA, 444 bp, Glycine max
  unsure (1)..(444): unsure at all n locations
ntcagtttgtttaagaagctatatccaaggcatagggagacagtgataaagaattccatggccaatgcagttcatggtatggaagttggggagtttgctacatttatggcacttggtttgcacttcgtggtcttgcagcagcgagtaaaacttacactaattgtgctgccattcgcaaaaccattaaatttctactttcaacactgaaagaggatggtgggtggggagaaagctatctttcatgcccaaaacaggtttgtcattgaatggtcatggtaaacaggatactatatggtttattaaactgtattaaatatgcttgtatgtatgtctttaacctcatttagtttggatgaatagagcacatattctttatgtgggttcaggacatttcacttctcttcccctcggttttaaattntaatctctattagctaattcact

SEQ ID NO: 110590 - DNA, 377 bp, Glycine max
agaatcggacatccgtgtgagaagatatgagcatatgaatatcactatagctttcgctggacaatttccagtgtcactatatgagatgcgccataaatggacattctagttaaaagttatgacgatttgaatatctccagagctttcgttgtagaactctgagcgtctcgttatgagattcgcctgaatcggacatccgtgtgaaaagatatgaccatttggatatctccagagctttccgtggagaaattccaagcgctaatacttatcatgcccccaaatcatacacccgagtgagacttcatgacgataagatttgaccatcagattccgtcgagaacttccgagcgtatcattctagcatatccctgaatcgg

SEQ ID NO: 110591 - DNA, 258 bp, Glycine max
atgatgatgtgtgagggtgcacctctttgaaatactctgccccacatctatgatggacttgacaatagagttgttatttgttatcaacaggtaatgaactagtgctcttgtgatatactaataaaaggtatctctctattaagacaggtctgctaaaaagatctagcctccgtagaatgatctatacatttaagttgcatttttctgaacatatatgagacgtcttgaagcagaagttactacactctcacccatttt

SEQ ID NO: 110592 - DNA, 441 bp, Glycine max
agatcttgagccggctaagaacgccgcaagttgggacttctgtttgagaaatataaaagtctctggattgactactttgagaagttctggatgagattgaaaacaccatttcacgaaggcatgcctctgtagtgatgaaaattggtttgttctttcagttttactgtaacgatattgtcataaaaaaatccatgacagagcaaaactggagaaatatttaagatctgttggaattcgtgattcctgataattgaattgttttttgaattgagcaaagccccattgaacctgctctggaaagatctctggtattgggccaaagaaatcccagcattgaaaaaaccagtttggaaaattatagactgtgttagtcttgaaatatatcagccatgagtgcttgctacgggtggtttggtgccaaaatgtcttggtccaagcatc

SEQ ID NO: 110593 - DNA, 447 bp, Glycine max
attctatgcgcccttaggggtccattcttgctttgtttgtttttctcttcattcatctactactggggatctttcttttctgttttaagcaagtttcaaccgaccgtttaaattgtaatctcacttaatcaatgtttaaatgaatttcaaccgattgtttgtgttcgaatctcctctaatcacctttaaaataaaattcaaccaatcgtttgtgctgtaaccttgggtaatcatcaaaataagcttcaaccggccatttacttcaaatggtctcttttaatgggttgaacaataatcaagtgaaaccaaagtttaaatcaactcataaacaagctttttgccataggaaaatcactcgacttccgtcaaaggttccacgccttgaacgggtctttttatctttatacggttaaaatgaatctctaaaagtatgaaatctatgctacc

SEQ ID NO: 110594 - DNA, 293 bp, Glycine max
  unsure (1)..(293): unsure at all n locations
aaaacaaaatggtacaaaaataagttctgaaaatggcaaacactgaactacgtgatctttcatctcattcctcaagcgcgtgatcatttgatggtaagacacctgtggcaccattcaccatgtgatggcgacataacggatggaaaatctggggatatggttcaggagcaggaaaaaaaacctaatatcttatcagcaacacgtgaaatatgggggttaaaggttaatgacngaaagaaggcagtttatggtgaattctcctaggnggatcagagatatgtatattgctgcta

SEQ ID NO: 110595 - DNA, 438 bp, Glycine max
  unsure (1)..(438): unsure at all n locations
taaacgataacataaggacaaaggtagttcacctttnttctattattcaaggctagatctaggctttatcagtgttggttttcaaaaaataacggtggatttgagaactaggggaaaaaaggaattcaaaacatgtagtttttttaaaaaaggaggagtttcttttttcgacgcggcggcgccgccacccatggccggccagccactgcgccggtaaacagcttccggcggtgtgtggttagagagagaagagagcttctgagcgtttctttagagagaggaagaagttggatttatgttattttagggtttattttctaatttatactgctgccatgaccaatactatggtgcacgcggatctctgtgtccccatggaccatcagggttgaaccgttagatcctagatctaacggccaattgtatcccctgttttga

SEQ ID NO: 110596 - DNA, 252 bp, Glycine max
  unsure (1)..(252): unsure at all n locations
cacattaagatatcagaatctgaacttcttagtaaaacttccttctctaaagaatgatctaactctggtttcatgagtgagggtcttggccttttctttctttcaatgtatctatcataatcacacanattactctttccatcactaaccacatcttgtgattcaaaataactagtagaatcttgatgctttttggcngatattccgaaccaaatcaaacacaagttcggatcctattacttgtgaaaaaaa

SEQ ID NO: 110597 - DNA, 448 bp, Glycine max
  unsure (1)..(448): unsure at all n locations
cttaaaactaagctatcctacacactgttctctatggcataattttaatgaattcttcanataaacaaccaacacaagcctcaacttttgcatttcatctcattccatacaatcacaaatacacaaaatgaatctgaaggactttcttggcttgtaatgaggttgggctacaaacaattcatggtttttctaggatgcaaaacttaggttctaggagagcattcatccttagatcacctttttctttagttcccagcttttattgatatgccacaagcataatagacattcagctcaagcaacaacacacaagtttacttattcttggaattttcaacttcttttttttttagcagcttatgattactgctactagatatggttttctgtggttgtttgctttctttcctgcaatcaaaatcacccaaacacacttccccaaatttgg

SEQ ID NO: 110598 - DNA, 289 bp, Glycine max
  unsure (1)..(289): unsure at all n locations
atatacnatagtgtcatatctgatcaagaactcatcanatttcagataccacattcgagagctttgcttcagtccatacaaagattttttcaacaagcacacctggttcgtcccttcttcanaaccttcaggctggntcatgtaaatgggttcctttagatntccatgaagaanagctgtttaacatctagctgtcaagttccaatcatactgattaccacaccaagtatgattcttattgaacaatgcttcacaactggtgaaanaatctcattgtaatcaattcctt

SEQ ID NO: 110599 - DNA, 461 bp, Glycine max
ctataaaactcagcttcctataagctgaagccatttatcaataaacacaagttgagttttattcagaaaattagagtttatctcttttatcttagggagagtgattctcctaaattcttgagtgattcaagaacaccctgactgtatcaaaggactttcacaacctttgtgtgttgccctcgccggaaagagtgattctttccttcctttcatcttcaaccttgttctttcaaatcataattctagaaaatccacttctgcccagaattatctcgtggccataactcccattttacgcactcaaattaagtgattcttgagcctaaattgaatttcaaaacgagacctttcaccttgttttggaatcacctcatttggagtcccgtagcttgagttattgccatttctatatttctgtccagccaccacttatacctacgtttaccatcccattcatccat

SEQ ID NO: 110600 - DNA, 449 bp, Glycine max
tctagattagtgtaccagatgaagtgcatcaacaacttttcattcctagaatgcgcccccatcttgcgacaatacattttgagatggttcttaggacaagtcgtccctttgtacctaccgaaatcaggtacattgaattttggggggatgacgacgtccggtactaagcaaagatcagccatgtccgtgaacggatagtcgccaaagccttcaacagctctcaatctctcttcgatgagatcgagtttccttttttcttccgctgccgggggtggcccttctgcggacaagaatattggctgtgttaggaggtttcgaggttctcccgtgaggttgggctgaggtagtgtgttgggtgccggcccatcgacggggaccggggagtaggaattgatgtctccttgggcatgctctctacgatcctcgtgaacctcgtccgactgtcgagg

SEQ ID NO: 110601 - DNA, 194 bp, Glycine max
ggttctttcggcaaatcaacactactaaatttgattccttctatcaacgtaagtaccctgaattttgtccatccagatcagtaacacgacttgtaccatgaggctcttggcagaaggcttctggtatgacaaagactttggacattggagtctctgtaaaacagaggctctggacttgaagattcagtaaaata

SEQ ID NO: 110602 - DNA, 441 bp, Glycine max
  unsure (1)..(441): unsure at all n locations
tgtcgctggagctgacccatcaactaccctaactccttatagctggtgacatctangcccttaatcttgacttgatagaatctttatccaatttgatgtgtccccatcatttacctaaaaaggggtgaatcaaggctctaatatgaatgatgcaatgcacatgcatgaaacgaaaagaaaagcaagtggtaatttacatatacaagaccgaaaaagatccatctttttaatactacgttctaggcattgcggcgccccaacgtatgcattaaaaagtgacgcgttactctaaagagacaagatatcactagatatacaacaaaactataatttatgtgctattcgcataagaatgcatgagaacaaatggcacagagcgtgcttgctccatgcncctatttggggacctataagataatatctaggggtctctaataacta

SEQ ID NO: 110603 - DNA, 88 bp, Glycine max
cgcttccctcacgagtagtgcggctaatacatataggtgctcgcctaagaaccgcctcttatgcacacttggccgccaatttgtaagt

SEQ ID NO: 110604 - DNA, 457 bp, Glycine max
  unsure (1)..(457): unsure at all n locations
ctatgatactcagctgcatgtgttgagtgacatccaccttntaagtanttgacgatatagaaatattntcaaatagaaacaaacttatacaaataattgattcccagatttctaaagatgtagaaaaaagtattaaaaaaacaaaaaacattttttagattttttaacgtgtacattattttatatatcatttggttaaaaaattttatacttgtattatttgggtcatttttttgtattaaataggtaaaaaattctactcatgtaaaacacaaacttttgtaagttttgttatttgaaataaaaaaatttattgggtcccatatctcatttaatgtttgtctcttgatattggagttttaaaaaaaaatcatcggtttttggataattacttgacagtttggtggtttgcttgctggatttcgtttgcatggctcgcatttttgtgattntggat

SEQ ID NO: 110605 - DNA, 441 bp, Glycine max
  unsure (1)..(441): unsure at all n locations
tactcaagcttcaagaacctctaatgcgtgcgcagcctccacgcgtaatgctcgtggtctacctatgctctgnggaggagtcctagcataactcatgacacgatatatatttttataaagaaaattatatcacctctcacatactcacataatataaaacctctatgatcgattcttgttggtcactaacgttgttacttgttagatgtcaagtggcatgcatctaagctgcgacatctgtcacattattttggcattgaatctatatatactcgagactgaaaatgttactctaatactcacaccccacaaacttataaagtacaactattgtaataaaaatatattgctacaaaataatttttcttccaaatattcagatttcactaattcaatcaatctaactcatttcatgattggattggattgaattgaattgag

SEQ ID NO: 110606 - DNA, 453 bp, Glycine max
  unsure (1)..(453): unsure at all n locations
tggcgttaaattactaccacgttttctcccatgttaccaaaatatataaattgctactaccttntacaaatcaaatagtatgaagtaatttgccccacgcagttgtacacgactcatccaaataaaatatttggaacgtctattagactattactctntaacagtctactgtttattttaacggtttcattaataagtcagattaaaaaataatttgtcaaattataattttggatgacgcttacgtgacaaagtggacgtttgatattgaaaaaattaaaattacttatttaaaaaaatataagaactaaacgtcttcatttagaaataaaagaatcaaaatctcagatttaaaattaatgtggaaccaaaattaataaataaaaatatataaatagtattaaatattttatttttcggtaaaaacttttctgttaattctgtattcattat

SEQ ID NO: 110607 - DNA, 446 bp, Glycine max
ggttaaagaaaaataaaaaaagtaaccaaatattgaccttagttgttattcagagagcaatcaagaacatcttatgataccttgtggactttgtataattggtaataatttgacctatgctactatttacaatggtagctggagccatgaacatttgggcaatttcaaaaacttgctcactttctattatagtaccaatgcctccaattgctttcacaacagcttcactgccccaagtacttaatctacagtatacaagttgtcctttcaccttttttggctctaaggagtcttcatagcataatctgtcaatgcattgaaatggtactttgttaatatggaaagcttaactaggtgttgtcaaataaacaaaaagaaaattacttagcattttccttgcttccaaattgtataatcattccttatcatgagtggtccataaccac

SEQ ID NO: 110608 - DNA, 150 bp, Glycine max
tctttccgcttggaaggatgttttgcgggactttttcaattcacgtgcgatggaattatgtatatggttattcaatatcacgtacagttaatacagttatgacagttggtgtcggaaaaagtcattgagacattttactcaaattttttt

SEQ ID NO: 110609 - DNA, 445 bp, Glycine max
  unsure (1)..(445): unsure at all n locations
ntgagaacctgaacatacttctccacggtgctaaatgaaagttattttataaaactaagcgaaacgggaaattaaacttataccaagaaaatgttccatggagaaaacctctatgaaaatggccatgtttcaaaatgctcctggaagcattatgaaacacatgaggttgttcaaaataatctttctcatagtgtattccaatgtacggagtaatgaatcttgaatatgcataagtatacctaagttctaactctaaagtgaatgagctttctcataaatatttgtggctataattttgtgtgaaatttttattttatatttttcttttatccctaaatgtgtaattcgctaataaatgtgttcctgaaagatgaaaatacaaaatttagtcttggaagtgtaaaaagtgcaacaaatatatttgaccgcttaattttgttggtca

SEQ ID NO: 110610 - DNA, 144 bp, Glycine max
tatcttatatgggataagatcttctttcgaaaatactaaaggccaatatagatgccattcaaactgatgtctgactctgttgtgttgtgttcctatcaccccaatttaatctaactaatagagattctctatacttctctttta

SEQ ID NO: 110611 - DNA, 456 bp, Glycine max
  unsure (1)..(456): unsure at all n locations
gacctataaatctcagcttggaagggagaccttgcataccttgagttcctgcgattattaaacttagcaacggagaggctcaccaaggatgaaccttgggtttaacgagctttggaccagggacgcattcgtgttgggttttggagaggcgaaccttgggtttgtccagcctttggagaagcgagactcaccaagggtgtaccttgggtttgacaagcctttagagaagcgagactcaccaagggtggaccttgggttttatgagcctttggagaagcgagactcatcaagggaaaaccttgggtttgaggagcctgtgaatatgcgaccaggaatgcctccatcctgngtcttttcggggctcaccaagggcagaccttgggtttgatgagcctttggagaaacaagactcacaaagggccgaccttgggtttgacgagcatgcgaagatgcgac

SEQ ID NO: 110612 - DNA, 300 bp, Glycine max
tgcatctacctcgacaaaaataaggaattcatcaaaagagaagaaattcatcaagatcatataaaaaagaatcccataagatgggagcaagaaaaaaaatccattaaatgggaagtaaagaaaaaatgagaactcttcagatcagaacaaaaattcgaagcttgacgacatttacataatgtccataaaaaagagaccactaggttctatacacactctcattgcaaaaacccaattacacccaccaactaaactcagactttctaccatttttgaatgagcctattttgtatgactctc

SEQ ID NO: 110613 - DNA, 434 bp, Glycine max
  unsure (1)..(434): unsure at all n locations
tgcctcanagaggtccaggaaggacaaggcggccgaatgaactatttccgccccggagtatgacagtcaccgctttaggagcgttgcacaccagcagcgcttcgaagccatcaagggatggtcgtttctccgggagcgacgcgtccagctcagggacgatgagtatactgattttcaggaggaaatagggcgccggcggtgggcaccactggttactcctatggccaagtttgatccagaaatagtccttgaattttacgccaatgcttggccaacagaggaaggcgtgcgtgacatgagatcctgggttaggggtcagtggatcccgttcgatgccgacgctatcagccagctcctgggatatccgatggtattggaagagggccaggaatgcaagtatggccagaggaggaaccggtctgatgggttcgatg

SEQ ID NO: 110614 - DNA, 451 bp, Glycine max
tccatcacctttcaagtgttggacctttcagaacaaactcatatttgtcatttctcaagttatcatgcaatttatttattcatgcataaatttaaactactgaaattaaattgctgaaatcaaaatgcataaaaataacacaactatcctaaaaaaaaaacaaaatgcgattaactaaaagaaagataaagtaagaaatcctgggttgcctcccagtaagcgcttctttaatgtcattagcttgacgagtcaaatgccttcaaggtggcatgaaggtcacgtagaacacatcttccttgcattctcgcctcttagttagagacgccatgaaactcgtgtattctggaagcaccttccacgttattgcaagagaagtggtggtgatcaaggaaagaatgacacttaaggctttctcatgttctccatgtctttctttcttgacaataagttg

SEQ ID NO: 110615 - DNA, 441 bp, Glycine max
  unsure (1)..(441): unsure at all n locations
ntgagcaaattcaaatgacaataactnttcactcggttctctgtctgagtcccgtaatataccgagacgctcgaaattgattatcgaagctcttagcaaattcaaacgacaataacgttttactcggatgtctgattgagtcccgtaatatatcgcgatgctcgaaatggaataccgaagctctgagcaaattcaaacgacaataactttttactcagatgtctgattgagtccggtaatatatcaagacgctcgaaattgattatcgaagctctgagcaaattcaaacgacaataacttttcactcggatgtctgactgagtcccgttatataccgagacgctcgaaatagattatcgaagctcttagcaaaattaaacgacaataacgtcttactcggatgtctgattgagtcccgtaatatatcgagacgctcgaaat

SEQ ID NO: 110616 - DNA, 238 bp, Glycine max
  unsure (1)..(238): unsure at all n locations
tatgcangttgaaagtcttggaggaaagaggtatgcctatgttgttgtggatgatttctccacatttacctgtgtaatatttatcagagagaaatcagacacctttgaagtattcaaagagttgagtctaagacttcaaagagagaaagactgtgtcatcaagagaatcatgagtgaccatggcagagaatttgaaacagcagttcactgaattctgacatctgaagcatcactcatg

SEQ ID NO: 110617 - DNA, 448 bp, Glycine max
  unsure (1)..(448): unsure at all n locations
tgatcttttagttntntatctntaatctttaatccctgaactatctattcaagtttgtaattgaaacgacaataacttttgactcggatgtccgtatgtgtcccgtaggatatcgagacgctcgtaattgaaaacggaagctctaagaaaaatctaacgacaataacttttaacacggatgtctgatagagccctgtaatatatcaacacgctcgaaattgaaaacggaacctctaagaaaagtcaaatgacaataacttttgactcggatgtccgatatagtctcgtaatatatcgagacgctcgtaattgaaaacagaagctctgagcaaattgaaacgacaagaacttttgacacggatgtccgattgagtcccgtatgatatggagacgctcataattgaaaacggaagctctgagaaaaatccaacgacaataacttttactc

SEQ ID NO: 110618 - DNA, 372 bp, Glycine max
  unsure (1)..(372): unsure at all n locations
atcacaatgacattttaacatcaacacaatgtcatctccaggtcattgtcaacatcaacatcatctcatctcaatgtcattctcaacatcaacattatctcatctcaatgtcattccaacatcaacatcattatatctcaatgtcattctcaacatcaacatcatctcatctcaatgacattatcaacaacaacaacatcatctatatcaacataatcattaataacaacatgatctcgtatcaatattatcataaacaccaacatncggtcgatcaattattattaatatcatcttcaatatcaacatcattctctatcaacattatcataaacatcaacgtcacctcatatcaattaatgtcattgtcat

SEQ ID NO: 110619 - DNA, 442 bp, Glycine max
  unsure (1)..(442): unsure at all n locations
ntctagctnttcattggtatattatgatctccttttgttgctctaaattgtgggaatgtgctcaaatatgtggggcgattttggtttgttttcttgcttgattaggttgaattaggggtttgtatgggatggccctagacctataatgcattttgaaacaatgggacatgccacattgttcctgttctcttgctattgatgcctaaacgcgcgcccaccaagtgttcggtgaaatgcctcaatggcattagcgcgtgacttttataaggaaacaacccatggggcattttggtttgcacatattttctattttttgggacatgcattcattcccgaaaaaggctagagtgattgccccacatatatcctaggcctaggaaccaaagtttttatgcaaaagaacacaagaggaggtgcacgttgggtaaagttaccctttttg

SEQ ID NO: 110620 - DNA, 444 bp, Glycine max
  unsure (1)..(444): unsure at all n locations
tggtcgtctntctcctttntcacgtggcgatgctgtctctatacctcccaaaggtcgcgtaaaacctgataagaatcgacgccattccatatcctaagaataagatcgttatgtctgcagggtatacaagttctaatgttctatctttgttttcttaggcttgtaaacaggactagttttacttcactgttatacttgtgtagattatatttaattatgcttaagtaaataataactttaatatgtaatttgtaaaggttggtaaaaaccaaaagtaatgcagaatttctgattgtgttgcatcctaaggtgacatagatgctctataattacaagaataatagaatcaataatttatcatctgttatcattggaaaaatcattgctgttcttatcaaccatgtgcacaaaacataaatcagtataaaatcttacatgacagca

SEQ ID NO: 110621 - DNA, 322 bp, Glycine max
aacgggtcttatcttctcttattgtgacacggatacattcgtctgtgacatgcgtgtctgttgtctcatattctacacattgaatatactaatcatctacttgctggttcaagagatcaatagagttgctaaataaaaggacacaccctataacattgacaagagagaatgaatactacagtctctatactaccttaaagaacatactttaatctgacccatatagttgttcttttactcaacaacttgatacatatctagattttctcatctaaaaaataggatgagaacttaatctcggcattgataggaatccaatttt

SEQ ID NO: 110622 - DNA, 448 bp, Glycine max
cttctttggacctcgaacaagcaattaactcctctgtcagaactattctatgtgctcgcgactggtctctttcttcccttcgcaacttgagttcactattgctaccccatagagctccgcgaaatttgttctggccatactcttccttgcgagccctcttggtctcttgttcaagggctcttgcggtaattgcattctcctcccgtaacccggcacactccttccgaatgtgtgttgcggccaacttgaacttctccttggcaaatttcgcctttcctaactcgcttttgagagcttggacttcttcgtcctcttccggtgcttcaaaactctcttcgctgacgacttttaacttggcgagccaatctaaacctcgtatatgaactttcagccattcgtggtacccaccaatgatgccattacgaatgcctctaagttcttgatcttt

SEQ ID NO: 110623 - DNA, 423 bp, Glycine max
  unsure (1)..(423): unsure at all n locations
tgcaattgagcaacggaagctctcgagaaattcaaatggtcattacttttcactcggaagatcgattcacgcgcatcacatatagagacgctcgaaattgaacaactgaagctctcgagatattcaaatggtcataacttttaactcggaggtccgattctcgcacataatatatcgagacgtccgaaattgaacaacggaagctcttgagaaactcaaatggtcattgcttttcactcggaggtccagatcacgcgcatcacatatagagccgctcgaaattgaacaacggaagctctcgagataatcaaatggccataacttcttactcagaggtgcgatttacgcacataaaatatcgacacgctcgaaatngaacaaccgaagctcttgacaaattcaaatggtcataacttttcactc

SEQ ID NO: 110624 - DNA, 408 bp, Glycine max
  unsure (1)..(408): unsure at all n locations
gcatttataccttgaatatcttctgtgttctaaacacaagtcgtagctatgtacatagaatcacacattgagtgtgacatttctactgggatctggaaagagggaccatactggcaataaatagccagttattctatagactataataagtagacgcaaattgtgaattacaaagccatcccatacaacacacttacagaatngccaggtttaaattcagtcgaggttcttaaccgcaggacacaaccaaaagcatacggtcgactcagcatccgatacctgaaaagaggacagatcacaacatagtcacccaaagtgatatatgtgaaagtgtgtacacacatatcattgataggtaaagtgctattggtaacacttgtgatttncaactacagtcgagttagttac

SEQ ID NO: 110625 - DNA, 65 bp, Glycine max
tgaatatagtgcctcttgcaaaaagtttcttttgactaacgtgtgactgttaataatgaagtttc

SEQ ID NO: 110626 - DNA, 451 bp, Glycine max
  unsure (1)..(451): unsure at all n locations
ntatcatntatatcaagcttatcttannaaaaagggtaggccataatttgtatgtctagaagattggaattggctaattagaaacaagtggagtggttcaaaaatttcaggtaaagttattttattattttgaacataattttttaataggtttatgtttataatataaaatcatttatactttgatgtaggaaagaagcttgacaaacaaagctaatcgaagcaagtaagaaataaaatcaattattggcacaaaatcaatagtgcaaaaggcatttgaaatggtaatatcttttaatattttatattcattttcttataagttatataataataactcattttttattttgtgattgtttttatatgatatatgaaaggttggtgaaatttataaaggcatcatgcattggattatattatttaatttggtttttactatatttaattt

SEQ ID NO: 110627 - DNA, 156 bp, Glycine max
tataaaagatatcttcctattaagaacaaatggcagaatttcttaatatttccaccattgacaggtaaactccttcttggggaaatgggagatattccatcagactcccagagaatgatgatacaccattgcgttggatgaactgaagctgtatat

SEQ ID NO: 110628 - DNA, 453 bp, Glycine max
  unsure (1)..(453): unsure at all n locations
tctaagcttcaaccttctttagtatggcttagtcatatatcagcgtcttttaagaattcacctttcaagggtcacaaacatatgaatgcttgctggaatgtagatgaaacccgtgagggaattggtctagtgtggatgcaaaaatcacaatgattttctctcttcttctttctctctcaatgatttgtaattggttttctctctcaaatgaatccctctcactatatctcgctctctaaattgactctctctctacttaaatacgtaagacatacgaaccttctcatttgggtttttacttcacataggaagagagcaaaaaaaacccaacatgtgaaatggtagagtggatagagaataatgtgatttcttaaacctccaatgctaacaaaacaacaaagaaaaaatatgatttacactttaaaaaagtaagtattntaccatgtaatttga

SEQ ID NO: 110629 - DNA, 254 bp, Glycine max
ctttggtcacatatcacatacttgctatgttacatggcgtttttccgattcctgtctacacggctatgctatgtgtactaaaccatcacacgatgtatcatgcaactcctatgctttgtttatttataaatctggaatgagatctgctttattatactatcaacatactgtttaattgacagtaacttcacagtaacttcaatatcttcttatatactatatcttgctctacatataatagtccccatatctca

SEQ ID NO: 110630 - DNA, 443 bp, Glycine max
  unsure (1)..(443): unsure at all n locations
tatatagaanatgcaatctatcaatctaatggctaaaagtattatatgataatataatattactttttattaatagatataattagtattgaatttaaaaataaaagaatgactatacattgtgtaaaaagttttactttatcatctagtcacaacctattattgttgacttttataataattactttaaaagtcatattaataataaattattattagatgacaatacaaaatacttttatattgttagtgcatgactattaaattctttaaaaattatttcattctttgttttaatatcatcaaataataatttaattaaatttgtaacattggattaggtcaatggctatgtacttgctaatataattaaactaactactaataattaagtcatttgaatttaattagataagatcaaaactattataaaattcaattat

SEQ ID NO: 110631 - DNA, 321 bp, Glycine max
tgaataacagctttcagagtgccgtcccaccttctccctatttgctttgctacttttatgtaacttatgttctaccagttgtcttagtcttccctggaactaaagaactacccaacaatctacgacacataataaatatctcatgctaccatccacaagcaaattatatcttatatggcatatacatacaacacaaagcaatccgcataacaagctatatctatcctatatctagctatctactaatagatgagcggggtgataacagcgtgagacttctacttggactgtctgatacgtgcatgatctgataatgacaca

SEQ ID NO: 110632 - DNA, 446 bp, Glycine max
  unsure (1)..(446): unsure at all n locations
tataagaacanaatngcctaaatcatttccaaatatgcatgttatttangaagcatgaacaagaattaagccaaggctattgtgcaagcaatcaatggggcaaaacacaccaaaagattatgatgatggatggctcaaattctcacaaaggtaagcttatcactttcaaattgagctttcaaaactatcatgacatgtagaggaaaaacaaggatttcaaatcacacaatgtcaagagacttttattttcagaacaattaccaaagcttgatttgtgagttgattttagccttggtttcactttgattattagtcaattaattcaaggaaactttcaaagaaaaacgtctgattgatttttcttgattattttattatttttttcaagatattttgattattttattattattttgcttttttttgtttaaacgaggttacagcgt

SEQ ID NO: 110633 - DNA, 358 bp, Glycine max
  unsure (1)..(358): unsure at all n locations
cagtcacctgangctgcagcttgctaatccaccaactcggctttgtagtagtatacctgtacgacctaacngcgactctgcagtcaccaataagaacaagtcacaacaggagttgttggcgctgccactatgatctggtggattgaaatacctctgtatcatacatcgtggtatcatacgagtaaatgaaagattaaggcttggatcatacccggtggatcataccaggtatnggactggatcatacattgggaatcataccatgtcctgtctgaatcatacattatgtatcataccggtatttattcatgcaagtggtatcgtttggcctgtatcatactcttgtatcataccaaag

SEQ ID NO: 110634 - DNA, 462 bp, Glycine max
tactacggacctatgaaactcagctttctttggcttccggatgtctcggacttacaaattttctttgatgggtgccaaatacctcgaagtggtcaaacgagggtcgcatcccaacaacggatggtccccggacgaaattagggtttgacatttagttcacataagagcttaagcttccaggatgattggttttcaacaattttaatattagtaattttatcttctaatatcagtttcaaattgttctcctggccttttattttgagtttgatgtcataattttcttgatcacttcagcaactcaaataaaataatggaatctcttaattatatgttaacctcatcagataaaactatatcagaattccatcgtccaacattttgttggataaaaccatattccttggcatttatttttataatcattagactagtcgatccctagaattatccttcacttgc

SEQ ID NO: 110635 - DNA, 398 bp, Glycine max
  unsure (1)..(398): unsure at all n locations
ngagatgaggaagtgtagaagggtgaaacttcctgcttttattctttgaccacagagtggtacctggagatatgtcgcgggggtcaggagaccttggggacgtcaggtggggtgctattgcccaaaaccaagcttgaccaatcccgacccaacccgggcatagtcagtcagtgagaacctgtgatgtacctaagcatgcgagctcctggcagtcaacagataaaaggaacaaagaccacaaagtaaggaggcttgtgtggtggctggctagctgtgaatattgtgtgatatatgggttatggcctctggtaatcgattaacaagggtgggtaatcgatacaaggcttaaaatgaagacggacgcaagatggtctctggtatcgataccacgggtgtat

SEQ ID NO: 110636 - DNA, 280 bp, Glycine max
ttctgtccttgcctgagcgctacacggctcctaagttatttttttgcttatttagcttattattcttaagctcatcttagtctaggggccttgaagaagtacccttagtctcttggcacagaactaggtgccctgagactatgaacactttgatcttgaccgatgtgtatcagcaatgtactattacctgagccttaatttgtgttgtgataatttggtttctactatcctgagagactatttggggcctgctaatatgagcttggttacgaagctaaaa

SEQ ID NO: 110637 - DNA, 441 bp, Glycine max
  unsure (1)..(441): unsure at all n locations
ntaaggatcattcaatcacattggccaacataaaggagggcctacatgtaaattaaataaacaccaagtaccacataaggtgcaatttgtctcaatatgcatgaattagcttagttctcatgttttagtcacacattaataatttgtcttggctaaaattaagtgcttttaattatactaaacagggttaaacattaaataactgtatatcaagtttttcaaacatcaagttcacttaaaccatatcaagaaatctagcactttgttatgattttcatttgctagtttcccctaggctccgacattagtatggatttggtaaaagttgattttagttgtccctaggatgaataaatatggggggaaagtccccatctatctcaagcattgaacatctcgaattggtgaaaacagtactcatacttaaattcgtccaccaca

SEQ ID NO: 110638 - DNA, 441 bp, Glycine max
  unsure (1)..(441): unsure at all n locations
cttctatataagctaaacctagtcactcggatgtgngatttgtttacacaatatatcaaggcgctcgaatatgaacagcggaagctcccgagaaattcgaatggtcataacatttcactcggatgtctgattcgtggacataatatatcgagacgctcaaaattgaacagcggaagctttcgagaaatttgaatggtcatacctttacacacggatgtccgattcggggatataatatatcgagactctcgaaattgaacaatggaagcgcttgagaaattcgaatggtcataacatttcacacggatgtctgattcgtggacataatatatcgagacgctcgaaattgaacagcggaagctttcgagaaatttgaatggtcataccttcttacacggatgtccgatttggggatataatatatcgagactctcgaaattg

SEQ ID NO: 110639 - DNA, 448 bp, Glycine max
  unsure (1)..(448): unsure at all n locations
ataagacactagtccttggccaactntgtttgaactccagggttatttctgtggctactcttaaaaccatatttaattacaacacaaaatcggggttcaatacacatcaaaaacaggttctaaatatagattagaccaattaacaaccaaacaaggctaataagagttacctgatcatgaatgaattattttattttataccactataaacaataataattcccaaatttaaagaagagtaaggaaataatttatttatttttatactaaaaagggggaataatctatgctaagttctaaaagcaaaattaatcaattttattgcaaatatgcaaattctttgtataactgtagtaactcatgaaactaattgtagaagaacagacataagtccaatagcacatgtagtgcaacaaaagatatcatacaaaacaaatgttcacacaac

SEQ ID NO: 110640 - DNA, 373 bp, Glycine max
  unsure (1)..(373): unsure at all n locations
gcttagcaccggctcgctgccttttatctaaacagtatattaataatgtcatacagactactctatagacaagatttaatttttgatcttatctgttactaagaactgtgaatatatatgatttttgcacttagaaaaacgtatgggtttttaggatcatgtatggttacaactatattagttacgatgaactcaatataatatttgataaaataatggatatagtgtgatgattattagaaaaggtatggtgattctttattgcctcctgctctagttagttgcctgcactgcatgtcanttatgttatgtgtctattaatattctataaatgaaaaaagatgccaggtattagtcatactagaataactta

SEQ ID NO: 110641 - DNA, 295 bp, Glycine max
ctcagcttgtcagccctttagcctggataagtgttgtccaggctacttttgcttatttgtcccgagtggacatgctcttggttttgtaggggaggtgtgatgtgcaagttgagggacgtccatgtttctaatgattatgcccttttctgattgttggaggatgcattaaagacaaacattacattttgtcttttgctataggtgtgtgcagcgcacacacaatactctcgtatatgtgtcactcatggagtgggcacgttctgaagacatggtgcatgggtgagtacgggcgtga

SEQ ID NO: 110642 - DNA, 136 bp, Glycine max
ttcgtggttgaagcagattattgcaagagacctcttggtatagagctcccctttttcggcgtttcgatggtgtgctcaccctaatccttaaaatcttgattatatcccctcaatctccctccttaactttccaatt

SEQ ID NO: 110643 - DNA, 455 bp, Glycine max
  unsure (1)..(455): unsure at all n locations
ctanaagattggctaagatnttgttgaaacataagcacttagacaatgaaggaaagctggagttgctgcacatgatgtccaacgttatgtcaaagaataagatcgggctgcacaatgcacaaggcaagataaagtgtcaaatgaagaattgaagctgcaggattcacgatgtcggatacaatgtccaggacatcctgctcgaaaatagtggaattgctaaaagcattgaagctgcaggatccacgatgtcggatacaatgttcaggacatcctgcccgaaaatactggagttgctgaaagcattgaagttgcaggatccgcgatgtcggatacgatgtccaggacatcttgcccgataatactggacatataattctgttatatctttaacagattattgtgcagttagcaagagataagataatctatctttatgaacgaattataagataatt

SEQ ID NO: 110644 - DNA, 383 bp, Glycine max
gtgtggctaatattggatctgttattgtatatattgtacattgtacaatgagctataatgaatgagaatcatttttcttctctatgatcttggctctcgatggtcgaaacaagttgggctacgtcgatggcaacatcccaattcctgcttccagtgatactacaaagcttcgcatgtggaaaagaaacgacaacattgttgtgtcgtggatcttgaattcactcacaaaggaaattagcgcgagtgtcatttactcaacctctgcacccaacatttggaatgatcttgagaaatgtttcaacatcaagaacggacccagaatcttccatttgggaaagaattactcaattgtgttcaggaacgaactcaatcacatctacttc

SEQ ID NO: 110645 - DNA, 439 bp, Glycine max
  unsure (1)..(439): unsure at all n locations
nttaagggcagaggaccttaaattatcttaaggtgtggatatgtngccccctgagagcgaggacgcgtagtcctctaaaggcgagggcgtgcagccctctgaagttcaggacgtgtcgccttttgaaggcgagggagtgtagtcctatgatggcaaggacgtgcaatcctctaaaggtgagggcatgtccccctttgaagatggggaacatgtagtcctctgatggcgaggacgtgtagtcctctaaaggtgaggacgtgtantcctctgaaggtgagggcgtgtagccttacaaaggtgaaggcacatgaccctttgacggcgaggacgtgtagtcctctgaagttgaaggtacatgaccctttgaaggcgaggacgtgtagtcctctgaaggtgaaggtaactagtacccaaggtgagggcgtgtagccctctcaag

SEQ ID NO: 110646 - DNA, 441 bp, Glycine max
  unsure (1)..(441): unsure at all n locations
tgtacctaagcagttccaaatgctccaacctcgttttacatgtatgttatgaaactgcaacagtaccaggatgcattgtacaagtgttcccacttcgaccacccatctggtgaatcttgtgcagattgcaccggtgcaatattgagcttgagagatggtttacataatcaagtggccaacaacaacaacaaccacactgagctagccatatgtgaggtagcagctattgttgctgttgcagctgggaaaccaaacgatcctgtcgttgacaaagtcttacgctgcttgccaccttcagcttcaggatcagacaagagtagtcatctccaccatttttatttcttcattctttttcaagttctaaacatatggagccaaataaaactgacaaaaagttgcaaattttgggtcccaggatcttgtggaaccctngtgagtgtg

SEQ ID NO: 110647 - DNA, 343 bp, Glycine max
gctgccaacttaacgactcattaggtattttatgtgatgtctacagaatagatgatatgataaatgaatttaagataaaaaataccttaatttccaggtttacaaataaaaatcattttataaaataccggtatactacttatgaaaaggtatgtgaatacaagccgtgtctttgttagtctacaacaattcttctctataaaaacgtatatatagagacgaagaagcgatatagattatctgtgctgactatctttgcgcttcactggaaactccaatcacgtgtaccatctatcatactaatattttttattaatattatataaaatccatttttaattta

SEQ ID NO: 110648 - DNA, 449 bp, Glycine max
cgtcaatagtttatttcatatgctgtcgatagaatcaaagattctgtttataactggccctggtgattgcaaaggcataccgtgcagtaatagatgatttagtgattcacaatttgttgtcataacatcaccaataattagcatattttgtgaggaaatcagaagactaactttctaatgaacttagtatatctacggtgaacagttctacgtcgtcaaattcatgcctcagactcagactgatctactagtgaatacgtagagcttattaataaccattttaagtaattagaaacaaaatattaaatgtatttttgtagtgatagcgcagataaaagaactgctgtaaagtcttcttggtcgtccaacagtccaaaataactatagttgtttaagtttgatcaagagaccaatgggcaatggcaaaacatagggaatattcaaattaa

SEQ ID NO: 110649 - DNA, 276 bp, Glycine max
  unsure (1)..(276): unsure at all n locations
cgttttttaccactaattaaatgtgataccttgtgaggtactactctctctttctatggactgtacagttctacgagttgtattgactgaacctcttaaaatgagggagatgttggaatgaggcattgacagtgngtggttttttctggcattgtaggtagagtttggttttgtagaaagaggtagttacaaaagattatgganagaggagagagaattgaagagttgataaggtttatagtgaaaacatatgatgggtatagtgatataagtgtt

SEQ ID NO: 110650 - DNA, 431 bp, Glycine max
  unsure (1)..(431): unsure at all n locations
tcaagaacaggccaaactctcctccaaaatctgatttcatgcttaaataggtggctntgttcgtgctcatgcacttagcgcaattctaaaccgcttagtgcgcattggtgaatttcggcttaacgcagcttttctcactcagcgaatgggctgaagcggtgcgcttagcgggatggcccttcgctcagcaaacatgcacatctcatccttcttccagattcttcctcgcgcttagccaaggaatattgcgctaagcggatggctcgctaagccagcagattcgcttagcgatagggtcagaatcagcatttcacaaactcccctaattaacctgatattgagagagaatgattattaaacacacaaaatggaagtactaagtatttattacctatcgttacccaaaagtaattacaacactacaaaataac

SEQ ID NO: 110651 - DNA, 444 bp, Glycine max
  unsure (1)..(444): unsure at all n locations
tctggtagtaggggtntcatctgtggaaggtgctgtatctcttgattatcangaccttttctgtattatgtagtacctctggtacttgggttcatatataatatattatcttcgccttccaaaaaaaaaattccagttcccaggttataaatcactacaaagtagagtaaagaaatgaaacttacattattttgaatcttgacctgatcaagcgaatgcaaaaactgttgatacgcatctttgtcagataaaagcttccgcaactcatcaacactgcaatttataaagagcagaaaaaataactaagatcggcatatttggaaaatttgaacaattcacatttcacaacatcatagtaagtagaaagtactaattgtacgactaacagcacccttcctaactattttccatttacaaatcagatacaactaagaccatgaaaag

SEQ ID NO: 110652 - DNA, 57 bp, Glycine max
tcaagctggttcagcttatcatcctctattatatggtcagactgaacgaaccattca

SEQ ID NO: 110653 - DNA, 305 bp, Glycine max
tctcgatatattataagcctgaaacggaccttttgtgaaaacttatgagcattttaatttctcgagagcttccgttgttcaattttcgagcgtctgcatatgtgatgcgcctgaatcggacatccgagtgaaaagttacgaccattcgaatttcatgaaagcttttgttgttcaatttccagcgtctcgacatattatggttccgaattcagacatccgggtgaatagttatgaccatttgaatttctcgtgagcttgtgatgtttaatttcgtgcgtctagatatattataagcctgaattgga

SEQ ID NO: 110654 - DNA, 431 bp, Glycine max
agcttataagaacaaaattgccttaatcatttctatatatgcatgtgaattaggacgcatcaacaagaatcaagccaaggctattgtacaaacaatcaatggggcaaaacgcaccaaatgattataatgatggatggctcaaattctcacaaaggtaaaatcatcactttcaaattgagctttcaaaactatcatgacatgtagagaagaatcaaggatttcaagtcacaaaatgtcaagaaattttattttcaaaacaattacccatttcttgaacatatcctataattcaaagaaaaacatgcaaagtcgtacgtgcacatgaaattgacccaaaatattaaactgaaaatccgacgaaactaacaacattaacaaattaacacaactaacaaattaacaaaaccaacaaaactaagcatgaacgcaag

SEQ ID NO: 110655 - DNA, 308 bp, Glycine max
tcttctcaaggaggtgagcttaattatgaaaggggtgtgtgtaactaagctctagcttctcaaggaagttttctcaaagaagcttttcaaggaagttttctcaagaaagcttcttaaggaagctacctactctataaatagaagcatgtgtaacacttgttggaactttgatgaatgagagtcttgtgaaacatacttcaaaggtccacttctctccctcttttattccttcaatttagtgctcccccctctctctttctctccctctttcttttcctccattgaagcatccttccaagcttcttatc

SEQ ID NO: 110656 - DNA, 430 bp, Glycine max
  unsure (1)..(430): unsure at all n locations
agctntctccgtgttntcaattcatattgttgttttggtttantccatttattcagttatagtatatnggagtgaatgttggattgtaaagggactatgagaagagggagaccaaaaaggacattggaagaaatcatggagatctcagacttaaattttctaaaactttgacttttaaccatgccgaatggcattgtgtgatccatgtagccgaccttatctagtgagataaaaaaatttgttgttgttgttgttggtttactccatttattataggttggcttctctatttgttactgttggggaaaaacaattgaaaactaagtgcaaagagggaagagttaatgaaggcaatgcaagataacaacagaagagcacactcccactatgtctgtgatcttgcaacattacatgctgtatagacaacgac

SEQ ID NO: 110657 - DNA, 306 bp, Glycine max
cttgggtctagtcactactgactattcacacctctcaatggccctcaaacataacggcgagcccattactattcacgacaacgtcgatcttggcccattcgaaatacaccatggccaagtccgacacctggtcaacacgcacagaatcgcggccctattccatatccagctccaggaacacagtccaaccccttcaggatcccctttgacaccccctctgttacgcctctgcttaccaaattttcccaccttttgcaaactccgacccagctcccagctcctagctcccaccaccctggccaacag

SEQ ID NO: 110658 - DNA, 418 bp, Glycine max
  unsure (1)..(418): unsure at all n locations
agctttaagtgtgagaaatgaanatatatagtttatattagaggtcaaatcatctaattcttctcatggggaagatgaagggtataaacaggatgaggggggaaggaggaatgagaggtatatggagagaaaaaatgataaaagatatataggtacgaaaagagaggaagggattgagggagtgaaggtgaagatccctacctttaaagggacttgtgatccataagtgtatcttgagtgggagatgaaggttgagcaagtctttgcttgctataactacaatgaagaaaaaaaatatcaaattgacctcctggagtctaagggatatgccttagtgtggtgtaaccaactgaagagtgatgttgagaggatgagaaaacctttgattaatacttggcaagacataaagagagttttg

SEQ ID NO: 110659 - DNA, 311 bp, Glycine max
tcctaacatgccccctgccaaattctgagaattatttttctcccactaagaacataaacatttacagagggatttccaaaaccaaatgcccttattgccgaaaaatcacgaagtccaaagtcctatatatgttacgtctcaaaaattggatgcaatctcatgttgtaacaaagtcatttacaaatcccccagtccccacataaaagatcatacttgggccattactttgcaaattaaaatctggctccttgatatgaatatattgaagaatttctttacaggtgaattacatgataactgatcagcggata

SEQ ID NO: 110660 - DNA, 426 bp, Glycine max
caagctttacccttcatttaacatatgtttaatttataataaaatgagggaaattgagaggagttaacactagagagatttacaccaatgaatcaacaatcacataagggaacctgacatcacactttaactcaaatccttaaggttcaagtttaagggtcttttcctcacttatgtgatgctcaaatttttcacttcacctcacacttgtactctaaaaatctactcctcaagtgtgagtctgttccacatgaaaacctccccctcaagtggaagtcattattatccacgagtatttcatggtaaccattaaagtccacatgctttatgtacttgcaccgccattccaacccacgaaacacactgcctaaacctactgtcaggaagacttttgatacaagggatccccaagttaaggatccattg

SEQ ID NO: 110661 - DNA, 311 bp, Glycine max
ttgaatcacggagaagaatttggccagtttctagatgataaacttgatgttcatactcaaagttcccaacaaaagtgttaagatcaggattgggatcttcacaacgtattgttccatagaaatccttaaaagccccatcattatccatatacaaggtaacctccaaagatctcttcaccttcaagtttgtctccccatctaaattcattgtctccacatagcatatcccatcttcataacttgacgccaagagaagcaagtcagctggaaaaaattggtccttttctacttttaccacatccccaaccatt

SEQ ID NO: 110662 - DNA, 389 bp, Glycine max
  unsure (1)..(389): unsure at all n locations
ttagtttcactttagttattagccaattcaattaagaatgagaaatcccaaagagaaaatgtccgattgatttttgtgcttcattntactaaaagatatatggttttattattatattattattttacctctttttttttatttccaacgtggttatggcacgaccaaacggtgggaattcattttaacaaaaattaacgaatactacaattcaaatgatcggtggaaatttatttttttagattaggcgcgaaatgacttaaataaatgactgaagcacgtcaaaaggtggtgcgaaaagataatgaaacgagaatataagtacactaaaaaaatggggaccaccacgggtacagagaatgaattgaaaagcttgatcggaaactacc

SEQ ID NO: 110663 - DNA, 264 bp, Glycine max
aaaaacaacagccctttggaagaatcttctggaaggcccaaatgggcctggttgctatttgcacccctatttttactaaatacaccccatgcctttttttggtgattctctttttgtaaagttacggaaacttacatatttcgtaacgatacttgttttctttccgtaatgttacggaaccttgcggattacataatcatcccctttttttgacttacggaatgttacggaacctcactatttgtgcaacgatgcttccttttg

SEQ ID NO: 110664 - DNA, 399 bp, Glycine max
  unsure (1)..(399): unsure at all n locations
agcttgtatacaaagaacattatgtttcatctttagtaaagcttggtcacttagacgaaagcgaagctttgtaccgggcattactttccatgaatcctgataattataggtgatctctgttgccacttatattttaggtttgagtatctcaactgattagtccttttcaggtgtctttccccctgctgttattgttttttttatttcttggcacctttcttggatctcaataaaattgttctataaacaaaagttccattttaattattcattgtgtttcaaatggtgagattgagatgaatgcatgtattctatgggtgtgtgactatactttngtcattactgtggctgttacttccccaccatttatcagatgacatgtagatgatatatattttc

SEQ ID NO: 110665 - DNA, 307 bp, Glycine max
ttttaagccaagctttctcctaagatattgcttttctttcttcaacaaaatatatgaatttacggttagcccatcaaaaataatttttagagtgttatttgcctattgtaagtttgattaacagaaattaagatctagaaatcagaaagaagatatgcggtattgcagtttatcagaaaaaataggaagaatatcaaacttttcttttacttgacagcccatttttatttataaattaaattcctatatattgactgtgatttattggatttgtgtttactcaaagagtttctcatgatataaatgg

SEQ ID NO: 110666 - DNA, 385 bp, Glycine max
  unsure (1)..(385): unsure at all n locations
gcttggttcgaggtactttcccgttgtatatcgaagaacgatgaagaacgaatgaagaacgtcgaagaacggtcgaaacctttacgaaattcttcacggaaaacgttacggaaatgtttcggaagcgcctcggcttataatttcttcacggaaacaatttttccaagcaaattcgaaagagagagaagtgcctacggggctgaacccttttcttcttcacttcctcccctatttatagcaaaataagggaggtggttgccgcccagctcgcccaggcgagccaggttgcttcctccagaagcaacagccttctggaggaatattctggagggcccaagtgggcctgggtgctatttgccccncattttactcagtcacccccctc

SEQ ID NO: 110667 - DNA, 310 bp, Glycine max
tctttgagcctattttctgactctccatattctcttgacccaaggtgagaatgtcaattcttaccctcggaagcaaaaaaagaggggagagggaaaatttccattctaagaggaagcaaagaaggagagaaggaaaatttccaatcaatggaataaaagagaggaaagggaattcccaatcaaagagtgggagaaagcaatgagaagagaaggaatatttccaatcaaagaatgggagaaagaaaaaagataatgagaagaaggaaagaaagctcctgatcaaggatcgaaagaaaacagaagaaatgtg

SEQ ID NO: 110668 - DNA, 412 bp, Glycine max
agcttgtggacctggtgtttcgtttttttcggacacagaggcgcacgcgcgagggtgcgaggtcagtgtcgacacccgtgctttacacatgcatgccccattcccacgtgccaacctgttgccgagatcaccttctccaacgctgccgttatgcatcatcctaactatcactgggcacaataattccctgcctgctaatctcaatgcgagggaatgcaacatgctatcatcatgagctatccgaaaccattaattctgggcagatgctcattacattgtctgagacacttacgacatgcacgattctacttactcaacatcgctatcaactttgtgctatgcccaactcgttcccatggtatcgagaagaagatctctggagagcctagacctaatgaacatgaccgacggt

SEQ ID NO: 110669 - DNA, 411 bp, Glycine max
agtctttatgatttggtctttgccagtgaaaggatcgatgtgggtctgaaaaaaaaaaaaaaaaaaataaagggcaaatttgatcatcctactaggacgacttgaaaaactggggcaaataaagagggtgaggataagggagaaacccatgctgtgactgccattcctgtacgaccaagtttcccaccaacccaacaatatctttactcagccaataacaaactttctccttacccaccacccagttatccacaaaggccatccctaaatctaccacaaagtctgtctgcacttccaatgacgaacaccacctttagcacaaaccaaaaacacccaaccaagaagtgaattttgcagcgagatagcctgtagaattcaccccaattccagtgtcctatgctgacttgctcc

SEQ ID NO: 110670 - DNA, 301 bp, Glycine max
ttttgtacaagcactcaacaacactaatataactggaatttcaaaagactggaatttaaatgactgaaataaaaacaactaaaacatatatcaaactaaaaaccaaactaaatattgataaactaaagtgttcataatttgaaaaattaaaaacaaaacagaatttaaatgtcctgatcctcctgtggttgatcttcattcagatccaatactagagctgctgatgaatcctgaatggtgggctcaagctccaatgctggtattgttggtactgatggcaaggtctcctcaagacctggtg

SEQ ID NO: 110671 - DNA, 427 bp, Glycine max
  unsure (1)..(427): unsure at all n locations
agcttgtgttaatgaagcaaaagntttttatcttcattctaaaggacaggtatgattcagaacttcagagctttcaatttttaaacaatgtgtcttgtgcagcgaatgtaacttgtggaaggtgattaacttgataagattacattttaatctgtattgcttttgtttttataaataattgcttgatgttgaagtccatgacctctttataacttgatgcaaagttgacaaattgataatattctagcaattcaatattgttacttccaaccatatcttgtaaggattaaatgctatgtttatttgatagtcataatcagtattcatcaattcaattgatcagctactttactagtactactactattattatcattcttttagtcataatagaagtttattgtgctttgtaatagatttcttattt

SEQ ID NO: 110672 - DNA, 308 bp, Glycine max
ggacatggtttgtttagttaaataatatttttcatcagaggctgcatgtgaatccgttgcgaaaaatgaagtgatacatcatcagttttgtctggaaatttttcaatgcagagttagccagcctttgaaaatgtaatacaataatttgtaaattatgattgatctcattatcaaaaaaaatatatgattgatcttaaattataaaactagagacaatgttacagtccagtactaaagtaaaaagctaggtaaagaaattcccttgagagaggtgcccacattttagtgtgtgatatgcctccaatatg

SEQ ID NO: 110673 - DNA, 425 bp, Glycine max
  unsure (1)..(425): unsure at all n locations
agcttctacgagatttagaggctcttatgatgtttatgatcgancacctncttggatttatactgtaggcatagttcattacttttagtcgggtagagatttgctatgatccatgattattttttatatatcgaagcattttggaggggctatgaatattttatcttcatgctactagtcgtaatgatttcaatacatctatgattatatcttaaggattattgaggctcagaatgtatgattaaatatctctcttcacttatcatcatttttaatttggtgcaaattaattctttataagttatactttattatagcattgtgtgagggtcaaagaaaaatgacaacaactttcaatatagttttaaaataaagaacgtattatgacacatatcctttactcatgaacattttaattatttgta

SEQ ID NO: 110674 - DNA, 226 bp, Glycine max
tgtaccccattagtcccaaaacaaggaagcttatcttggttttgaaataggaacaaaaagttatatcatcttatattcttacaccagtaaaattttatgtctctaaaaacgggtgatttttatgagtccatattacctttaattaataatgacttggtccaaacagatttccataaagatgctttgtccatcataccaaccctccccccaccacttgataaatgat

SEQ ID NO: 110675 - DNA, 432 bp, Glycine max
agcttaagctaaacgtgcctgcaaacgtaagttcttagcaaatgaaagtgttaagtgacaatgagaaactgatggacgatctgggggcaaatgtcacgccggctatctattacatgagtaaggaaaatacgctacaacaggccgtggggttgcccgatcagaaaacgcttaatatcattatggggaataaataaaaggtaattcatggatggttgaactatatccctgcttttcaaccatcctaaaaaagcatgaattgctcgctctgccctaagtggctgtgctattttagaaaaacttaatcctgagttaagcaaaaaaacataatcaataaaaatatatacgcaaaaaacattgattaagtgaatatatcatggaagaaaaatataaccggagtagtgtatggccaatctctacgacttgaaaaagttc

SEQ ID NO: 110676 - DNA, 54 bp, Glycine max
ttgtaccgacacgttttaaagattgtcccaagaagacccccaatgagattttgc

SEQ ID NO: 110677 - DNA, 426 bp, Glycine max
agcttgttgttttttagctagacaactttttattactattatttattttctatatttttcttccatcttattcttttcttgctcgctctctttttgctcctttttttccatgagatattttgctacctaaacatacgtatatttttgtgaggtattttgctatatacatgcgtgtccaaggtatcttgctacctaaacatacatatatatgttttgtgagatatttttgctatatacatgcatatccaaggtatcttgctacctaaacatacatatatatattttgtgaagtatttttcctacatacatgcatatccaaggtatctttctacctaaacatacatatatattttgtgaggtatgactaccttccgagcttgtgcttgttttatttaaattcctaggatcatgagcaactaagtgtgt

SEQ ID NO: 110678 - DNA, 310 bp, Glycine max
ttgttctttttatgaaatgagaagttcttttctcatcacgttatctaaaaaaccttgggggtggatccaagtgctccgatcattcatttgcatattcatgttttggtggcatactcaccattgtttatttctttaggaatttcatcattactaaaaaagcacctaggctcccctataacatttgatccagaaaaatggataatgaagagggcgtgcaggaacagatgaaggtcgatctatgacttcactccccgtgccaccctggaagatttaagccaagcccctactttctaggggcaacttccacctt

SEQ ID NO: 110679 - DNA, 419 bp, Glycine max
  unsure (1)..(419): unsure at all n locations
agcttgcaatttaattagttatgatttcttatgcagacttctttttagtatttctaccgcataacatggcagatatgctgtcactataatttcaaacctttaattttgtatttatactgtataacttttatgaaacaggccactaacaatgtcttttgccgtacattatccaattcattccaacactaggacattcattcaaatatgatttatgtgttcttataaaaaaatgatttatttgatctgtaaggacattttgaagcactaagccactaactacttttttttacttcaaaattactattactcgtttaatagtccgtgctattttcatgaggtccctaatgtcagtggtattctaataaaatagaaaaaaaaatctctntatcttcttatgaatngtcaatgaaacccatata

SEQ ID NO: 110680 - DNA, 269 bp, Glycine max
tctatggaagttttcccataaaaattgttgcattataatataagatgaacaaattgaaccttggtaacattgttcaaaatgtgatgaacaaattgcacaagcattttgactaattgtagagaagtgttactaacgtgaaaatttatactattaacctgttgtctttatttggtgagaatcctaagggacaacatgctttgtgcattgacattattattttttgtttgcttttgccatctatatttatatttatatcaagtaaattaaaa

SEQ ID NO: 110681 - DNA, 426 bp, Glycine max
  unsure (1)..(426): unsure at all n locations
agcttcttcaatactcttctcctttcttgtcactagtgggccatggacaatcagacttataagtatttccttcacttatctaatgtttaacttttttattttagatgatgtgagattttatctcacacttatattctaaaaaagttagtaaggacatatactctcaagtgttaccatttctattatactaaacaaaccgttaaaggtaattgtgttatgaaattataatcatattctctacacaatagttaaaagacttagatattttttttattgttagtaaatatttgattttgcttttgcttcctaataaactcttgtttttcaatgagtctccaatagaataacaattttatttttggtcattgacacttatttttaattcctaataaattaaaaaatntcgtgtttgctccatgataaata

SEQ ID NO: 110682 - DNA, 325 bp, Glycine max
atgttcactataaatactcagccttgacttaaaacatgtctattgaggattccttataaaacccatatgcctaaactgttggggtcctgctatgatcggtgaaatttcactcgaagaacagcacctcagaattgagaatgctagattgaaagatgaactataccgtgtttgtgcactcgctggcaagtttctgggtcgacccgtttcttctctaacaagctcaattgggccttcaatgccaaactcaagtttggagcttggtgttgggagcaatggttttggacaaggtttaagcactgtgccttcaacaatgcctgattttggg

SEQ ID NO: 110683 - DNA, 422 bp, Glycine max
  unsure (1)..(422): unsure at all n locations
agcttgtgaattgcggaatttatatttgtgcttaggatnttaagccttcggagacttatttctatgattntattgatctttcggggaatgaaatttcagggagtgcaattgggttggtgaatagtactgagtatttggtggggttttgggcttcggggaacaagttgaagtttgatttggggaagttaaggtttggggagaggtttaagtttttggatttgtctcgtaattgggtgtttgggaaggttccaaacagtgttgttgggcttgagaagttgaatgttagctataaccatctttgtggtcagcttcccaagaataagtttccggcaagtgcttttgttggaaatgattgtctctgtggttctcctttgccaccctgcaacaaagcataagtgtaataagctttgttgttgatgatt

SEQ ID NO: 110684 - DNA, 294 bp, Glycine max
  unsure (1)..(294): unsure at all n locations
cttatgaagggtctttttttacttaaaaatnggcaacaagagggttcattcttatgatatatgaaaatacatgatatccattttgattttgcatcccctatctttgaaattgtatacaaaagcagtatactgtttatggttgggtctcgcagaaaattaacataatattgaagtattacacaaatgtttctaggtgctcaaaaaaatgtaatacatgtcctttatgttaagaactaacaatgatgggtgtgtaggagaggaatactctgttcattgctgaaaaaaatttgaggg

SEQ ID NO: 110685 - DNA, 417 bp, Glycine max
agcttccatggctgtcactctccgttctgagcttccatgcctgcctaccaccaaccacactactcatcatacagaaccctccactatcccacacaacaaccaccacaccaccttgaatttttgtctgccactgaggattgcctcgaggccgccctggccaaacttgatgccgctacacgccgcctggacgcccgattggacgcccttctcctacgactgccttggcgacccgaccaccactaccctcctcagttcccatgctccgcacccataacacctagtttcacaccattactgcctttgctgtagactccgccattgactccaccgctacctccgccatttctggtgccacatccgccgctccagccaactcagtctcccacgctcactacatccacgaccataccatcttcg

SEQ ID NO: 110686 - DNA, 306 bp, Glycine max
ctgagggagtgatgacttccctttctttatggcgacgtctgatagtccaccctttttttatgaaccggtgtctatttgaggtcttgggtctctttctccccttgaccaatccagtgtgctcttcttgagcacttgaatgtggccccttcccaactccaccctaaaaaaagatgatggtactcaatgaaccaagaggggaagagggtgaattggttttcaaaaacaaaacttttaataccaaagttacaaaagcttcttttatacaaatcgtatcacaaaacttttcatgaactgaactcaatcaat

SEQ ID NO: 110687 - DNA, 365 bp, Glycine max
atctctaagtcacctgcggcatgcagcttaacattcaaattttatcgtttcttgtatgacaggactctatcagacattcgagtataaagttattgtcgcttgaattatctcaaagcttcaacattcaattgtgagagtcttgttatattacgggacacaatcagacatcccaataaaaagttattgtcttttggattggctcatagatttaacattcaatttcgagcgtctcgatttatgacgggactcaatcagacatccgagtaaaaagttattggcgtttgaatttgcctagagcttcaacattcaatttcgagcggctcgatatatgacaggactcaatcagacattcgagttaaaagata

SEQ ID NO: 110688 - DNA, 306 bp, Glycine max
ttgagcctattcaaacgacaatatctttttactcggatgtctgattgaggcccgtaatatatcgagacgctcgaaattgaatgtggaagctctgagcccattctaacgacaataactttttactcggatgtctgattgacgcccgtaatatatcgacacgctcgaaattgaatgttgaagctctgagcaaattcaaacgacaataactttttactcggatgtctgattgagtcctgtcatatatcgagacgctcgaaattgaatgttgaagctctgagccaattcaaacgacaataactttttact

SEQ ID NO: 110689 - DNA, 419 bp, Glycine max
agcttgtatgattatggggtacccattacatgtggtactaggtggcggtcgggcgatggtgcacaacaagttttccacattcacaaagcgcgcataaacccaccatcccctgttgcccacctccatctgagctcacgtactcccacgtagcccatatcctcgtttctctcaacaccgggtccccatcaatcctcccaagcttccacaacatccaagcaaaacaacattcaaacagcacagctatcacagccaagcaaaacaaagcaaaggcagaaaactctgccaaaacaccaaccaaaatcacagcttttctcatttaaagtccccagtaacaattccttcgatccaattcgttaaccgttggatcgactccaaaattttactggaagtctatagtacataaacctacattgtgaccg

SEQ ID NO: 110690 - DNA, 297 bp, Glycine max
ttgatggtgttgaaaaaaattttttgtttgtcatcatcaaaaagggggagaatgtgaatgtatgtatacatgattttgatgatgccaaagaagaatcaaacaagggtgttacatttgcttaaagattaatacaagattgcttcaacaaacaaagccttgattcatgatcaagccttgcctcaaaacaaagggtttcaaagtcatgcaaggctctaattatcgattaccaggaagtgtaattgattactaaaagggaagtttgagaaatagatgttgaaaagggttttgaatttgaat

SEQ ID NO: 110691 - DNA, 398 bp, Glycine max
  unsure (1)..(398): unsure at all n locations
agctntattattgcatanttttagtatttttttatatttattttctaggaaaactctagaaaatgaagccaaacactagatactagtatttcaaacagcgtcaggtgcctttgagagcatcaggtacaaagcattgaattactatgtttacgtgtccagcaatagtatttcagcgttgagtattgttgaacagtgacttaaatatatttttcatcttttaagttaataaatttattttttatttttaattctagtaagtttatatattttttaattttgatttctataagttttttgcttattttaagttcatataaatttgtgtttttttaatgttgatccatataaacataaacttatgagaatcataaatgaaataaattagaatcttaaaggac

SEQ ID NO: 110692 - DNA, 300 bp, Glycine max
tagaaggatgcttcaatggaggaaaagtatgagggagagaaagagagaggggggagcacgaaattgaaggaataaaagagggagagaagtggaactttgaagtgtgtctcataagactttcattcatcaaagttacaacaagtgttacacttgtttctatttatagactaagtagcttccttgagaagctttcttgaaaaaacttccttgagaagcttctttgagaaaacttccttgagatgctagagcttaactacacacacccctcttataactaatctcacctccttgagaagcttc

SEQ ID NO: 110693 - DNA, 304 bp, Glycine max
aagaccccatatgctttgctcatacacggaagcgcgcattatccctacctagccaggtgtgcaccttcatatactactattcctaacgcttctcataattaagttcatttttttcaccattgtgccaatgaaaaactatcatttatcatatatgtcgcacgcatatctttccaatgacactagctcttccctcctagcgtaccaaagcaaaggacttggactctttcgaagcaacggccgaggggaccgctaggaacttgataggatctcatgatatgatgcttataatgatttgggcaaccca

SEQ ID NO: 110694 - DNA, 319 bp, Glycine max
cactcaagcttctcccaactttgagataccaaagggtgttttttttggctggcgaatccgaactaggtcctggtatcaatggtgctgctgtaaaagagaatgaaccaagttgatgtataatgatggaaacactttttaattactgacaacagctttttgtacacccatatatgaaaagtaagttagggtttgggtggatgtactattatgtatgaagttgctcacatactcaataatcaagtgaattttgttgtggttttactcttcaacttctgattcttcgtcttcttcttttttataaccaacttttgattcctta

SEQ ID NO: 110695 - DNA, 411 bp, Glycine max
agcttcccgcatccgtacttggaaggacctgattactgctttcctaaggcaatatcagtataattccgatatggctcccgatcgcactcagctacagaatatgtttaaaaaggaaggtgagacctttaaagaatacgcacaatggtggagagacttggcggcacaagtggaccctcccatggtcgaaagggagatgctcaccatgatggtagacaccttgccagtgttttactatgagaagttggtaggctacatgccttccagcttcgcggacttggtattcgccggggaaagaattgaagtagggttgaaaagagggaagtacgattacgtttcctccacaagtacccatgctaaaagagtcgaagcaactggggcaaaaaggaaggaaaaagatacctatgtcgtcac

SEQ ID NO: 110696 - DNA, 307 bp, Glycine max
tcaagtaattttattttactaattgttgtgctttggatgccaggtatttcaataatagtatgtttcttgaaaattttaacaagtaaatgtcttagatgcgcattatatgttgtattttaatggtaaatataagttcacatgatatggtgtgtgaaaatgggccaagcccgataagttggtcggattaactaatgcatgagttgggttgggcaatgaacaattcatgcctggcctgattttgacttggcctaacccaaatttatattagccaaaatcggggtgacatgtgtaggctgggccatccttt

SEQ ID NO: 110697 - DNA, 427 bp, Glycine max
agcttgtaggccttggatcttcttcatcaatggagtcctttgcttcttgaagtttaatggcagcagaatgaagaaggaagaaagatgattggagacgccacttcaaagagaagatgagtcaagaagaagctaaccaccataggaagccatggataagagcttgaaggtaggagaagattagtggagagagagggagagaaggagcacaaacttttgtgcctcaaatgaggtatgaactttgaagtgtaattctcaaatgatcaaatttgaaaaaaggcacacacatgacctctatttatagcctaagtgtcacacaaaattggagggaaatttgaatttctattcaaatttcagttgcatttgaaattgaatttgtggggccaaattttggagccaaaatttcactaattatgattagtgaatttta

SEQ ID NO: 110698 - DNA, 51 bp, Glycine max
tagttcagcttatcatcctcaaacggatggtttttcttaacgaaccattca

SEQ ID NO: 110699 - DNA, 429 bp, Glycine max
  unsure (1)..(429): unsure at all n locations
agcttttaacaaatntactaagtccttatcttagattttcttgatctgtttctttgacttgattcaatccgtgctcatcaagtaaacttttggcatcatcaaaacctgcatgatatacattcacaatctgtaccccttttaataccttgctaatcaacttgtttggggtttctatttgtggttttgctatgggccaagattttgggtttgtactctaggtgtacacctagcttacattctgttacaatatccattgttgtttccatatggtgaagatggatacctggaggcaaatattccttcttcctatggtaatggtaataggcatgttggaaatcaaaaacgtatttcattntgtaaatttgtttctttccgaattcaatataaatatattgaagaaggtgttatatcgaatagtcattgcttatt

SEQ ID NO: 110700 - DNA, 307 bp, Glycine max
tgtaatggtaagaaaagagaaacaagggcatttttttcgtcaccttggtagactagtccaatatcagttgtacccttaaagtacttgaatatacatttcatatcttgccaatgttccttccctagttcacctatatatctactcatcatgttgactgcttgtcctaagtttgtgcttgtgcacaccattgcatacacgagactgcctacaacatatgcataagaaacacaagacatgtattctatttttcattctgacagattgacattgagttcagtgagacaaactgacgttgtcaaaggagtac

SEQ ID NO: 110701 - DNA, 411 bp, Glycine max
agcttcaagttgttcaattgcttcatattgtttcacagaagggcatatgtctatgtggtggtccacagaggagcattaaccacagagtctggcgacaggtgcagatttttgattcatggccaattgggttaccaggttaaccaaggcatctattttaccttcaagcttcttagtctcaactgatgaagatgaattcgtggctacttcatgcactcctctaatgacaataacatcatttctggcactaaattgctgggagtttgaagccatcttctcaattaagtttctggcttcagcaggggtcatgtcttcaatggctccaccactggctgcatctatcatacttctcttcatgttactgagtcattcataaaaatattggagaagaagctgctcaaaaatctggtggtg

SEQ ID NO: 110702 - DNA, 324 bp, Glycine max
tttaatactcaagctttcataagtgaagtcaagtgcaaccatttttcttatattcctttcacaagggggaagtttagccatgttctcactatgaaaattatcatccgaatggtcaaaatcacaatgttcagaatcaccatctacagaatgctcataatactcataatgctccaaatgatcaggatgcacactatgcctaactaatctatgaaaggttctatctattttaagatcaaaggattgtaaatcatctggattgcccctaatcatgcactatatgcaacaaatcatgtatttctcaaaaacaccatgggttaaaagggg

SEQ ID NO: 110703 - DNA, 353 bp, Glycine max
  unsure (1)..(353): unsure at all n locations
agcttgctgaggctgnttatactcttatatctcgtgagcacttggggtttttaagctttggggaagaaatagggtgaagaaatggcttcaacccccccctcccaccctcattttatgttttttgatcatacatgctcgcatatgcataaaataaatggggtgaaataatggcttctcctattcgtatgatgacaagatgcacatgcatgcttatgatctggatgtttatgtgcagcatttaagcatgtgtttattgtgttctatgttacttaaatgcttacgactccccttcgattgatccaaatggttatggattcagcgggaaaaatatattgtgtctgctctttataatt

SEQ ID NO: 110704 - DNA, 374 bp, Glycine max
agctgtgtttgttcgaagtttcctatttatattacaatgcatttcggctaggtttcttcgtgcgaacggaaccgaacttgtgatactgccgactggcaagatatcattttgtcggacaggaaaacattatcccacctcggcgtaaaaaacatgattcaccggtattgacaggaaaagaaaaatgctagcccacgtcggccaggaaagatgaccgaccgaggtctgaaaaataatcatgaccggatgactccggtccaacatttcctaacagatatcatgcaagtattattcagggattgtattgaaaaaacaatagccgacatcggtagtataatagtcgtgaatgatatttttcggccgacatgcgcagtttc

SEQ ID NO: 110705 - DNA, 250 bp, Glycine max
aatttgaggggaacacgcttatcccaggagagagactgtccctaaactcgtgagggatctcataacaccccggctggatcaaaaggactttcacaacccttgtgtgttgccctcgctggaaagagtgattctttccttcctatcatctccacccttgttctttctaaccacaattccagaaaatccaccgctgcccaaaattatctcgtgaccataactcccatttcacacactcaaatgaagtgattct

SEQ ID NO: 110706 - DNA, 421 bp, Glycine max
  unsure (1)..(421): unsure at all n locations
agcttcttgaggagttttaaagcttatgacagntgaggggcttttgtttatgcagaaaacaacaatgcttatatcctcagcctataaggactttggtagaccaacatgattcaacatacacctaactctttcaagtatggttctattgaacctcttcaccaagccattttgttgtggtgtccctctcacagttaagtgcctaacaatactattctgttggcataaggtcttaaacctttcatcacataattgaagtccattatttgtttttaatttcttcacctttcttcctatttgagttcaactaaaattttccattcttcaaacaccttgacagcttcattcttgtgttttagaaagtaaacacaaacctttctagataagtcatctactaaggatagaaaataccttgcccctctat

SEQ ID NO: 110707 - DNA, 315 bp, Glycine max
ctatatatactcagcctgtgcttggttcaccacctatccttgtttttaaccaagattgacaatacttcgacaacctatcatagagatgaatgattaaggcatacttatgctatgcatgaaaaatgtaatcatgaaatcgacatgagacgcccgaagaaccacccttttctagttaacaaagcattaggtaccatgttcacatgattttcaataatttttcatagagaaatgagtgtataatccaaacatggtatgtttatacctatcatcatggtgcccaacacatgttactaagaatgaggcgtaaactttcac

SEQ ID NO: 110708 - DNA, 429 bp, Glycine max
agcttgaaattagaaaatattttattatttattggttaacaaatcacaatcttaatatttataacacatttaattgatttatttttctccttccagactttaataataaaattttaaatatttaaataacttgcacaatatatattttaatattttaataaaattatttttaaaatcaactgatattaatgatttgaatatttaaaataatattttaattattattattattatatttgtaatttaaatatttgatatttaatttgattcaattatatattttattattagttaattttatataaatatcattttatatagataaaacattattatacaattttatacgtgatttccactcattattatcattattggacgtgatttgcaaataccgatttatatattctgattggtttcattttaaaa

SEQ ID NO: 110709 - DNA, 277 bp, Glycine max
ttttcaaaacatgcaaattaatatttattttctataataattctctgtatattctctttgttttctcctcttttttactggtttgtgagatattaacgtgtttttttaatttatgcctgcaaacacactgatttgtaaactttaaaaaaatataatttatgcaaaataaaaaaattaactaattaaaatcaaatttcatactcagtcccccttctgcgggagtctggcccttcccggaaaaaaacccatatacatgagatattcaggacatcatttg

SEQ ID NO: 110710 - DNA, 361 bp, Glycine max
agcttcaacattcaactccgagcgtctcgttatattatacgactcaattagacatccgagtaaaaagttattgtcgtttgaatttgctcagagattcaacattcaatttcgagcgtctcgatatatgacgggactcaatcagacatccgagtaaaaagatattgtcgtcttaattggctgagagcttctacattcaatttcgagcgtctcgatatatgacgggactcaatcaggcatccgagtaaaaagttattgtcgtttgaatgggttaaaaccttcaccattcattttcaaccggttcgttttttgacggaactcattcaaccttccaagtaaaaagtaatggcctatgaaatgggct

SEQ ID NO: 110711 - DNA, 302 bp, Glycine max
ttatagcagattttagtaatgacccacttacctagaattaaaataacttaatgccattaacctagggaattaaaaaaaacttaatggctgagtgtaactgaaattgtggcaaccaaaagtcacccccaacagccaacaagtcagccaccatttggtctcccaaaaggctgatgcctatgttgccaattgggcccttattacaacttgaactaaacctaactaaagcccttttaattgattaacccaaaacatatttttggtcatccaactttacaaggattgagccattatttatacaaact

SEQ ID NO: 110712 - DNA, 400 bp, Glycine max
cacctcacgcatgaagctttgtcaattcgacaacatttctttttcctgggtccattgatgcccatgatgtattagacgctccgattgaaaacaaaagttctaggaaatcaaatgggcataacatttactcggatgtccgattcaagcccacaatatattgataagcttgaaatttgacatcagatagcttggtccaattcagacggtcataaactgtaacatcgatgtacgattgagtcccatgatatatcgaaatgctccaaatttaatactacaagttctgggaaattacaatggcataaaatttcctcgatgttcgatcatgtccacaatatattagacgctcgaattgaacacaatgccttgtgcaattaaacgacataacttttagatggaatac

SEQ ID NO: 110713 - DNA, 306 bp, Glycine max
taaacattctatttcgagcgtctggatttttttctgttctcaatcaaacattcgagaaaaaagccattgtcgtttgaatttgctctcatcttcaacattcaatttcaagcgtcccgatatattaccagactcaatcagacatccgagcaaaaagttaatgtcgcttgaatttgcccagaggttcaacattcaatttcgagcgtatcgatatatttcgggactcaatcagacatccgagtaaaaaggtattgtcgtttcaattggcttagaggttcaacattcaattttgagcgtcccgatatatta

SEQ ID NO: 110714 - DNA, 306 bp, Glycine max
tgaatactatgaaactcgttaacttatcttctcttacattcactcaattcactctagtttccttcatccagtgaattgattcattgagagatcctagctagtcgttcactaacaattttctctaactttggggtgtgggtacacacctcaaactctttattcattgagtcacagtatttcttccaataaatatattgaaggtccttataaatttagattctattaggatgcaaggagttatatattatgtttattcttttcatttgaatatgatatatatatatatatatatatatatatatatat

SEQ ID NO: 110715 - DNA, 428 bp, Glycine max
  unsure (1)..(428): unsure at all n locations
agctngtcaagtcccccagcctggacttttgtttttctggctgcttcttgtaagttgtccaaggtggacatgcttttggttctgcatgtgaggtctaacatgtcaggtgagggaagcctgtatatttggcaactctgtccttttctaacagttggagaatgcattgaagacaaactttatgttttgtctgttaatgcagttgcgtgtagtgcacacgtagtactcttgcacacgtgtcactcgtggagtgggcacgtactaaatacgtgttgcgtgggatatgaagttgttttgtggtctcctcttgccagtgaccaccgtcacttcaaatttctatcttctttctctcgaaatataagttttccctcacctacacagcaaagtgtctttgcagacgccaggtgaagctagcaaatcctgatgaatcc

SEQ ID NO: 110716 - DNA, 305 bp, Glycine max
tgctaagaactagaaaaaataagaccttcttgttcgcacatcgttcgcgtgtatgacatccactccacaaggtttgaagtagaggagaccttcaatcctattacgcaacgtggcggacaaaaaggggcagttaacttgaatgggcattattatcaatgcggaaggtattctgcgcttcactgtccatgttcacatattattacagcttgtggttacgtgatcctgaactactaccaatatatagatgttgtttatacaaatgagcacatcttattagcttactccccacaatggtggcctcttgg

SEQ ID NO: 110717 - DNA, 424 bp, Glycine max
  unsure (1)..(424): unsure at all n locations
agcttgagaaagcccttctgattctgtttatacttttctgactctatggcatgagatgcaatgcaaagattggacctcctgttagttgttatcaaagaatagcttaaacacttgtgcttgagtgaaacagttgctgtgagactgtggtttgagctactttccttgatacctgtcttatgattaacttcatctaactgtatagttcacattttgttctcctctttgtctagctgcatattctgggaaaacaagtgataggtacacattgcttcatcttttacatcatgcaatcaataaattttaatgcatacacctttgaacataaacactgcatgttttaccacttgaggacaagtgagttgttctcttttgcttgaggacaagcaaaactataaatntgggggagttgttagtcgatgaatac

SEQ ID NO: 110718 - DNA, 307 bp, Glycine max
tgcatgatttacatctccctatttctcaagcttattcttcttgatatcatcaaaatcttcatgatttacataactttgatgaatgaaagtcttgtgagacatactttaaagttccacttctctcccttttttattccttcaatttcgtgctcccccctttctatttctttccctctttcttttcctccattgaagcatcctcttcaagcttcttatccaaggcttatcttggtggtgaagctccttcttccatggcttattccttaatggatggcgcctcctctcacctcctttcctttgtcttccg

SEQ ID NO: 110719 - DNA, 436 bp, Glycine max
  unsure (1)..(436): unsure at all n locations
agctntggaaaatgatttctatacaaaatttagtcgtacgaagcgactaacagagacctatcatgaactcattcaatttacagttaatgaactgtaaaccgttatctgttatcatgacacatggaatgccaaagtgtgtgatgatatttttccaaaggaatttctggatattctgagcaataattgttgccaaaggtttggcctctacttacttgatgaagtagtcaatagctactaactaaaatttcatttgcccaaagaccatggggaaaccttcaaggatatccattccccaaatagtaaaaagccacaagggagtaagggaatatagctcctcgactagttgagggatcaagtttccatgtttttgacatggattgcatttttttgacaaaattcacgtggtctatcttcaaggttggccaataatacccga

SEQ ID NO: 110720 - DNA, 309 bp, Glycine max
tcttatccaaggctcatcttggtggagattctccttcttccatgacttattccttaatggatggcgcctcttctcacctcttctcctttgtcttctgctgcatctccatggtggaaaatcacaattagaggacctcattgaagctcaaagatccatcctccatagaagccccacaagcaagcttccatcaagtggtaatcagagcacaagagcttcaagtaggtgctccttaaacctccattaatttttttttgctttaccttttcttccattgttgtttcttcattttttctccatgtatctcctcac

SEQ ID NO: 110721 - DNA, 430 bp, Glycine max
  unsure (1)..(430): unsure at all n locations
agcttaccctatttataccgngtttgtaagagttgggtaatgattctgcagcaatttgtgtttctttagatttttcaatttagtccttgccacattggactcaaacttgtcacattgggttgcttacgtggactgaggtgtgccaaatagacatttgactaacggaataaattagattttaacagcaaggacttatttgcataacggatgtaaatatagggactattttgaattaaaatttaagttaaggactaatatgcaaactggttacaatctcaaggactaaattgcctattcactcatttttttaatcaaaacctttttatatgtatacaatagattaaaaatttcatcattagcgaaagatattgtgaatcattacatcaccatcatatcactcatttacgcgttattttgactttctagctac

SEQ ID NO: 110722 - DNA, 253 bp, Glycine max
ccgaatgaagggttaatctcggccaattaaaatataggggacgaaacgaacttataaaccatttgaaaagaaacaatctaggtgaaggaattaaaaatatggaataaaactaaatcaggttattaatcaacttcgtaagacctagaagggtatatttaacgtttctaataatttatcatgataagaagtagaacatagatgggtttttacgaattgaatggatcacttatcaatcacgcaaggaagtgaaaaa

SEQ ID NO: 110723 - DNA, 300 bp, Glycine max
tgttgaaattgccatgttcggatgatttttttcatacccattctgttttagggttttgtgatgatgtttgtgatgtttgtatgctgaaattgcccatggaaaactgttagagatgaaatgtagagttaacctagggttggaaagtgagaatgtggtgttatgagtggaaaaagagtgaggctttgagggtcggaaggttaagtctgaattctgtggtaaatggaggttaaagtgagttaatcctagcttgaaatgtcatttatgacttatgagaaagcttggactgtgctagagagaaaa

SEQ ID NO: 110724 - DNA, 409 bp, Glycine max
  unsure (1)..(409): unsure at all n locations
agctntaagaatnnnntattatttactttggggcccggagacaggaaaaattatgctgacattcattgagctccttattggggttgtggttattgtgggtgtagctcgctacatcattaaagggtattccgccactggtgtgttatttgtcggtggcctgttattgctgattatcagtgccattatggggcacaaagtgttaccgtccagccaggcttcaacaggctacagcgccacggatatcgttgaatacgttaaaatattactaatgagccgcggcggcgacctcggcatgatgattatgatgctgtgtggatttgccgcttacatgacccatatncgcgcgaatgatatggtggtcaagctggcgtcaaaaccatngcagtatattaactccccttacctgctg

SEQ ID NO: 110725 - DNA, 267 bp, Glycine max
ataatcgccgccggggaggcacaaatggcatcagctgcgccacgactgataccaacgtttaccatctccggaaatagggttgccatcagcaaaacacccataccggttgcggaagagacggccagagacatcagacaggcgacaaaataggcggcaatcatcagcaggtaaggggagttaatatactgcaatggttttgacgccagcttgaccaccatatcattcgcgccgatatgggtcatgtaagcggcaaatccacacagcatt

SEQ ID NO: 110726 - DNA, 284 bp, Glycine max
aactctatttttttttttttaatccaaacgcacactaagaaataagatcatgttgaatgtttcatgaatcaccaaaacaacacgatagatttcacaaaaaggaacatgtgttttaagttcagttcattcatgtctcgtttgtctggccataataatattaaaaagacttatccaagatataccaaacattattactgttcattttttactttttcaacattaacatgaaaatgttggcaataaactaacaaactttttaacgggtttatatggttagggaatgc

SEQ ID NO: 110727 - DNA, 411 bp, Glycine max
  unsure (1)..(411): unsure at all n locations
agcttaatcatatcattgagatgattatttnttttataactattaaatttttatgttaagagactttaaatatttatatttaatttttttatatcaaaatatccttcatttttttatttaaaattataaaaaaatatttttttcaacgattatatattctatttgggttgctatatatattcatatttatattcatctgtcatacatgcaatcatactataacaaatttatttgggtgatttttttatacattgattttttatgtcaatagacttctagatatttctatttaattttaatgtatataaattttatatgaatgatgtttgaatttttttggatcaaaacatcattcattggtttttttaatttgaaagtatgtaatattatatcttctaaactattatgtat

SEQ ID NO: 110728 - DNA, 306 bp, Glycine max
ttgccaacgtgaactaaatgcattttttttcaattataatgtgtgaaaaaaaatatgcactaatttttaattaattaatttttacaatacataaatgtactaataatttaaataataaaagaaattaaaaattaaaaataattttagtgtgaaaagtataaagtaatatattatgaaaacgtagtttaattggtaaacaataaatgaatctaaattactgaaattaaagcatacctatgttgacctaatattcctcagtgctgcctcccattgattctcaagcagctcaagctcatttttatttaa

SEQ ID NO: 110729 - DNA, 435 bp, Glycine max
ctgcagattaacggggaaaagaagagttgagagagagatgggggagcacgaaattgaaggaggaaaagagggagagaagctgaactttgaagtgtgtctcacaagactctcattcattaaagttacaacaagtgttacacatgcttctatttatagcctaggtagcttccttgagaagcatgcttgacttgaaaagcttctttgaaaagcttcctagagaagctagatcttagctacacacacccctctaataactaagctcacctccttgagatgagaagctagagcttagttacacacacccctataatagttaagctcaccccatgccaaaatacatgaaaatacaaaaaagtccctactacaaagattactcaaaatgccctgaaatacaaggcccaaaagaaagaaaaacatattctaatatttacaaag

SEQ ID NO: 110730 - DNA, 300 bp, Glycine max
tgcttccttttcctcttgggttccctctgccaaagccaccttggtttcctcttcctcctctggaagtataattatgaggaaaaccattatttctacaacacttgtcaacaatgtgattggctttaccacactaggtgcacaaatcttttgagttagatgaattagtggtgaccacattaatcagacttgtgtttctcattacatcattattggtaagttgtctttcttgctgagcaacatatgagaaaaccttatctatgctaggcaatggatccatcatcaatacattagatctaatag

SEQ ID NO: 110731 - DNA, 395 bp, Glycine max
atcttgtatgacaatgctggactctttttttcagtggcaagactcgcaagctgatgagagaaagaggcttaagaagaagtccaaggcagtgttggatggaggtcaaaagtaagatttatctcttctctggaagagagaagataggtaagaatgaaattaatgaaaagctagagtttcttataactgaaataaagaataaagggtatccataccaagagaatgaagattagttataccactcagagcaattggcccttgtatttggtgttcttagtgtaccaacttcggctccaatacgcaaaaacaaaaattcacttatctgcactcactgtcattcttttattatgcttgtgacacaatttgttgatagagagataattgtgagggataggaaa

SEQ ID NO: 110732 - DNA, 276 bp, Glycine max
  unsure (1)..(276): unsure at all n locations
tcgtagcttcgattccccttcttgatatttctaccntcttagagtctgcatctattcgctataaaagtgcgccacatgtgaacttgcttagtagtattgagggtattcccctgttttactattttcttataaaaaaaaaagtatgacttccctgtaaaagtgggccgggggcttaattttaaaaacacttgttggatgtaaaagaaaaaaaacttgaaacaaaacatcattttccttgggggggttccttacacataatcacatttgttttaaatt

SEQ ID NO: 110733 - DNA, 304 bp, Glycine max
  unsure (1)..(304): unsure at all n locations
tatgtgttcgcgactggtctctttnttaaatgatttaggggaggatattattgccaccgccttgagngnnngnganntttgttnnggtnatattntttgttgggagcaatattggtcttttgttcaagggctcttgcgagaattgcattctattcccgtaacgcggcacactcctttcgaacgtgggtaggggacaacttgaacttcttcttgggaagttttggctttactaacttgattttgagagagtggacttcttagttctattccggtgcttgaaaaatctatttgatgacgactttta

SEQ ID NO: 110734 - DNA, 310 bp, Glycine max
tcagcttctatccaaatggacttaccttgaatttatttttttgatagcccttttgagccttgtttacctttccttgttttgaatctcactacaagccttaaatgaaaaaccatgatattatcatatccttaaggaattttggaactttggaattgttttgggaataagtgtggggggtttttgtttcattggacaacttgttttgttggctatgcttcatgatgtattttgggccatacttgatgtacattgtatattggttaaatgttggacatgctgaatgaaatgttgtttctcaaaggctaaagag

SEQ ID NO: 110735 - DNA, 338 bp, Glycine max
  unsure (1)..(338): unsure at all n locations
ttcttacacccaacggcggggcaaattatgaaggggggagggaataagccgagacgattcttgttnttgttntaggggggnnntgnnnaaaaagtaaaaaacctccccacccacccccccccacaccccacccagatganannttnggnngagaagtcgggaattgggaggcggaatcagaatgagcggggaggagaagctccatctaataagatttaaccaattatgctgacaaaaatagaggcatgcttatagaggggatgacgatgaggcgtcccggatactctaattgggcgaacaggatggtaatgagcaaaggaatagtgaataatatattc

SEQ ID NO: 110736 - DNA, 308 bp, Glycine max
ttatactttgatgcataagtttgaactatttcttttacaaatcttgttattatgaatgtatgaatacatgattttgatgatgccaaagaataatcaaacaaggttgcattcaagattacttcaacaaacattcaaaggataagcattgcttcaagattaatacaaggttacttcaacaaacaagcaatgcttcaagattaattcaagatcaaactttgcctcaaaacaaagtgtttcgaagacatccaaggttgtggtaatcgattaccaggcagtgtaatcgattaccagaagacaattttgaaaaa

SEQ ID NO: 110737 - DNA, 382 bp, Glycine max
agcttgaatgtgctagcttgggtgtatttttgcagaaagctttttctaaatgaaaagaactgcatgctttattaaagtgtgttcaaaaggcctcattccactcttgtagaagcttagcttaaatgctttcaactcttggtctcggggttgaaagagtactatatgatatcaaagtgtgtgaataaaatatttgaggaggtccaccagtatcaggatcgtgacatagttccacaggtggggaacagtatgacataattgacattaaccaaacttctcatacatcatataagggaaaggaaaaccattgcctctaaaatcttatctatgatggccatgacaggttaactttgaattactctaagcactgtttctggcaggtgca

SEQ ID NO: 110738 - DNA, 306 bp, Glycine max
tcttctttagatgtgatggagttccatcttttttttttgtcactctatcattaccaccccattttagaaaatcgtccgcatcatatgccttgaatggcctcagagagattcttgaatgatccataattaatttatgaaaactatgcaatttgtgaaataaggcagcccttcaaaataattctttcatttgcaccaaccatacttgtatccgatatatggtcaaaatatatactaaattcttgtgcaatatctaaaagggaatattgcctatctaattgaggtactaatttattgagaaagacaata

SEQ ID NO: 110739 - DNA, 420 bp, Glycine max
  unsure (1)..(420): unsure at all n locations
agcttgtctttcaccctanaaaaacgttattcttaaatttgtgaaccacttttttctctttcagtttcacacatactgatttttttttgtaatttactgtgtaaaaactacttttgtgttgtatccaaacaaacttgcctaaacaaaaactaatttaattataatcgattgtacatataatcgattattgaaataatctaatcttctaaacttgatgtttttatttgtaataacagcttcgactttttcttcttttttttttatactatagattgactcttaaatttttggtccttggagtgagaccttttactcttttttctccttcatagaacctggtcctctagtacaactaggatgtgggacaatttctggggctgttggagctacttgtgtctatccattgcaggttattcgaac

SEQ ID NO: 110740 - DNA, 310 bp, Glycine max
tcctctttttagtggaagaacaagaaccttattcttatggtctaagtaaaagtgcaagaacacatacctaatgttaaatggatacaaaacactaatcataatattgataccagatgttacttattactcaagtgattatttattgtgtttatttttcttaccgtgacataaaagataaaacatttgtcttctatatatagttgatcttgtcttgataaaaagataaaaaaaatatgttgcccattttaaaagaattaatcaatctatatgcaaatatttcactcatatccatattaaaatattttctatt

SEQ ID NO: 110741 - DNA, 417 bp, Glycine max
  unsure (1)..(417): unsure at all n locations
agcttggcgggcctccaaagattagattctcntttttctgccatccttccctctctatgtcacttcaccattatcctttctaccctaaattaattcaatcctttatgcttttttttaaatccttaaataatataacatcattttaactaattactctacttgatggatctgagtttaaacatgtgacaatttaatataatgaaaaataagattttaaaattaacttacagatttatcctttttttttttaacttacttcttactttaaaacaaataaaaaacctggtggttcatccgcgaatttctatatattatttttaatacacatctaaatcaaaggtacaaatatttactgtacgctctaaatatatttattttcctatcttttatcggatggattagacctttttattttgt

SEQ ID NO: 110742 - DNA, 310 bp, Glycine max
ttgatagtaactttaccttccataaatctgttcttcatgagtgaaggttgccgtaaatcttgcaaaacctgatccaatagataatgcaaacagagggctgatgtataacttgctgtatttgttgtatgcattaacattaaagtcatactctggggttaagatcttggtggtgtcatatttatgtccactggccgtgaacaactggttagagaatataggaaacttgtgggcatcaaaagtgttgaacttccagtatcacacaggtacaatgatgtagatgaacatgataaatccaattcccacattaact

SEQ ID NO: 110743 - DNA, 432 bp, Glycine max
  unsure (1)..(432): unsure at all n locations
agctntataaaggatgtgacgagttttatagtgtctgaagccaattggntgtatcttattatcttatttaaaatggattttgtgagatgattttggctaggatttttattccattgctttctaggtagaaagcatcgctattccatttgccactattttttagaaataattatttgaaaagaaacacttgaatttggtgttgtacttcaattaagctgagaggacattcacataaaaaaggacaaatgacaaaacttcaagtaacctttgtttatgttgttattattgttatggctagggttaggtaacctctatttttgttgttactatctggggctataggtaactaactgtaaatattctgaatttatgcagggtcgggtagctgtctctaataaggaacaacattatttattgactgaactatgaatg

SEQ ID NO: 110744 - DNA, 301 bp, Glycine max
  unsure (1)..(301): unsure at all n locations
tttcgatttattctatgcacccgtttttttcacattgngtttcgggcatttttattctcattttgtttactttttataccccctgttgacatgcttaagccattttacttaagtcgtttctcgcttaacttaaaaataaaataaatttccaccgaacgtttgaattgtattatccattaactttggttaaaataaattacgaccgttcggtcgtgccgtaaccacgttggaaatcaaaaagaggtaaaaaataatataataatcaaaaagacatcttttagtagaataaagcggaaaatca

SEQ ID NO: 110745 - DNA, 311 bp, Glycine max
tactcaatcttgttttgaccatggctactcgcattttttttttgttttgagtatgagcatgctgtcaattttgaattatccgtgcatcaatgtacttctctggaaccttgtatggatgagatctggcattttttgtttgtttggagaaggcatgattacgggtggagcaggagcaactattttctacaatctgaagcataggcaccctactcttgacatgcctgtgattgactatgatctatcacttcttttttaaccaatgttgatgcttggaatcagtataggagttgctttcaatgtgatttttcctg

SEQ ID NO: 110746 - DNA, 425 bp, Glycine max
agcttgtaaccattagaagataatgttcatgtgaatagaagtatgactgaaaatgttagtcagttgttagattgattatgaaggaatgcattgaccgtatcccggtgagagtgtgatctttaaattttgagagaaacgattatcatttactactaattttcgcatgaatctctgaagtatggactgaatgcatgaaattgaggacgatgaaggccatgtttgattgtgatagccacttagccaaaaagctgaccacgtgcttgaatgatttatcccttgcacttagtttgagctgaatgaattattgattgattgaaccctgagcctatatagtgttatctccagctaccttgacttaggtcgtaggagagcatcatccacaggaagcatggttcaaagaaaatttgtcccaaatgtgggggagt

SEQ ID NO: 110747 - DNA, 262 bp, Glycine max
aaagcaaagagttttgccttctgaagaaattttctaactagaaattttcttctcactcgcacatgatgatgcatgatgcacaaaagatatgaaatggactaagattcaaaattcaatataacaactaataaaaatgccactcaagagagttaggcatgcaaaagacaaaacttcttcaagcttcaagcttaagtcttcacatgttgctccccctatctctaaaaatatggtgatcatcctaaaagtccataggtctaaagcc

SEQ ID NO: 110748 - DNA, 365 bp, Glycine max
gttcaaccatatactaattcttctgtcaaacaatatgtgaaagaaatactcgatcatgatcgttataatacgaactgttggttctattcattaataatttatttttaaatgggtttgaaaatggttatatattagattttacatatgggactctagacttgaatttctgtaaattatgtgcgacaggtttacaggtgttcataggtctaggtctacccgtgacccaacctgacccaaaccaacccaattatattaagttgagttttttaattgtttgggtcgaaccccacccaacccgatgaaattcaatcatatattggtggataacaggttttattttttaactcgacccaacccaaccatat

SEQ ID NO: 110749 - DNA, 299 bp, Glycine max
cttcttatggactcatcaccaaagctttcttttttttggaaaaaattacagggactccttcggccattggaaaatgatgacgtctcctcccagtggactatctttctaaaatggcactgatcaaaaaccatctactagccttctttttatcacgggtgctgtcctccaatgctttaactaccgcctctctggatttgacaattcccgtttcaagatctgatcataggctagaaagggcggatgaccatacacttgatcaaccagggagccgaatgtagtgttatgctcatatctatctt

SEQ ID NO: 110750 - DNA, 401 bp, Glycine max
cttaagccacctgcggcatgcaagcttacaaagaaaacctcacatttcttttatgcccatttctcaggggagacatccgatactccttgatcctacatacagaagccagtcgcttgctcgagatcatgaaatcaagaatctgtattgtcatcactccataatggagagattgtaaatgctattggctctgatgtcataatgaacatctttgttatacgaaggaatatgatgcaaatggtctttacaccacagagattcctcactggccttcgagattccatgtctcgtcatcgatatccacacgtaccagtttgggtcggaatatctacttgtggtatgcaacgttccgccatgagattcaaatatagaatggattcactagtttactctctggtacacgt

SEQ ID NO: 110751 - DNA, 305 bp, Glycine max
tgaactatgcggtgcctacccggtttttttgagtcaaagaaaacccgtggtggccctgagcttgcttgctcctgacacgcatgttattttaggctcgatataactcgagtcgtgggggcttgtgtagtgcctggccaagtggctgaattgaccgatatttgggatatagactctagtaactaactacccacggtggtgaaccaatcaaaatgattaataatgaagacaggatgcgttataagatgtacgggaatcaattagccatgggtgtattagattgccaatcttgataacgaggtcataga

SEQ ID NO: 110752 - DNA, 407 bp, Glycine max
atctttacctacctaagtaagtaattaactcactaacctgctttctttgaagtcagaccaatgtctttgttgccgatgttggatcgaacgccctgctggaaatccttgattcagaagcgaaatttgtaatagaatcaatatataataaaaaaaattagcagaatataaaaagtattctttgatactgcatccttgatcgtctttaagtcgaggtgtacatgtatttaatcttttggcctcataatgctcagaacaagtcatgaatcgattgataaacaccaatgaatgtacacgaacacgaacacgaagatacttgaaatcatgagcaggttgacaaagaagcagtaaggtacataaactatatcagaaaaaaagtagatattttctataaaaaaatagtagagact

SEQ ID NO: 110753 - DNA, 297 bp, Glycine max
tgtaggattatggggtacccatctcatgttgtactaggtggcggtcgggcgatggtgcacaacaagttttccatgtcaacaaatcgcgcataaacccaccatcccctgttgcccacctccaactgagctcacgtactcccacgtagcccatatcctcgtttctctcaacacgggtccccatcaatcctcccaagctttcccaacatccaagtaatacaacattcaaacagcacaaattatcacagccaagcaaaacagggaaaaggcagaaaactctgcccaaaacaccaaccaaaa

SEQ ID NO: 110754 - DNA, 409 bp, Glycine max
  unsure (1)..(409): unsure at all n locations
agcttctcattgtatttntctcaagttatcttctcaaggaagctacctattctagaaatagaagcatgtgttacacttgttgttactttgatgaatgatagtcttatgaaatacacttcaaagttccacttctttccctcttttattccttcaatttcatgctccccccttctctctttcttttcctccattaaagcatcctcttcaagcttcttatccaaagcaattcttggtggtgaagctccttcttccttggcttattccctagtggatggtgcctcccctatcctcttctcctatgcctttcgctgcatctccatggtgaaaaatcaccattgaaggaccttattaaagctcaaagatccagcctccatagaagctccgcaagcaagcttccatcacatcacta

SEQ ID NO: 110755 - DNA, 299 bp, Glycine max
tggtgatgtctttcactcaccatttcttttccagcgcctttattcagaggttcatctccttaagcacctcaaccatgactctatgatgatcttctatggttcttggatcgatgtcaacaacaaaacctttaactttgtcactgaattgttcacctccggcacccttagagagtaatcaatcagtccttaaaccttgtttactaatccatgcatgtagcttaaattaaccatctatatttggaaattatattatatttggggtaacatactatgtatttatgtctataggtataggcaga

SEQ ID NO: 110756 - DNA, 416 bp, Glycine max
agctttgcttgaagtccaatagatgttgtctattgtttgatactagtgagttctaaattcaaccttaccatattctttgaggtcactgagaaatacttcaatgacatgcagccatagagggagagataacgaagagagtccaaatggatattgcttcggaggcttctaagggaaaagcaaccacctagatacaatttctcaagctttttgagagagaaaactgatggatgtacactagttaaccctacacaaaatcggagatccattactttaagatttgtggcctttgataggtcaggcagctcctttagttgtgtggatgaatggagtataaggatcctcatattcacaagatcctgcatgtagcaattaaaacaaatgaagacatctcagcatgagctaatgaaagtgggtaa

SEQ ID NO: 110757 - DNA, 306 bp, Glycine max
tgattaagaatgtcttgctggaaaagattcattattgctgtttgaaaaagaaaaatctgaaataaattctataagtaattcttcattgatccctccccaaaatgaaaaaagggagaaagggaatacttcaaccgtggagaagtcacgagaagatggacctgtgaatcctcttgccagtatggatattgatctaaaaaatcatttggaagatttggtttctttcaggaattcatacttcagtgagagcaatgataatataagccagccttttctgcatgacgaagacttgggtaaatgccaagaacc

SEQ ID NO: 110758 - DNA, 441 bp, Glycine max
tcacctgccgcatgcaagcttattcagaatcatttctaggatatatattttatgaaatgaacttttccataagttcaaattagtttatccataagtgaaaaatgatcttttaaagaagctataaaagaaaacttctacaaataatcttatgcataagttaattctagtgtatggagaaactcatttcatttttcttcttattttcttattctaaaggtgttgttggagaagtttatccaaatagacccatatttatcacttgtgaggagtacctacatgaatccctctggagttttaggccaaaattgaagctctctgtactgggtggggtatgtgattaatattattgaatctgaccagtcaagtgtttgctctccagaaactacacaacccttcccataaccttgtgtctcacttgaaaccattgcatacgttgtcttc

SEQ ID NO: 110759 - DNA, 308 bp, Glycine max
tgtcccctatatgaaagatggagtcgcactttttctgtgctctacactgtaattgcaggggaattgaacggtccaaggagttagagttgtatatgagaaccaatgatgacaaccatattaaaccaattgaagaaacatgtaccttccatcttggcattaaagaagaacaagtttcttaagttaacaacccactttcaatggaagataagaacaacttacatcatgttatccgagagcatgctaacctatttgtatggcccgcgaccgacatgccaagcatagatccaaccttccattgttgtagatta

SEQ ID NO: 110760 - DNA, 352 bp, Glycine max
tcccgagtctcttgctgacgctgacgacttacaatcggggacgtcatcttgcaaaacatattttgatcgtgtagtgcgaagatgggatcaaccatgtggcacattctccgcgttccaccctcttgatcactaatgaccttactgtctccgctctaatttgtgtagtatgactgtgaaccgagtgtgacacttcaactatttagtgatatttattacggctctcttatgtgtacagtctatgttctcatttaactattttactttctcacgatgtacaatcaccaatgaaggaccttactatatttataggtcgactaaccaaaatgtctcttttaaaaaaaccttcatgttt

SEQ ID NO: 110761 - DNA, 431 bp, Glycine max
agcttgtaaaacacctaatccggtatgtaaaatttctttttgaaataacctttctggtatgtgaattttttgtatttcaaaaagattattccaaaataaaattttacgttccaaaataagagcatgaagcaattagggaggtggagaaaataattttccaattttttatgactttttatttgtgtgattctaggcaaccaagtcttacttttggttaggtgaagtttaatcaaaatgggcatcgaagacattggtctttgataaacacatctctcttgtttacttttacaccctcttccacgtattttgtaattactttttccaaatatatctttttttttctttttacgaaaattaatacaccccattctcttctacaacacaacaagatagaacacaaaccccacctctgataatcaaccattcaccca

SEQ ID NO: 110762 - DNA, 305 bp, Glycine max
aaccgtaagggatacctcctgagagacttttgttctgccatgttacaaatgtagggcttatccctgggaggggcgggcgaagggatggaagcattggcgcctcttttgtcgaaacagagctccaccatcccatccaagcacgcttcttcttcttcttgatcagcgccggcggctgttgtttgggtgtagaatgcgacgaaggtggcggtgtggggcatgatggacctgcggtcgaagaggtactgtttgacaaggaaggcgaggaatttgacgtaaggttgggggaggagcatggactcggcgaa

SEQ ID NO: 110763 - DNA, 425 bp, Glycine max
agcttcttttggacctataacaaactttcttttttcttttcagaaccatgctatgtgctcgcgactggtccctttcttcccttcgcaacttgagttcactattgctaccccatagagctccgcgaaatttgttccggccatattcttccttgcgagccctcttggtctctcgttcaagggctcttgcggtgattgcattctcttcccgtaacccggcacactcctttcgaacgtgtggagcagccaacttgaacttctccttggcgagttttgcctttcctaactcgcttttgagagtgtggacttcctcgtcctcttgcggtgcttcaaaattctcttcactgacgactcttaacttggcgagccaatctaaacctcgtatgcgaacttttagccattcgtggtacccaccaatgatgccatta

SEQ ID NO: 110764 - DNA, 309 bp, Glycine max
tgtatactgaattgagtatggcgcatgctttgtttgtctgatatgccttttaaaggctggaaaagtgcaagaaaatgagctgggttttctgcattttctggaaaacgcgatgaactcgcttatcgaacatgctgcactaagcgagtttatcaatactcattgtatataagcgttatctgaagaacttcgctaaatgcacttaccatgctaagtgagttcatcttttgaggatgaacactcatcctcttactgaactacctgtggcttagcgaggctgaatctctaatccctggtaacttaaccaaattt

SEQ ID NO: 110765 - DNA, 422 bp, Glycine max
  unsure (1)..(422): unsure at all n locations
agcttccatcagtatggtatatcaattaatatcaaccacttcttccatatgcaagttttacttgtcaacttcttttaggtctttccaaatatggtattgatgtcctcaacaaactcaaaaacatgctgaccagctaagggtatcgacataatttcatgccctaacttccattaaaaacttttttcaatcaccggtaggggtgataaggtttgagaaaatgttgatgcctagtttacacaatttttcttaaattttgtagttgtaggtagcttgtgccttcttcacagataaggcatgcatgatagcccttaatactatatctactcaaattcccatatgctgaaaattcattaatggtacaaaatatcattgcacgcaacttgaatgtctcaatttgatacacgtcanacacgttaacccct

SEQ ID NO: 110766 - DNA, 304 bp, Glycine max
cttggcagatcaaggagagtggaccttcttcattgacatattaacactattggtgtttgggaccatactctttccaaatgtaaacgggctagtggatttagcagcgatcgatgcttttcttgcttatcatcacaacaaggaaagcctgatcattgctattttggtcgatgcatatgacacattcaacctgagatgcgaaaagagtggtgcaagaattgtctgttgtacaaccataattccacgccctatcgaccaaagatgaatggggcagttgaggctgccaataaaaatatcaagaaaatag

SEQ ID NO: 110767 - DNA, 422 bp, Glycine max
  unsure (1)..(422): unsure at all n locations
agcttatctcttttcttgtttaattattatattttgnttttaagccttgtattttgctatgtttttatgacatttgaacacttagtatttcttttattatttgattagtatgactgaacatgatgattatatttacttgctcttgcttgtttatgattatgtgttttaaacttaattactttaatgatatatggctagtggtatgtactgacatttggtattgtgttttatgtatattttttttaattattcatatgttttatttgaatattgtggatgattttctagtttgtttgatgttatgaatgaagtattgtctttctaagtttgatgaatggataagttatcttgtttgattgttttctatntatttgcatttgatctattcatgtttcttgcttcatgaatggtctatattcttc

SEQ ID NO: 110768 - DNA, 304 bp, Glycine max
tctagattagtgtaccagatgatctctgtcccttccaaactatcttgaaagatatgcatcaattacttctcgtccctggaatatgcacccatcttgcgacaatacatttttaggtgattcttaggacaagtcatccctttgtacctatcgaagtcaggtactttgaactttggagggataacgacgtctggtaccaggcataggtcggtcatgtctacgaacggataatcgccgaacctttcaacatcccttaatctttcttcaatgagatcgagtttcccctttccttccgctgcccggggtg

SEQ ID NO: 110769 - DNA, 409 bp, Glycine max
agcttgtacacgacaacacctacaaattctcttaatccctccataacaaggatgctcaataccaacacgctctttcccaccttctctctgtctctcaggtatatttgcaattcatgcatattgatatgctcatatgcaaaaactagtttcaaattttattcttgcgtatggtgtttgtttattatatgcatagtttgtcaatcttccttaaaactttattttaatattaatggtatgtattgaatgtttttaatggttgagataggtagcactgacacagaagtgctgaatttattggcagttgaaaggagaagagatacttgagcaattcgaagcttctagttcttctgagccggtcgcttctataactcatgaaacagaaagtgaatatgatgatgctcgggaaagt

SEQ ID NO: 110770 - DNA, 305 bp, Glycine max
tgttatcgattaccaaggcttgttatctattatcaaaagatttaaacgttttataatagccttcagaaatttgaatttaaattttaaagcctgtaatcgattacaacttgtgtataatcgattaccagaaatgaaaattcaaatttcaattctgaagagtcacaactcttcagaatctaactgtgtaatcgattacaacagttatgtaattgattaccagtaaggaattttcgaaaataactcccaagagtcacaactgttcaacaagtttttgaatgaccatcaaaggcctatagataggtgac

SEQ ID NO: 110771 - DNA, 417 bp, Glycine max
agcttgagctcccgtgatatttcatctacatgtattccacgtccatctgacctgcaatttaaaaaccaatttcgaaatcattcagcatcataattcacaaaagtgtgatgagaatctaaataatcctacatttgttaaaaatattaaatgaatggtatcaagtacaaataaaatgttggatgtgtaactcacatatctgaatgctgctccaggtagtccataatcaatttatcaatacccttaagtccatccacgctatgctgtgcacttacctgagatgaggaaaataatatcaatccaattaaacaactgtaggaaatagcaactgtcatatcaaatctcgtactgggattgatgatggtgcctgagatccatttggtgcacttttgccaggagtgttcaaagatgagccagatg

SEQ ID NO: 110772 - DNA, 306 bp, Glycine max
tctttgttggggagctctattgaacaatcttgatgtaacactcttactatctattaaatgttatttttctgtgttcattgcttctatctatgcttattttacatgcttgtggcttgatcacccatttgtatgtgtagttgggctttttagtattggaaaatgctttacaaccttaaaacttgatagagcaagctagaaatctgtatgtctaggaatgaagtgcagtgatctagtccattttacgttgtaagcttagtgtaactcttttagacctagtttgttgagggatcatggacgaaatttaaa

SEQ ID NO: 110773 - DNA, 413 bp, Glycine max
  unsure (1)..(413): unsure at all n locations
agcttataaagaaatatgatgacattgttttgacccaatcacattatgttgaaaagctattgaagaagtttaattattttgatgtgaaacttgtttctatgccttacaactcatatattaagttacaaaaaaaattgggtgaagttatttcttctcataaatattctcaaattttttgttctttgttgcatttgacaaacttctctagacctcacattgcatatatagttggtagattagaaaggattaccataatcctgatcattgtcatttgactgcattagaaagggtttttagatgcctaaaattgaccattcattatacacattttcctgttgtgattaaggggtttagtgatgcanatgggatttttaattctgatgaaacaaaatcaacaagtggttgtgtcttta

SEQ ID NO: 110774 - DNA, 299 bp, Glycine max
ttcttgagaaaacttgcttgagaagcttttttgagaaaacttccttgagaagatagagcttagctacacacacccctctcataactaagctcacctccttgagaagcttccttaagaagattcctaaagaagctagagcttagctacacatacctctctaatagctaagctcacctccttaagatgagaagctagagcttagcttcacaccccctataataactaagctcaccctcatggcaaaatacatgaaaatacaaaaaaatccctactacaaagactactcaaaatacctcgaa

SEQ ID NO: 110775 - DNA, 393 bp, Glycine max
agcttttggtttgatcaagaagtgctttatgaatcctcccgtgcttatgccaccagttcctggaaagcctctcattatgtacatgacaatcttggacgaatcaatggggtgtttgcttgggcaacatgactaatccgggaagaaagagcgcgctgtttactaccctaagtaagaaattcacgacctgtgagatgaattactccttgctcgaaagaacgtgttgtgctctagtatgggcatcccatcgcctaaggcagtacatgttgagccatactacctggttgatatccaatatggacccggttaagtacatttttggtaagccagctctcacgggacaaatccccggtgggaagccctgctattccaatttgatatagctacgtacccaaa

SEQ ID NO: 110776 - DNA, 305 bp, Glycine max
tcttgaaggtggccccttatcttcctttcatttttccaggcaagcctcattccacctctggtggcaaggacagtcaagtcatgaacatggatgaagaatccccaatgaaggtcctaactgtttgcaaagcaactaggggaaattaagatgatgtattcgacataaacctgggcaatgacactattaacaatggcccaaaaccaatcaaggagcttgttaatttgcaactcaaacctaatgacactacgaaggaatatggatttattcgcattgtaaccatctgatatgccatgtatccatcctaa

SEQ ID NO: 110777 - DNA, 417 bp, Glycine max
  unsure (1)..(417): unsure at all n locations
gcttggagacccttatcattntgttgtttgccttatcgttgacggcattcattgttggagactattgatattgagcattatcacaagtacaaatgcaaaacatacttttcttggcctagtttatgttagagtccttttttacgttgttttatgttattaatgactattgttgtgcgtataattaatgtttatcatgagtgaaccttggattcccatttgagattcaatacaatgatacttgcagatagtttgcattaatcgttgtattgaatcttgaattgtgcatttggacagtttggggagactcatatttttatggtagattcatgcattaaggttaagatttttttgttaaatttgatgaaatttcgatacaatgcatttctagttgttctctgaatgcatacttgattatcg

SEQ ID NO: 110778 - DNA, 306 bp, Glycine max
tgtaatattggagagtatcttaaggattgattatatgtctattatgcaaattgatcttttttctgcaattaacatatcctgcgtatttttgtttaatatgaatagaactttccatatatgtaattcatatctcaatatggcagttatacttataaatggaaatataagattgattcacatatatatttcttttaaacaaaaccatgtaaactagtataaatgaataattcaaataaaattctcaattcaatcagtgtttggatagactagatgagcactttctgcttctagtagatgaggtatcca

SEQ ID NO: 110779 - DNA, 377 bp, Glycine max
gacactatgggctacctccatcaagagtactcagttgaaattcatagttcggtggagaatataacttcccagcgggagaacatttatactccgctaacccttatcaacctgcttaaccctaatgatgacgacacttagttgtgttatatgtgattgtcgcaacctacccttcaacgggagggcgaggcgaaacgcaatagtgtgtcttctcatgacgaaaacacatggagtccgcaccaacaattattcaaggaaaacgttagaaaaaccattaagaggtttgtaaatgatgaaaataaaggttcgggagttgttacgcttggggaaggtattagcacacctcacgccgccacaagatactgtgccctttaatcgag

SEQ ID NO: 110780 - DNA, 305 bp, Glycine max
tctgaatttatattgagaaattgcttcttttttctttcctgtcaatccctcagccactatatcaaagaagaaaggggccaaggggtcaccttgtctcagccctctttgaaatgcatatcaatgttatcaattgcagattgcggaaatggcggaaagccaataattttttctatatgatatagtggatatcgtcgctaacatatagcgaaagttacataacagttgaaatataagatatatatcaattatatatgcataaaaaaattatgttgtatgtaaataatattaaaatacatgaaaattga

SEQ ID NO: 110781 - DNA, 430 bp, Glycine max
  unsure (1)..(430): unsure at all n locations
agcttttattaaattacacataatctcactnnttgttcttacactaactcttcaagnacaaaaacatggtattaatacctccttatatgtgtgaaaacattatacttacattccctcaacatctcacccaaatcatacaccaacatctgatacaagaaaggtgaatgtaagagttaaaaaagtaatggatacttatataattatacaaaactttagggagtattattggaatttattctaaataattttatactatcctcactcaagtcatttagtaaagcatattttctccaaaaatgttcaaattatttcctatcccagttgcatcataagcctcatattgcntgagtagaaagtaagggatttagactatttgaatatatagaaactaatacagatttgatagtgacaattaatattaaaaaatcat

SEQ ID NO: 110782 - DNA, 310 bp, Glycine max
  unsure (1)..(310): unsure at all n locations
tgcaagatggaagcaaagaaatatatcattgtttgtgtttaanaaccctcattaattcagtcttaacagccttacccatctatttgttgtccttcttcaagattcctaaacatgtggtgcaaaagattgtatctattcaaaggaatttcttatggggaagtcaccaagactccaacatgatcccttggggaggcctcattgaagcctcatttgcacatgaatcactcttgaggcaaaaatcaaggatcaaatggctcagggaaggtgacagtaacacaggcttctttcataaatccataaatttcagaag

SEQ ID NO: 110783 - DNA, 379 bp, Glycine max
  unsure (1)..(379): unsure at all n locations
agcttctcaaggaatgtttctcaagatatcttctcatngaagctacctattctataaatagaaacatgtgtaacacttgttgtaactttgatgaatgagagtcttgtgagacatacttcaaagttctacttctctccctcttttattccttcaatttcgggctctcccctttctctttctctccctctttcttttcctccattgaagcatccttccaagcttcttatccaaggctcatcttggtggtgaagctccttcttccatggcttattccctagtggatgacgcctcctctcacctcttctcctttgtcttccgctacatcttcatgggggaaaatcaccattataggacctcattgaagctcaaagatccagcc

SEQ ID NO: 110784 - DNA, 314 bp, Glycine max
tcatgcttgggcaatagtatttggcggatggtcaatatctgttttttcatgcacaatgaaaacctaccaaagttaacaagatgtcttggtgcatgtttaatttaatttattgttaagatattcatttttttatggtatataatcacttttgtccatcaatgtgttattcgttgacaaatgcatcattgaaagatgaaaatacaaaatttagttcttgaaagtatataaagtgcgacaactatatccagtcgttaactatcgtccgtcaccgtttataaaatagcctaagtggctcggtgggacaaacttgtcac

SEQ ID NO: 110785 - DNA, 406 bp, Glycine max
agccttgtgtggagcttcaatggaggtttaattatatagaaagccacgtgcgagagggagagaaatggcttctgaacttctttcttttggctgagtgaggagagaaaacagctttgtggttctaaaataaagggccttctctttttctattattttatttaagcaatgccacatgtctccatttgagtggagcaagaagggcccacatttcctttttgactgtgacccatactcagccataaaagtgaggaaaatctgacctttgaaatgctaaaatcctgcctcggtttgcgtgccgtttctctggttccagtttctcgcgtttctatgcatccttctgtgccagttttctaaagcaagccctatttatatataacgctctgaatagaaccccgagcgtgggtca

SEQ ID NO: 110786 - DNA, 312 bp, Glycine max
tcttgctatgcacctttctttgaaccatatttttttgtttaaccgcacaggttgaacaagtgggatataagggatattggtttggtttgttttccttccttggctttgtggagttcaagcacaagaaaaaaagaaaccttgtggtggttttgttttgattgtgaagaagttcatagaggaaagaagggaagcttcatacccaaacaatcagagagagattctccccttctggcttggtttggattgctttggtttgatgtggggttttctttttgtaaattactatctattgttcggcagatgatgattttt

SEQ ID NO: 110787 - DNA, 305 bp, Glycine max
tgtttcaccaataacaattgtgccttctttcttcaaaccaccacacacgcaaaattttgaagaatctaattttcaagattttgaatacgaccatagcttgtatcacagagaagtccaacatccggtggggactctctttgaagggatgtgttttatgacaaaacaagaagttcaacatgctttgcagcagtatcatgtcatcaaaagagttaactacaagacacaactatttaacccaacaaagctaattgtcatttgtgatgacgatagttgtgcttggaggtgtagggcatcatacatccttg

SEQ ID NO: 110788 - DNA, 420 bp, Glycine max
agcttccattgttcaatttcgagggtttcgatatattatgcgtttgaatgagacctccgagtgaaaagttatgaccatttgaatttctcgagagcttccgtttttcaatttcaggcgtctcgatatattatgcgcctgaatcggacctccgagtgaaaagttatgaccatttgaattgcttaagagcttccattgttcaatttcgagcgtctcgatatactatgcgcctcaatcggacctccgaaataaaagttatgaccatttgaattgctcaagagcttccattgctcaatttcgagcatctcgatatattatgcgcctgaatccgacctccgagtgaaaagttatgaccatttgaattgctcaagagcttccgttgttcaatttcgagcgtctcgatatactatgcgcctgaatccg

SEQ ID NO: 110789 - DNA, 304 bp, Glycine max
tttgagcaattcaaatggtcataacttttatttcggaggtccgattgaagcttataatatatggagacgctcgaaattgaacaatggaagctcttgagcaattcaaatggtcataacttttcactcggaggtccgattcaagcgcataatatatcgagacgctcgaaattgaacaacggaagctcttgagcaattcaaatggtcataacttttcactcggatttccgattcaggcacataatatatcgagacggtcgaaattgaacaacagaagctctctagaaattcaaatggtcataacttt

SEQ ID NO: 110790 - DNA, 421 bp, Glycine max
agcttaggctaaattagtctaaaatttctttagctatttaagctaagtctagtccaacaagagggatctgaggatgaagcttagtttaagttagcctaaacctaggagggctatctaaattaagcctagtccaacaagagggatctgaggaaaaagcttggattgattcagtctaactagggattgaggtttagtaatttaggctacaacatagaacacaaaagcatgattaattagagaaacatctttatatacatcagctggtttgttagaaagacccaacatctttacctactactgccaatcttacttacttgcacttttactatttttagcctagacttagtttaattctattctaaatcatcaaattatcaatgattctttcaacaatgccttatttattgaattaaccctgttt

SEQ ID NO: 110791 - DNA, 221 bp, Glycine max
ggaaggatttctcaataaaacgtcctcaggaagcctcctactatacaaatagaagcatgtgtgacgacttggtgcaactcttgatgaatgaaagccgtatgagacacactttaaagctccacttcatctccctctgtgattcccttcaatttcgtactccccccttctctcttgcttgtcctccattgaagcatcatctccaagcttcttatccaaggctc

SEQ ID NO: 110792 - DNA, 313 bp, Glycine max
gatatgttggtgaagttcaatgcttattgttttggtgaacaagttcaagctattgtgttaaagttatggccttgttgaccatgaaagtttttggattgatactagcaaaggtgatgccctcattagtattgcacatttggccgtgttattaaacacaaacatatgttgttaggtgacacattgtggtacggattgagatgaaatattgaaattgatacagatgtctatagctataggggtatttatagaatttggatatagttgggtgagtcactagttaactgtgcgtatagatgaacgggtatatgatcac

SEQ ID NO: 110793 - DNA, 298 bp, Glycine max
tggttcgaggtacttacccgttttagatttaagaacgatgaagaacgaatgaagaacgtcgaagaacggttcaaacctttgcgagattcctcacggaaaacgtttcggaaacgtttcggaagcgcctcggcttaaactttcttcacggaaacaatttttccaagcaaattccaaagagagagaagtgccttaagggctggggatcctcttcttcttcattttctcccctatttatagcaaaataggggagatgcttgccgcccatctcgcccaggcgagcttagctcgcccaggcgag

SEQ ID NO: 110794 - DNA, 431 bp, Glycine max
gcaagcttgaagcctcgaagatttgtctttatgttttatttttggtttgatgattttacaatgcctaaacaagttttatagatgtgacatttgtattgaatgtttttagtttaggcatgataatagatgtagtttaagttttcttatatccatgcttagtgtgaatcaaatatgttagaaaaatggattgatctctaagtttcttagaagcaatgaacttaacaaggtttgattataaggttttgtaatcaattacaaagtgtcaaaacaagcaatataattcacttatacttaaaatttggcaagaagcatcaaactatttgattacaagtttttgttatctatgacagaagaaggaagactctatagtttaagataattgattaccatttatggttattgatgatattgcatctagaaacataatgaac

SEQ ID NO: 110795 - DNA, 307 bp, Glycine max
tttagatggtaccatcaatttgatttttcacatcaacaaagttggcatgccaagtgggatcagagtggatgaattgataaaatgatttgaatcaaaggttgagtcatattagcttacacatttgcactccagtaagactacaaaagacatggaactaacatagaagaaaacgtgtatcaagaagacgactaaaggaataactttaggaatgacgacaacatgttaaatccacatccttggttttaattatgacaaaccattagcaatgcaaattgaaagcatgatgggtttaagtgataactaatgt

SEQ ID NO: 110796 - DNA, 388 bp, Glycine max
agctttcaacgtcttttctcttctcgtcttttgtataatatacatgttcttatgactctcataatagatgagctcaagacaacatttaagccaatagaatcaacaatctgaaagaagatagtgttttttttatttgtggaaattagaaatatgaataattgataatagcttacagattatactcaaccaattgagctaacgatccttctaacattatatttaattgagttacaataagaaattcgaaatattgttttattatttactcattaaaataatcaagtctatggtctttgagtatatgatggggacacatcgaaaaataatgtataatgcacacaatggagatcataatgataagttatttataagaacgaatgacattcat

SEQ ID NO: 110797 - DNA, 364 bp, Glycine max
taaaatccaattgttccaaaggcttaacttcatttgttctttgatccgaataaatttaatccttagttggtagctataaacttataagtaggtataatggaatttagtattcgacgaacagtttatatttgttataacattggtaaagataatgggtttatatgtaatcaaactactttaaacaaaaatggtggatagtaaatatagttatgttttaagaataaatttattatagaaaagtcaattaaaatttaatttaaactgaaataaataactaaataaagacaactgcgttgcataaaaggtaaaaagaaaagaaatgattgggaatagaatgaataatatggcatacttctcattataa

SEQ ID NO: 110798 - DNA, 269 bp, Glycine max
tggacagagtatgatgaactaacgtacgtcaatatggccacaatatgtagccttagaacgagaaaccaaaaatgcctcgtaggaacaactcgaccatgacaaatttttgcagggctttatttggctgctatacttagcacgatcttctaataggggaaaagaatcatcacgggtcaaaggcatgatctttgaagacaagctaagggtttgccttaagacgaaaagatatttgttcttactttttggcgatactgtaaggaatatgtggg

SEQ ID NO: 110799 - DNA, 249 bp, Glycine max
aaagaagcctgtttgttgaagtcagagctctcccttgaagatctaatgcgatactatgcttggacctcaataaggccttacttataagatttttcaaaggctacaaggaacatacgggatcagaatgaaggttttacagagtgtgcctcaaatgatgaagattttgactttaaacactgaaagttataattggtctcgactatacctaaaagacaatatcatgtctgtcatatgctgcgccacatacag

SEQ ID NO: 110800 - DNA, 426 bp, Glycine max
  unsure (1)..(426): unsure at all n locations
agctttaatattttattaattactttgttcaacttactagttctccttttattaatattttgttttgcttaagaacaagtgatgtaatgtaatagagctttgagtcaattatgatgtttgtctatttgatattctgatatgaatttgtttaanttctttttattatatttttatttggtaaagtaaaaaaaaactaggggactacatgttttcatgttgttatagtcctttacacaaatcggtaagcttaacaattgaggttctttgcttgtttaatgcatgagtagtatgtattgtgtgttttttgctttgttataatcccatatgcagtttttctttttagagaacaacaaatcagggctcgaatccttttctttntaaccttctaatgtcaaattcttatgatactattgcctcatttgcagc

SEQ ID NO: 110801 - DNA, 307 bp, Glycine max
  unsure (1)..(307): unsure at all n locations
ttacagatctagtttgtatttgaacatcattttctcatttatggananatttctagttaatttattttaaatttattttttaaccttttggccatttaatttcaattaaagagaccaatacaagattttgtggactttaaacaatgaagaaaaaaaattaaatgataaaatttaacttcacaatatgggttcaacccaaatgaataaattatttaagaatttgaaataaaaaataaaaaatttaagcccaaagtgtcttgtaccaatccgtttggatccaactgacccatctgcaacccccgcttcc

SEQ ID NO: 110802 - DNA, 313 bp, Glycine max
ctaatacccaatctggggaatgactgcggccttttttttttttttctacatcttcctacatttgaagatccagctccttccaggatgaaccatatccatgggagattctatttatagtttgattcaacaaaggttaataaaattttcttggggtactacctggtgtgtgagtgaatgctactgctatgccaggggaagaagaatattataccagattattgggtaactccttttcacgataaaaaaaacttttaatgacagaatcctttatttatttttaaaaaaactaggttgatgactttgatccttaaag

SEQ ID NO: 110803 - DNA, 412 bp, Glycine max
  unsure (1)..(412): unsure at all n locations
agcttattccgtanaagctattccatacaaaacaaatgtatatgatagtcaattagcttagcaatagacaagactaaacaaaatggatggtctgactatagatagcaaaatgtcatttcagaattttataacatgataataaaataagagattatatgtaaccttccaatcactccttatttatttttataaacattttatgattatctttatttgaaaatgaaaaattacaactttcctctgttcccctccaaacacttccatccaaacataactgtccactaggggcatgtataatcagacaaggtaaagatacaaaaacaatactgaagatagacataatcattaattaacaaatctgaatgaagtcaaagcagaactatgagatggttagattctgggaaatctgaaa

SEQ ID NO: 110804 - DNA, 307 bp, Glycine max
gcttgctttggatcaaggattaatcctatttttctagaatctgatgcagttcaagctgtgagtatgtttttcaatttaaattatcctgagtttcaactgtaaaattcttaaggggtttcctagactatcaattataggaaacaacagaatcttgaaacttatgattctcacaaacaatcaataaacaatagataatgttgtgtacctttctccatgggaagacttgtacctttctccataggagcttctctccgatgcactttgatttccttgaaagaggagagaaataagatttcacttccttaag

SEQ ID NO: 110805 - DNA, 422 bp, Glycine max
  unsure (1)..(422): unsure at all n locations
agcttcttaagcactattgtagttgatgaaaataagtatataacaaattataagataaaaattgaggaaaaggattataaactcacaaatttaatccgaattgattatatttaattgagtttatttggtttaagttttaacttttttttttgttcattatagaagattattatatatttttaagtcttttatctttatttattgtctttttatataaacttttaattctatattaatatagggtcaaatatattttactcattaataatactcaaatatattttatttaatatttagttttttttgtgcttatcagtgttatcacattacatgtctcattatttttttaatccaaaatataataaaattattaccaaacttatncagtgtatcactttacatgtcttcttattaaactaaaa

SEQ ID NO: 110806 - DNA, 277 bp, Glycine max
atctgaaaaaaaaaactcaagaaccccataatgctttacacacacacgtaaataaaaaaaaatccaattttatgtccaatccatttactcaaacaacgaataaaaaaaaccatgattcatgaagaaatgaaccaaaacagttattgttgctaactacataataaaaacacgtattgtgggtccagagtttgctggaatctgacattccgacaccaaaattttccttccaaatagcctgatacctaatccttctctttttgagacatgttgttggtgt

SEQ ID NO: 110807 - DNA, 422 bp, Glycine max
  unsure (1)..(422): unsure at all n locations
agctgcttgggagctttatggaggctggatctttgagcttcaatgaggtcctttaatggtggttttccaccatggagatgcagtggaagacaaaggagaagaggtgaggcaccatccactagggaataagccatggaagaaggagcttcaccaccaagataagccttggataagaagcttggaaggatgcttcaatggaggaaaagaaaggaggagagaaagagagaggggggagcacaaaattgaaggaagaaaaagggagagaagttgaactttgagttgtgtctcacaagactctcattcatcaaaattacaacaagtgttacacatgtttctatttatagactaggtagcttccttgagaagttntcttgagaaaacttccttgagaagcttctttgagaaaacttccttgagaagct

SEQ ID NO: 110808 - DNA, 274 bp, Glycine max
tttgagaaaacaaggaagatgacattatgaccaagagaatgagctgaagattggatcatgaacacttcatgaattcaagaggaaatttgattgcaagattcatgaatcaaggttcaagatttaagttgcaagattcaagaatcaagaataatcaatttgaagattcaagaatcatgtaaagactcaatcaagataagtactaaaaagtttgtcaaaacatttgagtagcacatgaatttttcacaaaaccttttaccaaagagtttttactctc

SEQ ID NO: 110809 - DNA, 310 bp, Glycine max
gcttatggagaatcaaaggtgattcaaatgtgttttgatgataacaatgatgatgacaaaggtgatgacaaatagctcatagatcaatcaaagaacaactcaagtgaatcaagaacaattcaagagttcaagataagaatcaagaagaattcaagactcaagaagaaagtttagaatcaagaatcaagattcaaggttcaagatctcaagaatcaagatcaagattcaagactcaagattcaagaatcaagagaaggcttaatcaagataagtatgaaaaggtttttctcaaaaattgaatagcacatgg

SEQ ID NO: 110810 - DNA, 398 bp, Glycine max
  unsure (1)..(398): unsure at all n locations
agcttccatttccgagagcatntcttgtttaagcatttcagcctttgctttcgtgtagcttaagaaaaatgccatttcttctcctttccttcttccagagccatttctaatgtcccaagcactttctccatcacccacaaccaccattagccatcgcaaaccattgttgttcttcgttgaaactccacaacgagaggaacccgtcgattgaagcggaatcttccaacttggcttgcggtttcggtagagaacgaaaccctaatctgacctcttgttttctttcgaggtaaccatggttctatgcttgtttcttgttagtttcatcttgtctttgcatcttttctgactttggaaccgccattgcatgtcttatgcttcctttgaaaaaccttagagaa

SEQ ID NO: 110811 - DNA, 148 bp, Glycine max
  unsure (1)..(148): unsure at all n locations
taattaaaaaagaaagagaaaaatttgaacactttggataccctcggaatccnacagtgtcacctaagaatacttaagcttgcgcaaggtccaaacaatctctttttccaaaaatcaaggaaccggcactaaaccaagaaaaacaggg

SEQ ID NO: 110812 - DNA, 413 bp, Glycine max
  unsure (1)..(413): unsure at all n locations
agctttctttacctatcaaactcatgttacttgctttgagatgaagaaaatgaagaattgagagaactttgagtccaagatgcaagctttccctcactctttcaacatcatcgacaccacccaaaccccaaaaacctacaccatataaaaaaatcttgaaatagaacacttttatgaagctttgaaaagtgaccatgacggaaaaaaatggaggataagaggggaacaatgagggtctcttacctctgaaaccagtccaaattcaaaaggaagcttanccacaaggtcctttgtgctagggattcaaggttggagaggaaaaagagagtgaaatgagagtgtttagttatgtggttcagtttgggttaatttaagtatatgactcttcctcttctttatatgcacatcccatc

SEQ ID NO: 110813 - DNA, 301 bp, Glycine max
tttacaatgcatccaatagatcttcacctatctcaaaaagatctcacctctcttggaaacgtccatgcacaaatgcatgcgagagatcaagccatttcctattctcctggactgcacatctcaagggccatcaatgtcaagatcgttgctgacaagatatgtccatgactacctatgtgggatgttgccaaaaaagaaaggcttcaagttgtactacaatgaagagattccctcaaggcagatgaaggtggaagtagtcaactacccttgaaattggagttcactattcaatgggaagaaa

SEQ ID NO: 110814 - DNA, 400 bp, Glycine max
  unsure (1)..(400): unsure at all n locations
agtcttctattctaattaaaangattttatgatagactattgntaatcattagatgctcaattcatactaaaatgggtcttttgtgtgagtatattttgtgacatgagccggtcattaacttttctaatgataccaattatacaacagatgcgttgtattaacgttaagaaaataacttaatttgacctgcaatttttcattttaaaaggaaaaccagtagctttaatttgatgaatattattctagctagtttattctcttactaaagccacttagctagccacacactcatcactagagcagtgcacttaattctttctcaacatttatttatattcgcctcacgaagatgaagatatatacataataatggaaagcatagtcaaaaatggttaacca

SEQ ID NO: 110815 - DNA, 253 bp, Glycine max
agaataaaagaagaaacgtcgcccagaaaataataatattgacgacacggaaacctccagatacccctcctggtatttggaataaaaaaaaacgatgactaaatacctaaggagcggccatatcacactcgctaataaaaccctataccatgaagaatgccaacaagggcaccccccaaaaacataggctaagctattaaaaataaagaccccgtacaagtataataaatggcgccgtatgaaaaatggcaat

SEQ ID NO: 110816 - DNA, 254 bp, Glycine max
aactgtaaatacattccacctaacaaattaccttccaccgagattcactttggagggggttcattggcttattgcctattcccgggtaaagaaattgctcagtgccccaaaaaaaaacccatatttgcgaaacctaaaaattgaaacattaaattggggtgaaaaaaaaacacgaaaagattacctcaccgcattttgctctactgccggagtatttggtttataaaataccaatgtccaccaattccaatatc

SEQ ID NO: 110817 - DNA, 359 bp, Glycine max
ggaccctaaaccaccgcagctgccactccataccgaacatccattttttttaacatttaacgggcacacgggcaagaaagaactttccaccttccacaacaactaccacacaagggcattaacacgcacataaaacctcagtaagaaccccaaacaagccttttcataagctaccatgaatgaaccacgaagaaacaaaaatgaaagccaaggggaagaaaaaaaggtcttaccacacttaaaacaaccatgaaaggaaaaagaagcttctttttgcaccaagaagaagaaaaactccagctcccaagaggatgatggttctctaaaaaaaaaagaaaatagcagataatgatattttg

SEQ ID NO: 110818 - DNA, 173 bp, Glycine max
tttctgttataaaaatttcgagaagtcttcatattctacaggaacacaattcggacattccgaataataaaagttatttgcccgtttggaatattagttcagagctttttgttttctggtttctgagcgctcccgatataattacgaaactttaattggacatacgaaataaa

SEQ ID NO: 110819 - DNA, 364 bp, Glycine max
tcttaagtcacccgcaggcttccagccttaaatttcattccttctttttctttttttcattggggtgcactttcacttggggagcttgctgcaccaacagtagtggaaattaccttggtcttgaaatgtctggtggtctttgttgggtgacttgtggacccaaaaaaaacatcaactccttgctaagtttttcattcaagaatggtggtggtggtgaaagaacacaaaagaggttttctggaatcattttcgcaaatggtgcctctgctttttcatgatcaaaagtcagaaaggttcactaccattttctccctatgtatccacattccaacgaaaattgtagatagcaaacaaccaaaaaaaa

SEQ ID NO: 110820 - DNA, 308 bp, Glycine max
ttgcggccgaacgaacaagttccgttcctgaggatgacactcatccgctctatgatcgccgtacaccattagtggtttgaggtcctctatggatggttatttcttcaggagcgacgcgtccaactcagggacgatgaatatgcggatttccacgaggagataggtcgccggcggtgggcattattaggtaccccctgggcaaattcgatccagaaaatatcctcgaattttatgccatagcttggccaacaaagatgggtgtgcgcgacatgaagtccctgggtaaggggtcagcggatccccgatga

SEQ ID NO: 110821 - DNA, 280 bp, Glycine max
  unsure (1)..(280): unsure at all n locations
agagattttgctgtgtgaagatctgcagagacgcaagttcgaagcggaagccgttctgagagcttgagataagtttgtgagtgattgtgagatcctagaagtgaaggagacatcctcaccacttgtgtttttgcagtctttcatcttggtcttctctttgttgtaaaggaggtttctggactatggaatgctaaatcctctgttggatcttccctgtaggtacctgatgtaaatatatttctatctatgtnatgatgntttctgtgttctctgtgctatc

SEQ ID NO: 110822 - DNA, 218 bp, Glycine max
gctcgctatccgcaccgtttttttactttaggcctcactgacatatcggaacatagaagaataccttggtcctgctcaccaagatcgtccccatgaactccacactaacatagttcgcatatcctgatttaccaccccatatagatatgttccttgtgaaataaggaagatatgcctgagagagtgaagtatcaggcctcacataccatctggattac

SEQ ID NO: 110823 - DNA, 322 bp, Glycine max
agcttctgctttcaatttcgagcttctcgatatattacgggactcaatcggacatccgagtaaaaagttattttcgtttggattttctcagagcttcagttttcaatttcgagcgtttcgatatactacgggacacaatcggacatccgagtcaaaagatattggcgttagaatttgctgagagcttttgttttcaattctgagcgtctcgatattttacggggctctattcgacatccgagttaaaagttattggcgcttgaattttcttagagcttcccttttcaattacgagcgtctcgatatactacgagacacaatc

SEQ ID NO: 110824 - DNA, 338 bp, Glycine max
agcttagaaatcaagtgatttagtttgttattcagtaatcatcaattccaaaacatagggggagtatgaaatgaatgaaccccacattatatcttgcatatacattacttgtatcttgatttcaagaattaaattgtcatcatcaaaaagggggagaatgtagaagcaaggactttgcctttgatgttttgatgatgccatatgatcatgatgttttgatgccttatgaaaatgcgcttctcaagtttaattcaagacaaaaatccaagaatacaagatacaacatcaagaagatttctagtgttttaggaagggaattccaaactgaaacagcaaaa

SEQ ID NO: 110825 - DNA, 299 bp, Glycine max
taagtacaactccttctccatataaaaagtatgatttcaacacaattttttatttgggggaacggaacatgaatgggctctgccagtcgtttatatttgtaatgcattataacatgggaaagatatatatttaattacaaatcactgatgcaaagtaccatttgctttatttgcgggatgcttggataatttacaattggggaaattctgtgttggtaaaagaacggtatggtcatttgtaaattggagactctctcatttattatgtaaaatcttgtattatggaattaaatgatttt

SEQ ID NO: 110826 - DNA, 348 bp, Glycine max
agcttcaccggatgatgccgatctttctttttctaatcgacatcatccaattgttattcaaggattgaatagaataaccaatggccggtgtcggtcgttatatggcctcgactgatatctttcagccgacattgcgcaatttcttttacaaacgctggccgataatgtttttttatttacggtagaggaagttttttgttttggtgttgcctaaaaaatttacaacgtaggacggctaggtttttccgtgcgagctcaaccgagggttcgttccgacagacactggcatgttgttcttctcatttaagaggataagaaaacgttcgcccaccccggcaaaaacaaaaa

SEQ ID NO: 110827 - DNA, 256 bp, Glycine max
ggggggggggggggaaccccaacatccacaacaacaaaaaaacggacaaaactcgaacatccaaagcaatccccaacaaacacatcaatcctcaaactcccaaccggggtacaccacgccatcaatcataccacctcgctacctcctaaaaaaacactaccaaaaaaaacctactagacaaccctaaataaaaaacctcccctccaaacccaaaataagaaaactccctaagaaacaacaactaacaacacctccc

SEQ ID NO: 110828 - DNA, 308 bp, Glycine max
ctttgggcttaacctaaaccctatttgcaccccctctgacgtggtctacaccatcatgccaaaaatgggttacttcgaattccctccccacgaaaaaaaattattttctaagctttcaagcttcaacttggcacgtgactcgctcgaccttgcagatcttgaactcggaaaatcctacgagctcatccgcaccacgtactccggtctgtgccgttaccgcgtaggcgacattctccaagtcacggggttccacaacaccgccccacatttcagcttcgtgaggagaaaaaacgtgcttctgagcatcg

SEQ ID NO: 110829 - DNA, 282 bp, Glycine max
aaaaaaaaataatttctcgggttttaaaaattcaaattttattggtcatgcccagggttcacgtagaataaaattccgtttctgcaattttgtttctgattcaatctaccatttcattttctgttgattaatggaagggctaaatctccagcgttgttttctcttgaggatcaagcacatctctctttgaggttttgttattactattgaattctgataagtttttcctcttcaccaattactctgtatttgttgttattaatccatgcatgcttagtgctt

SEQ ID NO: 110830 - DNA, 281 bp, Glycine max
  unsure (1)..(281): unsure at all n locations
cacaaancccgggacaccacaacaaaaaggtgcaccaaaaaggccgaacagaaaccaaacctcaaccgtatcccgggggaagtataccctgaaaacaggccaagagtagctgaacagggcacctaagaaggaagatccaaagacaacccgtgaaccggggacaaaaaggagacccatgataaggcacccgcaagtttggggctgccaggcacaacaaaggactcaaaacccgcaagaaagaaaatgggagacaagaacaagcaggggaaatttcagcgggc

SEQ ID NO: 110831 - DNA, 294 bp, Glycine max
ctttttttatgtgttacaaaagggcggcttgggaccaacaattattggaggaacggctggctggtggactgacatatatctgacgaaattttatctcagcaatacaatctgccacttacaattttgcttcaatctttagctgttgtgctctaagtaccatatgtcgcaattactacagcttaggcctgttctgcttttatactcaacgttatagatcttatgtaagaatctacaatgattatattacattaaaactgaagcataattataaaggaaaccttgaacggatatgta

SEQ ID NO: 110832 - DNA, 320 bp, Glycine max
ttgggaaccttttttttttttcatggtgagaggaaatgatgtggggagtctaatctgaatatgccactcatttttgtatatgccaatgcctttggtgttttgatgatgaacatgatgatatgatgcaattgaagcaaatgggcttttcaagattaaaaattctagacaattacttcaagatttacaagttaccacatcaagatgatcactagttaattaggaagggaaattctaattgaattaacaaaaggtttggccaagtaattttaattaaaaagtgtttctcaaaagttttactctctggtattcgaataccagtg

SEQ ID NO: 110833 - DNA, 283 bp, Glycine max
aatttaaacctagccgtcgtcctcagatcccttttgttgggattaagctcaacttaaacaacttacgtaagtttaaactaatttaacctaagcttcatcccgagaatcctcatttaagactaagcctaaattaaacaactttatcatcacatcatattaagaaaactaaaacttaatctgcagatccctcatttaagactaagttttaatcctgcttctatcaagttctaaggcaacagtccatttcccaatgctaaagtcacctaactatacacacaaatgg

SEQ ID NO: 110834 - DNA, 169 bp, Glycine max
ggataaccattgaacatacggcggctgtatcttattctctcaagttgacttaaggttagttttaaagttcacctcaatgctctgacaactaaagcttaaaatgttgttcatttatcatcatcaatcttccatcatcgatcatcttacagcttgaactcttgactcttct

SEQ ID NO: 110835 - DNA, 304 bp, Glycine max
  unsure (1)..(304): unsure at all n locations
cttaccggaaaataaaaatgttcctcattgtcttttcttcactggtttggaactttaaatccaaacacattacatgaaacacctcttatatttcgtggtggctaattgctcgaattccctatcatggtattcaataaattcgtagtatttatacactagtcccaacggatnttatgaaatacgaaatctggttgaaaaatagtcgagctttgcactgaaatgctacagaacgtaattgcgagaaaatgatgataagatgaatgaacgaaaatcgaactacaatagacaaacaaaaaaaatactt

SEQ ID NO: 110836 - DNA, 284 bp, Glycine max
  unsure (1)..(284): unsure at all n locations
aaaaaaaaaaatacccanaaaaaaaaaaaaanaaaaattaaaaaaaaaaaataagaaaaaaaagaaagaaagagagaaagaaaaaaagaattagaaaaatgaaaaaaaaaaaaaaagtaataaaaaagaaagagaaaaaaaggaaaaaaatgaggaaataaatataaaagtaaaagagaaaaaaaganagagaaaaaaaaaggaaaaatagaaaaaagaaagtaaaaaattaaagtaaaaatgtagaaaataagaagaaaaaaaatgaataaggaaaaaagaaa

SEQ ID NO: 110837 - DNA, 326 bp, Glycine max
taccaagaattttttttttttgatgaaagagaataataattttataaattaattttatcatgatttattcattttggttttggagcccacctcattaatattaatagaagtatagggggaaaaacattagttaattttacattgaaaatttgaaatgacaattatttcaaaataaattttttacatgatgattattatgggattgaggaactactctcttttatttaataatgttagttttttaaaattatttttttcacctatttattagtcttaggttgtttcacctatttttaaaaattattataaataaagaataataattt

SEQ ID NO: 110838 - DNA, 322 bp, Glycine max
cttcgctaatgtgcgaatgatagagcgatcttttttactggtcaatcatgtgcctcttttatcacaccaatcatccttacatttgttgtaatgactaacattgtggtaactatgatttatacttcttcagcaatataatatcattggccatctaatcttctgtgctggtttatgcaactggagcccctcttactacttgaatttccaaaggccctatctacttcaccccaattcctgtacacactatcatttacctcaaagagatataataccaccgcttggtttaagaaccataagattctattcccgaaataacaccctt

SEQ ID NO: 110839 - DNA, 269 bp, Glycine max
gattctcgaaagttctggatacatgattacttttggatttggggcctaacttttttattggaatttccgcctttgaagtctcaaatatgatagttctttgggaagcatcaccatttggtctattgttgataagctgagccaaacttttatgggatttacccaagtttgatgatcccatgaatggtgattggttttatgggtatttagaggccatatcacatttagtagcctggtcatattatctttgcataaacatgttctattttaaa

SEQ ID NO: 110840 - DNA, 262 bp, Glycine max
tttttttactttaaggggaaggggggagaaatcactcgcagagggttactcctttgggggatattatgtactttccattcatagtattactgcaaatttgtttgagtggtgagccaattaaagatttacttaatgataaaattttgcgctgatgaactctgcttaccggctgttatatataatttaagacctcatgcttgtcattaatagatctatgtgtgaaaatctacaaaagaatggcggactgaattactcattttta

SEQ ID NO: 110841 - DNA, 310 bp, Glycine max
  unsure (1)..(310): unsure at all n locations
agctgcactaagagtgcagttttttttttttttacncggagggattctcttctgagagtctcccaccctcctcggacaagaaacctttggtgagggcgctttcctgtactcagtaacatatgtaggctaatctttgtccgcgggagtaagtcgggccatgaccttaatccacctgcccccttctcctaccataattttagggtatgataacctggggaactctacttatcctacaaaaccctatatccttaccccccgttgggaactctgagaaattcatggagcttgtaaacatcatttggggtgctaa

SEQ ID NO: 110842 - DNA, 340 bp, Glycine max
  unsure (1)..(340): unsure at all n locations
agcttatggctgaagnaaccttttttttgtgcgagaaagnnacttcaggaggaagcaagcagctcgccaggcgagctgctgggcaacctccacccctcatttcctataaatagtatagaagcatatatgatatgaaattttgatgatgtcaaagataagcgcttctcaagtttgatccaagagtcacaactcttcagaaaataactcccaagagtcacaactcttcagaaaataactttttcaggaaataactttcaagagtcacaactctttaaaaaataactcccaagagtcacatttgttcaaaagatttttgaatggccatcaaaggcctataaat

SEQ ID NO: 110843 - DNA, 343 bp, Glycine max
  unsure (1)..(343): unsure at all n locations
catgaagcttgtggattatggggttcccttcatatgtggnactagggggcgaggaggcgatggtgcaagtcgactttccacatccacaaattacacattaatccaccatccccagttgcccaccttcaattgagctcacgtactcccatgtagcccttatcctcgttcctctcaacaccgggtccccatcaatccctccaagcttccacaacatccaaacatcatgaactatcaaaaccaaacaaaaacagggcagaggtagaaatctctgcccaaaacataaaccaataccacagtttttcttactcaaataccccagtaacattcccttcgttccaattcg

SEQ ID NO: 110844 - DNA, 340 bp, Glycine max
  unsure (1)..(340): unsure at all n locations
agcttgtagctgaagtttttgtttagttctgaaattggntaagcaatagcaaaaaacatattcccctgctttcatttactggaagatgaaaagtacttcatctctctcttattttgattaaacatctgaatctttatttttatgtgtttacaacgtacattacattttcatgatagtatttttatgttacgacctctactagttagttaacaagtataatttattataattttttgtaattcatttttttttgttggttccattggtttttattttaaatacctattcttattttataacatatatggtagtagctgtaacataaaaattggtattgaat

SEQ ID NO: 110845 - DNA, 312 bp, Glycine max
ttggcgaatgtagtgatgataaaaaagtccaataggatgtggagaatgtgcattgactacacaaacctaaataaggcctaccccaaagattcatacccgttttcgagtatatatcacttggtcaatggagcatccaaattccccattctcagctttctagatgtgtattctaagtacaaccagatcccaatgttcaagtgagataaggagaaaatcgcattaataactgacacgactaattattactactcagttatttcattcatccttaagaattctaaagccacttattagagattgttggattttata

SEQ ID NO: 110846 - DNA, 300 bp, Glycine max
gcacatcgggcgcgtgtatgaaatccactccacaaaggttgtagtagaagaaacctttcatcctataacgcaacgggcggacaaaaatgggccgttacttgaatggccattactgtcaatgccgaaggtattctgcgcttcactatccatgttcacacattattgcagcttgtggttacgtgagcatgaactactaccaatatatagatgttgtttacaccaatgagcacatcttaaaagcatactccgcacagtggtggcctcttgggaatgaagcggcaattcctccttctgatgagg

SEQ ID NO: 110847 - DNA, 286 bp, Glycine max
ctcgtcatcttgggtttgtttgcagactttactaagtctcgcccctctctattaggtgcagtactttttcacaccgggtcctgaaacaaaaaagctgctgacttgaccttaactcattctgcctactaacctactaaacagccaggagcagctcctcatatggcagccatcacccccaccacccccacaccatacatgcactgtgcttagtcttgtacttgcctctactctaccccccggagtggactcagctaggtctacgaaactatgggcatacttgcctgac

SEQ ID NO: 110848 - DNA, 311 bp, Glycine max
ttttttgtactattaatgtgttggtcgaaaaacctgcccataatttaagaatccaaccgaaaggttaatctctaagtttccataaggaaagatggatccttgggaaaacttatctccctttgcacatttcatgacatacatgttatctgttggaactagactaaattcaagctcatcccaattaatgtcagcatatttttccccagcaatactgattttcagacaaaagagggtaatcaaagttcatattcaaaatcaccaataaaaccaagttcatacattattatcctactagtacaataacattgtcg

SEQ ID NO: 110849 - DNA, 295 bp, Glycine max
gcttacctcgacgaccgacgctgacaatgcctccttcacaggggacgcttgttcctgggtcctggcttctttttaccgaacacggctcctctttaccggggttcctggttcgtggctgctcgtgcttcgtcgttcatggccgaggaagaagaagaagaatcaaacggagaagaagaagaaggtagcgcgaggaagaagaagaatggctctggggaagaaggtagcgcgaggaagaagaataatgactctgtgcgaggaaaaaaataagaactgttgggtgaaatgagagagagag

SEQ ID NO: 110850 - DNA, 307 bp, Glycine max
  unsure (1)..(307): unsure at all n locations
cccctgctgcatgcagctagagaggaaaaatttttttttgtgtgccgaatnccgggggcttctggtgccgagatgaaggctcactgggtgaaccaaaaagcggaagtcttcttttggggaggaacccatggataaacacagcgtttggaatgatttcgttaatctcaaaaactattgggaaatgctgggtaaaacacgaatgccaagcatatataaatttgaatgaaaaatgtagaggggcgtgtgaagcaacagtcgaatttgctttgtggtgaacgtgctattaatgttaaatgattcgtttggg

SEQ ID NO: 110851 - DNA, 300 bp, Glycine max
  unsure (1)..(300): unsure at all n locations
ctaaccgacgncatgcgggaggtngntnagggattgaattgaaaactcgttaggcgacatntgtngngaagtaacgaccgatatttttcagccgacattgcacaattctttttagaataactcgctggtcgataatggtctttttaccgcagagtaagttttcttgttttggtggtgcataaaaaagttacaatgtacttcggctaggtttttcgtgcgagttcaaccgacattttgtttcggccaggaaaacattagcccacctttgcaaaaaaaaaatatttggtaaccgtctttatg

SEQ ID NO: 110852 - DNA, 283 bp, Glycine max
cccaaaaactaccgctctttaatttttgacacaaacgagattctggcgaaaaaaaaacttccaccgaccttgaaacaaatgcacgtgggaaataatcgggtttacaccagcgtttggttcataatccgacgattctatttgtgaaagcacggtatcggatttttagctacaccatctgcgcggaggtttcacattgataattttgcgtgtatttcgaatatcgtcgcaaactggtgccaaactcgcatgattttcacctcgacctggaaaaaaccggtttaaa

SEQ ID NO: 110853 - DNA, 344 bp, Glycine max
  unsure (1)..(344): unsure at all n locations
catgcagcttatatagtacaanntgtttttgcntttgctccancatccggaaggagaaaattcaggagaggcttagacttattttgattcacaaattcagccacaactcagcaccacaactcaacttcatcataagcatcatggtggaaatttagaaaacaaaaaaaaagttcaacaacaagactacttctaggaattgatttagaacatgctatgaactaaataacatgcatgaattacactcaaaattcaaatgataggctaaaaatgacaagaatacatgaacaaatgtatctagaattcaatcaacaaaataaaaattcaacacagacttagaacataat

SEQ ID NO: 110854 - DNA, 273 bp, Glycine max
gacatgggtgtttatagtaaaattaccgcacccccccatatttttatgataaattctaagggtctggaaggaggaacatttgtgttctcgagaaaaaattttattgtatttgaagaaaagaactttttttttgggcatggtgatttttttcgacgaaagacggtgaacgtgcggtggtggtggtttaacgcgggaaggaagtagctgagaggtaagaggcagtggtagtagcataatggaaatggggttggggttgcatgtacagggaccgtc

SEQ ID NO: 110855 - DNA, 311 bp, Glycine max
ttttttaaagcagaaaaagggggatttaacaagtttcaaaacatccacaagggtctttggaatgactttggcattcttatggggaaagaaaaattttttttatgtgcatgataaaaaggtatggagttccaagtgggaaatacaagttttataggtgtgcctagcagtggataaacaaccattgtatcttaatagcaactgctcgaggcatatgatacgagacaaatcaaattttttgcctctaaaagctaaagaaggaggatttgttacctttggtgacaacaacaaagggagaattctcagaatacctc

SEQ ID NO: 110856 - DNA, 358 bp, Glycine max
  unsure (1)..(358): unsure at all n locations
acccccctgnangcatgcaagcttataatatatngtttctccctgatttaaacatcggaaactcttgagaaattcaaatggtcttaacttttcacacggatgtccgattcgggcgcataatatgtcgagaggctcgaaattgaacaacggaagctcttgagaaattcagatggtcataacttttcacacggatgtccgattcgggcgcataatatgtcaagaggctcgaaactgaacaacggaagctcttgagaaattcaaatggtcataacttttcacacggatgttagatgaaggcgcatcacatatagagacgctcgaaaatgaacaacggaagctctcgtgaaattaaaatggt

SEQ ID NO: 110857 - DNA, 195 bp, Glycine max
  unsure (1)..(195): unsure at all n locations
tcacatatagcgcgcgaatcggacatacgngtgagaaagtatgaactatttgaatntcccgagaagttccgacgtntaatttcgagcgtatcgatatattataagcctgaatcggacatctgtgtgaaaagttatgaaccatgtaatatctcatgagcttccattggttcaatttgagcctctcgacatcttatg

SEQ ID NO: 110858 - DNA, 344 bp, Glycine max
caagcatgccagcttaagaaatctatatttgttttttacagggccctgtcaatggtaccttaagtttcatgggataattctcttcatttggttttgataaaaccccatggatcaatgcatataccacaaggttaacgagagtaaaatatgttttcttgttttatatgtaaatgatattttacttgcagccaatgatcggggtttgctacatgaagtgaaacaatttctctctaaaaattttgacatgatgggtatgggtgatgcattgtatgtcattggtatttagattcatagagatagacctcaaggtattttaggttcatcataggaaacctatattaaca

SEQ ID NO: 110859 - DNA, 300 bp, Glycine max
actcgctttgtacctttttctaatccgggaaactggctagggggtttcaacactgctcaccccgctatgctgaactgtgtctacgactcgcgcacataagcaaaccacaggtgggggcctgattttatggaatcttgatatacaggggatatcagcaaataacgagtaagcttgatatcacgggatatccgctgaaacacgaaaggactttatatacctggatatccagaggatgatatcagtgtatatccagttttgtatatgcggcggatagtacttgatatcagtggcatcaaaact

SEQ ID NO: 110860 - DNA, 279 bp, Glycine max
cccttctgttttaggggttttgagaagaatgttgggatggttataagctgaaattggtgattaaaatttggtaaagaccaagggtagaacttacctaagggtagaaagtgagaattgtatgttatgaatggaaaaagaatgagacttttagagttggaagctaagtctgaattctgtggtaaatggaggttaaagtgagttaatactagcttgaaatgtcatttacgacatgtgaaaaaggttatgctgagctagagagaaaaacaaatgaccaaagtg

SEQ ID NO: 110861 - DNA, 273 bp, Glycine max
aagagaagaaaagaccaagaaaaagacgggggaagccaacaaaccttgaagaagaacgccaaaaggcacaaatggaagaccggaataatagaatcaacaccaaatccagcttggggtggatactgcctcaaagacaaacaagcataacaagagctgttataacaacatccctccgggaaaagaattgatacaaatgtgttaagagaattcctctatataaagccatggaaataaacaagcaggatatgagaaatagaatttcctccctaccat

SEQ ID NO: 110862 - DNA, 370 bp, Glycine max
atactttatccttaatctcataaaaagatttttttttcttcatagagacactgctctcaaagagaaagcacaccagctaacttttacagatatcatccactatggtcatattgtcgtagaatatataaaatatgttcccatattatttattactcattttacttaatatgataggaacgatcttgtgatccatggataacttccactaatggtgacatatctaaaagactggatgtgaatcaaaaatcccaaacatctccagatggtctcaatttaaacttcaacggaaatctcgtgcgtgagcggtgccgtgaatataccttactactatttcttaacatcttcacccgctttttttattttggttctg

SEQ ID NO: 110863 - DNA, 336 bp, Glycine max
agcttcaacatcagaccactttttttttgctggaactacttcacatggacttgatggggcctatgcaagttgaaagccttggaggaaagaggtatgcctatgttgttgtggatgatttctccagattcacctgggtcaactttatcagagaaaaatcagacacctttgaagtattcaaggagttgagtctaagacttcaaagagaaaaagactgtgtgaccaagagaatcaggagtgaccatggcagagagtttgaaaacagcaagtttactgaatactacacatctgaaggcatcactcatgagttctctgcagccattacaccacagctaaatg

SEQ ID NO: 110864 - DNA, 471 bp, Glycine max
  unsure (1)..(471): unsure at all n locations
tatattatcatacaaaagatggagttagtgaatatatcaacattagcttacaacagtatatggtatctctagtgaataatatatttactcgcacaaagtgatatacattgactaatctagttgcataagatgagtgagatgcaactggtgtgagactcctaagtggaaagacccactcggcagctagatatatgtaccgatcacattatatcacnantaatacataaccatggttgaatgatcattacttacagatgattggccggcacattaacatcaaagagtattattcaacaatgtctctaaccaataatgacaacngaagatatgttgagtctgatcaactgtgcaacaaacaagtctatctgctacaatcattgcatacacatttatgagactacatttaatgttgtgacatagaatatcttagtcttgttgtcacactgaccatgtatcatatacatgtatgat

SEQ ID NO: 110865 - DNA, 309 bp, Glycine max
caccacctacttttttgcaatgagaaaaccgacccaaggaaaaggtccctaaagatgaagaaacagtctaatccactcattgacaagcccacaacacttaaccaagggaacttctcaccagaggttaggacatccaacagtcccatattgggaaagaaaaaactaaacacctcagatatgaagccggcaaaggaaaacgctctccttttcctttcacccttgtaggagaccgagatgatggcactggacatacaccacaaacataccccaagcctcttctttgacataacaaaggaaccccataacttc

SEQ ID NO: 110866 - DNA, 343 bp, Glycine max
  unsure (1)..(343): unsure at all n locations
caagcatatgtatcatcgnnctttttctgagttttttaaaacccatcacgcggtctaataaggggtctcgaaggggatcctaacgctccgattattcaatcactcaacattattcatgatttggtgggatgctcaccacttgttgtttaattaggaaactcacccttactaaaatagcgcaaaggcacccctataacacccgaaccaaaagtaagatgggtaacgaagagggagtgcaagaatagatgaaggtcgacatgtcggctttaaaagatcagatggcttctatgatggaagccatgctaaaaattcaaaaatcaatagaagacaatgctaccgcggc

SEQ ID NO: 110867 - DNA, 172 bp, Glycine max
  unsure (1)..(172): unsure at all n locations
catatataagggtgagatatcatcatatatgtagcaaattatcaatgctctcttcagattcattctttcatgttngatgatactcagcaactttcctaagtcaactcaagaatataactgaacatgccttggtctgtgtaangttctctgaagcctgtaaccatgcaacaat

SEQ ID NO: 110868 - DNA, 347 bp, Glycine max
  unsure (1)..(347): unsure at all n locations
gccgccggcggcntctagctttaaaacctctattattttttgaaaccaccccgggggcatttaaaacttgagaaaaccctttatggttaagcagatgtttcactggacgaacccactcagacatgtgaagcttgcataactcttaaagaaaaagagtccaagttttgtcttgagattgagacaaatgccagtgaaaaagctacctttcttaaaaacttttaagagttggaaaataaactgaaaaatcttcaaaaggatctgaagaagcttaatgaacttcataatcataaaaaagaagaaacatatgatctttggagagagtgtgccaaacacacaaagattatgat

SEQ ID NO: 110869 - DNA, 323 bp, Glycine max
cgaccgcagcatgcaagctttatgggcatattttttctctttcagctcccccccttgtcacgcctatccttgaagcgaaccaaattcttgtgcctcaaaccactcgtggttgagttcttccagaataccagccctccctttgtaatttaaaactcacggttgtgaagccttaatctatttaagacttgccaaaagtgattttgcagaaaaaaagaggactttaccttaaaacaccttccttaaaacactcacgttggtaaggaaaaaacttttgtcccctctcatcaaaaaatattataaaaaaaaattttcagccttgagga

SEQ ID NO: 110870 - DNA, 354 bp, Glycine max
  unsure (1)..(354): unsure at all n locations
cgcggcatgcaagcttgaaaagccctnccgatttttttatacattnctgactctatggcatgagatgcaatgcaaaaattggacctcctggtagttgttatcaaagaatagcttaaacacttgtgcttgagtgaaacagttgctgtgagactgtggtttgagctactttccttgatacctgtcttatgattaacttcatctaactgtatagttcacattttgttctcctctttgtctagctgcatattctgggaaaacaagtgataggtacacattgcttcatcttttacatcatgcaatcaataaattttaatgcatacacctttgaacataaacactgcatgttttaccact

SEQ ID NO: 110871 - DNA, 185 bp, Glycine max
  unsure (1)..(185): unsure at all n locations
atatgatgtgagtatcgtgccggcttatttcgcggacnacgagtctgtagacctggaaacacttgagatcctatctagaaacatggaagctgtgaaccgatccaaccattaattgatgaaatgtaggctggacacgcaattctttggactcatagtaggatgtggcctcatgaactgttatctta

SEQ ID NO: 110872 - DNA, 325 bp, Glycine max
ttttattatttacttttgggcccggagacaggaaaaattatgctgacattcattgaacctcttattggggttgtggttattgtgggtgtaactcgctacatcattaaagggtattcccccactggtgtgttatttgtccgtggcctgttattgctgattatcagtgccattatggggcacaaagtgttaccgtccagccaggcttcaacaggctacagcgccacggatatcgttgaatacgttaaaatattactaatgagccgcggcggcgacctcggcatgatgattatgatgctgtgtggatttgccgcttacatgaaccata

SEQ ID NO: 110873 - DNA, 315 bp, Glycine max
ttttaatgtataagccatataatccggctcataatctttaaccattcttgctcttcttacctcttcgaagctttatatctgggtctgggtgggcaagaatttcacttctaatagcaggaagaagactagatgaagtacccccactattccataatttaaaaggaaatttattttcataaaaatcagcatcatttgactctatgatcacttttgcgtttaagtcataaaacctcttgctattaatagcataaccaatgaacacacattcataggctctacttgcaagtttaaccctcttagggtctgggatcctta

SEQ ID NO: 110874 - DNA, 288 bp, Glycine max
ccattcattctcactctcctcttaccgggttccgacttgagcatcaaaattcttgcaagtagaaacacccaagctggtgaattccttctaacaccggcaaccggaaaccacattggttggtgtccaaccagctagcagacagtgaatttaccgccttttataataattaccttaaaagtcaggtcttttataacatcatgatatcatccaaatacccagattgccatgtatagtaaatttggtgactattcttattaaactaccttaaaagtcattctcaagaatgaa

SEQ ID NO: 110875 - DNA, 160 bp, Glycine max
ctgttataactcgcagtatcttacaattgaaatttaagtaaaacgggtgaattaggataattccttcagtctccttttctatgcgagaacaaaggctaaaaggaagtgtgagtaataaatccttcacctacttaagtcaattcgcattccctatttcttt

SEQ ID NO: 110876 - DNA, 264 bp, Glycine max
tccctgcgaatatacatgacacttcttgcgtcctaaatttgaaaatgggcgtgctcttcttgaacgatttgacttctttatgagtcctcgccaacttgtatgtccttcaaaacctccccgtcgtgctttcgaaatatatcctactcctctgagtggacttaaaaaaccgcgttccccgacttaagaagctcttaactattgggacagttctttactccttaatatctaactagcgtaccagagcttgacgtggttgcttcccac

SEQ ID NO: 110877 - DNA, 338 bp, Glycine max
  unsure (1)..(338): unsure at all n locations
agctttttagagattcttcttcttttttcatcgangcttccttacaatgattttcttctttgtaatatatttttagtacaccaattaaaaaattataaaaataaataattatatattttttaaatcataatagatttgtgactattaataaacattgggagtataatcaactttgtaccaaaaatgaaatatattattactaggagatttataacattcattcaataagtccaatcaattaaactagaccgcatgatatataatgaatatatgtaaacaaaagaagacaattgagtagaaaaaataaattgtgttaagtaaatcacataaataaatta

SEQ ID NO: 110878 - DNA, 196 bp, Glycine max
taatatgaccgcccaactctttgggctttttgctttctggccggcttacaccaatgaaaattttccagcctctttgctaagttctacgaaactctagcagacttgcccgcctaaattaaaccacacctaactaacagcactaagcggcttaccagcatacttcacactgtaagtccccacttacatggacctaaca

SEQ ID NO: 110879 - DNA, 263 bp, Glycine max
ggaaacgcacaacaaggccgtaaaagaaaaaccacgaaatcaccatatcccaaaggaagatcggagcgctggaaaaggtacgggaaaaaaggggggggggtctgttacaaaggaaaacacgggtcgggggcgaagcgccatgatgcataacgggccacacgcgacggacactggatattggggaaatgctggacacgcagaaagagatgatgtttcccaaaggccacggacgcaaaaaaaaaatcggaaaaaaaaaagaaaac

SEQ ID NO: 110880 - DNA, 334 bp, Glycine max
  unsure (1)..(334): unsure at all n locations
atcaatattaaagttgttgttaactaagacattctccgctaccaccttatggtacttaactaaacacatattacttttatagtctttctaaangctattagcagtccatacccttaggaacaatatactccccaaaggtttaacctttgtatgatgactattctaaactagttaaaagttctagaaattcttgaaacacttgacttcttgtcacttctcacatactaactctcctctataatcaagaatgtctttaagtgagtagtttttatgctataccgtgtcactttataaagtctttaataaaactgctgggaggctattttttctctat

SEQ ID NO: 110881 - DNA, 292 bp, Glycine max
atcattagctttttaaaggtatttcattggccaagactgtcacactttgcacataaaggtttttctggaagacaagtttttcatctcacgagacgataatccatcttttgtcactggatgaaggctttataaccttggttattataacatcttccaagtggaaaaagttttatattttgactaacctactattcaacccccctccttctagtgtgatttgttgtatttcggttggcattagagccaggtttcttaggttgagtattttcacaaatacagagaaaacaaaaag

SEQ ID NO: 110882 - DNA, 335 bp, Glycine max
agcttacatctcacaacaaacttttttattatagaagaatttattggaagaattgctttgttacctgactttggatggcccctattaacatatcctgacaacctgatgcatgaacattttccaaattggggcactggagcaacagtctccctgaaccagttaatttaatgaaaacaatcaatcttaccattgtaaaggaactcttgaagtgctgaattaaattttcacatgataattactaaagaacaggagcatgaaatgattaccaggatgcaaatttgaacaagaatttagattcagatcaatgagtcgtgggcagttcaagtatagggcct

SEQ ID NO: 110883 - DNA, 358 bp, Glycine max
cttaagcaccgcggctgcaacttgaggggcgcacccatttttttttctattaaaataccgataatgtgtctaccatcacgaatatcgtctccctttccattattgggggtaccacctgggccgccaaaacccttcaccttttgggcgtgttctttgaatgatccccccccctttttgcacatgttctgtagttgcatcctatccggaaccatatcaaaattgtactgatactgcctaacaaaggcaaccattaggtccttccaagaatggactcgggaaggttccaagttagtgtaccaggtaacagctaccccagtaagactttcttggaaggaatgtatcaacaattcctcatctt

SEQ ID NO: 110884 - DNA, 280 bp, Glycine max
gaaaaaaaatgaggttttttttctaataataaaaaaatatcccggaatctaaaagaaaaatcctctatcattttcggataaagaagtggaaaatagaaaaaaataactattccgaattataaaagaatatttctattgctctaggagaagaataattgtttttccttatcttaattatatctatcaaaatctctttattttataaaagttactcgatcggccacccaatactaaagcctgacaagtccaaaaaatataaaactaaatgtaaggctccaaa

SEQ ID NO: 110885 - DNA, 296 bp, Glycine max
tcctaaccactggcttgagaaaaaggattggatattggccctaccaccataagaatctgaaccacattcaaagccagttgggttggtgggccctttttttacaagtaagtggacaaatatttggttcaagtatacaaatatttaattttttttagttcgggtatcactaaaaaagaaacaccaagatttcaaaacgttcaccatacacagatcaacatacaatttatttataagaaaaaaataatgcatgataagcacaagtaataactgatcaccaaaataatgcatgatccact

SEQ ID NO: 110886 - DNA, 339 bp, Glycine max
  unsure (1)..(339): unsure at all n locations
agctttcataggttaaagtgagttgtttttatcttgngatatcaataaaaaatccattcaatcaagccttggttcttgcatttgaatgaaaaaggtgggtctctccttgactctattctcatatgtttttacatattgttacagcatatgcatgagtttctaaagcatggtaaaatagggttttctagtttgagctaaggatatgtgtctcttaggcttttattcataaaagaccatagggttggtttccttagtctctttttctgggtaggaattgagattgattatgattgcttgtaagaactcaaaatgcatagtggaaatctaatttaggttgaa

SEQ ID NO: 110887 - DNA, 342 bp, Glycine max
agcatgcagctgggcaaacaaaaacttctctttttatttctagcatgcattttctttctttacccactcctcacgattggttttttagggaaaaacaccctaactaaacgcgccgcaagggatccctatcgcaccagatccaaaactaaaatgatgggtgatcaagaagagacgcacgaacagatgaaagccgacatgtcggctctgaaagaacaaatggcctccatgatggaggccatgttaagtatgaagcagctcatagagaaaaacgcggccaccgccgccactgccagttcggctgccgaaacagaccccactctcttggcaactacgcaccatcct

SEQ ID NO: 110888 - DNA, 184 bp, Glycine max
taagggcaatatgccccgactactgagctgcatttttttactttacgagcgacgccaagcaggctgactacaaagttgaaataaggctactccccgattcacgcatacttcccctcaatactcgagtgaatcatgtcaactcctgagcagcagcttaatggcccgatacacgagttggaaaatg

SEQ ID NO: 110889 - DNA, 335 bp, Glycine max
  unsure (1)..(335): unsure at all n locations
agcttgacacagagaattcgccctcctatagctggggntttaagcgtagacgagatgctcaatttcatccttctcccttcgagagatctttctctgctgtcagtcctatctgcagccaagttggagatggcatggatatgaaatagatatctattatataactgcaaagacacttctttatcatttctcttgtccctttgaagttttttacgttttctatcggatgagtatcgataacagaacttgaacaattatggattatttattggtggacatgatgtgtccccatcttctgtaggaagtccttatatttctagtattaatgtaatgtagcc

SEQ ID NO: 110890 - DNA, 437 bp, Glycine max
  unsure (1)..(437): unsure at all n locations
tattagcttcatttcaccttgtaactactttttcttttctataccacccacctctcatctgttgtgtccaacatggtgtgtacttaattatggtgagcatacgtaagctacaatgctatggtgtgctgcgcggagatttaggatgacaaaaaataggattggcccccgggaatgatattatctatatatatgataaataataatataaatttgacctagactgtaccagatgataaaatatctanggacctagaggaggtcaaagtggataaccttattaattttgtgtcttcattatatcaactttacctgaagacgtggtcttctaaagagatacaccataacaatctgtattaaataaatcattgctaagtagattgttatgtaaatctctaatctatgataatgaaaattttaattttacgcgtttcccctaa

SEQ ID NO: 110891 - DNA, 292 bp, Glycine max
gccaagctggcttgaaagaaatggaccaacaacttttcgtccgcagaatacgcccccatctttcggcaatacattcggagatgcccttttggacatgtcgtccctttgtacttatcaaagactggtactttgaacttgggagggatgacgatgttgggcacgaaacacaaatccgccaaatccgaaaattggttattgccaaagccctcgactgctcttaacctctcttcaagcgcctcaatctttcccatatctttcgcaaagggaacagatttttttactggtgtgagtg

SEQ ID NO: 110892 - DNA, 124 bp, Glycine max
  unsure (1)..(124): unsure at all n locations
ttctagtagtctgacttggagcagctctatccctcttcatttcacctanagcaattccatattatatatatcgaatacgtgcgtnaggagatcttcnagacctaaaggaaagtagagatgaaca

SEQ ID NO: 110893 - DNA, 164 bp, Glycine max
aaaaagacaaaaaggaaaaacaaaaaggcaaaagcgcagcaaaaagaaaaagacacatcgacaccaaaaagggaacccaaaaaaaacacacaaaaaaaagaaagccacagcgagaaaaagcagacggaacaaaggaggaggcgcaaacaaggaaaaacaaaaaa

SEQ ID NO: 110894 - DNA, 336 bp, Glycine max
  unsure (1)..(336): unsure at all n locations
agcttgaaagggcaaaattagattttattttgtcctcggnngcgtgctggaatgaagaagtcaatattctcattggatgaagaaaaaaacttcaagccatgagatgtaatcaacaactaaaatgacaagaaggatgcaaacataaagatatgcacaatgaacatgacatgaagaacaacattgatacaacacacttagaatgcaatttcatcaattgtatgagttcgttttggaccttgtatcaagagttccaaaaatgcaattgagttgttcttggtggctatggaaatattgaagaaagctctttaactttcatgaacaagtcatggtttgata

SEQ ID NO: 110895 - DNA, 343 bp, Glycine max
agcttggattaattcggcctgatgtatgatcgagggtttagtaatttaggctacagcgtagaacacaagagcacgatttattagagaaatatatttctatgcatcagcttgtttgttagaaagacccaacatttctacctactgctgtcattttatttaccttgcattttatagtttttagcataaaaatttagtttaaattctgtttgaaattatcactcatacatgtcctctcaataatgctttgattctgaacttaattcaggctaacattagttccctgtgttcgatactcggattcatccgttttaaattttaaatacttgatgattcggtgtacttt

SEQ ID NO: 110896 - DNA, 195 bp, Glycine max
aatgtgatcatccgtgtaatgattaaaatttaatgattcacgtcatgattaaactgacattcatgtttgatatccgcttactaacaatcatgaacctcttctactggacacacgtgacatcagagttatatcaatacctcagttacgtatgttatcttagatatcttagctaaccctaacaaacagttttttata

SEQ ID NO: 110897 - DNA, 247 bp, Glycine max
ttttctccgcgtcatgcctttaattttttatgctttgaaacaaaaattgattgggccttgaatgtttgaaaagcatgtataaaaatgatgaaacttttggagaaaattttaaaaattgtgaaaaattttcagaaaatggtttctttatacatgaaggttttcttttcaaagaaaacaaattgtgtgtgcctaaatgttctactagaaatttcttgtttgtgaagcacatgaaagagggttaatgggg

SEQ ID NO: 110898 - DNA, 339 bp, Glycine max
  unsure (1)..(339): unsure at all n locations
agcttgttaaaaggggtacngtaatattatcttaacgaaaataaaagtacactaaataagtagggaccacctcaggtgcatagaatgaattgaaagattcgatttccggaacttaccagttgaagaccgaaggacgacgaagaacgaacgaataacggtgaagaacaatgaagaacggggaaaaatctccaccaaattccttacggaaacgtctctaaagcattatggaaccacctcggcttggatttttttcacggaaacaatttttctcactaatttcgagagatttctcgataccagatgggctgaacccatatgctttacccttctttccctatt

SEQ ID NO: 110899 - DNA, 242 bp, Glycine max
tctctctttgacagctctttgctttatcatattggctatctttggtcactctcggatgtcccaccatgatatacctctctagtctgcttccagtgtttgaggaggccccatcctgctatccgtatacatagtggtccatccacaattggtggactgtcactggtgcttctctttctcatgtcatcagaattatctcctagatctactcctgtattaagtgcccgtctgataccattgaattc

SEQ ID NO: 110900 - DNA, 211 bp, Glycine max
acaaaacccataataattgacaattaaaagtacttccgtcgtaatgatgttaactaatcccaactatctaagctgccatcgatcttatatgagagaagctataaactatcggaatacgttcactaccatatcgcacagactgtgagcctgattttttaacaaaaaccattatacctctgtaaatctgactgcttttcctaacgtaacgtta

SEQ ID NO: 110901 - DNA, 322 bp, Glycine max
ggggagttttttttttttttaccaagaacacactggcgggggttttgggtggggggcgggccgcaaaatggataatgattaaaaaatcaaacttctttacacctccccattctatatacttcataaccttttcaaagtgaaataaaaccttcttgtgttggaccctaaacaccaaaacctttcagctgtcaaaaattttctcgtattatactaatcaaaataaatatcatcatacaattaaaaaatattcatgctcatataaaccatcgtgcccccccccatttgtatattctactatgtaacaatacaattacaatgtgat

SEQ ID NO: 110902 - DNA, 203 bp, Glycine max
acgactttactggctgctttttcttccgccaaataccagtaactatcattaaaagtttcagagttttagggcctagatgggctttggtgttatagactagattccgacaaaagaagaggccttatctgagatccaacttactagactgaaaagaaaaagggctatgaagatattgtaaatgtatatctataagttaatgatta

SEQ ID NO: 110903 - DNA, 346 bp, Glycine max
  unsure (1)..(346): unsure at all n locations
ctgggngctgcaagcttgctgtgtgtaaaaccattgttanttttttaagaaaagccccgagggggctcttcattgcatgcataacccctatgatatggtagatagcatacatgaacatcaaagaatgccgggagaaaaacagttagctatcaggttacttactctaacctttcttgatgaaaagatttattatagtgcacaaaacataaaagaacgttttatatttgaacatttgaatcctcaatttgatattcctgtctactattgacctatgtgtttcttctaaaaatcaacaaagatatcattgttgatgttgaatctatttaatccattatgactaaggaaa

SEQ ID NO: 110904 - DNA, 258 bp, Glycine max
cttggcgtctttgagatctccccttgactgttgtgtgatcttcaaaatgctgcctgctagaacatctggtctctaatgctagagtcactatgccttaactcctgtactttgaagatgttcattctacttggtccccttccaaaatttaagtctggagatcctgtcttaagcctctgactgaggtaattggctgaacttctgttaagtactctctcagctactcttaatcattcttactacggttctctgataagtact

SEQ ID NO: 110905 - DNA, 328 bp, Glycine max
ttttgtgaagatatttttgtttttttctcccaccgaagaaaccagggtctccctcgagtttgatagcccccgcttcacgaacgccgagcaccagcagcgcttttaggccatcaaaagatggtcgttccaccaaaagagacgcattcagctccgggacgatgagtacatcgattttcaagaagaaaaagctcgccgacgttggacatcgctggtcattcccatggctaagtttgacccacatatagtcctggagttttatgctaatgcttggcccacagaagagggagtgcgggacatgtaatcatgggtgaggggtcagtggattccc

SEQ ID NO: 110906 - DNA, 336 bp, Glycine max
gtgacaccatacgaccttgccttcatgcacaactgagcaatgacagctgagctatgctgaaattatataacctctcacctagcacaaatcaccacgaaacatttgactctcacacaatcaacctgatgagaatacctacctaatggcagctcacacacacagaccgctctctcaaatgtgtggcagcgacatcatctcacatcacagacacacccaaacaacacgtgagcctccaactctcaaatggagaagattcgactcgttacaaacaactctcactactataatgaatgtccatgataactcaattcaggcttacgcaaccaagatcatatg

SEQ ID NO: 110907 - DNA, 295 bp, Glycine max
ttttttttttataaaaaaagatgtctggggtgtgggtgaaagaataaccggcatccattaaaaagcggttaaatattaatctcttcacccataaaccttatttttgtttggagccacgttcaatgcttggtatgtgcaaaccccaacttaatgggaaataaacaatttgctggattcacactggtcaccccattagaaagtaccaaaacgttaaaactactaattactgtaattaatcaatttagaatggaattgaagtgttgaagggtcttaattactataacatcctccaaaa

SEQ ID NO: 110908 - DNA, 336 bp, Glycine max
agcttttctttgagcttcattctttatcctttaggttgttcaccatgttgctccttctatctctaacactgcactccattccatcccaccatgtttgtccttaaccacgaaaaacgactttgttatcctttgtgtagaccaagcaatgaagtacataaaatttgggataaatatacttggacacctagtaagagagagagagagagagagagagagagagaaaatataagcagaataagtgatatgatagtgataagaaaaaagagaaaaaaaaataaaaaatattgataaggtgtttgaatttttggatgtccaaacatcatgtttctaaaattt

SEQ ID NO: 110909 - DNA, 299 bp, Glycine max
agctttgacatgagtcattttttttattttaatatgcgaccatggaatgaattttaagatgatatcaaatcatctattctttcaatctttctctcaaacatcattcaatatctttcactctttctacaaaattttctgatatctttttcttttccatcctttctaaaagcttttgttcaaaactttctcttccaataaattttgttcaaaaacttgtgctattcattcttttcattctcttctccctttgccaaaagaacaaacgactaatcgcctgagaatttttttggttcttccct

SEQ ID NO: 110910 - DNA, 323 bp, Glycine max
gacccgggatccttatttcacttgcaagcatgcaagcttgagatgaggaagtttttttggtgaaacttcctgcttttatttttgaccacagagtggtacctggagatatgtcgcgggggtcaggagaccttggggacgtcaggtggggtgctattgcccaaaaccaagcttgaccaatcccgacccaacccgggcatagtcggtcagtgagaacctgtgatgtacctaagcaggcgagctcctggcagtcaacagatgaaaggaaaacaagaccacaatgcaaggaggcttgtggtggctggccaactgtgaattttgtgtaa

SEQ ID NO: 110911 - DNA, 162 bp, Glycine max
  unsure (1)..(162): unsure at all n locations
tctcctaattcgtggttgggtttggaatatatggtagctgcatttcgctcagaaaattggaaaaactgtgaagctgttgaattgccatgtttatgatgaaacatacccatctgtttatggttttatgaagatgctcggatgttatgtactganatgcttatg

SEQ ID NO: 110912 - DNA, 319 bp, Glycine max
  unsure (1)..(319): unsure at all n locations
atcctntattatnaagcactgcaagccccaagcttgatgattccccaaagatgattccntatatgcnacgctagcatttttttatactgcctatccggtgcaggggtatggtattccgcaaaaacgaaaagggcaataaataaattcatatactttatgcatatgctccgaaggaaaaggctattggttctgccgcctcctggtttcagggaatagtattctgaaaaagtcaatagacattttgccatgtcataggattctccattgagcccaagttcataggttcttgactctagtttttgatggaggataactagtc

SEQ ID NO: 110913 - DNA, 289 bp, Glycine max
  unsure (1)..(289): unsure at all n locations
aattcatgcaacaacctcgtgagatacactggaatgcagctcttcgaattgtaaatacctaaaaagaagtcctggtcaaggcatacttcttatcagtacggctaaatatcagttgcatggatggtgcgattctgattgggcaagctgccctttaacccgacgctcaaccaccggctgtgttgtgttcttgngtcactctcctatctctnggaaaaccaagaaacaacacactgtttctcgttcctcggctgaagctgaataccgctctatggctaccaccacctgcgaa

SEQ ID NO: 110914 - DNA, 294 bp, Glycine max
agcttctcccccaattttttatttttagggggagaagcgaagtgaataagggttcagcccctgaggcacttatctctcttaccaatatgcttggaaaaattgtttccgtgaagaaaatccaagccgaggcgtcaaccaaacgtttccgttacacttccgtgaggaatttactgaaggtttcgaccgttcttcgacgttcttcattcgttcttcatcgttcttcaatcttgaacgggtaagtaccttaaaccaagcttttagattcattctatgtacccgaggtggtccacattg

SEQ ID NO: 110915 - DNA, 287 bp, Glycine max
agcttgcccaaataagtatttccggaggaaatgcttaccaccttaaaagactggaaagcggtttctaatgactcctctacggcctccacataaggcatagaggatgggcagctcaccaagatgtcttcctcgcctgatatgatgaccagatgcccttccactacgaatttcaacttttggtggagtgtagagggaacaactcccactgagtggatccacggccgccccaacagacagctgtagggggggttaatatccattatttggaaggtaacttgacaggtgtg

SEQ ID NO: 110916 - DNA, 334 bp, Glycine max
  unsure (1)..(334): unsure at all n locations
tgatgaataaaacatngggcaaatgaagaaggtgagaatgataggataacccatgtngcaactaccgttcctacatggccaaacttcccaccagcccaacgatgtcattactcagccaataacaaaccctctgcttacgcaccacccatttatccacaaagtccatccctgaatcaaccacataacccacctaccacacaaccaaacgctaaacaccacctttagcatgaaccaaaacaccaaccaggatatgaaatttgtatgcgaatagcctctatggttcaccccacatttcggtgtcctatgctagctngctcccatatctactngataa

SEQ ID NO: 110917 - DNA, 228 bp, Glycine max
  unsure (1)..(228): unsure at all n locations
aaacgnggggcttggaaaggaaaccaaacaaccaagcaggataagaactaaatcctataacctaaaccgcaaaaggagaaagagaacacttttatggggggtggcctgagggttcagagaaacatacctaggaatggtgaaaagggaatgtcacatgctaagagatgctccaagcagcgcaaaaacatagccatctaaaatcgaacctaggcagtgggagcgtaattc

SEQ ID NO: 110918 - DNA, 288 bp, Glycine max
agcttgttgtcttttcggttaaaagacatttacatagtgccttggagcctcaagaatagttggaaaaactatatgacacttactaactctatggatttttttattgaccatatttttcgtgagggaaacaactctgcagattccttagactctcgtgcttcttacacaattttttttttggaatagttgtcttgttttaatttagagcttttttgtaaatgataggtttagataaagcttctattgcttgttcccaggatttggtttggcccccaatgtgttttgttc

SEQ ID NO: 110919 - DNA, 158 bp, Glycine max
aagccggttctagtcgagtggttgtgccggataaacatggctgggcggcagccaatgaagacccacaatgacgatggagactaatgtgacgctcaccggagatgcgtcacgcgacgtgtgcattaacttcacgagttctggccctgagaaggatcaca

SEQ ID NO: 110920 - DNA, 287 bp, Glycine max
cccgggatctttaatcatctgtttttgcagcttgggggctgctgtttttattccctgagcttgggggtttttgaggggaaaatttttttgggtgaaaaaacgttcccctccacccctttatattttctacagggttgctccccaggcgagctaacctgtaccctctttttattttttatatttttttaggggtgcattaaccatgtctccctcctcttatgggttagcgttttgcctaacttgagcctacttaagttagaattaggtgtcgattacttatttaaaac

SEQ ID NO: 110921 - DNA, 349 bp, Glycine max
  unsure (1)..(349): unsure at all n locations
gcacaacaagtttcacatncacaatggcgcgcataacncatcatnccctgttgccacctncatctgagctcacgtactcncacgtagcccatatnctcgtttctctcaacaccgggtccncatcaacccgtccaagctgtcacaacatccaagcaaaacaacattcaaacagcacaagctatcacagccaagcaaaacaatgcaatggcagaatactctgctcaacacaccaaccaatatcacagcttttctcacttaaagaccccagtaacaattccttcgatccaatgtgttaaccggtggatcgactgcaaaattntactggaagtctatagtacataagcctaca

SEQ ID NO: 110922 - DNA, 190 bp, Glycine max
aggccaagcattaacccaaaacacgaaaaagggcaacagggacatacgacaggaacaaaaacgagcgcgctagggggacaaaaataagaaaccaagaaaagggcaccacaagacgatccgcgcaaaaggaagaccgacacatgagggaagatacaaaacgcaacaccgaagaaaagaagatcgggcgaaa

SEQ ID NO: 110923 - DNA, 215 bp, Glycine max
ttgaatttttcaacatttaaagaaaatggaaaacaacttaagaaaaacaaagtatggacaaaatgaattgttagttcgtcaccaaaggatgcataaagaaccagatccccatagtcccaaacaatctataggcagtgcagtttaatttaacgaccaaaactatattttgtcttaaaactttatgatagacaaagttaaactttaaggtctaagat

SEQ ID NO: 110924 - DNA, 117 bp, Glycine max
agaaaaggaagagcccccacagaaaccggagagactcccccaagaccggaaaaccgaagagccagagaaaaaagggaaaaaaggggccaatgagaaaaagaaaagacggagaggaca

SEQ ID NO: 110925 - DNA, 299 bp, Glycine max
gcatgcgacttcattcttacacttttctttttgaagggcattacctctctctctttcttcttcattacgctgcccctcagctttcaagaagcaaaggaatccattgatgaataagatcctaggcctaccagctccaatgaagcttgcatcataaagcctacaagctccacaaggagcttccccatatatgtatctatttaagtattttggggattgcttagtgaatgtctattgcgaaaaaaattaccctcatttttcataatcaaattaatgaagtttttcacttaaaaaccaaaatg

SEQ ID NO: 110926 - DNA, 297 bp, Glycine max
tctcagaatgaggcgtaggtccttcatccggaatggacagactctcattcttctgattaacccaatatatttgaatgtaaggcttgaggtctctctcggttggagtctattggacacttttccacttacactgagcttatctctccgggtatggtggattatgaatgcttcttgagatcggggtttctcacttacgaaaattctgagctcaaccggatatggatgactaagaccataccggataagaagggagtacattgtaaatgaaatctgtatcttgagaggactatctctgct

SEQ ID NO: 110927 - DNA, 278 bp, Glycine max
  unsure (1)..(278): unsure at all n locations
gaaacccccangaacaaagcngaataatgcctcancnnaatttaactgagaaacagaangacgggnatngccagggacnacccngaaaccaaaggccaancnnnnncccaanacacgaaaaagngcnncagggatancaaaaggaacaaaaaccccnncctangnaannaaananangaaaccatnaatanggcactacaatattatctgtgcaaaaggaatattgacacatgatgggagatataatatgttttacctcataaataattatctgctta

SEQ ID NO: 110928 - DNA, 294 bp, Glycine max
agcttccacaacatccaatcaaatcaacattcacacagcacaagctattacagccaagcaaaacaaagcaaaggcagaaaactctgccaaaacaccaaccaaaaatcacagcttttcccactcaaagaccccagtaacaattccttcgatccaatttgttaaccgttggatcgactccaaaattttactggaagtctatagtgcataagcctacattttgaccgttgggatctactagcaaacatccagaactcattctacattactctttccacaaccagcaaatacatggat

SEQ ID NO: 110929 - DNA, 345 bp, Glycine max
  unsure (1)..(345): unsure at all n locations
ttatcaatngcaattgactcattatttctttcctttacgtctatgttnttatgcctttatgttttatctttttgtgggcgacaagggcgtttccctctgctcctacgtattcctcgatcttgatgagaaaatcagacctacgtatttcttttgtgaacaaagcgtttcggtaaattattgttatcctttttgcaagaatgttttattgatganagtattaaagcgtggaccgtagcaatctttcgattttttgaaagtagaaacattaagcatggaccattatgtttcttattttttgaaaagtacaagtactattgattagctttataatctacacttacataa

SEQ ID NO: 110930 - DNA, 288 bp, Glycine max
agcttgtaaagttttgtttttggagagctcacaccatctagatgaagctgaccaggttatccccaagaattgtgatgttatatgctatacatgtcatatttgttgaaaagttatgaaaattgagaacctgaaaaacacggaaactggaaactagggactttcatcatctacaaaatattcactgacagtcatttttctttgtttcttcatattttcttttatctgcatttgacacattcatgctgacaacaatgctgcttgggcagtctctatttaagctttcttaca

SEQ ID NO: 110931 - DNA, 206 bp, Glycine max
acataacagtgcatgttataatcctaatacgacaccaatcgctatttgaatgtctgtacacggtataagttgtgggtcactaaacaaagtataacttgtgttgttgtcaatattattttcagtgttctaaacactctctaagtgcatatgctaacactggatgactcatatatcagtgtgggacaaagaatccataagaatgaatc

SEQ ID NO: 110932 - DNA, 273 bp, Glycine max
ccatccttaagatgattacccttaccacaagaaaattaataagttcaacaatgactacaaaatgcagacagggatagagatcagatctgttagtgcacaaatcaaaatatcatacgaatgaaaaatattttatagatcaaataaaatcatttgatttcaagttcacagtgtacatgtcttgttcataaaatctcattaactatggatgatttatgtaacccaacagtatttattaaaatcaacaccaaataagctttttaaagcatatgtgtg

SEQ ID NO: 110933 - DNA, 418 bp, Glycine max
  unsure (1)..(418): unsure at all n locations
actatgacacttctctatctaatgttattaattatgtgatataatntggtgtcagacgtntatccttaattattaagtaattattgcgttaagaaataaataagttggtgcaactaatatcaattatgcatgtatgatacatcgttgtcataatcgacaacacattgtcaaatgcatgcgtattaaagtttgagcgtgacacgacattgactgactngacaacacattctgatgcacgatacagtaggacaccacattggtttattgtgatacacaaacagaaagcatctgcacgcgtctctatgtttgtaaaaaaagtgaagcaatgttagtgataaccatctatatttataagacacgccaacactctatataatcacacattctctctcaaggttacaagaaagttgacattttg

SEQ ID NO: 110934 - DNA, 270 bp, Glycine max
gcaagcaacgccagagacggcggcaccaggccagcacataaccccatgcaaacgaacaaaagaaacccaggtggccaacacctcaaaaaaaagccccctccgcaaaaaagccacagggagcacatcctcccaacgggaaagggaccactcgacaagaaacaaaatttgaaaaaaaccactaagggcaacaacagacacagcgcccggagaacacctagcaacaaacagacgaaacatggtgacaagggatcaaacgcacacatccccgca

SEQ ID NO: 110935 - DNA, 530 bp, Glycine max
  unsure (1)..(530): unsure at all n locations
ctagcttacatataaagctatgtgcgggcagccttcgtttttgttttgtttgaactgcccattattgaataaataatgcttctcagttgttgctgatgctaccgctttgcaaacgtttntgctgctgtagtctattctgcatatactagtattgattatgtgctggagtcattattagcctctgctaatccttctacacagtctggtggcattgcttaacaagctctgcattcgatagctcagtgtggtactattctatgccttgttgctggtgatcagaagtgttcatctacagtgaagatgctcactgacattctcaaagatgacaacagttctaactccgtaagactttctcttcagtgaanatgctcatctacagtgaatatgctcactcacattctcaaagatgacagccgttctaactccgtaagctttctcttcagtantctattgtgagagaattaatcgatatccatctcagtattactattatgcagtgcagctgctctaatcatctgatctgcagttat

SEQ ID NO: 110936 - DNA, 289 bp, Glycine max
agctttgacatattgttttatgttttttaaaaaattttcactgcagcttttacagaagttaaaatggaagcatctttattaattacaatcgaagtatataagttggttttaacatataggagataaggtttaattacaacagggagtggttattcaaaataacatgaagtggaaagtgggggatggagagaaaattagattctggaaagacaaatggattaatcaacacgaatgactagtagaaaggtaccccacgctgtttatcttatcctcacagcagaatcacacc

SEQ ID NO: 110937 - DNA, 247 bp, Glycine max
gtgaagtatgcaatcctgcacaagattggggcttgcaactgggttcccacccatcacactttcactgtcgccacagggttggggaaatttctgtatgcttgtggaaccaaatccaaatttaattttggaaactatatttttgatcaaactgttaagcattcagaatcgtttgctgtcaaattacccattgccttcccaactgtattgtgtggcattatgttgagtcaacatcccaatatcttaaaca

SEQ ID NO: 110938 - DNA, 225 bp, Glycine max
tgcttgtgcagaaaatgttgtgtattgctggttgtgaaaaaggtagtacatattgggttatggacattttctatcagatcccaacggtcacaatgtatatgtatgtattatggaccttcagtcatattctcgagtcaatcccacggttaacgaatcggatcgaagagaatgttactggggtatttgagtaaagaaagatgtgcgattggaatgtgttttgggctg

SEQ ID NO: 110939 - DNA, 312 bp, Glycine max
gaccttaatcacctgcagctgcagcttttataaagcttgcgtttcaagaaaaagtacagtcggtgatttattaagacaacatttatctgaatttcagcagcattgcttgacaaggctaacatgagtaaattcattttcgctgcttttaaaaccaaaggctggtgctacgtattttacttttgttatgagttacaacccaaaacccaagccataatctgcacacaggctaagctaattgaaacactacttagcctggtaagcctaactagctcaaaaacatagttagcaaaaccctttcccaaaacaaattgt

SEQ ID NO: 110940 - DNA, 317 bp, Glycine max
  unsure (1)..(317): unsure at all n locations
atccttaatgctcttagtagaaataacttataccatattgctaaacaatccaaataacttgtgtgatgtcaaaacaacatatgaattaatcacctatgtttagaaatccaatttccagatagattacctgagttgcatctgatgaactttgtgccaaaaacttaagataatcaaccttcttttattgtaatcgaacctcgtctggtcaacaatatattgtcccttttaattcctccataatctgttctttcttccatgtgacatacttcaattgtctctcaatntcaatgtcggtggtatcaagtctcattgatctt

SEQ ID NO: 110941 - DNA, 285 bp, Glycine max
atatatattgtatttttatttaattaaaactaattgtactttaaaaaaaataattcaaatggtcacaaattgaaaaaaaaaaatgcttcgcataaacaacccgactatatatatatttgctgaaaaaaaatggtcaagagtgacccatcatcctttcagcactaatggtttactacataaagaaatttcaattgcttataagtagagatagagggtaattatttataaacaccatcttttaattcactgaagagcctattaattaattaagaacaaaaacatgac

SEQ ID NO: 110942 - DNA, 284 bp, Glycine max
gagcgcgtgcattttggttttatttttagatccggatattcaaaacgacaagtttgacaatttcctaaaagatcctcaagttttagcaaatgctattataacggacgtaagctctcatgcttctccacgtggcatcataaatgttttttgggggaattggcctccacttgactaaaaaaatgctcatctccaatatctccttatagtaaaacatcatatattagtgttcattataatgctttcgtcatcttagttcaattaactcaaatattttgagaagcgaa

SEQ ID NO: 110943 - DNA, 355 bp, Glycine max
atgtatagacttatttttttatgcatctctaaaactacaagcgtgagtgataatgactctctttatatgcaattgatgaatgggatgcctatcacaacataaaggagaggaaatttcaattgaattgaagatcgcttcatatgaaaaataatatattctatactggcgtgaactgcggtaaatactgttgaatgtccattgggccacaaatgtctcaagaaattataatctggataaacacagttgggttttagaaaattgtcaaaattaatacattgtatggccttttttttaaaaaccccttcaatatcctcttttttgaacattatttgttttacggatgttaaaaataaaa

SEQ ID NO: 110944 - DNA, 295 bp, Glycine max
agcttgaggggaattgatgcattttgaaacaatttcactttaaaagtgggtcccaattggcttcctaattttcagctttcctatttggatgtgagatcatggaagttaggtcccagttttccatcgtggattctgtcacaaaacaaacttctatatttagacatgtctaacacagggattattgattctattcccacacagatgtgggaagcactttctcaggatttgtatttaaacctctctcataatcatatccatggtgagattgggactacattaaagaatccaatatcta

SEQ ID NO: 110945 - DNA, 431 bp, Glycine max
  unsure (1)..(431): unsure at all n locations
tattcatgagatgacaatttatagagtgatcaaagactttcaaatcgatttccacttgaattatcaatagacagatcaagatatcttaatgttgaaaagtttccaaatcatctagaaatggcaccaccaactgagttgctgtaaaatctacatgtcaatattttaataactccaattaatccgtcaaatggttatttatcattaggaaaatatttctgttttttttctatgtgggtcttttcaatatgcccaaagtgataatctatataacattaagtttagtctaaacacatatgattatattttttaactaacataaatattatgcctcttttattcttaagcattaaatttttttatttacactcaaatataatttttttacaattaaggataattatttttttatttcctagacttanctttgtttt

SEQ ID NO: 110946 - DNA, 294 bp, Glycine max
ttcagcttagaatctttatttttgatagcaaataaatggggtaggctgtttaaaactgaattaatggaggttattcttccccccattgatagatttctttgcttccattttgtaagtttagcctcgaatttgctaataatgggctgccacatagacctatttttagagctcacctctacaggaattccaaggtaagagaatggaatatccatttgactacaattgagagaagatgctgcctccctacaccagtcctccgatttgtccaaacacccaaatttgctcttattgtag

SEQ ID NO: 110947 - DNA, 265 bp, Glycine max
tttttgggtggcacactaagcgaaccccactggcccacgacaaaaataacaagtacctcttcgttgctcatcgttaaaccccttgtgcttttttttcatcaccaagctttagcattcatctttcttccttaaccaccaaggaagtcttctacttattgaagaagccccacatggtccatacttgggttattttcacacacaagcaattacaacacagaggcagaagaagcaaagagtgagaagtgaagagtgaagaagagtgaat

SEQ ID NO: 110948 - DNA, 273 bp, Glycine max
tcacataagaaagcattaagaaataatattgcttaagaactactgcttgcatttgtcgcttaatgatctcaagactattagtctccatatctgttaaaaccacgcacgcatatatacttacacagcatactatgcttgggttatgcttattattagaagctatgaacgaaggtcatagctactttcatatcatattttgtatctccagcctaatatgtgaatactgatatgacctgatatagttattgataacgaatggttcttttttacatg

SEQ ID NO: 110949 - DNA, 287 bp, Glycine max
  unsure (1)..(287): unsure at all n locations
agcttattgntttttttttgttgattaggttctattataacagaggttgacttattcattgaagattttctgttttccctttttttgacaaaggttcgaccttttgtttgattcttctttgattttcatgatttatgttgttaccatgtttgggcatgagcatgtgtgtctctttccccttttcatttatgttcacattgtaaaaatcctatcttttcttcatgtgttttgactttgtgaagcattgtggtttttattctatgaatctttgtggggtttgtcctttt

SEQ ID NO: 110950 - DNA, 437 bp, Glycine max
  unsure (1)..(437): unsure at all n locations
gctctttggaccttgacaagcaatcactcctctgttagaaccatgctatgtgctcgcgactggtccctntacttccttcgcagcttgagttcactattgctaccacatatagctctgcgaaatttgttccggccatactcttccttgcgagccctcttggtctctcgttcaagggcccttgcggtaattgcattctcttcccgtaaccacgcacactccttccgaacgtgtgtagcagccaactngaacttctccttggcgaagtttgcctttcctaactcgcttttgagagcatggacttcctcgtcctcttccggtgcttcaaaattctcttcgctgacgactgttaacttggcgagccgatctaaacctcgtatgcgaactntcagccattcgtggtacccaccaatgatgccattacgaatgcctctaagctc

SEQ ID NO: 110951 - DNA, 78 bp, Glycine max
cggcgacccaaggccgtccaaccaaggtcgacaggctctgacaagccagacacaaaagagatacgtctgccatatcaa

SEQ ID NO: 110952 - DNA, 289 bp, Glycine max
agcttttatctatccaatttcatacaaaagtgttacaacagaacctaacagtttctaattatatgggccatcaaatctatcatgtgttgacagtagttgattagcccgtgaatttcctcaggggctgtacacacttcagcgatggcctttgctttggctaatagttgcgggaggtcttgacttccattcaaggtcaaggcgaacatatccatccacatggtcgcttctcgatgcaatgcatcaatcaccctcccttttgcttccttctcggcgtacgcttgtgcgaagt

SEQ ID NO: 110953 - DNA, 295 bp, Glycine max
ctacaggcgattctgtttcctgccagcctataaaaacgaaatttcctaaaacattgcccaatatgcctgtgaattttgaagcatctacaagaattaagccgtggttatagggcaagcaatgactggggctataacccaccgaaagataagatgatggatggctccaatggtcacaaaggtaaacttatcgctagtcaattgtgctttcaaaactatcatgacgatgtacaggaaaaaaaatgatactaaaacacacaaagccaagagacttttgttttcaaaaacattacccaat

SEQ ID NO: 110954 - DNA, 268 bp, Glycine max
agcttttaaaaccaaatttttatacaaggatgtgagaaaatgggcttgaaagtacagtctgtggctataaattcctcagcagatcacttgaaaaagaagtggttaggagtgattgctgcagcaagttggaggactaaggtaacaaagaaactccaaattcaatacaaggtaaccatctcagcatgtggctctctcaacactcgtcctctaatgatttctactggactagtatgctacgaagacataatttgcaccaacaaaataatta

SEQ ID NO: 110955 - DNA, 350 bp, Glycine max
  unsure (1)..(350): unsure at all n locations
atgatgaagttccattgcaagaacctccatgacctatttaccttatcgcttcatacatcaaggaccacccaccattgatcccaacctctctatagaagacattgcaaggttatgggttcctatggctnttctctctgagaatgcttacaacattcaaaggagaatgagagctgatatttgaccttcaactaattggatgcaactgcccctggatgttgatgaagagatagtcacatgcactcccttcatgtacaaaaaccttgaagttgaccattttctgctacatcagaccaatctatatgatngaagtctttcttgcacccaactggaatcatcttcaccctaagata

SEQ ID NO: 110956 - DNA, 293 bp, Glycine max
agctttataagcgcgggtctgggatacaaaggtcaagcgttcgcgatatgcgacgatgatattccgagtactttggatttggtacgaccatgccctcctgatttccagttgggaaattggcaagtggaggaatgccccggcatttacgcaacgagcataatgtaaacctttacggttttaaaagctctatagttgggcctaggctttagagtttttccttttgttaaggctttgtgtcttttgtttttgaatttataatacaaggatctttcttgatctgttcctagtctcta

SEQ ID NO: 110957 - DNA, 293 bp, Glycine max
agcttggaattgcatttgtgcacttattttgaatctcctatgttgggcctacatataagaaacagtcccactctcccaattttacaaaatcatattcatatatcattagggcatttcaccgagcacttggtgggcgcatgtttggacataaattgcaagaggatggggacaatgtggcatgccccattgcttcagaaaacaacacaggcctaaggccttctcacacaaatcctcaactcaacaaatcaagcatcaaagcaacccaaaactgccccacaaatataagcacgttc

SEQ ID NO: 110958 - DNA, 292 bp, Glycine max
agctttgagcaacttcaattaactttaactttttactcggatgtctttttgagacccgtaatatatccagttgctcgaaattgaataccgaagctctgagcaaattcaaacgacaataagtttttactcggatgttcgattgagtcccataatatatcgaaaccctcgaaattgaagacagaatctctgagcaaattcaaacgacaataacttggatgctgtctattaggaaatgttcgatcggcgtcatccggtgatgctcattttttaaacttggatcggccatctttcc

SEQ ID NO: 110959 - DNA, 294 bp, Glycine max
gcaagctacaggctgctcatttgctctatgttgctgcaaggaagggcatttgtctgcatgatggccagcagaggagcacaaaccacaaacccttgcgacaggtacagatttctgattcaaggccagctgggttaccaagttaaccaatgcatccagtttgccttcaagcttcttagtttcagatgatgcagatgggcttgtagctacctcatgcactcctctaatgactatggcatcatttctggcgctaaactgttgggagtaggaagccatcttctcaattaaatttctggc

SEQ ID NO: 110960 - DNA, 261 bp, Glycine max
tgtctgtttaccagtaattctcttttttccactatgaaggagcatgtttaatagacacatttgactgtaccgaactctatttcccctttggatggctctaatgctgattttaggtcattgaccttttacactcaaactgaaattttttcacaagacctctttttgataagggtttctaagacgaaaatgtgaatgctatgtattagccccttcctaattataaatacactcaattcatgaaccaaatactacctaggtgta

SEQ ID NO: 110961 - DNA, 272 bp, Glycine max
agtggttaaaataaaaatccatgtacaagtgtacagaattacctacgcttcattacattattcctttacttagggttccttcttttatagtgcgttttgcataatttttctgtacaaaaacaaggtgtatacttacttgtaacagcttaaaatattgaatggatgtttcagagattcagtgttttgtctgaacaatctcaaacaaaaatctgttaccatatcctttgcactcttctacataatttctttccaaacaaaacaatgtttctttt

SEQ ID NO: 110962 - DNA, 346 bp, Glycine max
  unsure (1)..(346): unsure at all n locations
tatcttacgttgnggaggatggtgaatatgctaatcctcatatgccttgcttcattacacgttcacattatatacataatttcaagtgcgtctaatattttctagacagaataggagaacgctctcaatgcttgaaatagtgtaagtaggtcgctttggatgttctattaacctcatggttcaatttcacggcatccatggatattgtgctacacggcatactcattgaatatgctgcccatcataacacaattgtagaaccaaatctgtgcacatgccaacagctggttgctgtaatggaaccaaagttatgaggatataggatatataattactcacttagcga

SEQ ID NO: 110963 - DNA, 247 bp, Glycine max
atgggtgttcaaaacataaagcttgatgatgaacgtaaggatgtgaaaaacaaggccaggttagtttccaaaggttacttataaaaggaaggtatatattatacataaacttacactcttgttgctcacctggaggcaatacacatttagtgtcatttgctgcttatactaaaatgagactctatcaaatggatgtaaaaagtgaattccttaatggactaatacaagaggaagtctatgtagagca

SEQ ID NO: 110964 - DNA, 295 bp, Glycine max
taattatcgatgacacataattgtttttacagaaataaactatgtctttcattgtaatcaatgccaacacaggagaactgataaaaaaaatgatacaatgtaatgggtgcctactatgctagtacacctgtctgctctataacctatgatacagttattgtggtaagttgttgtctcttgtatgattcactcagacatctgacttgctctacctgcatgtgctctacctgcagttcctgtgccatcaatttcgtgaagccaattccaattaacacttatgcagcctctctgacta

SEQ ID NO: 110965 - DNA, 286 bp, Glycine max
agcttctatagaatgtttttcctaatttctctacaattgcattacctctcaatgagctggtgaggaagaatgtggcatttacctggggtgaaaaacaagagcaagcctttgctttgctcaaagaaaagcttattaaggcacttgttctagctattcctgacttttctaaaactttagagctagaatgtgatgcctctggagtgggagttggagctgtattgttacaaggagggcaccctattgcttattttggtgaaaaacttcatagtgccacccttaactaccc

SEQ ID NO: 110966 - DNA, 413 bp, Glycine max
  unsure (1)..(413): unsure at all n locations
ctctagcatgcatcttctttctttatccactcctcacgtntgagtttttcggggaataacaccataactaaacgcaccgcatgggatccctatcgcaccatatccaaatctagaacgatgggtgatcaagaggagacgcatgaacagatgatagccgacatgtcggctctgaaagaacaaatggcctccatgatggatgccatgttaagtatgaagcaactcatatagaataacgcggtcaccgccgccgctgccagttctgctgccgaagcagacccgactctcttggaactacgcccatnctcctcaacatatatgacggtgaaggaccactgggcacaatggcagcctcaccttgatcaaccgacggttaccctatggttgcgccactatcacacccgcttgcaaaatgc

SEQ ID NO: 110967 - DNA, 290 bp, Glycine max
agcttcaacattcaattttgagcgtctcgatatattacgggcctcaatcagacatccgagtaaaaagttattgtcgtttgaattggctcagagcttcaacattcaatttcgagcaactcgttatattacaggactcaatcagacattcgagtaaaaagttattgtcgtttgaattggctaagagcttcaacattaaatttcgagcgtctcgatatatgacgggactcaatcagacatccgagtaaaaagttattgtcgtttgaattggctctcagcttcaacattcaatt

SEQ ID NO: 110968 - DNA, 269 bp, Glycine max
tttttttgtgcctcatggcttcaaaaatttttgttttgacggcctacctcgccggggcctaaaatagggctttgggaaagggattttgggacttcctgacttttgaggggaggggatattgatagcttcctcgccggggatggaagactctaatttcgagatggagtctttggtgtctcaaggaagactgtgcggtcctcgtggtggttgagggcggcccagaggagggactcgtgggtgaggcctacgattaagaagttggggcgcgg

SEQ ID NO: 110969 - DNA, 255 bp, Glycine max
  unsure (1)..(255): unsure at all n locations
aacactacactaagacgctatctntctatatccnctgcatccttcactatcagatactcatatgaaccatcgagaaccactgggaaaatatcaagatagtgacaacaaatganacgggatgtaagacaaaagctagaaaaacaagtacactaataagaggagttgcgagtgaaaatngctacaacagctcatacctgacagaatgtagcacaaacaagactttaaaaagcattggatggtactactggccttgaa

SEQ ID NO: 110970 - DNA, 265 bp, Glycine max
gctgtacagaaattttttggggaacaagttagacaaaaacggagaaaatatttgtcttttcctaaagccctagacctattcttttgttttttgtcgaaatataaatattctaaaaatattttaaccccttcccaaaaaatctcatatcttagtttctttttttttttttaacttaaaatacttctcccctataatattttattgcatataatacttagtgaacaaataaaaagagagatggagaattttattaaacaaattgaat

SEQ ID NO: 110971 - DNA, 291 bp, Glycine max
agcttgaaagaaaattagttattactgtaagtaaagttagaaattaagtggggataattaaggttgattaatggtgatctagattccatagaattagaaagggataattaagccataagagtttaaagtggagggcattttcataaatgactatataactagttggaaaatagaattttagtttaattaattggtgactaattaaagtgtataattatatgatgtagaataattaaaataagttagagctgtaacaccctgaaaaattacaactccgattgacagaagaaa

SEQ ID NO: 110972 - DNA, 292 bp, Glycine max
agcttgtaggattatggttttcttatcacatgtggtactaggtggcggtcgggcgatggtgcacaacaagttttccacatccacaatgcgcgcataaacccaccatcccctgttgcccacctccaactgagctcacgtactcccacgtagcccatatcctcgtttctctcaacaccgggtccccatcaatcctcccaagcttccacaacatccaagcaaaacaacattcaaacagcacaagctatcacagccaagcaaaacagagcaaaggcagaaaactctgccaaaacac

SEQ ID NO: 110973 - DNA, 383 bp, Glycine max
  unsure (1)..(383): unsure at all n locations
gtgaaacggtttatgatcccaacatggttggctcgtggtgcctaacacatganactaagaatgtagtgtgaagtgtcacgcttcccccttttttgtgtttgttttgtagaggaaaacgcaaggatgagcaaacatgaaaacaaatggtatgcaattgtgcagatcaaatagtttggtgaacgcatatgcatgatgatgccatgactcatgcaaaatgtgaggccggaatatgataacggacaaatgcacgatatgtccattatgatgttatgaagagatgcttatgcgatgcatgatatgatatgcatttacggacacgagagcccggaatattatctcttcttacttgcgcatctgtgggcgcagtgccccatgtgtacaat

SEQ ID NO: 110974 - DNA, 231 bp, Glycine max
ctcttgctatttttttctttcatctcttattaaatggaagtaaggtcatggtgctctatacataataaagtggctggtagcccgaatgcttgggtaccgagatattattatgcgaaaggattgttaaacaatattttggcacttgtgcttggttgaactaactggtgtatttaaaggaatacattacttcttttttgtattgcttgtacacaatactgaagcttatctttg

SEQ ID NO: 110975 - DNA, 309 bp, Glycine max
gaccttatttagcctgcagcaccaacttgatctgaactttctatctgccagaaaacaattacggttatagtagattcggagctgtcgggatttctgatcaatggaaacctgatgcagcaaagaacttgaactgcaactgcttaactcttctttttgtgtatcttggcatacctataggggctattaatgcaacaaaatggtgagctatggaccacagttttgaattccaaatatggtggatggaggaaccctgaagaaacaggaaattcagcaaaacaatgtgtttggtggagggatgtaaaacaagct

SEQ ID NO: 110976 - DNA, 293 bp, Glycine max
agcttataggatgcctattctagttacaaccaaatcaggatgcacactccaaacgaggagaaaacaacatttatcactaaatatgccaacttttgctatagggtcatgcccatcagcctccaaattgcaggcgctacatactaaagattgatggatcgaattttcaaacaacagaccggagtctatgttgaccacatggtcgttaaatcttatagcattgcccaacatgtggtagacctggaagaggtgttcggagagctctacaaatatgatatgcgcctcaacccaaaaaa

SEQ ID NO: 110977 - DNA, 115 bp, Glycine max
cttctacacttgctcatctcaagcttgtatgattatggggcacccatcacatgtggtactatgtggaggtcgtgcgatggtgcacaacaagttttccacatccacaaatcgcaca

SEQ ID NO: 110978 - DNA, 287 bp, Glycine max
gagctatattcattgtgtttcttagcttctttcgcgggaattgcacctacgaacttctcaaagtgggtatcatcaacacactgatgaagaatcacaaatgctttgcaatcctgtttctttaattctttgaatccagccttttgtgcatcaagagcgttgtctcttggaacttctacaccattctcaacgatgtcagttaaatcttggaagccaaacaaggctttcatctgaacttgccacctgctgaagttcttgctagtgagaactaggagattcgcgggaaaatg

SEQ ID NO: 110979 - DNA, 431 bp, Glycine max
  unsure (1)..(431): unsure at all n locations
cactgttgttggagacaatgactgatgtattcagaaagtcttgctgtaatccattaccaagtggtgtaatcgattacttctttctcgcttagtagttcagaagtgaacaagaacactntaaccaaatactttgagtatctaatcgattacattgttcttgagttattgttagatgtcgggaaaaacactntaatcgattacctagataaactaatcgagtacttcgttgaattaatcgattactttatagatttaatcaattacaggaggttataancttgtttctctataaataactagcttgtgttcccctctatatacatcaagagaatactctatatctctgaaataacacattagcctatgaatgaacaagatctcaagctatcattagtgataaaagctgttagtgactcacaacttcttaatcg

SEQ ID NO: 110980 - DNA, 240 bp, Glycine max
ccaaacccactctccgggtgtctaagacaacctactgtctccctatgccggctagtctagcatagctatcatttttcctctcaatttgatctttgactctctcatgaagcttctttacatagaccggcttcgcttgaccttctttatgcttaaaaacagaaacattaggcataggcaaaagatcacgaggagttagtgggttaaaaccataaacaacttcaaaaggagaacaattagtgg

SEQ ID NO: 110981 - DNA, 471 bp, Glycine max
  unsure (1)..(471): unsure at all n locations
atatggatatatggacaagttatgaaagaaaagctgggggaccgcatcactgctcttcagcaatttggttcacctttcnganaaggaaatnttttgtatgttccttccttcactttattatttttcccttcacggcagctctgacaatgatatggtagaatgtaaaccttgacattctagactctgaatggtaatngaaaactcaccacatattactatattcgtcgtgatttaatagacggatacagcatccgttcttcacgaatccatcgtatacatcaatgttctncatgaccaagtcagtgtatgttgtcattgttacgaagtctaacttgtgtaaagaaaacctagtataattgtatttctacacaagaaatgtaaacacacggtttctatgtgttaatataatttgttctaattcaggttgacactctattgaaacacgactcattcacacacagtctctatatt

SEQ ID NO: 110982 - DNA, 303 bp, Glycine max
ccccgcattttagacttgccaccctatctttattgcaagttaaaaattacaacattttttatgcgtttaaataagtagggtttatggtttacaaacacaattaattcaaggtttaacgacaaattacaatacaaaagagatatatgattgatcttttcatgatcggaaaaggggaagggaggtgagagagattacatttataacacagctaaaaaattaatatttatcagatgaaaaaaaattacaattcaagtgcatacaacaaccacgagccaatacttacttttggttttcttaaaatat

SEQ ID NO: 110983 - DNA, 195 bp, Glycine max
gctttcttctaatcatctgtctactgactacattctaatgcagctctcttctgttcttcttgtctccataccactgctcatactcatgataaacacagctatttcatcatcattcattccatatcattacaacaccattcacaaaagataatgttgcattgatactcaagaatcaagttactattcattgcttaa

SEQ ID NO: 110984 - DNA, 286 bp, Glycine max
tagatcaaaaacctggggttttatattcaaacgagcagagctttttaatacgcacacacatgacctctatttatagcctaaaagggacacaaaattggaaggtttgaaactgaaattgtggagccaaactttggagccaaaactgcactaattatgatcagtgaattttagtatatggatcaccccactaatccaagatcaaatataatattctccactaagtgcgcttaagtgtcatgaggcatgaaaagcctgaaggacatgccacaaagtgtgactatatgat

SEQ ID NO: 110985 - DNA, 177 bp, Glycine max
  unsure (1)..(177): unsure at all n locations
tagtctactatccacatccacaattcacacataaatgcaccatccctagttgcccaccttcaactgagctcacgtactcccacgtagcccttatcctcattcctctcaacaccgggtccccatcaattcacccaagctttcacaacattcaagcaatntcaacatccaaacatcatg

SEQ ID NO: 110986 - DNA, 139 bp, Glycine max
cattacaagtcctctctaaatgatataaaacccggttagggagctgcagaacagaatccaggagagctaggggagaacaaccatataaggcctggacaagagatatatggatggcatgggcgaaagaaatgtggagaag

SEQ ID NO: 110987 - DNA, 291 bp, Glycine max
  unsure (1)..(291): unsure at all n locations
aatgtntcacactccaaagatctttntctggtgatggctntatatgtctgaaaaggaattttgggctaatggagacatacctattatggtatgtctctattagcccaaaatatgttaaccaccacaataagtatgtctccattagtccaaaatatgttagcccaaaatatgttaaccaccacaataggtatatctccaaagatcttttgagagtctatnttgttcgaaagaaagaaaagcacggcggaggcatatgtcttattaggtgaattcaataatattagagtcttg

SEQ ID NO: 110988 - DNA, 83 bp, Glycine max
aggggccagaaatacaaggagtttttctctacgcaagcgggggagaaagaacgacccataaataccacgataaaacgaaaagt

SEQ ID NO: 110989 - DNA, 220 bp, Glycine max
accacccgaaaaccaaaagacgggggagaaaggccagcgcgacccagaaaggagaacaaaacttcccggaagggaaaaacaaaccagcgcttccaccataatcaacagcaacgaatgcccaaccccgacgagaccagcactgaatgcccaagataaaaaatccacgtgttgcaacagcgggaccacctgaaagactcaaacaaaataaagaaaagacaaa

SEQ ID NO: 110990 - DNA, 166 bp, Glycine max
caggaagcgcaagcccggaggcttgttttaaaaaaaaaacgacgaagcggcccgcccaaccccatacgaacccggaagggacacttatcctcccccccacctctactttgcatgaccaagaccagtcacaaggggaacaaacttcatggacacgcagacagggcaa

SEQ ID NO: 110991 - DNA, 299 bp, Glycine max
  unsure (1)..(299): unsure at all n locations
acctgcacgcttgcgagctcttagactacnggttttttttattatagcaaagatcatatactgtcagtcctttctcaaattgggactcagaaagcttggatttactgatagcttcttcagttcctgctattaccccccctttttcattgagtctggtgaatacccttaatgatacagaccccacataagaagttaatgcttacaatcaatcaaattcacagtttcatccttcagaatcagaagagtgacagaggaaaaagcagaacaatcggacctaacctacacatgctttatattaa

SEQ ID NO: 110992 - DNA, 353 bp, Glycine max
tatatgtggaataagaggagagacatgagaagtgtttaaagtatatggtgcatgattcatatataattactctgtatttatcaaataatgcttcatcaacacttagcttctatacggcagattagaaattatgagaggacagtatacaaatattattagactagttggattgagaaatttaacaagaataatctaaattgggagactactaaacacgattaaatgcttaatctctttctattgtcttcactaacactttaacttaatttattttcattattttactcatcttttatttcatcacctattcttttcttacaacatattttatctttttctaatatatactatag

SEQ ID NO: 110993 - DNA, 259 bp, Glycine max
caaaacccaccatttttgttgtcaacagaaagaggggggaaacatgctccgatcacctaagaaagaagcatttatgaaagatagagaggaacggcctgcaaaataattagaaaaacaattcaagtaaaaatggaaaaaccagcgggggggaaggaaaaaactcctacctgaagggagattctgattccaaaaagaataaagtgtgcaacagcagacacagacgggatgaaggctgttaaaagtgaaaataaaaactaaa

SEQ ID NO: 110994 - DNA, 273 bp, Glycine max
  unsure (1)..(273): unsure at all n locations
aagtatacaatgactaattgatcaaaagtcaacggacaacataataaccctaaccatctagtataaatcataactcaagactcaaccactataataaacaaacatatgtaatcacctgataaatacataagcacatctataacaaatgctaatcaccatatatgtcagaagtccaatactaatcatcagcatatagttaacctgataacagaaccgaacatganatgggtgttcttgctgctaatgcatattatattagtggaccaggatact

SEQ ID NO: 110995 - DNA, 221 bp, Glycine max
acacaaacaggactgtaaaacaccgctatttagctagactgataaacaacccactaacatcgatgaaatccagtactacagggctaaaatctactgatatctctggcccccaaaacaagtttccatatcgcccaagaggggccgattacatataaacaatgactaatgaacacaagacttattatatttaccaagactggcatgggcattacagacaaaat

SEQ ID NO: 110996 - DNA, 347 bp, Glycine max
caaatcgctccttcatttgggtcactggcgcatatcctcactttggctgtcttgaagatcgtcacttttgacatgtcttattgatctaccgaacctataaatgtctgtctgctacaagcacctttgccttcaaatggctcggaagtccagtatgaccagacactccccataacttctgaagatggtaacctatttctccggacttgttagacagcacttcttgtctatagtgtggaccatatagcattggaattcgactgcgaaacaaatttgtgcatcgtattcggacacgataaggactggctatatgatcgactcgagaaaggtattgatcagtctactcgaaa

SEQ ID NO: 110997 - DNA, 293 bp, Glycine max
agctttgagcaaattcaatggattataaattttcactcggatgtccgattgtgtcccgtaggatatacagacgctcgtaattgaaaacggaagctatgataaaattctaacgacaataacttttcactcggatgtccgattgtgtcccgtaggatatcgaaacgctcgtaatcgaaaacagaagctctaagcaaattcaaacgacaataacttttaattcggatgtcggattgaatcccgtaatatatcaaggacgctcgtgattgaaaattgaagctctgagcaaattcaaa

SEQ ID NO: 110998 - DNA, 201 bp, Glycine max
gcttactcacgctgtttacgactcacgcaccagtttttttgcattgattctcaactcgtttaattcacgctcgttactcggaccatctgcatcgatcaaagtattgtcgttgaattgttgaagctttgtttcatttgacgttcgaatttacggctcttcaacatccagtaagtattgcgttgatttctaaacttcctttaa

SEQ ID NO: 110999 - DNA, 237 bp, Glycine max
tgtttcttatatgagggtacgtttttttagtaaaatttcttctcctctttttttttttatcatccattgcttgttctatctttccaaataacactatttacttggcaaatcagttgtgtcatccctatgataccttccgatgcttggaacaggcatatgttatgcacataaatgttttgccactccaagcaaaataggtaacaaaattattggtggataccaaaatgctatttgaca

SEQ ID NO: 111000 - DNA, 300 bp, Glycine max
  unsure (1)..(300): unsure at all n locations
actacctatcctcgcttgcatagcactcctccanaaccatcttggatgcatcatagtacaccacataggattcacgtcggtcatgttacattaaatatggtgcagtggtcaacctttcctatatggtacataaactactcttacactgtgcatcccacacaataactcgacccttacgagtaagcttattcaaatgtaaggctagcttataataacactctatgaatctacagtaatatcctgctaaaccaatgatactcctaatctcaaacactgacttatgactctcccaactcatca

SEQ ID NO: 111001 - DNA, 291 bp, Glycine max
  unsure (1)..(291): unsure at all n locations
agctntaaaagttctggttttgtttttacgcacggggaaggtattatcaccccaagcgttctgtcacgagggatgtacggtagccttaaatcaaatgtgcaaaatcatgacttttgttttatttgatattcccatttttacgtttttatctttcggggtcgacaaaagcggtgcttttgctcctatgtatcctcaattacgatgaggaactaaaacctacgtagttcttaagaaaagcaagaaagttatgcggtgtgttgattttatactttttaacggtccattttaacc

SEQ ID NO: 111002 - DNA, 394 bp, Glycine max
  unsure (1)..(394): unsure at all n locations
ctgatctgaccttcgtggttgtcttctagatanacgtgattctaagctggttccttggtagtttaaacttatcctngcatcnatttctgactgtggaaccaccattgtatgttgtacgcttcctctggaaaaccctagagaaagagactgtgtcaaagctatccttttctgaaatgggtgttattttcgtgaccttcattgaactccgttcgcattgacgtgattggaatttcanaatgatgctccttgtgtagaacccgtaataccccttatcctnttcatgtagtgacatgagtatntgactcatggtatcgttgtcaacattatntctgaaatccgtatgaagtttccttcatttngacgtatagagactatcgttggaccgacaagcgtg

SEQ ID NO: 111003 - DNA, 262 bp, Glycine max
  unsure (1)..(262): unsure at all n locations
cgcctcgtctgcgtcgcaatccatcgtctctctagtcatactcgcgattctccgaatcagcactttgaattcgaaaccaatccctatcttctgcgcgtgtcttcccatcaacaatcccacgctgttcagnctctcgtctgcgccgttcttcgtcaccgcgacgatcttcacggcggatggagctgccttccgtcgcgccgaaagctcgtggagaaagctcacgtattgagttccgtcgccgatatcgaaatacagcacgcac

SEQ ID NO: 111004 - DNA, 292 bp, Glycine max
gcacgcatgcgagcctcaaccctatcaatttaacaatagggggagacaccgaattatttaaaaaagttccgccccaaaggccctgaacgtccaaacgaatctgctgaggaaaattaaccccgtgaagaaaatccaaaccgaggcgctgccgtaacgttcccgcgagaaatgacgctaacactctcaaccgtttgtcaagatccacccatcgatcaccattatcgacagacatccacggggaagtaccaccaaccacgcttttcaattaccaatacgtacccgcgggggtcca

SEQ ID NO: 111005 - DNA, 269 bp, Glycine max
  unsure (1)..(269): unsure at all n locations
agcttttctcttttcttgtttaattattatattntggtttttaagccttgtatttggctatgttttcatgacatttgaatacttagtatttcttttattatttgattagtatgactgaacatgatgattatatgacattctatgaagtgttatctgtataagattgatgaatggttaagatatcttgtttgattgtttttctattcttgtgtatgtcatttatgtatgggttttatatttcttaactttctaagtttgatgaatggtta

SEQ ID NO: 111006 - DNA, 338 bp, Glycine max
  unsure (1)..(338): unsure at all n locations
gctctctatgggcaggcggcttcttacttctatctaacctctattttgaccaccgctctntcttcccgcaatgcttctctntatatccgcctgagtgggtgtatagcctataccatatttcccacgatttcctttggcatttatcatgctagttatgccgacattgtctttgcctaaacccattccgggttcgttaccgttccccaacataactcgggccatcattactgctgcatcggacatgcatggttgcccatagaatgagtccacagatgaaatgcttaccacctcataagactganaagcgatttctaatgactcctctgcggcttccacat

SEQ ID NO: 111007 - DNA, 312 bp, Glycine max
  unsure (1)..(312): unsure at all n locations
caacccggatactnatgaccctcgaagccccaatcgagaagccaacatttttccccaaaaaaaacccaaaagctttcataaagacgacagtgcacagggcgacacaaccaacacgaggataaaacagttattcgaagacaaagaataatgccaaaccaaatcgtcaaagaaacctaagacaacacgaaaacccaccactgcaaccacccaaaacaaacacaactaagggcacaaacctgaaaagcaccacaaatctagaaagcgaaccaacaccccaaacaagtcaactgacaaacagggacccccccaaag

SEQ ID NO: 111008 - DNA, 312 bp, Glycine max
  unsure (1)..(312): unsure at all n locations
atcctttatactctacctgcaagcttgcaagctttgattgagccnaattgttcttctgaggaggcaggaacgacagcttcactgcttggtcgataagacttggctgccttcacaacggtctctccacgacccttaaaaggtgaaggagtggaaggagactgaccaagaccaatcaatccaaccctctttgatccaagtcctgtaattctaagaacagttgactgaccaactttgccagagaaatcctcttcagaagaggcttcctctaataaaccacccaactttgagtcgatctttgtcaaaatcacattc

SEQ ID NO: 111009 - DNA, 289 bp, Glycine max
aagcttgacgcgaagggatattactatgacccgagggaggcggctcatttctacagagggagcggagcgcggggggcattcttaacgggatagttcgcgaagaaagagtacgtggaggagatttacggtgggggaaggccgcccgggagctagatgggaggcggagggaagcagatggcagccccagagaaccacaaaaaggtggagagccggtgggatacggccaacaaggcgccggagaggtaagggctacacaagacgaaactgtggaaaaacttcaaggatgaaa

SEQ ID NO: 111010 - DNA, 376 bp, Glycine max
tatctcgctcattgtcaatgtgagaattaatggagttttttgttattactatatttctcgagggctttatgtgctccaaattcgaagtggtcacagctcctccccaaagtggattctatgatcttgctgcattctgaaaatcttaaaggcgaaggtttcacttaagctacgttagttaatctgaaaacatactatgtatttctgttcaggttatatctcctttgtccatgtacaatcatcaggaaaatattattgtcacaactttgtctgtccctatgtggttcattggactctgtattccggttttccaaaaaacgctgatttttccctttattcatgtattgacccttagtgacctgattatgactattttcca

SEQ ID NO: 111011 - DNA, 299 bp, Glycine max
  unsure (1)..(299): unsure at all n locations
tgcgagtttgccacccanctcgttcattttagctatgcggcttcctccagtttctaccgccttctggaggaatattctggaaggcccaagtgggcctggttactatttgaacccccatttttactatagacaccccctgccttttttggcaattcttttaccgtaacgttttgaaactttacgaatttcgtaatgatgcttattttctttccgtaatgttacgaaaccttacggactatgtaatcaacccctttttggtttttaagatgtcccggaactttatggattgcctaacgatg

SEQ ID NO: 111012 - DNA, 319 bp, Glycine max
cataagaactgtatacatggaattaagtaactttcggtgatttcatacattccacaacatatgaataaagttacaaacaagttagccaaattatgggctaagacgatacatgatgtatgtatctgtatctcttgtgacaccttcgcctgaagctatggataagtctatataagaaaattaaatctacccagataaatagaatcttcataagttgggaagtgagatatataaataagaatgagcatactcatcaaacatgttgtaacactatgtattcgataaagattataaaaatgcattatattaactaatgtcctct

SEQ ID NO: 111013 - DNA, 208 bp, Glycine max
atcgttatattgagacatccactattgtatcgtacttacaccagacaactaatccaatataaactagtacctagcatttcgggatgtagacaagcatgcctccacaaaattatgaactatcttgcctagcaacagcaacacaaaagccttaaatttgaatttaactctctgcaacaaaacaaaactcaaacccaaccaataatatatt

SEQ ID NO: 111014 - DNA, 446 bp, Glycine max
  unsure (1)..(446): unsure at all n locations
tgtcaataaccgtgcttgcctgcatatcgatctataactctatgtatatgttaaacanatatgagaggattaatggagaanaatagtactaactagttcttacactttgatattgctggtgctgatcttgcatcgaatccggatataatgggaagcatgggcacaaagatgccacccncaccaacacctcccacagtcccaaatgctgatcctaggaatgcaattatgctgcccactattatgttccacccaaatgtcatctgctacaaccaataacataagcattaattacaagggtatgtatcccaattcaatgtccttaattaatatacaaacactaatccacatgcgtggccctagaaattcttattactattgtggttacatgatattgactcaaaggtatataatctaatntctatagtgatcaatnatgaacactcacc

SEQ ID NO: 111015 - DNA, 282 bp, Glycine max
agcttgtattaatcattttctactgattgtgatttctgcaattctgagtaggggggccatggaactgtcttatattgatctctatttatcagccacatttatgctagcaatgtatatttccatttattgttttaaatatttgtttaaagtaaaaatttatagcgatgttataacatagtgtaattatctatcagtaattgataaattaaaaaaaataagatctttgagactttaattgtgatatgatttatattcaaatcaaagggagaaaatcagagctag

SEQ ID NO: 111016 - DNA, 315 bp, Glycine max
  unsure (1)..(315): unsure at all n locations
gtaaattaaatgagtaattgaagcaactctacctacacaatcgtacataatctaaactgctaaactgaantacacctaatattccaccgaatcataatttgactccctcacacccaactttgccctagaaatggctctttgttcactttgatcatttgttcttctctctatcacagtccaagctttctcccaagtcctaaatgacatttcaagctagtattaactcactttaacctccatgtaccacagaattcatacttaaccttccaactctcaaagcctcactctgtgtccactcataacaccacattctca

SEQ ID NO: 111017 - DNA, 293 bp, Glycine max
gcatgctagcttaacacgcgttagtttatttggcattacgccattctttttcttatagcggaagagacaatctttttgctgaaagagttgatgacgtgctgagcgcgtgataacatggaaaattctcttatatattcatctcactcgctaagcgggtgatgtctcgcatagcagttgagtctcgctaagcgcatggtccaggcttatcaagacagcaacttttgcaccttcaaatttttctccttgttatcccgaaattgaagtgaaatttacattaaatttgtggcgtccct

SEQ ID NO: 111018 - DNA, 279 bp, Glycine max
gacctgcttgcacgcacgcaaccatcaaacagctttttctcggggcggccgacaaaagagtggcttgtgctccgacgcgtccccaaggggagaagaaacagaccccgcacgtcttgcaacagcagtcaagcatgcgttcgagttaagcgttagagaagtccgtgttaaccgagaaaagcaacaaggaccgtctaacgcgtcggaccatgacacggctcagacagacctccgcggaccaagctagagttgtgagaagaggctacccccagcaacactctg

SEQ ID NO: 111019 - DNA, 356 bp, Glycine max
cggaatggagaaagaagaaagatgattggagatgccacttccacgaatagatgagtcaagatcaagcttaccaccataggaagccatggataatagcttgaaggttggagaagattagtgaatggagaaggagcatgataatttatgcctcaaatgaggtctgaactctgaagtgtaaatctcaaatgatcaaagttgaataaaatacatgcacaaagcctctttatagcctaagtgtacacacaattgggggaagattgaattctatttcaatttacttgacttgaatggtggagcaaaattggaggcaaattcacctatatgtgttgtgattttagcttggttaaccactattc

SEQ ID NO: 111020 - DNA, 275 bp, Glycine max
  unsure (1)..(275): unsure at all n locations
tctgtttcatgcgagcttgagcataataggtgttgaatgttncctaccctgacccacaagggaaatggtgtatcacgaccagacatattcaattgcgtcaccagctcttgttgaatgaaattgtaagtgcctccaccgtctactagcaccaccacctggcgaccggaaaaccagcccgacaaccataaagttttcagtgcaaggtgacccgctaaggagtgaaagctaatttgggttgggcttgggttaagtaaatccactttgtctggcgggtc

SEQ ID NO: 111021 - DNA, 319 bp, Glycine max
  unsure (1)..(319): unsure at all n locations
tctatgatgacaagctcactgctatccctcagttggttaatcatggattggtgtttgctccaattatgtatacattgngtgctggaatcagtggaatgttgatatcgangaagtgatgggtgggagtccctttggttctggaacatatgctggtactgatggcgaaaggaacccaactgatattgagctgatgcaagcattccaccaacggaaatgtatagccgccatctcatagaagcttaagcgagatcctcacaattatctccataatattgctcgcagatggtgaccaatgagtgttntctgagttcttatttct

SEQ ID NO: 111022 - DNA, 311 bp, Glycine max
ccttgtaaacccccccttgtaactatacagcgattctttttcatgcaagctttacaaatctatattttgtttcaaacaagcctctcgctagcggtaccttaagtttcatgggaaaattctcttcatttggttgtaatgaaaaccccatggatcaatgcctataccacaaggtcagtgggaataaaatatgataccctgttttatatgtatatgatattttacttgccgccaaagatcagggcttgctacatgaggtgaaacaatttttctttaaaaattttgacctgaaggatatgagtgatgcatcttat

SEQ ID NO: 111023 - DNA, 61 bp, Glycine max
cccccccccccccgtgattgaacgtgaaaaaactgaaattgactctcttgatataggcgat

SEQ ID NO: 111024 - DNA, 282 bp, Glycine max
agcttgatgaattatattttttgtttatagcagcggacactacgtagaacaaaatagggataaagtattggggtggaatgttgataatgaaccactccctagttaaacaatgtctctttgcaaatgatgttatatgtcatactctaattgttttcaagaattgcatcctactataagcaattgattgtgggaaatgggcagagacaatcaaaaactttagaagaagaagcatttcaataaataacaagatgttattagccaaactttatatgcggaataaaa

SEQ ID NO: 111025 - DNA, 319 bp, Glycine max
acccggatcttatatcacttcagcatgcaagcttgaaggtggcattatctttaagaaactttaacatgtatttactatggagtatgaaaagagaggacttgaacagaggttaggtataaaacaccatttttgtggtgaaagtaaaaacgaaatatctggctcaaacttgattcaatgaattgaatagctcaaggaaatataagcacccatgatggttgtggcatgtacttcaacaattaattcaatatagaaactataataattgatacgaaataaaatgtgtggaaatattgagaccatacttcaaatgagtaagtaa

SEQ ID NO: 111026 - DNA, 283 bp, Glycine max
  unsure (1)..(283): unsure at all n locations
gctgctgctgcantgacagtgtcaacagcttgaggagaaatggtcatcttcctcctgggatgaatatatcaactgcactatattcttcaaaggaaccatcttgctttcctgtccgtgactcgctcatgatgatatgctctcagaatgatggccaatatagatctaatgttgtcactgttattattgaccacatcaaggaatgtggatngatttctggtaatggaaataataccatgctcgctgctctatntcatgtgctngcgtttgatctaatgaagatgct

SEQ ID NO: 111027 - DNA, 300 bp, Glycine max
cctgcaggcgtgcgagcttacattagtcaagcttgtgttgtttccattccaaaatcccaacgtaaaagaaaaattagtcattgcgtgatccacatgggctttattgggcttgtcatatggtcaaaggtaagaaagctttgaaagaaaggattagagagcacaaagattggttgaggattatattgagtaagaacctcaagagcattgcttgtatcttttgagatgggctctactacttttgtctgatacattaatcttacattgcactcttgtgtctttcttgaaaaatttggggatctt

SEQ ID NO: 111028 - DNA, 266 bp, Glycine max
  unsure (1)..(266): unsure at all n locations
ctagttgatagtatgtcattattaaatgttattagctaaacaattggcttgcactgctgtccacaattngtctcctgcatgaagttataatcaattaaataatcctaggaatacttatgtttcatctgtttgtgaaatcgctgactattgtgtactacatgtcttaatatgtggtacatggctccagaatatgctatgagaagttacttgaccgataaagcagatgtatatatctttggagttgtagctctagagattgtcagtgg

SEQ ID NO: 111029 - DNA, 275 bp, Glycine max
agcttaatacccaaaattatatctacaagaccaaggtccttcatatcaaaattactagacaataaagacttcacatcatttatgaaatgcatattactaccaaatatcaatatgtcatccacatacaaacataaaatgacacatccactatcatcaaattgtttcacatacacacatttatcactattattgatttcaaaaccatatgaaagaacaacttgatcaaatatttcgtaccattgctttggagcttgtttcaaaccatataaagattt

SEQ ID NO: 111030 - DNA, 286 bp, Glycine max
agcttctctttccatggcttattctctgcgggatggagccttttctcacctcttcttctttatggctgaaaatcaccatttaaggaccttattgaagctcaaagatctagcctccatagaagcttctcaagcaagcttccatcaggtcaagacatttatagtagtcaagaggagactacttttttcccttcttctagtgggagtgaagatgaagcaaggggtgaagactctagtgaggaagtctacctcaatgaagaaggtgacgtcctaatggttagaaggctcc

SEQ ID NO: 111031 - DNA, 283 bp, Glycine max
gcaagctagaaactgttcaacttgtagctctccacaaactcatatggttatagcttatcacacgggaggacaattgacgcgcataagatatcgacaccctttaagttgaacaacgaatactcttgaaaaattctaatggtcgtaacttttcatacagtagtccgatgaaggtgcatcacacatgaagacgctggaatttgctccaccaatgctctcgatagattccacatggtcattactttccaaactgaagttctattaagtgcataatacattgagaatg

SEQ ID NO: 111032 - DNA, 288 bp, Glycine max
ccagctgcagcagtcaaacccattttttcgccaccagccaggttgactcaaacaaatcaaatagatgtatcgcatgtgcgcacaaggactaactcttaagcatcttacagacaagtatacaaacacaagacttaagctctcatctaaaggtggacaatatgtttggagagaaacctcgaaatatacaacaatttacaaaaatatgggcatagaaaaaatttgaatgaaagtgagtaggtacgtatccatgtgagcaaagcttgtagaatttataggaacttttgaaca

SEQ ID NO: 111033 - DNA, 249 bp, Glycine max
ttgcttccgttccatatcatttttatgacattgtgcgagaactaaattgtctcctttctgaattggaacgggagatgctgaacacttttccatcctaaatctctctagtacttcattgatatatgcgttttgagacaagcctaacaatccttgtgatctatttcggaatatgtctatccctatcacatagcttgcctcacccatatccttcatgtcatagttactagaaagaaacttcttagtctcatg

SEQ ID NO: 111034 - DNA, 243 bp, Glycine max
aaatattttcaaatatgcatgtgaaatcagaagcatcagccagaattaaccctggctattgtgcccgccatcaaaggggccaaaacccaccaaacaattatgatgaaggatggctcaaattctcacagagagtaacttatcactttcaaatagagctttcaaaactatcatgacatgtaaaggaaaaataaagatttcaaatcacacaatgtcaagagacttttattttcagaacaaagaccc

SEQ ID NO: 111035 - DNA, 399 bp, Glycine max
  unsure (1)..(399): unsure at all n locations
caagctctatcttctaatcgatcatgcacttaattctgccactttgttnnttgagttaagcctcactctgaaataagttatgtaattacatgagttctctgattaatcccaactttctcttccactgtggcatcaacaaaaagccaaagttcgtataaaggcatataattatacattcactcataatcatccaagcaagaaagacaataatctatacataaactaagcaaggatgataataattcattcataaactataatataatgtcaaataatgtagaaagtcatccaagataaccaaatggaaacaactaatgtagaaagtaacatactaataagtgtatcataacatagtcataagacatcataacatataacaaatcatttgtctaagtcact

SEQ ID NO: 111036 - DNA, 385 bp, Glycine max
ctgtgtaatcgattacacttatttggtaatcgattaccagtgattgtttttgaaaaaaaaatcaaaacgtgtaactcttcaaatggtttttgactttttcaaattggttttaagtttttctaaaagttataactcttctaatggttgtcttgaccagacatgaagagtctataaaagcaaggttttgttttgcatttaaaaatcttgaacaacttttacaatacaatccttttcaagccttgaatctctttgaacttcttcttcttctttgtgccaaaagctttccatagttttctggttttctaaaccttgaaaacttgtgctattcatcttttcattcccttctccctttgccaaaaagaattagccaaggactaatcgcctg

SEQ ID NO: 111037 - DNA, 384 bp, Glycine max
taatgaagccacaagaaaagatcactacccgctttccttcatggatcaaatgcttgagagacttgtagggcaatctttctactgttttttggatggctactcaggttacaatcagattgcactagatcctcaggaccaagaaaagacagctttcacatgtccctttggtgtttttgcttatcgtcgcatgccattcaagttatgtaatgccctcgctactttccagagatgtatgatggctatttttgctgacatggtagaaaaatgtattgaagtctttatggatgattttttggtatttgatgcatcttttgagaactgtttagcaaatctagagaaagtgttacaacactgtgaagaatccaatctggtgcttaactggga

SEQ ID NO: 111038 - DNA, 381 bp, Glycine max
tcatgacaggcttcatcggaccaaccccatttcttatttatcttaactttctccttccatgagggttggctcctacttttaacaaccaatgcttaagcaaaagtcgattttgaaggatcaaaccccaaatcatttacttccttcaccaccttaagaatatcagttgaggagaaaacccctttacaacggttccgcaataatcgtgcaatgtttgtttctcccactccattctgaagcaacactctgatgttgcgcgcgacataatggccgccagagaaaatggaattaccaaacaaacaattaatagtgtgctcatcagatttcaagaatccatgtaccaattcataggttgggactatattattctccaggcttggactc

SEQ ID NO: 111039 - DNA, 380 bp, Glycine max
ttacaaccttcagataatcaggctaacagaggtgattttattttcagaataattgctttttttcctttcctttccttcttagttttagctttttcatgtttatgtgtggtgcatatccttcacaggttttgaaatcattgacctttgtcttgtgtttatcacattttgccatgtttcacgatatctttttgaggggcaccttacagttgatcctgagccaccacagcctcaatggttggtgcagtcaaacctcttgacaacagctgctacactctttgctgctgaatcctctcaagctccagcagcaaatgaaaccactcaagaggatgccgcaaatatgcttcaagatcttctgaatagattggaagaagctgtgccct

SEQ ID NO: 111040 - DNA, 386 bp, Glycine max
tcagccccagcacgcatggcaatgttatgaactatattagcatcttcgctgtcacctccaatgaagactctgttgaaatcaccgtgtttgacaagccatggttcggtgttggtggcgacccatttaagagcatcccagcagtcatcataagctgcaggaagaagggtctctggagccaacctatactcgacggaaacgactaaaacatctgctacggagacaaacttgttgaaatagttatggtggagttggttgaaggcagattcaaagaagaaacctccaccatgaaagtagaccaagatggggactttatgaccctcttgctgggatcgaatccggtttggaaggaaaagacgagcagagatgagggggtcaccagagatgac

SEQ ID NO: 111041 - DNA, 390 bp, Glycine max
cggccaatgactttcggtttccacacctgagttgactttcgtaccaccggctcactctccttagatattggccccccgggcatcttcttcgcttgatctctttgatatcgaggaagatttgcaaaaagcttatcccttccaatgaaaatattgtctagcttcatggcgaatcgtttcggctcttgaatccggcaaaaacgagcaaaaccgaatcttttacccatcctatttctccttgtcggaatcaccacctcttgcaagtcaccatagctcctgagactgttgaacaagagcttcgcattcatcttctccgctaaattggcaatgtaaatcatcgttgattgtaggtgctccttactcctttggtccctggattgataaatatctggg

SEQ ID NO: 111042 - DNA, 384 bp, Glycine max
cgaaccaagaaagagacgcaaccttctttctttatggtacaaaggcggagacgacaaagctgagcagtcaagaacacgccatgagaacggagatgaaggtctcaagaatcacagactgagatcaagagtccagtcagaacactgcaaggaccagcagaggaaagtggatctgcgagaaccacgaatgacattccaggaatgaagagccagattcaagactcaagaatcaagaatcaggagaagacgtactcaagataagaaataaaaagggtgttcaaaaactgagtagcacaggaatttttgccaaaaccttttaccaaagagcgattaatctctggggagcgatcaccagatcattgaaatcgattaccagcagcaaaatgg

SEQ ID NO: 111043 - DNA, 247 bp, Glycine max
acgcgggccagggacaccatcaactgctacaacatcaaaagggcaatctgcacccgcgcctgccatatcaaggccacctaaaacgggggaagccggaacgatgaagtaactcgaacgagcccgaacaatcttccctgatgtggccagcacttgctcaggagcaggacctgctgcaccaagaagagccctcgtgctcaaggcaactataaggaccaatgataccaacgtcaacttcatcattctggcg

SEQ ID NO: 111044 - DNA, 355 bp, Glycine max
  unsure (1)..(355): unsure at all n locations
accttggggggagagacgtatgttcttatcttactaanaacagcaccatacatacggatgaaacgtagcagaaattttcatgaatcaagcgaatggccataagagagtcatactcacaaattaagcgaatggccataagattaaaatgagtgtattatatttactcttataactactacttcctataaaaaaaatatattatgcctcaagcttgtgaatattagctaataaatatttcatggaactcttttatacatgaatataatgaaatattttataaaaaatattatttttaggcttatgaattttaactaataaatttttatgggacttttttatgcatagatgtgatgaa

SEQ ID NO: 111045 - DNA, 344 bp, Glycine max
cggaaactgcggcagctaatgcaatataagcaacatgtgcagtttttgagaatgccctttctgcctctgatggaattccaaatgatcatgttttgtcagtcatatctgttttatttcttgagcttggtatggaactctatcattatattagtttaatatatataataattgtttttttttttttgaatttcttttaatgtatctaattggtgttagttgtgattgtgagagacagtggcataattatgttaagcaagttactctggattgcaagatgttctacatataattttcttaccagaaattgttgtccacatgaattttgtattctattgtcttgattt

SEQ ID NO: 111046 - DNA, 387 bp, Glycine max
taccttgaagacaagttgtatggcatgacaactttgttttggggtactcactggcttgcgcggtgcctccacatgacgagacgccggacgaggtctctaccgatgtcatgggggtgcgggcaaacgccagaggtcacggcgaggtcacagtagatcaaaatttcagagaaacagggaagcgggagcttgagcgcgagtgttcatgaattagtgcaaaaaacattatatacctcaatgttaacgacggtggcttaagaacaacgttgtcgaaattcaaaatttcaacgatggtgtttcaaatgcaccatcttaacttacctgttgcgctacctacaaagacgggcaccctcggtcaacgtcattgaatgtgttacgcgccaagcacat

SEQ ID NO: 111047 - DNA, 381 bp, Glycine max
tcagcttcacacagattgtctttcttaaacttgagttttggaagacaattactaagtctttcctaactagattatttaaatgatgcatattaatgtgtgcagtcctacaatgctacaaccatgaatcatctattttactcaccaagcaacttagctcatgaaaagatgcttgctcaacattcagcatataaatgctacttattctcttaccaatatggagagctttactggatatggcttcacttataagacaacaatttctattgaattcaatcttgaaacctttatcacaaagttggctaatgcttagaagattatgctttagtttatccacatataacacattctttatctgagtttcgtcttgattccctatacttc

SEQ ID NO: 111048 - DNA, 385 bp, Glycine max
tcgaagggttgagagagaccagtcaagagtcattggcataatattagaggacaagttgaagtttgtcaaaggtcaaagaggagtttgtctgaacaattgagtaggacggaagaaaacatgtgggccatcattgatcaatacaaagagaagctaagtctagcttcaacccatgagcaaaggctagaggacgagtatgtgaaggtatcggtcctgcaagcagaaagggaagcaagggagagggtgatagattcattacacagagaagcaatgatgtggatggataggttcgcttccaccttgaatgggagtcatgagcttccaagactactagccaaagccaaggcgatggcagacgtgtactcagctcctgaggaagttcatgggc

SEQ ID NO: 111049 - DNA, 392 bp, Glycine max
actaagcttcacaatgaaaatcatcttgatatgacagctttgtatgttctcttacgagactatgcttttgaagctttgagattaacctcaaactagcatgaccaagcttcttatgccatacccagtaatgctctttgattgagagtaagcataacaccttttgactggatagatcaccaagattaatcttgtaaagatttccttatctcttagcatataagagtgaagagttgtccttgttccggatgatacacatatccttgttaaagttgacattatgcttcaatcccttaacaagtaaaacattatcaatagaaggatagtaaggaatacaaaccttacctacaccagttatcaaacctttctgattcccttcgaaagtgaccacccca

SEQ ID NO: 111050 - DNA, 378 bp, Glycine max
ttgagccaattcaaacgacaataactttttactcggatatctgattgagtcccgtaatataacgagaccctcgaaattgaatgttgaagctcttagcaaattcaaacgtcaataagtatttactcggatgtctgattttgtcccgtcatatatcgagacactcgaaattgaatgttgaagctctgagccaattcaaacgacaataaatttttacccagatgtctgattgagtcccgtaatatatcgagactctcgaaattgaatgttgaacctctgagccaattcaaacgacaataactttttactcggatgtctgattgagtcccataacatatcgagacgctcgaaattgaatgttgaatctctgagccaattcta

SEQ ID NO: 111051 - DNA, 336 bp, Glycine max
acctccactcccgaatacgacagacaccgctcgaggagcgccggacaccaacagcgattaaaggccctcaagggaaggccgaaaccccgggagcgacgagtccaaccaagggacaacgagaacacacacccccacgaagaaatagggcaccggcggcggacaaaaaagaaaacccccacggcaccgatggatccagagatagaaccagagcatatagcaaagcgcggccaacaaaagaggggatgcacgacaagaagaaccgagcaaagggtcaggggaacctgtccgaagcacacgccacacactaactgcagggaaaaggacaaccgggggaac

SEQ ID NO: 111052 - DNA, 386 bp, Glycine max
tagctgaatgcagatcgaatcgaagttagcttatctcatcctcggccagcttagcggaccaaatcaacctcacatgcaagggttgggtgctaagcgctcaagactcgcagctttgcgcatgaacagagatgcgcttaacgcgaggctcgcgcttaacgaaaggactatttttcaaaaagagtttctaagttataacttagtcctttcccaagaaattgaagcccttaggttaaatatttaaaaattggctgatatactcctatgaacaacttacatagcaagttccaaatgatcaaatgaatgaaaaacaaacacaacgaagattaaaactgggtttcctcccaagaagcgcttctttaacgtcattagcttgacgtttttacctc

SEQ ID NO: 111053 - DNA, 380 bp, Glycine max
ttgacctttgagcatcgacgactgtttcagcactctatttgcaacaatgtatctagggttttctttgagccaggacaatgtgggttctgtggggttcgagcgacgacgatataggttttccggtaacaaaaaccttttctttattatccgatgccactctcaaatcgggtcaaatcactcacaacgaaacttagcatacacgaatttgacctatgtacctcgcggagaaagctttgacctttgagcatcgatgactgtttcagcaccctagtagcaacaatgtatctagggttttcttcgagccaggacaatatgggttctgtggggttcgagcgacgacgatatatgttttccggtagtatatggggttctgtgggttc

SEQ ID NO: 111054 - DNA, 380 bp, Glycine max
tgtgcaaatcaaatcactcctacatctcatctctagcatgcattttctttctttacccactcctcacgtttggttttttagggaaaaacaccataactaaacgcgccgcaagggatccctatcgcaccagatccaaatctagaacgatgggtgatcaagaggagacgcaggaacagatgaaagccgacatgtcggctctgaaagaacaaatggcctccatgatggaggccatgttaggtatgaagcagctcatggagaagaacgcggccactgccgccgctgtcagttcggttgccgaagcagacccgactctcttggcaactacgcaccatcctccctcaaacatagtatgacggggaagggacacactggggcacgat

SEQ ID NO: 111055 - DNA, 383 bp, Glycine max
taaaacgtaccatgtatatcttgtatgattgttcttggttgctgcatggtagctgtaaactcgttcaatactttcatggtcagaaaagagggaaagagaaaagctattatatagtcgtattctcatgattgatctataaataaaaaaggtgaaagcttgattcaattaaatcaaatctatcgtgagcccaactttcgagtggcattatgaggttttggcaaagcatgatgatgtcttgtaattgaggagcatgcatagagcttaagataatgtcttctcacaagtcacaactttcgagttgcatttgtggtggaaaatgagatggggggtggggttcataatgaaaacatcttactatctttaactagtatttaatttaatta

SEQ ID NO: 111056 - DNA, 349 bp, Glycine max
tgtttggggagcttctatggaggctggatctttgtatcttaaagaggtcctgtattggtgatattacgccatggatgtgcagcagaacacaaaggaaacgtgatcagaggctgcgctatccactagggaataaaccctggtagaaggagctttaccaccattatgatccttggattacatgcttcgacaggatgctctactggatgaatataaggagagccagaaagagagaggggggagctcgaaattgtctgtgataaacggacagaagtggtactttgagttgtgtctcacataaatctcttctctcttcgttgctacaaatgctactcatgctgctttctctaca

SEQ ID NO: 111057 - DNA, 386 bp, Glycine max
  unsure (1)..(386): unsure at all n locations
tataaagtttgatgctgagaccttcaacaccttcctgattactccgatnaacttggagcctgnggagcactacatcacttactccaaattctgtcattcacatctagatccctaagagctggcttctagactttgcattccagggtgaggatttgtgcttaatgctaagagcgcgccttggaagcttcttaggaaggacatgaccaccctaacccagacctggagtgttttatcatactccaacctcacccccacctctcacacgtccgatcttaatatggacagggtgaggttagtctacggactggtcatgaagatggatatggacttgggctcgctcatttcaggccaaatctcacagatggcccaatccaactcctcttggc

SEQ ID NO: 111058 - DNA, 386 bp, Glycine max
tggtcatggctgccaccatctgttgaacaccgtttgctatgggcccgccggcaatggtgtcaacaagagactgctgaagctgttcaagaccttgactgagagcttcttctgtttgcagtgacgaatgcccgagttcacatatgaccataatttgctgctccgccaggggctctaactgtggtatcaacatctgaccaaaaataatatatatacacataagttcatgaatatctattttttataacatgcgctatgtaaatactaagttaagtgtggttattaaatattttttgaatgttattgatgacttaatatataattaataaaaaattaattcaagttttattgtttttactttttaataaaagtagttgaaattactaatc

SEQ ID NO: 111059 - DNA, 375 bp, Glycine max
tgaagttggacccatgatcacggaaagctctagtaactttgtttttagaaagagaaactccacattttttgttactgcaaggtttcgcgtgaagtgtccgaaattacaggaaaagagagatatgagaaagtttgagagagagagagagagagagagagagagagagagagagagaggaggtagttgtagagagagaaagagaggagtctggtatggtatgtttgtatgtgaaatggggtcaaagagagaatccagagaggaagttacgaagcaggaaccgcgtgtgttctaagcttttagctttaggtgatggctttcgtaatcacttgtacttttttattccttttctttttcttaattttaaaaaaataacac

SEQ ID NO: 111060 - DNA, 383 bp, Glycine max
tctgaattaacaaagatttgttcattgcctcaattttgtacttgatatataaggatagggataaaaaatatatgtgaattaaaatgtgtaaattatatcaaacaatactttataaaagcaaactttgatggaaagtgggaaaagcaaccattaattaaggggcacatgcttccccactttatatatagagtattaaaatacctctaaaacaaattaaaaaaaaatgtctttgttagtttgttattgctgttatttttttaatctggattcctaaaatatgcataaattaaaatccaacaagatataatccactccataacataacacaattttacaatagcggctttatctttatattagttacatgttgtgaagtttaaatc

SEQ ID NO: 111061 - DNA, 387 bp, Glycine max
tgaataaatgcaaatactaaagtcttgagatctttcttattctgtctcgagatttaaagcaattaatagtatattagataagtgatgaattcaggtcctatctgttttaaaaaactattttaaaataagtgatatatttgactttttaatgtaatattaatttattttttattaatatttttaattaatattgctttagtttttaaatctaatattaatattattttcttttatcaatttaataagattaattttttaaaattatcatttgattttatctatttattagttttaattaatctgtctaaaataaaataaaacgacacttattttgaaatgaaaaaaagtaatatagaatttatttaaaattaaatttaaattaaataa

SEQ ID NO: 111062 - DNA, 382 bp, Glycine max
tttccaagtggtcttcggcattacattttaactctatcaattgtcgataagtacctttgcgacaacgtggtccatacatctcaccgacacatgtagagccttgttgtgtcctctcccctcaacgggaatctcttcttccgcaaacgcgatataattgttggtggttatatgattaacgatgccttcaaaaccctccactgagatatcatgtgctacatgggcatcgttaaggaccttcatcaacaacgcacgatgaggctcggagtttatgagtagttcaagcaaagagatccttgctggagttttattcagttgctcaactaccttaaactcgctttgttggatgaggcggaggaactcatgggcctcttccaaagtcacc

SEQ ID NO: 111063 - DNA, 381 bp, Glycine max
  unsure (1)..(381): unsure at all n locations
ntaacctcatcgtctctcacagtctttagatttgggagtttatccagtccttgtgttcggactctcagccacttatgatagccgccgatgatcccattactgcttcccctaagctctctgtcctttcttcacgccgcatcccatgccttgcgaactccttggagtaccctcgcgttgtggtcactgaaacctcgtgcgatgaaaggcgtgatgctttcatctgatggcactcctctcatgggacatccttcgcatgaagatagaatcctgattcttccttccttctagcgagggaaccatttaacagacgcccctccatgctagccaagagttggtgcacaacaaacaattcttgcgccgctcttttcacatccccggtcg

SEQ ID NO: 111064 - DNA, 371 bp, Glycine max
ttgttgtttctataatcaacaattgtttacgatttatataatattttcttgtctcaattagaataattgaacttaaatgttaattaaaataaaagtaagtgtgaataaaaatataggacatttaatgattacttaaaattatatatcagaataaaatgtatataaattgtttaaatatgatatgatgttataaaagtcaattaatagaaaataaaaaactcaatgagttgtttaaactgcattccttgaaaatgctcttagcaagctcgatattgtattaagtctataaataatgagaatgaagtttaaactaagtcctcctacaaattacggagaaaaaatgttcatccatacaaaaaggatttcccaaa

SEQ ID NO: 111065 - DNA, 384 bp, Glycine max
  unsure (1)..(384): unsure at all n locations
attgcaatattgcagttgtaaatatctgcttactgttgcacacaataattgtgacgcgttngaaaatcacaaaacaaaaaatgtaacaacgacacgatagaaacaatgcaactaatgtaataatggctacattggattgcaacagttcacacaaattgttttccattcttttaattttctttactttaacatacaactcaccataaactcttcacaaattatttgtaaatctaaatcaaaacacatggcttctcatttcactctcttcttcttcaagacaatccaccattagagagtatgagaccttgaattttcttgactcaagggaccttgtaatagtactcttttcgagttttgagactagttccgtggtaagagactttc

SEQ ID NO: 111066 - DNA, 360 bp, Glycine max
tttcgagtcattctatgtaccgcaggtggtgcataatgtgatttcagcattgacacactcacataatgtacatcttataccccctaaagacgtgcttgagccatttgacttaaatgagttctcgcttaaacttaaaaatagaataaagttccaccgatcgtttgaattgtattatccgttaacttcagataaaataaatttcgatcgttcagccgtgccgtagccacgtgggaaagcaaacagaggtaaaatcataatttaataacaaaaatataccgtttagtaaaataaagcggaaaatcagagagacatttatctctttgggatgtctgattcttaatcgaattgactaattactaa

SEQ ID NO: 111067 - DNA, 335 bp, Glycine max
aaacgagaggggggggggagcacgaaattgaaggaagaaaaaggcagagaacttgaactttgagttttgtctcacaagactctcattcatcaaagttacaacaagtgttacacatgcttctatttatagactaagtagcttccttgagaagatttcttgagaaaacttccttgagaagcttctttgagaaaacttcattgagaagctagagcttagctacacacacccctttcaaaactaagctcacctccttgagaagcttccttatgaagattcctaaaaaagctagagcttagttacacatacctctctaatggctaagctcaccttcttga

SEQ ID NO: 111068 - DNA, 385 bp, Glycine max
  unsure (1)..(385): unsure at all n locations
ttgagccaattcaaacgacaataactttttactctgatatcttattgagtcccgnaatataacgagacgctcgaaattgaatgttgaagctcttagcaaattcaaacgtcaataagtatttactcggatatctgattttgtcccgtcatatatcgagacactcgaaattgaatgttgaagctctgagccaattcagatgacaataaatttttactcggatgtctgattgagtaccgtaatatatcgagacgctcgaaattgaatgttgaacctctgagccaattcaaacgacaataactatttactccgatgtctgattgagtcccgtaagatatcgagaccctcgaaattgaatgttgaatctctgagaaaattcaaacgacaa

SEQ ID NO: 111069 - DNA, 384 bp, Glycine max
tgaagtgatctgtgattatctgtactttatagtttttttcgttagcataatttatgtaatctatgagaaatctaacgcttggagctagtagtatccttaataactcagattgacgttattgtgctgctcacaaagtcaaaagtctatggcctattggctagtgtagctttttttttctcttgggtgagttgggagaattattttggtgttaggtaggtatgattggcctctggaaaaagaaaaaaatttgttattcctcctccttattgtgtgctagcctggagttgcaggattttttcttttgacttgtgtgaaaatttctattttctatgaattcatatataaataaaattaattaattttatattaagaaagttaattaat

SEQ ID NO: 111070 - DNA, 372 bp, Glycine max
tggccatgtaggaatggcagcctcaacatgggtttcttttttattatcatcctcttcatatgccctagttttctcattcatcaaagcaggatgatcaaattttcctcttttcagacctgcttcgatccttttgccggcaaagaccaaatccgcaaagcttgaaaactatgaaaaaaattggaggtgccacttgagctgccaggtctctccacctttgggcgtattctttgaaagatatgtgcccctttttgcacatgttttgtagttgcatcctatccggagccatatgaaaattgtactgatactgccaaacgaaggcaaccattaggtccttccaagaatggactccggaaggttccaagttagtgtacc

SEQ ID NO: 111071 - DNA, 381 bp, Glycine max
tagaacaatatacttggccttcgtttaattgtctttttgtttggcgaccacgatcaacaaagtactttcgacatctactatatgttgacttgaccaacgctgttattggaatgatgcgacaatctttcaacaccttattcacacattctgataggttggttgtcatgtgaccatatcttcctccagatgtatcgtaagccatgctccattttttctttgaaatgcgatcaatccatcttgctatggctggactcaactgacgaaatttttctaagttttgatcaaacacatgcttgcaaggagtgtacgctgcataaaatttgttaccatcaaaagttgtaggtagatatgaaactcaaattaacttcatgtataaaataa

SEQ ID NO: 111072 - DNA, 389 bp, Glycine max
gtgctgatttagttttcgccggtgaaaggatcgtagtgggtatgttaagaggcaaatttgattatcttgctgtgatgaataggaagcctagggaaaatggagagaataagaaagagggagaaacacatattatgactatcgctcctacattgccaaatttcccaccagctcaacaatattaatactcaatcaatatcagcctttccattacctacaaccctatcagccaagaacacccatgatgcaatcctaccccgcaagggcattggatagaagactctaagtagattgggccagagatctaagggaaggccctagggctctcatgagccttacggtagatttcgagctcattggctaagtatgagcccacttatctctgtaaatat

SEQ ID NO: 111073 - DNA, 383 bp, Glycine max
tatagttattggagggagaataaaacaattcatattcaattgtacccttcaagtaacgaagaattctttttgcggcctatagatgaggagaggtaggagcctctgtaaagcgacacacaactcccaccgcatatagaatatcgggccttgtattggttagataccttaaactccccacaagactcttgaagactgtggagtctaccttctctccttcatcaaactttgataacttcaagccaccttccataggtgtgttcacgggattgcaatcaagcatattaaatttcttcaacacttcttttgtgtagctttcttgtgagacaaagataccattctccgtttgcttcacttccattcccaagtaatatgacatgagtccc

SEQ ID NO: 111074 - DNA, 382 bp, Glycine max
tgaaattgaacaacggaagctctcaagatatttatttgtgtcataacatttaactcggaggtccgattcagacacagaatatatcgagaaattcaaatgggcataagttgtaactcggaggtccgattcaggcggataatatatcgagacgctccaaattgaacaatggaagctctcgagcaattcaaatgggcataaatagtcactcggaagtccgattcaggcgcataatttatcgagacgctcgaaattgaacaacgaaaggtctcaagaaattcaaatggtcataacttttaactcggaggtccgattcaggtgcataatatatcgagacgctcgaaattgaacaacggaagctctcaagaaattcaaatggtcataa

SEQ ID NO: 111075 - DNA, 319 bp, Glycine max
  unsure (1)..(319): unsure at all n locations
aaacgacaacacgggagagagaaaaggaccaccacaacaacccacccaaanggaagccggcacaagaacgaccccaaggaagaaaggcncaaagaagaccaaaaaggacaagggggccgaaggaacaagacccgccccggagaaagacagncacccgccaaagaacgaggaacaccaaccgcgcgacgaagccaacaagggacggacgagacncccggagcgaagcgaccagcccaaggaagaccagnanacagaggaccaagaagaaaaaaggcgccggccgagggcaccaccggagacacccaaggccaaacacgac

SEQ ID NO: 111076 - DNA, 376 bp, Glycine max
ggtcacttagggctttgacttataaatagttttttacctgactcatctgatgatatttgttgtggtgaagggggctctttttctaataaaaatgttaattggtggataaaactattaatattttgcacaagaagtaaaaattaaaataattataaatatggttacatgcttaatttctttgaggagaggatcatgctaaatgatattttttgggataaaagtccttgcgttagtataggtctaaaatccttccttcaagttgtgagctgtgagcatgatttcaaaaataaaagtgtgtttgcaaagggtatacagtattgggggtatgtaagtcttatgtgcatgggtgtgaacgagttcatgtgttgttgtgttt

SEQ ID NO: 111077 - DNA, 287 bp, Glycine max
cacaaagtggtggacgagtatgcccgagtgtacgcggaaaaggaggctagaggaagggtaattgactcgttacatcaagaggcaacaatgtggatggaccgatttgctcttactttgaacgggagtcaagaacttccccgattgttagccaaggccaaagcaatggcggacacctactccgccctcgaggagatccacgtacttctcagctattgccagcatatgatagacttaatggcccatatgattaggaaccgctaggaagtttgtattgtcactcagatctt

SEQ ID NO: 111078 - DNA, 307 bp, Glycine max
caactgagccaactaactaactattcctgtcaaagctgaatatactgctaagagatttgtcaagcgactgagtcctataaatgtaatgacctcaatgtaacatctttttgagaaatgacctgattttagaagtcagtagacctatcactgattacttatacagaaaacccttgagaagcaactttttgatataggatgacattgcttgaaatcccagccatatgatgccaatggtataaaacatttctgtttgtcagggcggcgtacaaagagtccatttgttggatggcactattagaggagatcc

SEQ ID NO: 111079 - DNA, 387 bp, Glycine max
tcttagcattgccaacaaagtaagattgcttggttctgaattttccgattcaagaatagttgaaaaaatactggtgactgtccctgaaagatttgaggctactattatatccttggagaatactaaggatctgtcaaaacttaccttggcagaacttgtaaatgctttgcaagcccaagagcaaagaagaagaatgagggctgatgattttgtggaaggagcattgcaagctaaattgcaaattaaccaaggagagaaaagcaagtggaagaaatacatgaagaagaatttcagcacacaagaagcagcggctaaaactagcaacaaaagtggagacaacaacaaaggatttcctctttgcaagcactgtggcagaatgggtcatcc

SEQ ID NO: 111080 - DNA, 382 bp, Glycine max
  unsure (1)..(382): unsure at all n locations
ntacggatcaacttaatctatatgatttattcactctcacccagctttacggatcaacatgacccgtatgactcatagggatcaacttgagtgaagcgcantttcgcccattcacttaaaatgttgggtgcaccagcaataatgctaggtgcacctagcatcaccctttatttttcttgcatattaggtattgaaacttcaaagcccaactaaaatggatcacaaagctaggtttgaggttgttgcttccagcacttcccaagtttctttctacactttttttggaatgcttttttgaccgtctaaattgatcattatggaagccaaaaatggagtacattccaaaatgtaattttacattctaaattgatcattctgaaag

SEQ ID NO: 111081 - DNA, 392 bp, Glycine max
gaccaaaaactcagctgcttaacaagaattgcgataggcccaattttttcttttataaaagacccgaggtgcaatagaagaggtattttggtgctattcagacaacaacattattcccaaggctcttagttttgatttattacatgtttgtatgcttgatcgtgagaattgtaatcaagctctgagtagtgaatcttttcatttgtcggggttggataggctaaacttaatttcgtgtaatactcttttttaatatagttattcatatttattactcttcttcttctcttaatgcttgttttagattgatcacatgttatttaatattacgaattgatagtttagttggtagacactcgtttgattcttgaactgagaataatacctaatgg

SEQ ID NO: 111082 - DNA, 379 bp, Glycine max
  unsure (1)..(379): unsure at all n locations
tattctgtctcatcattgtcatgcgcaaggagttgacttattattctgagntgacagctactcgctccagtcttaaatataagaaaaaaaacacatttttcttgatctcaaatacttcctccttccctaattataaaactctttcaactaactcatgccccttaagaaaagtagttaatttagttaatcacattaaatacatcaattatttatactattattccaaaattatcattttcctatctctctatcattttcctatctctctatccattttcctgcctagggtagctttgctattcttagccggtcccaagtccggataaaaggagagggttgtgttatgctttctacagccaacgttaaactttgtcgaatc

SEQ ID NO: 111083 - DNA, 415 bp, Glycine max
tgtgaggtcaatggaatccaagattacgtttgtttcattgttattcacattctagttcttcagaaattgtgactctatggcgttcagtcgccaatatatagcttttagaggtcacgtttatagtcaaattaatactggcttatgtaaccacagcagatgtcatgcgatataatagagagtctcagttaataagggaatgcggatcttcattatagtataatatcagattaatcatgtgaccaaaagatgaaatatttctaacaattatctgaactataaagacagacctgaacacattgtttcgcgaatgaacacatataaaccatactgttgatatcataaactagaaacaaatttcttctacatgacatgtacgacaaaagtgttttttaaactcaaattgttaaccattaca

SEQ ID NO: 111084 - DNA, 309 bp, Glycine max
atactcaaactccaccaacaacatgagccagggataagaagcctttttttgatgctccaacggcggaaaacaacgagagaaggggggagcaccacactgtaggaataacaaagggacagacggggaacaataaagggagccgacaagactgacattcaccaaagccaccaccgactgagcccatggctatatctgtagacaacgaagcatccctgagaagacaaacgtgagaaaactcccatgacaatccatgaaaaaacaacctcgaaaagatagagcttaaccacaaacacgcctcgtataactaac

SEQ ID NO: 111085 - DNA, 307 bp, Glycine max
  unsure (1)..(307): unsure at all n locations
aagacccgacgcgcgacagaagaggaagcncggcgccacccacacaacaacaggatgcccaaggcggatacgcaagaatactacaagcacgcaagcctgagcatgagagaaggccccaagctcagaaacaagaccgaaccggacagaccgacgaacgcaaccatcaatcgaacccggagccaaccaagtcaggggccaagccatacaaaccaagaaacccgaaaaaagccaaagaaggacaacccaacagccgaacgcaacccccaaatagacacacagaccagggcaaccacagcggagaattaaa

SEQ ID NO: 111086 - DNA, 385 bp, Glycine max
tataaagaaaaatgatgacatttattatacatgtttttctacaataattgaggaggtttagtgatataaattggatttctgattctgatgaaacaaaatcgacaagtggttatgtatttactttagctcgtggtgcagtgtgatgaaaatctgctaaacaaactattatttcacgttctaccatggaagcagaaattattgctttagatcagtgaggctgagtttcttaaaaatttgttatgtgatttaccattgttgaataagcctatacttccaattccaatgcattgtgatagtcaatttgctatatctaaagttactagcaaaatttttaatgaaaaaagaagacacttaagagtgagacataagtctattagaaatttga

SEQ ID NO: 111087 - DNA, 377 bp, Glycine max
ccgcataagtgactagaaagaccttcaatgctttaacttcaaaatcttggatgctgcaaaacaaaaaatagtcgtcatcaaataaaaggtgtgagagttttggggcccctctacacaccatgatgccatggatagcaccaaaactctcaactgatttaaaaagtgatgaaagatcttttgtgcaaatgataaaaaagtagggtgacaatgggtcaccttatctaaggcctctcccgggagaaataggtcctacataatcctcattgatcaaaatagagtattgaatagtttccaagcaaagcttcatccaatctaaccattttgtggcaaaacccatttttgccatgactgtaagaaggtaatcccattgaactctg

SEQ ID NO: 111088 - DNA, 375 bp, Glycine max
  unsure (1)..(375): unsure at all n locations
cttcaaaaaanggtgaacacaataaggtaatatatttattcataaagacaaanagatatagctgtacacactactgtatgattgtgataattaaaaaagaaaaagaaaaacagttttcttctagtaggaaactaaattcatacctaggtaaagtttttagaatatctagttacccatgcaaaatttcagcaaccaaagcaagatagaaacattgtattttaaggataattagccactgaatgtgtccttattcttcgcacagcaatgaggaacaaatccaaatgatatcagaaaatgggataacaccagtgacaaatatacaatagtactaacagcaatcaactacggaaagttaaggaatattgtattttaaga

SEQ ID NO: 111089 - DNA, 385 bp, Glycine max
tgcatcttacaagagaaaaccaacattttcacgaacagtcaatgaatcaaagagtgctgcactttggaaaacctatttacagattaaaaaaaataagttacgttgaaaacaaaataagaattagtatattgcataatactctgaaacttaccaatccaatccgaagaccagatatgtcatcatcacttactaaaccaactctctttttacctcgaatatatacttctccctgtcaatttaacaacaatagcattcaagaaatgaactcaactgtttgaaattaaaagtacatactcaaaattctaaatagataggtactttgtccggagcaagaagtccagcaataatcttcaaaactgtagatttgccggtcccagaaggacca

SEQ ID NO: 111090 - DNA, 382 bp, Glycine max
tgagtcttagcataactgttgcatacgcttgcttattgtttattatgaaattgatgtgttattatgtcttgatcggagtgtgcgattcctgtgtattgtgattgatgattgaaaggtgtgattgatggatgaaaagtgtgattgatgaaaggcaaagtgatgaaataatgtgagatatgctaagtaaattgtatttggctactatatgttgtgttgtttctctctagtagttagaaatgtgataacttactcccggtttgctatttgtgtttggatcctgtgatgatattgaactttgtgttcgggggagcagatgaataggtggatgactatgaagaacctcatgctagaggacacgagaacaccacgctttgataggatg

SEQ ID NO: 111091 - DNA, 383 bp, Glycine max
  unsure (1)..(383): unsure at all n locations
tagcgtagtaggcagacagaaagagtgtggccgtgtttttgtacatgcatatcactntacatgtgtcacactctagtgcacatggtgttagtagatagaccagatgtcacaccaaacacgatcgatcactttcagaactactacattccttggggatttatgtcttgctaacaactggagtggtttgaagagatcaatttttatttggccatggaagtgcctcacgatgcttaagagttcatagtgaccccagtgaggtttaatgtgagaggtagtgtcctgagttggagattcgaactagtatgtcccatgtaggtcactgaagatcggggagatcacaccgatatgacgctcgaggaggaggaagagtatcatgagctttt

SEQ ID NO: 111092 - DNA, 391 bp, Glycine max
gaaactaagctttacacagattttaataatgacccactaacctttaagtaattaacttaatgccattaacctagggaattaaaataaaaacttattggctgagtgtaactgaaatagtggcaaccaaaagtcacccccaacagccaacaagtcagccaccatttggtctcccaaaaggctgatgcctaggttgccaattgggcccttattacaacttgaactaaacctactaaagcccttttagttgattaacccaaaacatattttttgtcagccaactttacaacgattgggccattattttattaaactaaacactctaaaattgagacaaagtggcgccatttagtctttctccatttgggccatgatacagtttacaaccttggac

SEQ ID NO: 111093 - DNA, 388 bp, Glycine max
ttgtggtggactgaagagaaggcgacctaaccgtcctattggagctgagccaagtcagccaacaataacataaagagaatttcacacatggcttttctgaatttcatataattttatttaagagggcatgtttagactactgttacagtttctttttgtgatcaaggggtagtgtataaaacttcacccaataaaaatttcacatattcaaataaaaattgtaacttgggatgacacttaaagtccatagcaagtctaagatgtcttttctatatgtacaattgacctagttcaaggctaaaaagaattaaaaacatggaaaaagatttgattgtaaagaataatgggaaaaataaaataaaatcaaaagtatgtcacttgactttga

SEQ ID NO: 111094 - DNA, 375 bp, Glycine max
  unsure (1)..(375): unsure at all n locations
ngaatagctancaagacgatgttggaaatgttttatatacttgaaccatttacaaatgaaaaaatactcagccaaatacatatctttagtaaccaccagaattaagaactttggatctcctgtgagacccccagatatcccataagctttagaccgacgatgacaaaaatcttcggttcacagcttaatcgctgccaactacgaccatcgagtccgggcaatatctaaaaactagacaaaatgttcaatgcctacttacagaggccaaggaaagtcgctggaatccaaaccaatcagaaaagtcaaagtacggaaaccacagccctcgaaagccgcacgtggagagtaaaacacacaaatccatgacacgaatca

SEQ ID NO: 111095 - DNA, 380 bp, Glycine max
ttcagactttggtcttgcaaaaggtcctgttatttttttacccatgtcatggaaacttatgcttaccgtgctccagactatgctatgactggacagccgactgtgaagtctgacgtatatagttatagggtagccttgctggagctgattactaaaccttgttacatgggtagtcttctaatctttgcttgtctttattacttatacataacaatggctaatggtggttttaatttacacgtttgagtaggcacgtccactgttcaaggatggcacgaagtttccagagttagcagatgcgaggtctttaccaagctctaactgtggcatcaatgtgcattcacgaacaggcaaaagttcgtcctctcattggggatgtg

SEQ ID NO: 111096 - DNA, 317 bp, Glycine max
  unsure (1)..(317): unsure at all n locations
ccaacggcccaacaccgcgggagcacaaaacgaacgagccgccgacagacacggaagaacaccgcggagcaaccgcaaccacaagcggggaggcaaccggnggggagacaccaaaagggagaaacaagaacgggcaaccagggaccgnacaaaccacggaacaaacccgggcgacgaaccaaaggcagacaacacaaaccaaaacagaccaccaaccaccgcaaagaacaggggcaagacaggggaaccaagcgcacgaccgcccacacaccaaaaggggaaaagaccgaaacccaagggaggagcccagggaccaa

SEQ ID NO: 111097 - DNA, 379 bp, Glycine max
taaggggcctttgtaggggaaatattctttttgttggagaattatgtaattcttgggaatcgtggtttagttagtcatcgtaaacatttaaataagttttttacgaattgaagagttgtatgatatttttatcaattattttaaatatttatgaaattaataagagtaacatgatatttatactgtaataaaaaaaattaaactcaagaaagtaagattttcacttctttcatagtgaagtttttaaaaatagataccaaacataagaaactaatgattctcaaaaaactcaacttctttcctaccaaacacctcctaagatgcatgttttgtttattatgcttatatcctttgtcaaatttatggacatgcactacat

SEQ ID NO: 111098 - DNA, 312 bp, Glycine max
ggttggcccataccaacattcttctataaatcttcattaataaaggctggtttcacatccatctgatgtaccttcaattcataatgggctactaatgccataataatcctgaaagaatcctttcgtgagatggcgaaaacgtctctttataatcaaagtcatctttctgagtaaatcccttagcaacaaggctagccttgtaacgttcaaggttgccatgagagtcacatttagtcttgaagacccacttacgaccaactctcttacaaccctttggtaattctacaacgtctcaaattatgttccatggaa

SEQ ID NO: 111099 - DNA, 324 bp, Glycine max
aaacctctagttttggaacttgttttcacagtaattttcaattgaaattttagaactaagattggtataaaataggcaccaattatagaacaaatttcgagccaaaacaacaagcacacttccctttcactttttttttcctggacactgatttttctgccaactcaacaccacaactcaacttcatcataggcatcatgtaggaaacttataaaacaaaaaaaaaagttcaacaacaagactacttctaggaattgatttagaacatgttatgaactaaataacatgcatgaattagactcaaaattcaaaagataggctaag

SEQ ID NO: 111100 - DNA, 356 bp, Glycine max
acaacttatttttatttgaatttcacgagagcttccgttgttcaatttccagggtcactatatgtgatgcaccaaaattggacattcgaattaaatggtatgaccatttgaatatttcaagagcttccggtgttcaattctgagcgtctcgatatgtgatttgcctgaatcggacatccgggtgaaaagttatgaccatttgaatttctccagagctatcgttgttcaatgtcgagcctctcgacagattatgcgcccgaatcggacatccgggtgagaagttatgactatttgaaatccctgagagtttccgacgcttacttttgagcgtatcgatatattattagcccgaatcg

SEQ ID NO: 111101 - DNA, 381 bp, Glycine max
tttttttcttgcgcttcacacaactgtcatttttgttttctgtttttctctatttttgaggttttcatgcggcattgtctcgggttcgttggttcattgtgaacggttaggtgcggtgaaggtgaaggtgcgttgcggtggtcagcggcggcaaacgaggtacacagaaggtggtggctgtgtcgcgaacgtacggattacttacggatcaacttgatccgcaagagtaactatttttaaaatttgatgtttttcgaatttagttttcatttttttaaaattattaatttgtttgtatggccaatttttgtttgagttggttacgatgaacgaagatgagtggatgtatgaaataatgtctgatcaagctgatatggatta

SEQ ID NO: 111102 - DNA, 393 bp, Glycine max
gcgacactataaaacccagctgtgatatcgaatgactcatcttatctactcactttttttgagagttatccctagaatcagagggtatggctcttagagtcatgagagatgatacttctactcgtctactgagtgacttccaacatataccagtggtctatcatctgcatgacatactcataaatctctgagcgccgtcctagctatgcaattaatgcataacaccatactactaacatacccagaattatcaggttcttatcatatgtatacaacgtacgtctaagaagtaagaatttagtagttaataatgatgtattaaagaatcacaaacttcgtctactacattcacgactacacacaaaataatctgagttcaattggcatgccctt

SEQ ID NO: 111103 - DNA, 385 bp, Glycine max
  unsure (1)..(385): unsure at all n locations
tccgttcctggagcatttcttatttaagcatttctgcctttgttttcgngtatcttaggaaaaacgtcatttcttctcctttctttcttccaaagtcatttctaacatcccaatcactttctccatctcccacagccaccattagccaccacaaaccatcgttgttctccattgaaaccccacaccgagaggaacccttcaaccgaagcggaatcttccaacttggcttgcggtttcggtagagattgaaaccctaatctgacctttcattttctttcaaggtaaccatggttctacgcttgtttcttgttagtttcatcttatctttgcatcttttctgactttggaaccgccattgcatgtcttatgcttcctttgaaaaacc

SEQ ID NO: 111104 - DNA, 387 bp, Glycine max
tcaagaatactggtctcagcaaacttcttattcttaatttgaaattcaataaataggcctcctatttttaatggagagggttaccactactggaaaacctgaatgcaaatcttcattgaggcaatagacttaaaaatttgggaagccatagaagtaggaccttatgtacccaccatggtggctagaaatgcaacaataaaaaaacctagagaagagtggactgaagatgaaagaagattagtgcagtacaatttaaaggctaaaaacatcattacttctacccaaggaatggatgaatattttagggtttcaaattgtaagaatgctaaggatatgtgagacactctacaagttacacatgagggcactactgatgttaaacgatct

SEQ ID NO: 111105 - DNA, 384 bp, Glycine max
tgtaggattatggggtacccatcacatgtggtactaggtggcggtcgggcgatggtgcacaacaagttttccacatccacaatgcgcgcataaacccaccatcccctgttgcccacctccaactgagctcacgtactcccacgtagcccatatcctcgtttctctcaacaccgggtccccatcaatcctcccaagcttccacaacatccaagcaaaacaacattcacacagcacaagctatcacagccaagcaaaacaaagcaaaggcagaaaactctgccaaaacaccaaccaaaaatcacagcttttcccactcaaagaccccagtaacaattccttcgatccaatttgttaaccgttggatcgactccaaaatttttctgg

SEQ ID NO: 111106 - DNA, 381 bp, Glycine max
tctatataagatgaaccattttatcaataaacacaagttgagttttattcagaaaattagagtttatctcttttatcttagtgagagtgattctcctaagttcttgagtgattcaagaaaaccctggctatatcaaaggactttcataacctttgtgtgttgccctcgccggaaagagtgattctttccttcctttcatcttcaaccttgttctttcaaaccacaattccagaaaatccacttctgcccagaattatctcgtggtcataactctcattttacacgctcaaattaagtgattcttgagcctaaactgaatttcaaaacgagatctttcacctcgttttggaatcacctcatttggagccctgtagcttgagt

SEQ ID NO: 111107 - DNA, 297 bp, Glycine max
  unsure (1)..(297): unsure at all n locations
aaccaaaaagagaaaacgcanaggaagcgaacggcagacacgcaaaagaaaggcgaaggagaaacaagaacgaaancggaaagagaagcaagaaaaggaaaaccgcagaaagaacgaaacaggagcaccagaagagaaaaacagcaaaaccagaaacccgaaagaaagcgccgaagaaagaacggcacaacagaaaaaccggcacgaangccaaggcggcgaataaaaaagagccactcaaaggcacagggcccaaggacaagactggggcccaaaacgaaatagacacggaaccac

SEQ ID NO: 111108 - DNA, 384 bp, Glycine max
tgatgattgcctatggcatatagaacaaccttctttactcccattggcctctccccatttcatatggtgtatggaaaaacatgcgacctaccagtggagttagaaataaaagctcattgggctatgaagttcctcaactttaactctacagcatccagagagaggagaaaggtacaaatataagaacttcaagagatgtgcctcaacgcatattaatcatccaagctctacaaagaaagagccaagaggtgccataacaaaacaatcctccacaaagaatttaggcccaaacaacaagtattgctctacaactcaagattaaagttttttcccggaaaattaaaattgagatggagtggaccctttactatcaaagacattaag

SEQ ID NO: 111109 - DNA, 351 bp, Glycine max
tttttttcaaaaggctaggcacgcaattaaactactcgaatacacttgcatacaggccaacactcgatggcacatgaagatgtgctcaacggacgaacaacaacgctcacctcagggacaatctaaagaaactaaaactatcacaccaccaaacaaattatgaaccggttttctaagacaaaccaaatacatggaattcctcggtaaacggaactgcacataacataaatttcattgacgcgctgcctatcataatatccaccaaccacaaaccaaatgcagtaagggagcttacagatttaaacaaaacagctaaaacggctacaattttcttgccttgtgtataaatac

SEQ ID NO: 111110 - DNA, 365 bp, Glycine max
aaccacctcttgaaccttcatatgtttttgattcaaactagaacaacatgaacttattctttgattctgaagagcagacatctctgaatcatgaagtgttctagaccttcatcaatatgtcatcgacttgctatcaccaaaactgctttcaatcaatcttgaatcaacatgaagcttgattctacaaataaactcttccatatgcatgcatcaaatactcttggatgatgatcccaaacctgttagaaagccccacacgagattgaatcccaacattcttgatgtggtgaagaaagaggtgaagaagccactaactgcagtgatcatttatcccatttcaaatagcacttgggcttgacctgtac

SEQ ID NO: 111111 - DNA, 234 bp, Glycine max
ccgaccaacggggacagaaatgaaggcaagagagagatgagaaatgagccaaggcgcacggccaaacccacacacagaggaagcaagggcaaacatggggacgccatgagatacgcgacactgcaaagggagacccaagcacggaagaaaaaagacccccaaggcgccagcgaaagggccacacccacggggaaagcaggccccaaaaacccaaaatggcataccccaggaaaa

SEQ ID NO: 111112 - DNA, 382 bp, Glycine max
tatggaggaatattgaagctggaaatgaatgcggtgacatggtgcatggacaagagcatagttgctggttggttccctttctggaacagtgctactggaaactaattaaaaaattctcaattttacaaggaagatacaccggacatatctggactttgtgcaatgtcgcgctgctttccttttccaccaccaggatatgaaaagaaggctacagcacaggacgtggatgtactgacaaaggttaacgtactttccttatattcacaatatgcattttgtttcattatcaagatttgggatgcaaaaatgaattttcttgtcagctgtataggtgttaaatgtgcattgataatataagatgcttctttgtgaatggaccatc

SEQ ID NO: 111113 - DNA, 379 bp, Glycine max
  unsure (1)..(379): unsure at all n locations
tctgctgttaagatttagccctaatatccagctcnctttttttgctcttcaattgagatgggtgttgtgaacttcatgcaccatgtacgtgaattgttcggtatgattctttgcggaggggttctttgtgtacttggagcatgctttttcagttatgtcacaacccgcattgatttaaaaatgccatgtgacccaaaacattttaaagagccgtattttacattctctatttgatagtatttggcttcatgtcacaactggcatgtgctacaaacatctttgtttatttattgaaaagttaatatgactaaattttataaaaaaatcttggctaaaaaaatcttaaaaaaaaatattatttcattacccaagtgcacca

SEQ ID NO: 111114 - DNA, 362 bp, Glycine max
  unsure (1)..(362): unsure at all n locations
agcgatttgtgatgcccctgaatgagagattcgagagtttttttctgtccatcacaaatngtcgggaactgccattattgaattactgacgtctaaatctgggatgttcctgaaacgggcctactagggaaaaggtatgaacattctaatggaataataactgtcgccgataaatgtctagcgaatacatttttgaagtgcctgaatcgaacatcggagccctaagaggtgagaaatataatttgttgtaacccaccattggtggtgaactagcgtctaaattttgtgtgtgcctgactgctactatctgatgaaaagttttgactatttcaattctaccgagagcttatcgtaggtcatag

SEQ ID NO: 111115 - DNA, 386 bp, Glycine max
tgaattggagttttgcaggtctgaagatcaagttgcagtcatattaactaagccattgaagtctatcaaattcaaggaattgagagacaagttaggagtgacatccttgacaaatctgaattaagaagggatgttgatgtatgctgtaattcagttagtcagttagttagttaggagttagttagtttgacagctgtgaaggtagttatagttacatgtgtagtgtataaaaataatagtgatcatgaatgagatgatgagaatgcagaagttttattcagagttctaagttccttctattttctcaatcaattctttcatcttctcttattctctaacatagagtgagtgagtgcataatgtgtgtgtgaagagcttctttgttc

SEQ ID NO: 111116 - DNA, 382 bp, Glycine max
tcttttggaccttgaacaggcaactaactcctctttcaaaaccatgctatgtgctcgcgactggtgcctttcttcccttcgcaacttgagttcattattgctaccccatagagctccgcgaaatttgttccggccatactcttccttgcgagccctcttggtctcttgttcaagggctcttgcagtaattgcattctcttcccgtaacccggcacactccttccgaacgtgtgtagcagccaacttgaacttctccttggcgagttttgcctttcctaactcgctcttgagagcttggacttcttcgtcctcttccggtgcttcaaaattctctttgctgacgacttttaacttggcgagccaatctaaacctcgtatgcga

SEQ ID NO: 111117 - DNA, 376 bp, Glycine max
tcaccaccaagatgagcctcggataagattcttgtttatgatgcttcaatggaggaaaagaaagagagaaggggggagcaccaaattgaaggaataaaagacggagagaaggggaactttgaagtgtgtctcataaaactttcattcatcaaagctacaacaagtgttgcacatgtctctatttatagactaggtagcttccttgagaagctttcttgagaaaacttccttgagaatctttgagaaaacttccttgaaaagctagagcttagctacacacacccctctcataactaagctcacctccttgagaagcttccttaagaagattcctaaagaagctagagcttatctacacacacctccctaatagcta

SEQ ID NO: 111118 - DNA, 381 bp, Glycine max
tcctcatcgaagagatactggtaatcatagtcattatagaaagcagaaggtgaagtgtggaggtgaagctgaagaagatgggaagtgacgttgtggcagaggactccataccagtggcaacagttggtattattatgattccaagaccaaagcctattggaaggatctatgagattattcttaaacttcaaaagtgtctcacgctcacttgggatgcacacactctctctgcatggtaagctcaacaaccaaagctggacaaagacaagaatataaatggaggaattcatgatcacacaagaatatatagaaaacaagtgtagttgttggttctgcatataaatcatcaaacttctattatttatactgctgccctgcctg

SEQ ID NO: 111119 - DNA, 282 bp, Glycine max
ggagagcaccaaccccagacatctcaagggggagaaaccggaaactagtgaacacccccacaatagctatggccgccaacaaacattcacacacactcaaggcttggagggtcgacaagagactgagagatgcaggaagggaaggagtacaatttagaccacccaaaagcagcaccctcagttcttgcatccgaacacagaaatcgtcaggtatcctcaaatagttacctcgacaatttagtaggagcatctccaacttgggacactccaacatctcaggaa

SEQ ID NO: 111120 - DNA, 374 bp, Glycine max
tatactaattggagcctaatagcactcattcactgtctgtcttccattaccgctccacgagaaaatcagaatttgcgttgctgtactctaaatcaagaaagccaagagtttgccagatgattggacactgatttgggttttaaagataactttaacccagttgcaaaacaagaaataaaattatttcctaactccactaatctaattactaacttacttattcaattcaattaatttaatactcatacattcattttaatacacattatataataatcccaatttgattcatctttttaaaagccctttttgaattactccaattgtattcatctttttaaatggccttttgaattactcagcattcctagagt

SEQ ID NO: 111121 - DNA, 380 bp, Glycine max
gtttgcttaagaaatattgcattcgataacgctcttgtatacgcatgtccatgcatatttgttatcttgtgacagggacgagatcgttttaagcaatggtcaaataccacaccaaatccaagacagagatgaatcgaggttagtggtaacgcgatatcaaaaaataccgcgcaatgtcatttcctgcttccaggtacttggggacgggcacgaatggacgctatgcccatgatcaacagatcgctgtcccgcatccagctccggacaatcgagaagcgctactgggaggcagcctagtatcctttaaattcctacctgttattattgttgtttcattaagatgatgatcggatgcctaacttacccaaggggtttcgaat

SEQ ID NO: 111122 - DNA, 402 bp, Glycine max
  unsure (1)..(402): unsure at all n locations
agcttcaaagaatgcgttgaatgaaaaattattgaatataatggtcacatttgcttggatgttgaaataaggtggaattccacctatttgatgttagatactactttgaagcatangaaggcatttgaggagtttgaatttcatgacagaaaatatgctaatgagttangaaaagggataggtctgccttcctatgaagattgngaatatgttgaggctattctaccattcttgagcattttctataaagtcactttgcgcatctcaagtatctcttatgttactagtaacatttacatgttagaggtggtaggtatttggcatggggttatggatttgcttaactctaacattaaagatagcgctacacataagatggctaaaaatatgatagaaaaatat

SEQ ID NO: 111123 - DNA, 339 bp, Glycine max
  unsure (1)..(339): unsure at all n locations
tacctctntgaacaaatacccctcagccaaatagaattcatcttgggccttttgcccacaactctcgtaaataggagaaaaatgttcgtctgaagcatacaattccctaatgttatcaaatcctaaaatttgagttcctagggagcaaaataatgtgtgcctcctagagagggtatcaactaccacatttgttttcccctttttgtatttgataactatggaaattgctctaggtactttacccattttgcatgcattttgtttaacttgttttgccctctaattaggggtggcaataggccacgccccgctttgaaaggcctgagcctatcctacgat

SEQ ID NO: 111124 - DNA, 398 bp, Glycine max
  unsure (1)..(398): unsure at all n locations
agctntataagcgcgggtctgggagacatttgtcaagtgttcgcaatatgcgaagatgatgttccgagtactttggatttggtacgaccatgccctcctgatttccggctgggaaattggcgagtggaagaacgccccggcatttacgcaacgagcataatgtaaacctttacggttttaaaagctctatagttgggcctaggctntagagtttttccttttgttaaggctttgtgtcttttggtttcgaatatataatacgaggatctttcttcatctgttcctggtctctacccattctcattcatttgcatgtttacttctttttctgaaacgacagatccgatgacgagtccnccgtaggtactaatacctgngacccgcctatcgacttcgag

SEQ ID NO: 111125 - DNA, 394 bp, Glycine max
atttagcgcacaattgaccctctgttattgctagcgataccgcttgaaatttcttgaacaataactgggacaaaaatgtcgcagtatgagtcaccagcaatgtacacttcatttgagagaaatttcggatgatcaattagccactacacggatttaaacatgactatcacaacttattccagttattctcaatttagatttgcaaaactcaaactgtagaaagtttatgttaacgaaaagattttgttctgttaaatttatcttaaaatttagtaaatttggtcttctgtgcacttttttttctagaggtgaaataattttagaagcatagaagtaagaaataagttgataaaatttgataaattttatgagatgtgaaattaagatttgaaga

SEQ ID NO: 111126 - DNA, 385 bp, Glycine max
tacgaaacacgaacaagtttcgtgatatatttctctcttgagaagactctttgtgggtctcttgtatagatactaagttctcaaaataccttgtaaatcttgagagaataaactaaagtgttgaatgatatatttatctgtaagacgatcacatattagtcatagtggaaactttcaatgaattttgttaatttttttagagtcaatagtggcttgataggataaagaatactaagttaaagtcaaacttgagatagagtttgtctttataagaggtagaagtgacaatgaagaatacttgtaacttttgataagttagtgaaaactttgtggattgtacagaactgcgcgtactctcgatgagagagtacaccttcccgtgcgt

SEQ ID NO: 111127 - DNA, 420 bp, Glycine max
ccttgatactacgctgagagtttatgtctattttataatataaaaaaatgtgtattctaaagcttggaattgtatgacgagataagaatggattatacttgtaataataaagaatatttaagaaagtggaaaaaaaatatattgagcacgtggttatataactgagataaagatgtttcaactttcaaggtaactaattaattgtgtcaaatttaagttttatgaacataattacatgctaaatactcggaattaaaactttttttattcaattcaatcaggtttgtctatttaaaggatatatacatgtgatcttaaaccaaacaatattaaaatgttaagtttacggtttgtgctttaaattttaaataataaattccctttgtttttcttttttggaagtgtcgaatttttataaat

SEQ ID NO: 111128 - DNA, 391 bp, Glycine max
  unsure (1)..(391): unsure at all n locations
ccaccaagtaaaaactatattttattagttaacttcttggnagaaacaacaaggcttaaccatcaagagcagaaaccaaacaacaattcaatgcttaactatctatgacanaagcttaaacaatgcttaatcaccatgaacaaaagcttacatcaacaaaatagaaaaatcacanaatctgtcttctatgaggacttttcacaaatactttgtgaaccaacaataatcaaggcttaaccacccatgacagaagctaaaatcatcaaaacatgcctaaaaggatccgaaaagcctttgtgggagcattgcatgtatcaccgtctagactattagccataggtgcaatggcagcaacaggagacctattaattactgtttcgtgttgaatata

SEQ ID NO: 111129 - DNA, 363 bp, Glycine max
  unsure (1)..(363): unsure at all n locations
acaatggtgtgcactngtgtgatggagagagatgttggctttgtcacagaagcagttataaaagggcttcctcttgagagaaagaaccttaagtttgaagagggaatgtccaaagtgacaccaaagtcactgtatgatgagattacacggttttgttgacgtgagtgtgtttgaggggaagagatagtgatatctggcacaaaagcttggtataacactgctgtggtgaaaaagagaagagggtatgaggctgagagtgaggagtttgaggttttgataaggtaggggtgaatgtactcaggctgtgtcccatttggaataacaaagttttggaagaaagagtttgtggggagtggagaagaa

SEQ ID NO: 111130 - DNA, 372 bp, Glycine max
gcttggttcgagggacttacccgttgaatattcgaaattatgatattcaatgagagcgcaagaacgttgaactttgcagggtctgacggtaaacgttacggatacgtttcagaagcgccttggcttatattttctttacgcgagacgatttttcaagcaaattccaaagagagagaagtgcctaaggggctggaatcccttcctttttcatttcctccccttttaatagaaaataggggaggtggttgcggccagctcgccatgcgagcatggtgcttctccagaagcaacgccttttggagaatctttgggaggccaattggcctggtgcttttgccccccattttactaatacaccccttgtgttgtttt

SEQ ID NO: 111131 - DNA, 405 bp, Glycine max
gagcaaattcaaacgacaataacttttgattcggatgtccgattatgtcctgtattatatcgagattctcgtaattgaaaacagaagctcggagccaattcaaacgacaataacatttgactcggatgtccgattgtgtcccgtagtatatcgagacgctcgttattgaaaacagaagctctgagaaaattcaaacgacaataacttttaactcgggtgtccgattgtgtctcgtagtatatcaagacgctcgtaattgaaaccggaagctctgagaaaaatcaaacgacaataactttttactcggaagtccgattgagtcccataatatatcgagacgctcgtaattgaaaacagaagctctgagaaaaatcaaacgacaataacttttgactcgggtgtccg

SEQ ID NO: 111132 - DNA, 393 bp, Glycine max
  unsure (1)..(393): unsure at all n locations
agcttctgcttattactgtatatcctcctttaagaatttagcatatctgggaatttgctttattgcatccagcagaggtatgtctacctctactnttctaaatgtttacaagatctccttctcttgctcttccatttttttgttggaaattgctcttggagggaatggaagaaggatatgctgcttttgtaaatcagaattaccagtggaaggttcacctgcatagaaattgttaggtaacttactctttaaatttttgtcatcatctttttctggagtagagtgaagttggccatgttcatttgcggatgaagaaaatgttactggttgaggtccttgacactgctttcctgacctcaatgtaatggcactcacacttttgggattctggac

SEQ ID NO: 111133 - DNA, 364 bp, Glycine max
ttatattttattcctcactcgctctactataaaggcccctatttatagttgaacctcctccaagaactcttcctctgacattgccaactccatcctgtgaagtaaaactttgtgccattgacatatacttatttgtcttaattaatggaaaaccataatacgtcttgtctatcaccaatggattcccatatagtgaaccacctctttctatgagtagcacagagaatttctctgaccgtggtacaatttatggacaaccacatgtgcctccccccattataatatagacataagacttgcttgctacttccttaacatttgaagtcatgtgccattgcctactattttctacatagtgaaaata

SEQ ID NO: 111134 - DNA, 402 bp, Glycine max
tgggacattctcgcaaatgcctatgctggttctgattagttgaaaagagtcaagatgcaaactttgaagcggcaattcaagctattacatatgaatgagaaggaaggtatagcccaatacctaaatcgcgtgcaaaatctgtcaaattagattatggcttatggtgaaaccttgaaggatcaagatcttgtagaaaaggttttaagaaccttaagttcaagatttgattatgtggttactgcaacagaagtatctaaggactttacataaatgaaattggataagcttcaatgctctcttgaagcacacgagcaaagaatcaaagagagggaaacagataggtcatctgaacatgctttacttgctcagagtggaaaaagattcaacaatggctcacgaaat

SEQ ID NO: 111135 - DNA, 317 bp, Glycine max
  unsure (1)..(317): unsure at all n locations
ctgcagctttaaattatactaaagaatttttgatccattggnagacaaggggctagatatcttaaaagggagggttgaattaacaatcactaactattttctaattaaatttatccttctttaagccatgtaatattccttattatgaatactatattcaatttaactaatttccttaagcaaataaaatacaataataaggagttagggagaaaaagcanactagtttatctaatcgcccaccctgtgccaatntctaagcaaaataatacataataagagtttaggagaaaatcaactcattatctatcgcaccc

SEQ ID NO: 111136 - DNA, 407 bp, Glycine max
gcttgacatcaacaatatggttgaaactggtccaacatgggcatcatcgttcttcgattcagttgctcagaggatgatgcagtacgcctcaccgacgaattgctattttgcatagattcaaaggcatctacatactcccagtaaaatggatcgcgctttgttgaccttgggttcctgctcatagctttctttggtgcccccttcgtgttaacctttgctggaggaggacacatcgaattctgatcagggtatgcaatttcccaaagtttagtcttcaaagtaaacttaccacaaacatcaagttcttcgaatcttttaaatattgtttccattacttccttgatgctcacctcgggctcagataacccttggtctgaaaaacttagtctcctccagaacatatggat

SEQ ID NO: 111137 - DNA, 317 bp, Glycine max
  unsure (1)..(317): unsure at all n locations
agcttatgtcaaataggtattatgttgactatagaaccagncgatgccagattggaaacatatcgtataataaatactttccatggtggcatagaatacaaaaacaaagatagccttattattccaataaccaacccaattatttatccacaagcagtgatgatcctacttcatatntaccaatcaaaccaaaatggtcaaaataaatcgcttacttcaagaactcaaatgtgaaattgaagctcaaagtacatccattgacgagacgcaactgacctaccattttcaaaatacaccttctgcaaacttgacaatga

SEQ ID NO: 111138 - DNA, 402 bp, Glycine max
cttgaaagcttcttgagaaacttccttgagtttctatatcttagctacacacactcctgtgataactatgctcacctccttgagaagcttccttgagaagattcctagagaagctagagcttagctacacacacctttctaatagctaagctcacctccttaagatgagaatctagagcttagctacacacacctctctaatagctaagctcacctccttgagatgagaagctagagcttagatacgcacctcctataatagctaagctcacccccatgccaaaatacatgaaaatataaaaaaagtccctactacaaagactactcaaaatgccttgaaatacaaggctaaaaccctatactactagaatggccaaaatacaaggctcaaaagaaggaaag

SEQ ID NO: 111139 - DNA, 343 bp, Glycine max
agcttgaaggcaaactggatgcattggtttatcttggtaacccagctggccttgaatcagaaatctgtacctgtcgcaagggtttgtggtttgtgctcctctactgaccaccatacaaacctttgcccttccatgcagcaacctggagcaatttagcagcctgaagcttatgctgcaaatatttacaatagacctcctctacctcagcagcataatctaccacagcagaacaattatgaccgttgcagcaacagatacaaccctggatggaggaatcaccctaacctcaaatagcccaccccctctcaaacaacaacatcctggtcctcctttcaaatggtgt

SEQ ID NO: 111140 - DNA, 412 bp, Glycine max
  unsure (1)..(412): unsure at all n locations
ctccgctttctgaaatntttgaatgaagagagagaagatttttgtctgttttaaaaaaaagattttcggttcctttttttttctcataaagcaatgccacatgtcctctttcaagtggagcaaaaagggcccacctttttctcttgatgtgacttcgtactcagccacaaggaggaaaaattgaaccttttgaatgctgaaatcctgcctcgatttgcgtgtcgcctctctggttccagtttctcgcgtttctctacacccgtcggggcccgttttcgaaagtaggcaatatatatatatcaaaacgctcagaatgagaccctgagcatggttcagaggttggttttgttaaattttaagttgcacgcaaaatgataatttttagactaattaatttaggattaatctataa

SEQ ID NO: 111141 - DNA, 240 bp, Glycine max
ctacacatattggtaatcgattactttacagcgctagacagagtgtgaatcgattacccgaatttttgtaatcatattaacaacgcgtccctactcctatatattcagatttcaaaatatgaaatctgaaacctctcattcctctcccgaaccctcattcccaattcgtatttctaccataacttactcatttcttatccaaatcactgtcgacatagcccaaaaattcatcttttttca

SEQ ID NO: 111142 - DNA, 369 bp, Glycine max
tgagatgaggaagtgtagaagggtgaaacttcctgcttttattcgttgaccacagagtggtacctggagatatgtcgcgggggtcaggagaccttggggacgtcaggtggggtgctattgcccaaaaccaagcttgaccaatcccgacccaacccgggcatagtcggtcagtgagaacctgtgatgtacctaaacaggcgagctcttggcagtcaacagataaaaggaacaaagaccacaaagcaaggaggcttgtggtggctggccagctgtgaaacttgattgatatgtgagatatggcctctggtaatcgattaccaagggtgggtaatcgattacaaggcttaaaaatgaacacaggaggctaag

SEQ ID NO: 111143 - DNA, 146 bp, Glycine max
agcttctatcttatatatatgcgtcatctttaagcgcccacagtcccacaacgagtagaacacttgactcgccctccgtctaatgaatgaggtaattggagtatttattgtcagcactaaatgcacgtacattctttatgcacaaa

SEQ ID NO: 111144 - DNA, 414 bp, Glycine max
  unsure (1)..(414): unsure at all n locations
gaatactcccgctctcatatgtgatttgaatttgactcttatgcttctgtttctatcaatataaatntacaatggcgattgtttgacatattttgttgattggaactcgataatcatttacttgttggtattagctactacttaagtgaggcagctgtagttattcaaccattacgaaatcttgttttcatgttttttacgaaacatagctcatacatataatgtgtttcctttaaagtacctgtttacatgcataactagtcatttttcctgttgataggaaaccaccagcaatcgtccatatgctgcttggactccggcttttacttagggaaagtaaatctttagatcagagatagccaaatattttatatagctatatctagtatttttttttttttttttatcaattta

SEQ ID NO: 111145 - DNA, 368 bp, Glycine max
agcttggattttcatcttgttacattctcctattaacacatgatcttgctcttatgccttcttcaaggcaacatccttctcctctattggctttaatgggttgatattacctagggactgcctcaattctagaaaacattttatatcctatggtaacatgggtgagatactctttcacccctaccaagattgatatggtagaatctaagctggtatgattgttttttagaacaatatcccaattctcaaacaaaataagacgatcaatctcctcactcaaagacatcaatatgaggggaccgccaaacatcctggtaggaaccaagctagaattgtataactccacttgttgtcaatattgaaaacct

SEQ ID NO: 111146 - DNA, 404 bp, Glycine max
tcaggctgctcaattgctccaggttgctgcatggaatgtcaaatgtctgtatgatggtcagcagaggagcacaaaccacaaacccttgcgacaggtacagatttctgattcaaggccagctgggttaccaagttaaccaatgcatccaatttgccttcaagcttcttagtttcagatgatgcagatgggtttgtagctacctcatgcactcctctaatgactatggcatcatttctggcgctaaactgctgggagttggaggccatcttctcaattaaatttctggcttcagcaggagtcatgtctccaagggctccaccactggcagcatctatcatacttctctccatattactgagtccttcataaaaatattggagaagaagctgttctgaaatctaatg

SEQ ID NO: 111147 - DNA, 222 bp, Glycine max
ccctaaccggcgaaagcggaaatggggttcgtgggaatgtgacaatataaagatgggaaattgcaggtagagagagaacgtgaatatagacagtcgaatggatctgatcggatcttaatacgcgctgtgtttttcttgagatgtcgcccttttcttttttcctctgggacttggtcttggcttgctccttttctcaccaaacgaaaaaattctatctttttg

SEQ ID NO: 111148 - DNA, 337 bp, Glycine max
cctcacacatatttttacttgagcgtcagagtcctttgttttgcacgtcctcatcctgtcaaaggcacttctctaagccgatgtgtgaagtttgagaccccactcagccatgttcaccctgacgtgccacaggtctagatcttggtaagaaaagtttcaaaatatgttttcatctattcttagatggcactttttataagtgatctatgatgcaccacattttataatcctcaaattcatttcaagcttatgttattaccataaaccctcaacacatgattatttcctaatcctgtgatttacctttatgttgtgtacaattatgtcaccgatgaac

SEQ ID NO: 111149 - DNA, 389 bp, Glycine max
  unsure (1)..(389): unsure at all n locations
atctaataaattggacatcaatattctgagttttttatttttacttcgtagnaacatgaatgtttcgggatgaaatgaatgccacgctcccctctcttttctttctgtgatgattgagtaggtacaaatcgactattttttaaggaatataacttcataaatcattgtgaaagtattatatatacttatttatataactgatggcttttattaaacaagctgacgtggtaggaactgtatttatgctcattgtgtggtatcttctcatatgtactttctcatgtttatttcatggcaaaggaaatgggactcattttcaatacatttttatgaaaaaattatctccaatatcttctattatttttcttgtgcacaacccatggttttat

SEQ ID NO: 111150 - DNA, 353 bp, Glycine max
  unsure (1)..(353): unsure at all n locations
atattctaatgtgtttattttntgagagcgtngagattaccgaggngtggatcgtgaggtccttgctccacatcgaaactattaatgtggtgcacccaacattagttaatgatcataagaggatccaaactataaaaacactataggagagtgttattagattattatccatttgtaaaacaagaccttataatattactgatatatcatagagatatcccttgcatataatagatggaagatactcacactacttgccatcaaagatatgatttatattaatatttctcatcctcatgaagacggcacttagatccatatatgatcactctttagatggaccgcatatgtat

SEQ ID NO: 111151 - DNA, 404 bp, Glycine max
tgttcagaataatactcaagatttccttgactgtgtactacaattaagaagtcaatatgcttactagatgaagagaaaaaatcaattttgtatgttgcagacttgaagatccacccaatgaacatgacatgaagaacaatttttctacaaacactcaaaatgaaatttcgtcaacaagatgagttcattctggacattgtatatggagttcaaaaatgcaattgagctattcttgatggatatagaaagcttgaataacgatcttcaactttcataaacaagttgtggtctggtacaacctgtatcatggacaaaattgagcctaaagttatagacgttgatttgcctagataacttgatatgaatgtagcaatttgaatacttttgagctacacaagttcatt

SEQ ID NO: 111152 - DNA, 399 bp, Glycine max
  unsure (1)..(399): unsure at all n locations
nntacaaattttattgaagacttttgagcctaatgtcttattttctgttcccttcttttgtgaattaatagatcatgtctgttgtgagctggtggtgaagtgattttactaatgtttcatatcattctcgaccattgtgtttaactcaccattagcagaggaatccagaaccaccagtgctgttccaatttatatgttctgtttcacacaattagtggtttcatttgcagttggtaggagttcatgcaaacgttcaagagcctcattagtgtggacactctgtagcaaaaattcttctgaaaatgacagggactcacaacattatcaaagggctttacctcaattgtttccatggaaaagaccaacatttgcttcaagcttgaataacagttccttatc

SEQ ID NO: 111153 - DNA, 391 bp, Glycine max
  unsure (1)..(391): unsure at all n locations
agctttacaacagaattttttaatgactttctatcctagaattaaaataacttaatgccattaacctanggaattaataaacaaaacttaatggctgagtgtaactgaaattctggtaaccaaaagtcacccccaacagccaacaagtcaaccaccatttggtcttccaaaaggctgatgcctatgttgccaattatgcccttattacaacttgaactaaacctaactaaagcccttttagttgattaacccaaaacatatttttggtcagccaactttacaaggattggaccattatttagacaaactaaacactctaaaattgagacaaagtggtgccatttagtccttcttcatttggaccatgattacactcacaaccttggacttt

SEQ ID NO: 111154 - DNA, 405 bp, Glycine max
tgactaggcgagttgattttagccttagtttcgctttatttattagtcaatttcaattaagaatgaaaaatcccaaagagaaaacgtccgattgattttttgctttattttactaaaaggtatttttattattattttattattttacctctttttttatttccaacttggttacggcacgaccgaacggtcggaattctttttaaccaaaattaacggatgatacaattcaaacgatcggtggaaatttattttatttttagattaagcgagaaatgacttaaataaatggcttaagcatgtcaaaagggggtataaaaagtaaatgaaaacgataataaaaatacatgaaacaaaatgtggaccaccacgggtacatagaatgaattgaaaagcttggtttga

SEQ ID NO: 111155 - DNA, 321 bp, Glycine max
  unsure (1)..(321): unsure at all n locations
agcttagcaaaatcatgcaactntctcattcctgtgctgnntccttntacagatggcatacttcttggagcctagtcttgattgtctagtggagtgcttgcctacctgcaaataagatagtaatccacccaagtgagttaagcatgtcatctaaatttgacagcatattgtgtgttacaaagttaatatcacattcaaatcccatccttccattctgtgttataaagttaataaagatccatctagataaattcttctacaagcacttataggagaagaaaataagaaaacaaaatgaattgtgctttttccatgaactaa

SEQ ID NO: 111156 - DNA, 402 bp, Glycine max
tgtcacttcaaacattgattggatgcataagtacaattgctctagtaagctattgttacaacctacgaccgctgaccaggttcttttattattattattattattattattattattattattattattattattattattattattaattgttttgcctctgttgaatagaatgaacaattaccctttaggaccttgattcaatgtagcatttggaaattggcctccttccttatgtgtatatcttggtctctctacttttgtttggaatttctattaattgttttgtgaacttagtataatttttgttgagcactgtactgcatttccactgtaaaaaatagaatcattatatatttctaaatcaggttatacatacatctgataaacaattgtttagaa

SEQ ID NO: 111157 - DNA, 394 bp, Glycine max
ttatcaacaagtgttggtgggtgcagaaactatattttttatgttttgacttgtgaatgtttggctacggtagcgtttttattgtgcctgcaaagagttcagaaatggggtgaagaagaatgccatgaatctgacttgggtatggtggaatcgcagtacgctccacacccatttatacaactgttaaatcttgcagatggtctctatgatttcggcatttggatttgcatattttaagttcttccttttttcatttcttttttttaaagttggcttcgattaagatagtccagactttctagcgagacctggtgttttgtactttgccggggtgtgtgtgacatggcatatggactaacgcgttgagacctgacattctaacttatggtctatt

SEQ ID NO: 111158 - DNA, 329 bp, Glycine max
  unsure (1)..(329): unsure at all n locations
attttggggagacatgaattgatttgggatatacttgtgacacttttgtgatgagatatttgtgaggaacattgaataatcgaacaaaatacctgtatttttctttcaagtaatagtcggctatatgttattcatctgagtgataagttcttacctgaccctggttccttgccttgtagttaacaactcctgaacacctttggaacaagtgatatgactaatggttgagatcatcacgtgttaattaattagactatcatacaatttgtcgtattgaaggtcctgccttttttagctagccnttttattagcaatgaagtgtttattga

SEQ ID NO: 111159 - DNA, 398 bp, Glycine max
ttcaacaacgcatgttatattatgaatagagtcttattttacccattcttaagaaaaccccatatgaactattttacaatagaaaaccaaacattgctcatttacatgtttttggatgtaaatgttttttcctaaacaatggttaagaaagccttggtgaatttgatgctaaggcggatgagggtatcttccttggttattccctacataacaaagcctttaggatatacaacaaaagagccatgacaattgaggaattaatacatgtttcttttgatgaaactaatattacctctccgagaaaggagtttcttgatgatattgcagattctttggaatatatgcacaatccagaaaggaatataaaaaggaatacaaatgaataaaacaatgatgtt

SEQ ID NO: 111160 - DNA, 350 bp, Glycine max
agcttgccttacattgtcaacgaaggatgttgagggcgaatgccataatcacagaggaagggtggttacttgcggagtcactaaagaaggggacaatttctggaaaacgaatggggacgtgagccattttaatttgataaatatttgggaaaactgtattagggttatttaggaaaatcatttataaaatgggaaacctaggggtgttgtttaattaagggaggcttatttttccatcataaaagaataatgattttattacacaatacacattccactattaaagaggtacaattattgtactttaaatttatagattatttacagatattaaattctttcaaaattta

SEQ ID NO: 111161 - DNA, 403 bp, Glycine max
tctagagagttctacactactctagagttttccaggacgttctagaacctccccaattaaggaaggatcccgacaactctgacacaagaacacagacgttaagtccctagtagccaaactctcgactaacaagttatctctaatcactgattagttgaatattttgctatatctttatcttatggcatgtgcctaattacctataaggtaaacattatctataagtcacagttatctacaagctgataattatttgcaaggattgttataccgatataacagtctctacaaacaaggacccgcaactcacactcacctatataagtatcaggttttatctcactctttccatattcactcatattctcctaactcagatactagcgtctgagtcatttgtttt

SEQ ID NO: 111162 - DNA, 384 bp, Glycine max
agcttggttaaagctactagggtgaatgtttcactactttcttagctaaggaatcttggaagcctcttgaaaatgcaaagactaagttagaagcagttgagattgggatgaggctttgaaggccaagatgaccatgactgaggactctaccaaacctctccaagaagaggttgaatgccttaataaggagtctactctctttaagccaaatgcgacgaaggttgaagagaaattaaagagtgatctcgacgagattgaggccgagatccttaagactcatgaagttgagtaactttgtttctttggcatgtgtctagccaaataacttagttatatttagtctatacttagtcaagtaacttagcttctttggtctttctttag

SEQ ID NO: 111163 - DNA, 410 bp, Glycine max
  unsure (1)..(410): unsure at all n locations
accgcttgtgcctctctctctctctcgctcgctcactngagccttacttaagcatataattgctttattctcctagctcatattcttacttgagggtcagagtcctctattttgcaagtccctcctcttatcaaaggtacctctctaagctgacatgtgaagtccgagaccccatttcagccacatccaccttgacgtgtcacggttctagattttgataagaacatcatttgtgccaatatttaatgggcttaacttctttaactagaatgagcaagtccaatttcaccttggtgtatggatcttgatcttgctatattgtaagaaaagcctgcagctattattgattctagtagcaatgatgagaaagcccattataaagcttgggaaagatctaacagactcaacct

SEQ ID NO: 111164 - DNA, 361 bp, Glycine max
catgcaagcttctcgccaaatggacttaccttgatctaattcctttgatagcccttttgagccttgtttccctttccttgttttgaagctcactactagccttaagtgaaaaaccatgatatcaccatatccttaaggaatttcggaactttggaattgttttgggaaataatgtgggggtttttgtttcattggataacatgtttagatggccatgcttcatgatatattttgagccatacttgatatacattgcatattgagtaaatgttggacatgctgaatatgaagatgtttctcaaaaggctgccaagcaaaaaatttatatatatatatatatatacaatgtataaattatata

SEQ ID NO: 111165 - DNA, 407 bp, Glycine max
  unsure (1)..(407): unsure at all n locations
tccatgattagcaaatggattaatccttacatntggactatcctcttgaaatgtaagccatccaacatcaatcaaactttgtaccttgtgcttaaaagctacacattgctcgacggagtgccccgggacaacaccttgataggtgcatgtggcgttaggattgtaccatcggggaaatagaggttgatagaactttcccaggctcaccacagccatttggttgctaagaaaggatggtagctggtcggcgtacgacattgggattggggtgaactccacgggttttctctctgggaagttgctccttgggttggtgtttgtattggggttaggatttacacttggtttgggttgtgtagggaatggattttgtgggtgatgttggggaggtctttgtggttgattgg

SEQ ID NO: 111166 - DNA, 397 bp, Glycine max
agcttctcttcttgaaaatgagctaaccctgcctcctgatccaacatcaggggttgcaaggcttggacctctcaccatatctccggactcaaactggagatgaaaaaactcaagaggaaaggtgatggaagaccaattctacgattggtcaaatcttggaatttaaagaggtaagcgttgatagtactcttctgggtcaattggaacagggcactcgtagggtcctcgtactgcgaaggtgtgaaacgagtttgaaacgcttgaagaaagaccggacaagaagtgaattgaccattactggtcatccactgaaaccaggccagcacctacccacccatgtaaaaggaggcaatggtaaaaaaaagatatgttttgcaaagaaatttgtaaacatttt

SEQ ID NO: 111167 - DNA, 403 bp, Glycine max
  unsure (1)..(403): unsure at all n locations
tcacgggtttccccagagtcttgttctgatgtgaccctatttcatttgtcaattttggtgcaagctatttcatttatgtggcaccaaattgtgaatgagtactacatatcacccagaattcaatggctagactgaggttttcaaccgtgtgttggaacaatacttgcatgcttttgtccctagatgaatggtcatataatactgcagttcacgcaggtacatggctcacaccatttgaggttacttatggtaaacctcctgngaaaagtgggatgatctcaatgctatctcattggtaacaataagtaatgggggagtgcatttaaatagtcctagatgatattaatctatggataatatttaataaagtgtcaatatcatgttattctaaacataaataaaa

SEQ ID NO: 111168 - DNA, 237 bp, Glycine max
gaagaattcctgtaccaattaacttccgatgttcaagaggctactccccatctctctaagatttatgggatagatatctgaggagcgactcgatctacttagacaacagatctgtccccactaggataagtaactgatgcgacacattgattctctccgtacattcacaatacaatggcttaattattcatgccttgtactaagagagcttagacatgcaacttgtgtcgtattcag

SEQ ID NO: 111169 - DNA, 385 bp, Glycine max
gtgccaattcgtcttcttcttttgtccagtcttcttctggcttcaattcattagggggctttccttctgtgtccagcatcttgggatgttcccagcctttgatgacagctttccaggttctgctatccagtgatttgaggaaggccaccatccttgctttccagtattcatagttggttccatccagaattggtggtctgttcactggtcctccttctttctccatgttcatcagaatttatctccctagatctcactcactgatttcgagtgcccgctctgataccaattgaaattctgataccaatgccagatgtcgtacaggatgtcacgacatcacgcttcagaacatgcagattatatttgagagtatgaacacattaaa

SEQ ID NO: 111170 - DNA, 342 bp, Glycine max
agcttctagttaaattatgtttccgaattgtacatccgagttaaatgttgtgaccatttgactttctcgagaggttccgttgttcaattttgagcatcttgatatattatgtgaatgaatcggatatccaaagttaaagttatgaccatttgaattatttcgagaggttccattgttcaatttttgagcgtcccgatatattatgcgcctgattcggacattcgagtgaaaagtatgaccatttgaatttctcgagagcttctgtgattcaatttccatcgtctcgatatattatgcgcctgattcggacatcctagtgaaaaagtattaccactttgaatt

SEQ ID NO: 111171 - DNA, 422 bp, Glycine max
  unsure (1)..(422): unsure at all n locations
acactaanaatactcagctagaaattgggtgacaaaagctctcgagagattcatattgtcataacttttcactccgatgtgcgaatctggtgaataatatcgcgcgacgctccatattgaacaactaaagcgctccagaaattcaaatggtcatgacatttcactctgtgtccgattcatgcgcataatatatcaagacactcgaaattgagcaacagaagctctcgagaaattcatatatgtcctgactttttactctgatgtccaatttacgcgcataatatatcgggacgctcgacattgaacaacggaagctctcaacaaatttaaatggtcataacctttcacactgatgtcagattcccggagataatatatcgacacgctcgaaattgaacaaccgaagctctcgagaaattcaa

SEQ ID NO: 111172 - DNA, 366 bp, Glycine max
  unsure (1)..(366): unsure at all n locations
agctttaccaactgcagtatgcaaagactttctctcatagtaagaaccacatttcaaacagtatctaggttgaatatgaatagatntatcattttgtgtgaagacacgatgacatacttcataaatgtcatcattcttgtcaacctgaaagagcgaacgattgaacaattgaatagttgaacaatggtagcatactcatttttgagaaanataagcccatctttacaatcccataacccaacctgaaaaatagaactgtgtatngaaaaattaaacaatgacatttatacagcagacttgacctttgaaagcctgtgtaaatatacttttctttcttggttacgctnttcttttggatgtagaggg

SEQ ID NO: 111173 - DNA, 401 bp, Glycine max
  unsure (1)..(401): unsure at all n locations
ngcttctacaaagcatcttaattcggttagcatgaatcataacgttagcaaatgaaggtccncagacgaaattatggtatgaaaggtgcccctctttacttatcttttattggaaataaaagggaagtaaagacaaagacactaatttcattcgagcgatctcaccatccgaccggccactataggaggcccaagcagtgaaactgaggaagcatgaagacattgaagttcttccttttcgttttctcctttttttatattttcattttctattatttttattttttctttttaaaagcatagacacagaggacgtcgagtcctatgaagcacaaggacaaaagacattgaagtctttgtgatgaagacattgtcgtctttgaaagcgtaaacaaaggaat

SEQ ID NO: 111174 - DNA, 390 bp, Glycine max
  unsure (1)..(390): unsure at all n locations
agctgtacccttttgttatttatagntttatttgtcctttatatataaaagattcattaatgtattttactactttgttagatatagaattatattgaattaaaagtgaaattaaagagttaaaatgtgtatattactgaataaagttaaaagagaattcagagaataatgaagaaagaagagcgagagaagacataccatgttacatgtgtacatcgatcatagaccacaaaataccaattatatgaatttaaatttaaattttttttaggtacgttgggtgaaaaatataaatcttagataataatctaaaaacgacatatattttagatatgaaaagattaattaagcctaatattagcatagatgatattttgggcacgttgcaat

SEQ ID NO: 111175 - DNA, 405 bp, Glycine max
tggtcatgactcggtcaaccattagaaaccagtctgtatttggagatgagtcggacttggagatgggtcagacatgtctctggcgtaaatgcttaagcgtgagtcggcctccaagggagagttggctaggacgatgtacaaccctccaaggatgaagctgtgtggcgtaaatgcttatggatgagttggttttctgaggagagtcggccaagatgatgtataaccctccatgcattaagccttgtggtgtaaatgcttatgagtgagtcggttctttgggaagagtcggtcaggatggtgtacaagcctccaagcccttctggcgtaaatgcttatgggtgagtcggttctctagggagagttggctaggatggtgtacaaccctccaagcaataatccttgtgg

SEQ ID NO: 111176 - DNA, 378 bp, Glycine max
  unsure (1)..(378): unsure at all n locations
agcttctcccccaattatgtattaataggtggagatgtgaagtgaaaaagggttcacccccttatgcacttctctctctctcgaatgtgcttggaaaaattgtttccgtgaagaaaatccaagccgaggcacttccgaaacatttccgtgaggaatatcgcgaaggtttcaacctgtcttcgacagtctaccttcgttcttcatcgntcctcgatcttcaactggtaagtacctcgaaccaagcttttcgattcattctatgtacccggggaggtccacattgcgtttcgtgtatttttattctcgattcatgtgcttgctataccccctattgacgtgcgttagccattttttttagtctttctcgctaacctaaaa

SEQ ID NO: 111177 - DNA, 404 bp, Glycine max
taacctttcttttgaatcctatgattgtgtaaatgcttgtatatgacttgtggattgtatggaagttgtgctttattattattatttttgttttcaaagttaatgttttggtgtgcttggggatgattgggaaccaaaagttgcattagaaggaattgtttatactaaactcgaaaaactacaaaattgcaatgggcaacttaagcacgagtaaaagtaagcttaagcacgacgagcttaagtgcgatttcactcatgcctaagcaccaaaaccaaagaagaagaaattgaactctagatttcgcacttaaacaagaatagcggcacttaagcgtcagacctactataacttgaataaaatggttttcaaatgaatttaaattagaattcttcctattgcataa

SEQ ID NO: 111178 - DNA, 291 bp, Glycine max
  unsure (1)..(291): unsure at all n locations
agctgaggaatttagtgaaccgtatatgttgtatcactgtcagactacacacgtgagcccgcttagaggtaagagatgaggttataacaattgtggttagagagaacatgtgtaagggatccttataggatcaaatggggttaatcttggagtgtnttatgtgttttgatttagcctgtacaacaataactatgaatttctcatgttggatgggtcaatccatgccctgatgtgaattggatgatttagttgagtgtttaactttgaatgttagaaacctacaaatttggg

SEQ ID NO: 111179 - DNA, 404 bp, Glycine max
agcaacactggaaggtcaatattcttctctttgtgtgaatggtaagccaaattggggattatgtttcacataaattttgctgatttatatagctagaagaaagtacaattaattagcatttcatctactttactattcctctaagccagaaaagataactttattttaaactattaattgctttctcaaacacgggatcaaaagaaccagcaacttgggccaaaagtatgggaaatagttggagaacaacagaagacattgaagataagtggaataggtaagcatgcgagttatgatataaatttatttatcttcaatgccaataaaaagtgaatctaattttaggaatttcgttatcttgtttgcatcacattaatgctttattgaacacttgacaaagacat

SEQ ID NO: 111180 - DNA, 352 bp, Glycine max
  unsure (1)..(352): unsure at all n locations
agctttgttcttttataatatgagaagttctgaactcatcacgttatctaaaaaacctttgggtggatccaagtgctctgatcattcatttgcatattcatgtnttggtggcatactcaccgttgtttatttctttaggaatntcatcataactaagaaagcacaaaggcacccctataacactcgatctataaaaatggataatgaagagggcgtgcaagaacagatgaaggccgatctatcggccttaaaagatcaaatggcttccttctcggaggtcatgctaaaactccagaaaactatagaggataaagccacggcaaccgcctccaatacagctagggaagcggag

SEQ ID NO: 111181 - DNA, 399 bp, Glycine max
tgccacccagctcgcccaggcgagctaggttgcttctttcataagcaaccgccttctggaggaatattctggaaggcccaagtgggcatggttgctatttgcacccctatttttactaaatacacccccttgctcttttttggtgattctttttccgtaacgttacgaaactttacgaatttcataacgatgcttgttttctttccgtaatgttacgaaaccttacggattacgtaatcatccccttttttgccttccggaatgttacggaactttacggattgcgcactagcacttccttttaatttccggcatgtcatggaactttacgaaagctttaggcaatatacattcagcaaaactttttgcacatttttatataaaggagcttgcggcgtc

SEQ ID NO: 111182 - DNA, 270 bp, Glycine max
ccggatcttaagcacctgggctgcagcttgatggtcgactcaagttttaggatcaaagtgtgcacgctaatttggaaagaatccataccttgttcgatctgagactctagcattcgaacccctttacatagcgaagataggtccttaaatacaagacgatggggtgtattctaaaaaaaaaaaagtttatggtctccttgagcatgccaattgattcttaatttttttcgcccgaagcattcctaaaaatgcaagctatttgcagcttct

SEQ ID NO: 111183 - DNA, 403 bp, Glycine max
tgcatgatttacattctccccctttctcaagaaaattcttaattcttcttgacatcatcaaaatcttcatgatttacaaattgaacacgaagcgtgcacagattaatattaacgaatgtgggttaattggtgaagggaaaactgccaggaagctacattataaacagaacctcgaagagagttgagcttcatcctcagaaggaaacaacaccagaaaacttagccttccatagattcaataaaagtagaaacgtaaatgaaagcagaagaaggaacaagaaacgaaattccaataagaagtagagaaactgaaattgcattcaagtaaacagtaaactaaaacgtaaaaaccctaaactgtgctctaaataatgaatagcctaacagaatgccttgcacgaat

SEQ ID NO: 111184 - DNA, 404 bp, Glycine max
gcatgatgagaatctgtccttcaaaccaagctttctatttgtcatctgaagtctgagagctctgggcagataagtctgctaaagctggaagtggggctgaagtagaagatgcagggatgccatctattggtgcaaaggaagagggaacattagttgctctgagcttggtcttccttgcctctggaaaattaactgtttggtcattcgtattccaacagttccttatgatataagctaagtcaatgaccggccttaggttttcataggaggtaagagcatcagatccaactcccctctgtcgcaacctacccttcggcgggagggcgacgcgagactcgcgggatgcgtgttccacgaaaggaatacgcgcggagtcgccaccaacgtttatttgaggaaaatgt

SEQ ID NO: 111185 - DNA, 345 bp, Glycine max
tgctttggggtcgatgatgatccattctatcttacctcatgtggcctcaaggaaacccacatttctggtacttaattcttcctattacatactactttgtatatttggctacgcacatgcactagcttgtattgttaattaggtatggatatattaggcaggccatggtattgttgttgatagtgacttgaaatcctgggtttcaattacaaaatatatatatcagagccaccaaactcatcatatatacctgcggatatgtcatatttattgggggcttgaattattatcaccatccaattaagaattagttgttacaattttctttcagtcttggtatgagga

SEQ ID NO: 111186 - DNA, 396 bp, Glycine max
  unsure (1)..(396): unsure at all n locations
aagactcatgtntctggaaatgggcacatttttgtttagtcaggccttttaccttgccaaccctcacaatcaaaaatcaaaatagaacatccatgtaagaagtaaaatgctgccaataattaaccagacacacaaacctatcaagatgatgatcagctttcaaagtgataatgaaatgggaaccgagtgtgtcacggtctgcaattgccattgataaaaggccagtagcatcatgctttagcctaggtgactcatctaaaacaaatcacagatacataatacattaattataaaatacaacactacagtactataaacaactcataatgcaaaatatgatcttgagagtgtgacttggcattctaacctgggaactttgaaccatatatgctttct

SEQ ID NO: 111187 - DNA, 390 bp, Glycine max
  unsure (1)..(390): unsure at all n locations
agcttcactcagaggcttgctncagaagcttgattaagatgcttgtttctcaggccacacatcttgtaaaagatcccaacggtcatatcatggacaattgttttgtggagttgcagaccaaatctcgagaagatccaacggttaacgaacgctgggcatcgtatttacagaagcagcgttatgtagctttctctagaagcttctttaagaggcttcctccagaaacttagtcgtggattttttgagaaagtttcttcagaggcttctttgagaagttagatccttatgtattcacacccctctttaactaaattaactttcttaagaaccatttccgatgataattacgcgacaaatgatcccacttcggacattaatactaataatttg

SEQ ID NO: 111188 - DNA, 428 bp, Glycine max
gcattccgcgacctatgaatctacgctttccctatttgctataatgggggagaagtgaaattatttggttcagccccttaggcacttctctctctttcgaatttgcttaggaaaattgtttccgtaaagaaaatccaagctgaggctcttccgtaacgtttccgtgagaaattacgcgaagatcctcaaccgttcttcaagattcatcgatcgttcttcgttttcttcagtcttcaacgggtaagtacctcaaactaagcttttcaattcattatatgtacccgtggtggtccatattttgtttcatgtattttcattctcgttttcatttactttttatacccccttttgacgtgcttaagccatttatttaagtcatttctcgcctaatctaaaaataaaataaatttccaccgatcgtttgaatt

SEQ ID NO: 111189 - DNA, 419 bp, Glycine max
gatactccgagtcacctgcggcatgcaagcttagtgataatggagggttcaagtttctcaaaagtatttagtataatagctgaagcttgggtcatggctaaggtttcttcgacaattaagtccctcatcccgccgggatagggaaagtcacagtttctcaataaattctctaatcctggaatgtttccggatgcacttttcaaattttttgcatctcaagtcaattgtgaaattgtcaaaacttgataagagtattgttctagcaaatctaattgtcattaattagaacgtaataactcagactaaataataatcatatactgtatatacatcgactaagatttaaaattgtgtcactaaaagagtttcacgacctttctaaaacctcacaacacctgtgtcttttaatttttatcact

SEQ ID NO: 111190 - DNA, 407 bp, Glycine max
  unsure (1)..(407): unsure at all n locations
ggcataactcttanagaaaaagagtccaagttttgtcttgatattgagacaaatgccagtgaaaaagctacctttcttaaaaacttttaagagttggaaaataaactgaaaaatcttcaaaaggatctgaagaagcttaatgaacttcataatcataaaaaagaagaaacatatgatctttggagagagtgtgccaaacacacaaagattatgatgaccttaaaatgagtaaacataatctttgggtggaatgtgaagaacacaagaaatctatgagtttcttgaataatgagcttctgaagtatcaagaacttaaaggtcaacctcaagatgttgtcaaacttcatgaggaaataagaaccttaaagtctacattatccaaatttttcaatggaagaaaaaatctt

SEQ ID NO: 111191 - DNA, 319 bp, Glycine max
gcttatccctcgttcagaatatattattttacaacactatctcaaccaacaatatgttaatttcaaatggactctttaatgtccaaagacctaacaataagaacccagatcccaaacatcaccattcttttcagttccttaacaggaagccagattcctatagaggctacaatattgctagtcaactgcagcatgctagggtctcactctcgcacaatctggaagaatcctgttcaacatagagaattatattttcactcacatgggcaagtgttgtcataaccgcctaaacatatctagagaatattatttggtgggg

SEQ ID NO: 111192 - DNA, 409 bp, Glycine max
tgttcaacagaaggggtccttctcttcagtttgcatatgatcatggttcatcttctgaccatcttaggatcatatctgaatcctttgttggaccggtggttcaacccggttcagcaccctttggcctccaaaccgagttggctaagatgactgctcaagaaatcatggaggctaaggcccttgcagcttccaagagtcacagtgaagctgaaaggagacgcagggagagaatcaataaccatcttgctaagctgcgcagcttgttgcctagcacaaccaaagtaagtctaattaattaattaatttaactaaaattaaataataaattcttcccataaattaaccacgtattcaaattataaaatatgtatattttactattatgaatcatgaattggctactactagt

SEQ ID NO: 111193 - DNA, 424 bp, Glycine max
  unsure (1)..(424): unsure at all n locations
gacactatanaanaacccagctatgaggatgatacgatgcatatgtagccagaatcattgtgtttgagctacattcaaagaaaaatgaatgtcttgagaagacagctatagcaactcttcacatttcagcttgagtatatcaactggaaatgatgctggaactgagggtcctaggagtgagtatgcaactccctctgccacatctagaacttcttttgattttaaccggacaatgagtttgaaggaagaaagtgggagaaattcagatagccataccccaggaagctccaagaatttcagtgcaaggagaagaagatcagtagatttcaaaaactgccttgattctttctcagaatcttctggcacggagaaatctaatttggtgaaatatgctgaagctataaaagattccagtggaaccctc

SEQ ID NO: 111194 - DNA, 364 bp, Glycine max
agcattggttttggcaatatcaccccattttacgttttctatgtctcctgacccctgtgacatatctccaggtaccactctgtggtcaacgaataatagcaggaagtttcacccttttacactttcctatctcaagcttgtatgattatggggtacccatcacatgtggtactaggtggcggtcgggcgatagtgcacaacaagttttcacatccacaatgcgcgcataaacctcccattccctgttgcccacctcctactgagctcacttactttcacgtagcccattattttattgttatctacaccgggtccccatcaatcctcccaactttcacaacatgcaatataaaaacatttaaca

SEQ ID NO: 111195 - DNA, 412 bp, Glycine max
  unsure (1)..(412): unsure at all n locations
tactccagcttagggcttgtntccacattcagatcaaaccagtgttttatgtttgttctcttaccaagtccgtgcagaaaaaaaaaaacatctaagtccatttggtatttaggaaagttcttcattattttaatcctcaatatattttttcaaaaaactttttgtcgcgttttgatctacaaaatatttaaagggtactggctgttgattcttttaaaagcatgttgggttcaagaaatgaaatggtttgagtcccacaaagagttataatctatgactaccatcagaacatcaaagcgcgcaaattaataaaaaataaccttgtgtaagtttttttttaaaagaaatcaccaaaataaataacgttacaaattactaaaagcaataaataagataaagacaagttcataaa

SEQ ID NO: 111196 - DNA, 380 bp, Glycine max
  unsure (1)..(380): unsure at all n locations
agcttgtcaattgctaattttttccttgtatctttntcatatnttactaaaaatatctttcgttaagtaatttattcaaactagcagactattttcagtcttttatctatctaaatttctctaggcaacaaccataacaaataaacaatcaattgtagcacttaaatgaagtgaattaaggtgcacagtgcaccccatatgcgactcctcaacgtacataaactaaacaaacactacacgttttataaggaactgtaaaacatagtccctatcgagaacatttaataagaaaaggacaaaagggtgcatgaccatgaattatcaagataacacagtgtataaagtaaaacgcaaaccgatgaatattgcaaaataagaag

SEQ ID NO: 111197 - DNA, 405 bp, Glycine max
tagaacaataaacttggccttctcttaattgtcttttttcttggcgaccacgatcaacaaagtactttcgacacctactatatgttgacttgaccaacgctgttattggaatgctgcgacaatctttcaacaccttattcacacattctgataggttggttgtcatgtgaccatatcgtcgtccagatgtatcgtaagccatgctccatttttcctttgaaatgcgatcaatccatcttgctatggctggactcaattgacgaaatttttctaagttttgatcaaacacatgcttgcaaggagtgtacgctgcatcaaatttgttatcatcaaaagttgtacgtagaaatgaaactcaaattaaattaatgtataaaataaaccttacccaatttcttgaacatc

SEQ ID NO: 111198 - DNA, 374 bp, Glycine max
agctttcaatttataatgggaaaaaattaatatatttttcttctactatatggattggtgggtgatgaataacatttctaatataaatatttttatatgattataatatgataataaatttgtgacagtttatgattggatgataattttaattgtcttacatgaaatgcattctaattaaatttaaaattaatttatattgaaattaagagtatcatttcaatataattaatataaattttaaataaaaaatacggcttatgtaaaaaatattttgctgtcaacaaaaaccaattgctacgtccccggatgattacttgattatttctatttattaacatttaaataaatttcttttttaaaaataaaaatta

SEQ ID NO: 111199 - DNA, 410 bp, Glycine max
ttgagccaaaatcctaactcaccataaaccttgccctctattgataacaaaaaaaggaggagaaaaagaaaagaagagaaaaggagaaaaggagaattcccgatcaaaagaatcggaagaaagcaaaaaaggaaagaaaattcccaatcaaagatcgggagaaaacagaagaaatatacagaaaggtctttggaccaaacgacatctgaacaaatacagagttatcaccaaagtaaatatagaaagaaaggaaaccacgacctaaagtggtcccctccctttgattgccaaccaaaatcccgtgcgtcggtgacttgttcgcctcgcgctaaacaaaaacagaaaagaaaaaggccaaaaacactcaaagccaaattttccaccaagaaaaaccccattcccaagaaaaa

SEQ ID NO: 111200 - DNA, 381 bp, Glycine max
  unsure (1)..(381): unsure at all n locations
agcttgctganttttaaaaaactgaagtatgaattcagaagaggtaaaaatactaactacaaaattagaaaacaagctaagagtaatgagaccactaatatgaaaactaaacatcaaagcatggcagggatatatgcttaattttgaaaagagataaagtactttgttctaaaaaagataatcatggagtgaaaaatgtgaacctcacgtagtagccaaaaagatgatgcttggtttatgtcttgtgcaagaacaccatcagatatcatttcattctccatagagccaagtaaaaatgcttcaggcttntgcctggaggtatcataacaaaatgtgacatcatatgtgaaaggacttaattacatgctcagaagtgataac

SEQ ID NO: 111201 - DNA, 406 bp, Glycine max
catagtcattacttgttgagaaccataagccaaagttttatgttcctttgatatagcaaataatttgttttgtggccttgagatgagtagtggttggagtctccatgtattgactgatgagtcgagtaccatatagaatgtctggtcttgtggacgtcaaatatcacaaactacccaccaaactcttgaaatttgtagcacccatcttttttgcttcgtcaaactttgataacttcattttgcactccaccggtattccaattggcttgcatagttttgctatgaaatgaagattcaatcttccttttgctttacctcaataccaagatagtatgacattagtccaatatcggtcatcttgaactccttgaccattgctttcttgaacttttcaaacatacttgga

SEQ ID NO: 111202 - DNA, 382 bp, Glycine max
  unsure (1)..(382): unsure at all n locations
agactgagggaagggagntgtgttcttttttttcttcttcacagctggtcctttgtgttcttgagcccttgaatcaccaagtataggtaaatgagcttcattcttcattctagacttgattcctcttcattctcttgttctagtttctctaataactcggagatatcatttgttttactcatgaagggaaattaactttgaaaaacctaaatattcttcattctccttcaagaatttgttgttggacttccttgaacatgttgctttgaaatttttgagcttggtgtcatgtcttgaatatgtgtgctgagctattttctttgagtttttttattgcaaatgagttctttacatgttaaaacatagaggttagcctaaattt

SEQ ID NO: 111203 - DNA, 390 bp, Glycine max
gctaaagaccctcgtggaggtacagcagcaagaagattttgttatatcattctagaagctaggggtggtgatgtaagcatactataggctgttaggattgttagttagctgttacgtaactaactacatgtataaaagccatgcacgaacccgtgaaagggattatggaaataatattctcattctgcgcttagattttccttccttctctctctcttcccctttctctcttagaatattcagtcacgaggaaagctacctctaacagataatctcaaatcatataataacgtttccaaaattagatgttactacctctcttttttatcgacaaatgttagttagatagttttgttagaaatgtcaattggagaagttcaattctgcaac

SEQ ID NO: 111204 - DNA, 404 bp, Glycine max
  unsure (1)..(404): unsure at all n locations
agcttgattatgcacgagattnttcgcttctgggcggagggtgatcaagtttgatggcgtggaaaaatgtcgtggctgtcccattntatcgctttcaagacactgaagntttgttgacgcttctgatgcaattttcttctctttactgaatgacaaggttccgcttggtcggggatattcgacccggccgaattgatgttattgcttcaaaacaaacattaggtgtgcttaatcttataccttcgctttttattctccaaataaaagattattaaagaggggcacttgtcttactctaatttcgtctgggggaccattgtttggtgggatgcaacccttctcttgaccacctctatgtacttaacacccatcgttaggtaattccgaaaagttctgcgacattc

SEQ ID NO: 111205 - DNA, 419 bp, Glycine max
  unsure (1)..(419): unsure at all n locations
tatagacaactcccgctctaaaagattggctaagattntgttaaaacataagctcttatacaatgaaggaaagctggagttgctgcacatgatgtccaacgttatgtcaaagaataagatcgggctgcacaatgcacaaggcaagataaagtgtcaaatgaagaattgaagctgtaggattcacgatgtcggatacaatgtccaggacatcctgcctgaaaatactggaattgctaaaagcattgaagctgcaggatccacgatgtcggatacaatgtccaggacatcctgcccgaaaatactggagttgctaaaagcattgaagttgcaggatccacgatgtcggatacgatgtccaggacatcttgcccgaaaatactggacatataaatctgttatatctttaacagattattgtg

SEQ ID NO: 111206 - DNA, 402 bp, Glycine max
  unsure (1)..(402): unsure at all n locations
agcttcccgtcaatggtattacaagtttcatcaagtcattacctcatattgttntgaggcaaatgcaattgataattgtgtataccacaagtttagtgggagtaaatacttattcttagtgttatatgtcaatgatatattgcttgctagcaacgatataaacttcttacaagagactaagaaatttctgacaaaaatttttgagatgaaagatcttggggaagcctctttcatattaggattcaagatattaagagatctctttcaaggtattttaaggttgtcacaagagagttatatcgataaggtcctagatagattccgcatgaaagatagtaaaccagaagatacccagatagctaaaggagacaaatttagtctcaaacaatgccccaataatga

SEQ ID NO: 111207 - DNA, 406 bp, Glycine max
  unsure (1)..(406): unsure at all n locations
ntacagcagatgccactctatgctaaatttcttaaagatatgctaactaagaagaacaagtacatccacaatgacaccatagttgtggaaggaaactgcagtgctgttattcaatgtatccttccactgaagcataaggatccaggcagtgtcactataccttgttctataggagaagtttcagtaggcaaggctcttattgatttaggagccagtattaatttgatgtcgctctctatgtgctggagacttggagagttggagataatgcctactcggatgaccttacagttagctgatcgctctgtcaccagaccctatggagtgattgaagacgtgctggtccgggtcaagcatctcatctttcctactgattttgttgtaatggacattgaggaagatgcgg

SEQ ID NO: 111208 - DNA, 396 bp, Glycine max
  unsure (1)..(396): unsure at all n locations
agctttgagtgctacgttttgtcgagaagtttttggagatatgtgatacaatttctcttgaatctccataagcttcatttaatcatggacatgagacttntttttaatccataagatattgtcatgtttatgaagcattgcccacacttggataaattattcatctgtgtgagtatattattaattaatccttaactaattaacaataactactcatttgattgtaaaatcctatcaatcaacaattagtaggtacggttatactcacaccgataaacagtttctccaagagtaggccactcttcataaacatgcaatatcatattgattgcaaaaaagtctcttggcctgatctagtgaaactcttgaagattcaaaaaggtgtagcatgttttt

SEQ ID NO: 111209 - DNA, 417 bp, Glycine max
tttaaactaagcctctcaggaagctacatgagctgcctcgttaaaaatgcttttctgccttcgttaaccgttggatcttctcgaaatttggtcttcagcttcaaaagacacttgtccatgatcttaccgttgggatcttcgagaagatatctggagtgtgcgtgaagcttccgttcctgagagcatttctcacttgagcgtttcagcttctgctatcgtgtagcttaggaaaaacgccatttcttctcctttatttcttccaaagccatttctaacgtcccaagcactttctccatcacccacaaccacctttagccaccacaaaccaccattgttctccgttgaaaccccacaccgagaggaacccttcaaccgaagcggaatctttcaacttggctcacagttgtgacaccctct

SEQ ID NO: 111210 - DNA, 292 bp, Glycine max
atttttgcctttgaccgggcgggaaaggattggacagtttatatctctggattcacagatttggatagaatctagacacatgaatcctgctactcgagtctgatgatgctgattttccatatattataggaaggcagcgagggaggattctctcgtatatccataatccttcaactccagcatatttaaagcacctaagtgtactcttactctcttaaactaaacttgaaacgcgatactgagaatcgcataatgcacgatgcaactatcttttgtatagacaaaccttgac

SEQ ID NO: 111211 - DNA, 405 bp, Glycine max
  unsure (1)..(405): unsure at all n locations
agcgctatncgcagactcaacagaagtcagngtttttgatttcagactatgtgcacgaatcttatacccagtggattattgataggaccaagagctctggcctaccctaccgnttacctagatacctatcgtccaccatcccaccatcatccttgcctatcccctttgacactaaggaggagtttcatgaacaattaaccaaagaaaggcaagaaaaagaaacttggaagaggagatgccaggagctagagcaagagaatgagactttgaaagggaagatagcccaacagggccgtgagctttttatccagaaccagaggatgattgagaaggacgacttgcttcgtcggaaagacgttttgctccaccaagatgctagaaggaagaggaagtttatggacttgt

SEQ ID NO: 111212 - DNA, 343 bp, Glycine max
cagcttcaaaggctcacacaaggaaacatttttgtatatgtattttacaaagagatggaggtttccttgattagagctaatcttagtgaagattgagaagctactatggtgtgttttgataactgctaattatgagtctattttgaggttaaattatagatgaatctgtaatttttctcttttaatttttcccttttgagcaaataattgttaaattaatattatttaagttttagtgtagagaatattaaaagtgatgtgattatgaaacttggtgagtaaaataaagctaaaaaatacaagaataattaaggaaagcaagctattgaggaaagaaggaaaa

SEQ ID NO: 111213 - DNA, 401 bp, Glycine max
  unsure (1)..(401): unsure at all n locations
caatccagaagaaagtgataaagaagactttatttatttgaatgaagatgatgatcttagcctttntgtaaaaaggttcaacaagttcctaaaattcagaggaaatcaaaggaaaccaaattttaaacctaaaagaaggacagaagattcatcctctactacaaaatgctttgaatgcaatcaacctggacatttgagggtcgattgcccaatcttcaagaaaagaatggagaaatctgaaaagaaaaatttcagtgaaaagaagatgaagaaggcctacatcacatgggatgaaaatgatatggaatcatctgaggattcaaaaatgaagagataaacctatgtctaatgactaaaagttatgaaagcgatgaagagttaacatctacaaataacaattt

SEQ ID NO: 111214 - DNA, 403 bp, Glycine max
cgacctgtggaatgcaagcttgatgtcattcaaaacacactatgtatacctaaatgtttactaaacatgcattgtttatgtaattgtattcattatgcgatataatttgttgtaacccgttactatccaattaatattatcaagtactcgtttggttaagcaaggaaattgttggtccaacaaatatcatttacgcgtgcagcatacatcattgtcataattgacaacacataatgacatgcatgcgtattacagtttgagcgcgacaacacattggctgacttcagtacacattctgaaactagcagtcgctcgacaacacattggctgacttgactacacattatcgacaacacattggctgacttgactacacatttacgcgtgtcttattttttgaaac

SEQ ID NO: 111215 - DNA, 409 bp, Glycine max
  unsure (1)..(409): unsure at all n locations
tccncaagatctttcatttcaattgttttgttagaaatctcttggtctgatgcaagaagcctatatcgctgctagcaagtagtatatcatcaacatataataccaagaatttgtatttactcccactaaacttatgatatacatagtcattaactacatttgcttcaaaatcctataagataatgacttgatggaacttgtaataccattgacgggaagcctgtttgagaccatagatgaatttcttcaatttgcaaaccacaaactttgagtcacctgacacagttttctagttgcaccatataaatcatttcttcaatgtcaccatttagaaacacaatcttgacatccatctaatgcagctctaagtcaaaataagctaccagtgccataatagttataagagaat

SEQ ID NO: 111216 - DNA, 379 bp, Glycine max
  unsure (1)..(379): unsure at all n locations
agcttgtaggattatggtgtacncatcatatgtggtactaggtggcggncgggcgatggtgcacaacaagttttccacatccacaaagcgcgcataaacccaccatcccctgttgcccacctccatttgagctcacgtacttccacgtagcccatattcttgattctttcaacaccgggtccccaataatccctccaagcttccacatatccaagcaaaacaacattcaaacagcacaagctatcacagccaagcaaaacagagcaaaggcagaaaactctgtccaaacaccaaccaaaatcacagcttttctcacttaaagacccagtaacaattcctttgatccattcgtaaccattggatcgactccaaattttac

SEQ ID NO: 111217 - DNA, 402 bp, Glycine max
cttccttctccgtagtagtgctttccaccatgcttgttttgtatttttctctattagtaagtccttgcaacgcccaaacatttgttaccatgtagtctggtgcacattagcttggaaaggacaccaccaaccttggacaacaacgagtggttgggctgtacggcctcaacaaaggcatcaatgacgttggcaacctcaacctctaataacgtgaccttgcttagagattcctggtgcctttgtccattttcctccaaaatcgccaaacttcttagtaggaataccttcacataatcaatttcattttgaaccctaaatgaccagataaggttcttatcaaaagaagatgcaaagccagtcagagttctctgctccggcctatatcccatgctctacgttgaa

SEQ ID NO: 111218 - DNA, 306 bp, Glycine max
  unsure (1)..(306): unsure at all n locations
atcctttagtcacctgagctgcagctttgcgtgacatgattgtatttatccgtgaacanncncccctaaaggttcctttttcatgagcccagagtcccatttaacctatgcaatttttttctgatcaaggccaccaccccatatgaacctcctctgattaacttcgatttggattcccaaattataaaaaggcctaggcatgattcacaaaaactggttctccatacaaaaggtgtctttttcatacagcttccattccaaacatttgaactgacatcccataactgaataacttttgttgtgaca

SEQ ID NO: 111219 - DNA, 380 bp, Glycine max
  unsure (1)..(380): unsure at all n locations
ttattntcagtagatgaagataatccgggccttctttatactcctctaaggacaatagcatcatttcttgcactgaattgttggcagttggaagtcatcttctcaatcaaattcctagcctcaacaagagtcatatcaccaagggctccaccactggcagcatcaatcatactcctttccatgttgctaagtccctcatagaaatattgtagaaggagttgctcacaaatatggtggtgaggacaacttgcacacaatttcttgaatctttcccagtactcatacaaactctttccactaagttgcctgatgcctgaaatgtcttttctgatggcagcggtcgtagatgcaaggaagaatttcttctataacaccctctt

SEQ ID NO: 111220 - DNA, 403 bp, Glycine max
  unsure (1)..(403): unsure at all n locations
gccatgtaggaatggcagcctcaacatgggttcctttctcattatcatcctcttcatatgccctagttttctcattcatcaaagcaggatgatcaaattttcctcttttcagacctgcttcgatccttttgccggcaaagaccaaatccgcaaagcttgaaaactatgaaaaaaattggaggtgccacttgagctgccaggtctctccacctttgggcgtattctttgaaagatttgtgcccctttttgcacatgttttgtagatgcatcctatccggagccctatgaaaattgtactgatactgccaaacgaaggcaaccattaggtccttccaagaatggactccggaaggttccaagttagtgtaccangtaacagctacccaaaaagactttcttggaa

SEQ ID NO: 111221 - DNA, 388 bp, Glycine max
agcttaaacattcaacttcgagcgtctttatatattatgagtctcaatcaaacatccgagaaaaaagttattgtcgtttgaatttgctcataggttcaacattcaatttcgagcgtctcgttatattacaggactcaatcagacattcgagtaaaaagttattgtccgttgaattggcttaaagcttccacattcaatttcaagcgtctcgatatatgacaggactcaatcagacatccgagtaaaaagttattgtcgtttgaatttcctcagaacttcaacattcaatttcgagcgtgtcgatatattacgggccgtcatcagacatccgaataaaaagttattgtcgttggaattgggtcagagctttcacattcaatttcgagcg

SEQ ID NO: 111222 - DNA, 418 bp, Glycine max
acctataaaactacgctagagccattaaacgacaataacttcttactctttgtctgattgagtcccgtcatatatcgagacgctcgaaatttaatgttgaagctcttagccaattcaaacgacaataactttttactcgaatgtctgattgagtcctgtaatataacgagatgctcgaaattgaatgttgaagctctgagccaattcaaacgacaataactttttacacggatgtctgattgagtcccgtcatatattgagacgctcgaaattgaaagttgaatctctgagccaattcaaacgacaataactttttactcggatgtctgattgagtcccgtcatataacgagacgctcaaaattgaatgttgaagctctgagccatttcaaacgacaataactttttacacggatgtc

SEQ ID NO: 111223 - DNA, 383 bp, Glycine max
tgcaagcttgatcaagccaaacatgctttattttctctttcttcggttccttctacttcaactacttcatccctagttattccttcaataggacttatgatagtatccaattgaccataaatggccctttccaatttgcacattcggtagtatctaaccgatatagatgaccttcccaatttggagaccacttaccacattctaaatcctttgctcccaaaggcataatcgacttccaagctatgtcacattcgctaaaacattttagctaaatgtgattgttatatgctctttcaacttttctttttgtaagttgaatctgggcaagtgccattagtcgatcctcattaattcttcttactcatcaagcattgattattgat

SEQ ID NO: 111224 - DNA, 404 bp, Glycine max
tgcatttggagaggttccatcaaccgccctaattccttgtttctggtggtatctaagcttttaaccttgacttggtagaacctcttgccggtttgatttgttcccatgcttgctaaagtgagacaaaagctggtgcaaatcaaaactccgatatctatgggtggaatggatgaatgcatgaaggaatgcatataacacagatgcaatctaggaatgcggggatccggggaattcatccccttcttagacacaacgtctaggggtagcaaattgccccaacgtacgtttttaagaaggcgacacggaccctccgttggtttgtttacacaagggatcaagacagaacccatatgcgatgcctatgcaaaagacacaatgcgggaatgtacacagtatgacaatat

SEQ ID NO: 111225 - DNA, 210 bp, Glycine max
  unsure (1)..(210): unsure at all n locations
agcnttgcttctacaatcctctcacacctttagacctaattccctttccacttgacatatctctttacatgaagaacgggtttctacgtttatggagaaattacataagacggttaggaatcaaattgagaaccgaataaaagtgtctgctactaaacgcaatataggaaagaggctgtgcgtacttgaacagcttcgtgtttcaccccc

SEQ ID NO: 111226 - DNA, 398 bp, Glycine max
  unsure (1)..(398): unsure at all n locations
nggagacaataggcaaggaaagttctacctcattgattctcataaatatgttcgcataaggataagtgtatcctacgcattagtaaccatgtactaaatatagaatccaaatgaccacttgtgttcccaaacaattttgtaaaactaagtaattaagggttcaaataaaataaatgaaagccgggatnaattgcttaatttagtaaataagaatcaaagacataagagttgatatgaaaacaattataataagtagtctaggattgtgatttcacacttaccccaatttccccaattttaattataacaaccccaaatattatgaattatcgatatttccaaattnaattattaacctttggtcatgaattaataacgctctttgccctaatcaatac

SEQ ID NO: 111227 - DNA, 283 bp, Glycine max
agccttatatcttcactaataaaatcattataggaatcgagtatcatagaagacgagtatcatttcttttggcaatcattgttttgaatctctttctttcatattgcaatactctgattcaaatctttcacatatttttattgtatttatgcaaaacaatgaatgtgatatttatcaagttaaattcccagaaactaccgttgttccttaattctaaagaaattacctgcttccatgccccaaaagagaacttccatttcaaaaaaatatcccactattgtga

SEQ ID NO: 111228 - DNA, 400 bp, Glycine max
tttcgccatcgccaggagcgaaacaacacctagaaagcaaatgaatgtgttcattcattcgggagagcgtagcattttatataagaggaaacaggacatgcatcacgtgaagcttatttcgccactatgaatggcgacatctgaaaaggtattttgccactgccaatggcgacaccctctgaaaagctttctgctgccttctgcgaccctcagctaagctagcttttgctgctatgacctgcatgcgcgccacgtcaaccctatttcgccaatgccaattgtgaaacccctacctcacgtgtttcgccaatgccaatggcgaaacctgttccacatcagccgccatctcgccaacatgcatggcggtatacacgtaaaaatagaccctctctagaataag

SEQ ID NO: 111229 - DNA, 400 bp, Glycine max
  unsure (1)..(400): unsure at all n locations
agcttggttcgaggtacttacccgttgattatcgaagaacgaagaagaacgaatgaagaacgtcgaagaacggttgaaaccttcgcgagattcctcacggaaaacgttacggaaacgtttcggaagcgcctcggcttatattttcttcacggaaacaatttttccaagcaaattcgaaagagagagaagtgcctaaggggctggaccatttccttcttgctttcctcccctatttatagcaaaataggggaggtggttgccgcccagctcgcccaggcgagcagggttgcttcctccagaagcaaccgccttctggaggaatcttctggagggcccaaatgggcctgggtgctatttgcacccccatttttactaagtacacccncctctgctgtttttg

SEQ ID NO: 111230 - DNA, 397 bp, Glycine max
actggatgcattggttaacttggtaacccatctggccttgaatcagaaatctgtacatgtcgcaagggtttgtggtttgtgctcctctgctgaccaccatacagacctttgcccttccatgcagcaacctggagcaattgagcagcctgaagcttatgctgcaaatatttacaatagacctcctcaacctcagcagcaaaatcaaccacagtagagcaattatgacctttccagcaacagatacaaccctggatggaggaatcaccctaacctcagatggtccagccctcagcaacaacaacagcagcctgctccttccttccaaaatactgctggcccaagcagaccatacattcctccaccaatccaacaacagcaacaaccccagaaacagcca

SEQ ID NO: 111231 - DNA, 360 bp, Glycine max
  unsure (1)..(360): unsure at all n locations
cagctggccggtgcgaanatcacttggtattctaacttgttagcttcctggatccattcttggaaggacttgatggctgctttcatcaagcagtatcaatacaacactgacatggctcctgataaaacccaattgaaaaacatgtggaagaaggatcatgaatctttcaaggagtacgcccagaggtggaaggatttggtagcccaagtagcaccccccatgatggagagaaagatgataaccatgatagtagacacattgccagtgttctactatgagaaagtggtaggttatatgccctctagttttgcagatttggtgtttgcaagcgagagaattggaatatgcttgagaaggggg

SEQ ID NO: 111232 - DNA, 391 bp, Glycine max
  unsure (1)..(391): unsure at all n locations
tttctcatacaacaacctctctggttctattccttccacaaaaattttccgaagtatggctgtaagcagctttattggtggtaacaatggcctctgtggtgcacctctcggtgactgcagtgatccagcttntcgctctgatactcgtgggaaaagctccgattctnctcatgctaaagtagtcatgatcattgcagcttctgttggaggtgtttcactcattttcattttagttattttacattttatgagacgtcctcgggagtcaattgattcctttgaaggcactgagcctccctccccagattcagatatctatttccctccaaaggaaggtttcgctttccatgatnctattgaagccacaaaaggatttcatgaaagctatgtt

SEQ ID NO: 111233 - DNA, 362 bp, Glycine max
agcttatcaaaccagagcaacttctatctataacaacttgaagagctatattagaagaaatttcaattgttgaaatgtatagtaagtcggtcatctattgacagcataacaaagtcacaaatactagtactaagttgaagaacatattgcagtatcgagtgtttgctggttacatattttcaggttatatacctggaggagttccacaacacatattgcggtcatcaatatgctcaacttcaagaccaatgaaccatgcaccaagtgagacatcttcattagcatatttatgcaaaatcggcctgcaatcataattagactccacatgaaatttctatatggtagagaatattctatgagaa

SEQ ID NO: 111234 - DNA, 411 bp, Glycine max
ccctaaggataagcgcgtttaacgaattgaactgtggaacatatgacacttcaatctcccagatttttctctcttacgttaccctttttgtttactgcttccacatacattacactacttccacattttactcccttgtgaatcttattttttgttagtaaatttttgtctaaattcttgcatttatgttatctaacagtattatgcaaggactttaattagtgtgtaattcatatgttttaacattattttttttaaaaaaaataatgtgtattgtcaaatgaccacaaagaaaatgtgtgtggtcaaataattaaggtgtttaatttatagcttagtaaattaacgggtaagtaggagtattattagttaagtagcaagctctatatgacaagaaaaatagtcatactt

SEQ ID NO: 111235 - DNA, 297 bp, Glycine max
agcttgtggtaatctgtgaaaagtcccattctattagtgtttttatttttaaaatatcgattagaaatgatcttatatatgactttcacattgtagatataaaaaaaactcggggattcaaatactttctttgtataaaaaaaaaacatggcgactataatgaaactttgagcttagaacatttttcaatctattcccatgaatattgaacgttataatacgataatctcttttcttatgaatcactcttacctaatggaataccttcatcaccaaaaccctttaaaattagaatca

SEQ ID NO: 111236 - DNA, 355 bp, Glycine max
cataaaatcaacaaaaccacattgcatgagtactaaaattctaaaactatcatacatacaagggactggatcataacttgaaaatatcaaataccaatctctcgagtaggaggtgaaaaaaggcattttttatttatttgcaaaatcaatgttgattgataatttattagtttttgtttgtgagaagatttcaaacttataacattttcctctctcgttttttctttcaaccaccatgtaaatcttataattactcctaaaaagggcatataatagtcacacgcataaaaaaaaaaaactcatgaagagagaagatcagtagtagggaaaatataaaaacttggtgtacactttc

SEQ ID NO: 111237 - DNA, 361 bp, Glycine max
  unsure (1)..(361): unsure at all n locations
ttntgatgatgannactcttttattatgaaangcatannaggtgtatnttntaatngatcactcacataattctnccccattgtttttgagtttaagctttacttgaaattaagttatttaattatatgagttcttgatttaatcccaactttctctccccctgtggcatcaacaaaaagccaaagtgtgtttagagacataaaatcatacattcactcataatcattcaagcaaggaagacaataatgcctacattaactaagccaggatgataataatttattcataaactatatataatgtcagatactttagagagtcatcccagataaccaaattaaaacaactacaatagttagt

SEQ ID NO: 111238 - DNA, 66 bp, Glycine max
  unsure (1)..(66): unsure at all n locations
taatacataagcctacagaggaagctntaatggaggaagagaatgagagaggggtgggagggggag

SEQ ID NO: 111239 - DNA, 410 bp, Glycine max
  unsure (1)..(410): unsure at all n locations
ggatcttaagtcacctgggctgcagcttctaccaatagtctaccttgtcttaattcctttgatagctggcataccctaatttcgtccggggacccttgcttgatgacatgcgacctttttttggtccttgtgaggtgcttgacacccatcatgaggcaatttgtgaaattccaggacatgccggaaaaccaaaaaatattgatgcacaatccgtaagtttccgtgacacaccggaaatcaaatggaagcatcgttgcataattaagtgaggttccgtaacattccgtaagtcaaaaaagggatgattatgtaatccacaaggttctgtatacattactgaaagataacaagtattgttacgaaatncgaaagtttccataactttacgaaaaaagatcacaaataaagcc

SEQ ID NO: 111240 - DNA, 404 bp, Glycine max
cgctctagctgtgcgaagactggcagagaactaaccttttatatgaagccatcctgaaagcatgagatgagtctgtgagtgattgtgaggttctagaggtggaggagacatccccaccacttgtatttcttcaatccttcatttttctcttctctttgttttaaaggaagcttcctagatatcgagaactaaatcctctattggttctcccttgtaggtacttgatgtaaatacatgtatatctatttaatgatgttttatgtgttctctgtgctatcagtacgtcattttagtgtgctttttccttgatcatgtagatgcatgctttgttaggatcattcaacagtggaagctggtctgattcttagaacttgataaaatagggctggtttatcgtattatca

SEQ ID NO: 111241 - DNA, 338 bp, Glycine max
  unsure (1)..(338): unsure at all n locations
agctggttgtgtagaactgagtttcttatgttcaatgaaagatcctagatattagacatctgattctggttaaatttaaaaagtagtaaccacctgattatggactatntagaactaatatatcatactgttaggagccaagaatcagaatgggaaagaaaagatagaatttatggaatagtaagaaaagaacaaaacattggagagaaaactctccttcaaggtgtccccttcacaaaggacttctcctttcacaaaaagttaatactcaatntacaaaatgataaagatctccctctctcctatccttcttccnctattttttaataaacccctct

SEQ ID NO: 111242 - DNA, 395 bp, Glycine max
  unsure (1)..(395): unsure at all n locations
aggaagtgaacgaattagtatggccaanaatgtttgatctttgattggtaaatctggtgcccaaattcttgaaaaatgtaaagatccaggtacatttagcataccttgtattatagggaacaataagtttgacaatgccatgctatatttaggagcttctgttagtgtgatgcctctgtctatttttaattctctatctcttggtcccttgcagtcaactgatgtggtaatttatttagctaatagaagtgttgcctatcctgctggtttcatagacgatgtcttatttagagttggtgaactgattttccctattgatttttatattttgaatatggaggagaaatgttctaaaggatcagttcccatcattctacgtagacctcttatgaaaa

SEQ ID NO: 111243 - DNA, 391 bp, Glycine max
agcttgacgttgtcttgaagtcattactatttcattctccacattccattttcttcagaacactctcgctttcgccttcttccttattactcatcaaatgaggttcgcgtatttttctttgtgtgcttcttttaagttttttgttcccatttcactttttcacttaccggtcaaatctaaagataaccaattttatcaccaccccatctctgtgtaatgttatgcagccttcgccgcatttgttttccacatcaaaatcacatctttagtgggaaaaacgttggaaattttaaaatattattgacccatttgcttggaacttgaaaagttttatattctgagccattttcccattttttatttattatggccgtggattttttttttcttt

SEQ ID NO: 111244 - DNA, 405 bp, Glycine max
tggaacattagaaatggttttggaagaaagaaatgttttatatggcatttttcctaaactacttggactacaaggctcaaaaagcacaagtgagcaattctctcgggaacagaaacctcgcgcaccctccaaatatcttctcaaagatcccaacggtctgatcgttgacaagtatcctttgaagctgaaaaccgaatttcgagaagatccaacgattaacaaaggctggacaacgtttttaccgagatagcttcatgtagcttccttgagaagcttcattaagaggcttcctcaagaagcttcctcgtggcttctttgagaagctttctcaagaggcttctttgagaagctagattcttatctatccacacccctctattaactaaattaacctccttgaaaata

SEQ ID NO: 111245 - DNA, 362 bp, Glycine max
  unsure (1)..(362): unsure at all n locations
tgcaagnncttttttaagtangtgaaaggttttttgtcgcatagtnanaaaaaattcaagtgcttccacggcaaaggttccagcttgataattggaaatactaggaggaggcttaccataaacaatttcatacgaggttaaattagtggctaaatgagtagtggggttgtagcaccattcagcaagatacaaaaacttatcccattaggatggcttatgatgcactaacacccacaaatattgttccaaaactcaatcaaacactttagtttgtccatcactttgaggatggtaagcagtgctcatacccagcttattcccatacaacttgaaaagctcgtgctagaattgacctatgaata

SEQ ID NO: 111246 - DNA, 319 bp, Glycine max
  unsure (1)..(319): unsure at all n locations
agcttatcattaattgagaatggactttttaagtctttcaaaagattacaaactacttcaaggagaacatgaacgaaaaatagatcattctttagaaatttccattcaatcatgtgatgactttgaaagtctaaaattaaagacaacaaagctttgtcttgaaaatgaggatatttgtaaataaagatatagtctattggaagaccttcagaagttgaaaaatcaactgggaggcttaccaaatgagtatttcacactccataaactncatgattgcctaaatgaagaaagatggtatctatgaaagccttgtccccaa

SEQ ID NO: 111247 - DNA, 376 bp, Glycine max
  unsure (1)..(376): unsure at all n locations
accatnatcttagattattattaatatcattagtactttgatgtctagccgngtatttggctatattattatgacatttgaacaatttagtctggcntctaatatttgcttagtatgactgaattgttatgaattatgttatatgactatgtgatttatatttggtctattcatgttttttgcttcatgattggtttagatttttcaaatgaatgacttgtgtatgattagtcatttgtgaatgttttatattttttatgcactttggctttttgttgatgccaaagggggaaagaaaaaaaggattaaatcaagaaactcacataataaaataacttaatttcaagtgaagcttaagctcaaaaacaaagtgatg

SEQ ID NO: 111248 - DNA, 304 bp, Glycine max
agcttcaaatggtcatcgcttcattcttttggcaatagaatacttcaccaaatgggtcaaagcggcttcttataccaatgtcacgaggagtgtggtggtcaaattcataaagaaggaactgatttgtcgatacggactccctaggaaaatcattactgacaatggcatcaatctgaacaacaaaatgatgcaagaaatgtgcgaagatttcaagatccagcattataactccaccccttatcggccaaaaatgaatggggcctgaaaggctgcaaaataaaatattaagattattcagaagatg

SEQ ID NO: 111249 - DNA, 405 bp, Glycine max
ctccgcttgaaatctggcaattgtgagtataacttccgtattctccttaagcagttttgacactctcgcttagcggaccgctgcgctaagcgagccagagagatgtttggtttctcaatgaggctcgcttagcggatcagcgcgcttagtccctgtttgaaattcaaaatcagtttttttttttacacatagaggcttggcttagcgctcggataagaccgcttagcgagttatgcagatcaaaaaacctgcaactctcgctaagccgggctctgggctggcttagctaaaatgatgcatcttaagtacaaaggagcatgcgcttagctgaaaaggactcgcttagcgctcacattgccgcaaggaattcagcttagctgccatgactagcgctaagcttcatga

SEQ ID NO: 111250 - DNA, 372 bp, Glycine max
agcttagataggaaagtgatcaactcatgtttatgtctaatagcatatactggtattgatgagggaaatgttagtggtgactgagagtttctactatcatttgcttttgcttatagtatacttcacaactttctttcttttctatattaacaatatatggactgtgaaagggaattcgtgaaggcgcgtgaagatgaaggtggaagaacagtggacattatgcgtattattttaacttatgggcttgagtcaattatgtttttcattataccatcgtcaaataagaagcattctaattgtttgcctttattcttatattaaatatgcttggccttttcttactatattaacaatatagcccgtcatctatta

SEQ ID NO: 111251 - DNA, 376 bp, Glycine max
tagtaacccatgttttcatgaataagaaatctacatctgttgcaaaagtttgtggtctatgttcttctgcagatcaccatatagatctctgcccttctttgcagccttctggagtcaatgagcaacctgaagcttatgctgcaaacatttataatagacctcctcaacagcaaaaccaacagcagcagaataattatgacctttcaagcaatagatacaatctgggttggaggaatcatccaaatctgagatggacaagtcctatacaacaacaacagactgtccctccttttcagaatattgttggtccaagcaagccatatgttcctcctccaatacaacaacagcagcagtcacaacaaagacaaccagcaac

SEQ ID NO: 111252 - DNA, 402 bp, Glycine max
ctgaggcatgcaagctgaggtggattgacttaaaatgtgtcataatgtttaattgccattttcagtgtattttgccaaatacaaaaataatgagcacattttacaaagggtggcttttaaatatgtgacatgatgattaattgtcatcttttaattattttaccaattttaagaataaagagaaaaatgtttactaatgggaatttactttctgcatcccgagactatgaatataataatctcttgaatcattggtcctaatttatgctttaattgaaatatcctttttttatgaataattaaatcagtatttagtttgcatttccatttataatagactaaattataccctattagtggtgttttaaattggcatccatacttttcatttttcacccacaa

SEQ ID NO: 111253 - DNA, 336 bp, Glycine max
tttctaatttctatgatacgtgggttacatatatttatattttattgatgttgcaagtgcacatttgggacttttcaggacagacaacccagttcttcttgaatgacaaatctagattgccaaacgattctcctggtcaacttggaaaagaggtagttggtgattgttaatagattggcaagtgtatcaattttatcacaagtagtaaagattaaaatggaagttcaagtatcgaatccacgaggactttggttgtactttagtgattctaacccaattattaagcaatgagaagaagtagaagagaaaatgaattgtaagtgtgaaaattgggag

SEQ ID NO: 111254 - DNA, 328 bp, Glycine max
  unsure (1)..(328): unsure at all n locations
cccctcgattttcaaaagggcnctgtaagcaggcaagaaacaatttgtcatcgtttttatttttttgtaagagaggactttatcaaatgggttatatcggcttcttataccaatgttatgaggagtgtgggggtaagatttataaaaaaggaactgatttgttgatacggactccctaggaagatcatttcggacaatggattctatttgaacaacaaattgatgataaaaatgtgcgaggattcaaatattcactatggatacttcaccctttataggtaaaaaaaagatggggggtaaaggctgcaaataatattttataattttc

SEQ ID NO: 111255 - DNA, 371 bp, Glycine max
agtcacctgcggcatgcaagctttagccaatggactaccttgaattaattccttttatagcccttttgagccttgtttccctttccttgttttgaagctcactacaagccttaagtgaaaaaccatgatattaccatatccttaaggaattttggagctttggaattgttttgggaataagtgtgggggggttttgtttcattggacaacttgttttgttggctatgcttcatgatgtattttgggccatacttgatgaacattgtatattggttaaatgttggacatgctgaatgaaatgttgtttctcaaaggccaaagaagtaaaaaaaaaaaaaaaaattattcgaaaaaagattcgaaaaaaaaaa

SEQ ID NO: 111256 - DNA, 364 bp, Glycine max
aattctatcaatagacctccaatctttaatggagagggttaccactactggaaaacccgaatgcaaatttttattgaagcaatagatctaaatatttgggaagccatagaaataaggccttatatacccaccacagtagaaagagtttcaatagatggtagttcatcaagtgaaagcataaccatagaaaaacctagagatagatggtctgaagaggataaaaaacgagtacaatacaacttaaaagccaaaaacataataacatctgccctaggaatggatgaatatttcagggtttcaaattgtaagagtgctaaggaaatgtgggacactcttcgattaacacatgaaggaactacagatg

SEQ ID NO: 111257 - DNA, 248 bp, Glycine max
aaagaattctgaacaggaacatgcagagacactatagttgaagcatgatcttgcttacctgtcttgaaatcaaatgaagaagccgttcaaaacttataaagaaaatagaagcactaatatcgcctctataaagaataacaaaccaaagaagaaaactcccaattgctccaggatgtaatggagtgtaggaacacgccgacggaacaatggttctagtcaaattgatgggacataaaactgccaaccat

SEQ ID NO: 111258 - DNA, 403 bp, Glycine max
  unsure (1)..(403): unsure at all n locations
atctgnctcatgtagtcgtcacttgtcattctttttctcatattaactaaaaagtgttagtttgttcatgtttgaactttcttatgatcactatttatttttctaagaggttgtgtgataaaatgaaaggtagagtgaaagagaaaaatagaagaaaaaagagagaggaaaaatgctcaaatggaaagttgtcatggtattttatgattgtctcacttagaatcattcatgttattctaaccaaattttgaaaaacacatataagccgtaagacaagtgaaagaatcccaagtggaagaatcttatctttgtgatgtatttcctagctactaagacaccagttggtggagtagtagtcaatctctatctggcatctcctatgcaacaaccagtaagtaaaaca

SEQ ID NO: 111259 - DNA, 384 bp, Glycine max
  unsure (1)..(384): unsure at all n locations
agcttgcttctacactgatgaggatgattcttagttgtgttttaagtgtttgcttttgttgtttgattgtcctttctgattatgtttaattatgcttctgtgtctttgtttcttattaagcagttatggtttcttataatggttgtaatgttttttttatgaatgaaatgctatgatattttcccttttcacatcatatgcttgtctatttactctataagtagttgtgacattttggccttgttatgccaaaagggggagaaacattgcattagcattgcattaagaaggattagtgcattgcatacatacattcatatacaactatactcaatgatgatgatgatatgattngacacttcttctagtgttcaaaaaatttct

SEQ ID NO: 111260 - DNA, 403 bp, Glycine max
tctatataagatgaaccattttatcaataaacacaagttgagttttattcagaaaattagagtttatctcttttatcttagtgagagtgattctcctaagttcttgagtgattcaagaaaaccctggctatatcaaaggactttcataacctttgtgtgttgccctcgccggaaagagtgattctttccttcctttcatcttcaaccttgttctttcaaaccacaattccagaaaatccacttctgcccagaattatctcgtggtcataactctcattttacacgctcaaattaagtgattcttgagcctaaactgaatttcaaaacgagatctttcacctcgttttggaatcacctcatttggagccctgtagcttgagttattgccatttctatatttctg

SEQ ID NO: 111261 - DNA, 388 bp, Glycine max
  unsure (1)..(388): unsure at all n locations
agctngncaaaaagggattcaagnnaaatttcttcttttaaagcagaaacattgtttctacttcaaaacctcttgaactacttcacaatgatttattcggtccttcaagatctgagtttaggtggaaattactatggcttagtaatagtagatgattactcaaggttcacttaaactttgtttttgaaaaccaaaaatgaagcttttgatgtttttcgcaaacttgccaaggtgatttaaaatgagaaaggtctcaacattgtttaaattagaagtgactgttgcaacctacccttcgacgggagggcgaggcgaaaggcccaaggtgcatcttcttatgaagaaaacgcgtgggagtcgccaccaacgtttatttgagaaaaaattt

SEQ ID NO: 111262 - DNA, 347 bp, Glycine max
ctcactcaccgcacttttgggtttatttctagctatcttatacttatcgcgagcttcagaagttctacatctagaccactccttgaaacactcctttattactataactgtgctctgaacattgacatttcaccaccacgatgatttacccctaggtccaaaaccgctagattcacccaacgtctctttagccactttaataatctattatctcccaaattttgacatccgcgtgaaaagttatgaccataccaatatctcgagtacttacattgtgcaatatccagcctctcgatatataactgactacagtgggacatcctggagaaaagcgctgaccattcgaa

SEQ ID NO: 111263 - DNA, 365 bp, Glycine max
  unsure (1)..(365): unsure at all n locations
agcttgaagatttggacattgctttatatgtttntcttgagtcacatgaatgcttaaaattgtttggtttgaatcggcctacatgttggttaaacttgttgcactatggtgggtacattgcaactaaattactgtagaatatcaaattctttctttcaaaatgatacacactaagttgtgatttgttttattagttgtatggcaacacatgtaattagtaaaaaccacacaaaattgattgacttcttggttgctatacttggataactaaaataatgattacgtatttcatgcaaaataattttttatggatgtgtctntgtaagcaatggctcccaacgcccgcgcaggggagggatctaatg

SEQ ID NO: 111264 - DNA, 404 bp, Glycine max
  unsure (1)..(404): unsure at all n locations
ngcctaattaacctaaaattgagagaaaatgattatttatcacacaaaatggaagtactaagtatttattacctatacttaacataaaatacttataacactacaaaataaccataaattggaagagtttgatacaatttacacaagttttatacacaaaagttagtcgtattcaccgactaacaattacttacctcacaaaacaattgattacactactcgattgagagcaagaaagcactatttgactaagagcaaacaaaaagatatttgggccaaagagtgaaagggggacctccccttatttataggagttgggcctgggacgaggcccaaccaacaacatccccccaccgtttgatcaaggcaaatctacaactgagatcacgggacattacggtgct

SEQ ID NO: 111265 - DNA, 389 bp, Glycine max
  unsure (1)..(389): unsure at all n locations
catgcaagctttctctccaaaagttattctcttagtncataagagtagcaaagcgaggcttgtgagttccttgcaccaaatgagtacacaaaatgttgagtagtcaccattcgctaattaccctaggttcttcgaacctattcacccactataccccaatgtaccttgtaaatcatccatttctcaacataaacctcatcatctcacagataaaacataatcatatacctcatcatcttatagatggaacataaccacatacctcaccatctcgcagatgaaccataatcatatatctcatcatcttatagatggaacataaccacatacctgaccatctcatagatggaccataatcatatacctatcgtcttatagatggaatctaa

SEQ ID NO: 111266 - DNA, 408 bp, Glycine max
tcagctcgggaggattgatggggacccggtgttgagagatacttgatatgagctacgtgggagtacgtgagctcagttggaggtgggcaacaggggatggtgggtttatgtgcgcattgtggatgtggaaaacttgttgtgcaccatcgcccgaccgccacctagtaccacatgtgatgggtaccccataatcctacaagcttgagatgaggaagtgttgaagggtgaaacttcctacttttattgttgaccacagagtggtacctggagatatgtctcgggggtcaggagaccttggggacgtcaagtggggtgctattgcccaaaaccaagcttgaccaatcccgaaccaacccgggcatagtctgtcagtgagaacctgtgatgtacctaagcaggcgagctcct

SEQ ID NO: 111267 - DNA, 382 bp, Glycine max
  unsure (1)..(382): unsure at all n locations
agcttggagaggatgcttcaatggaggatatgaaagagggagagaaagagagaggggggagcacgaaattgaatgaagaaacagggagagaagttgaactttgagttgtgtctcacaagactctcattcatcanagttacaacaagtgttacacatgcttctatttatagactaggtagcttccttgagaagctttcttgagaaaaattccttgagaagcttctttgagaaaactttcttgagaagctagagcttaactacacacacccctctaataactaagctcaccttcttgagaagcttccttgagaagattcctaaagaagctagagcttaactacacacacctctctatagctaagctcacctccttgagatgaga

SEQ ID NO: 111268 - DNA, 401 bp, Glycine max
  unsure (1)..(401): unsure at all n locations
tcaacctctcccaaatgggccctaaactntagtaatttatttatttttaacaagaacttcacactaaaaacttactttttaaacttttacagaattgttatcaggttttttatatactaaatatagcctaataataactaaaataagtcaatgttaagatttgtactaaacgaaatatgttcaagctggaagtatcttgcgtacatttgaatgcgtcgtaaattttacaaatgatttaccaaacaaacgtgggtacccaattaccagttttggtcaagtcaagggagcttgctttatacacctgaattgtagtggaacaccttcaatcattcttggcttattctactggctctagatatgctgtgaagacttggttcaattataaaaaataaataacatat

SEQ ID NO: 111269 - DNA, 384 bp, Glycine max
  unsure (1)..(384): unsure at all n locations
agctngttttgactttggtttatatgatatccatatngacgacatgatcaaggaaattgatcaacataacgcaagcatcattctatgtctcgtcattgtaagttttcttgtaatgaggcataagatcatcaaatttcatcttgttatgtctccgtcggtgtcaaattttttgttgggggtattaatggaaggtttgtggtgcacgatgggcaaataaattatggggaatttgctgccatgatgagaaaaggcaatggatgaattgggaggcgaactatgagaaaaacactaaatttaagagatgctcttggattagtagacaatgggtccaatcaagttattgagggctactttaagtaataattacttggagacaaaattgac

SEQ ID NO: 111270 - DNA, 404 bp, Glycine max
taacagggaatttgccttctttatctgtgacatatgtattgtctcccctgtaaatgtttggcattctatgtcaattttccaaagtaaaaaacaacttatcaatcatgaacacagcatatctgagacagtatatgaagaaaatatccatgaaactgaagtttaaaattgaaatacaataattaaagggtcaataatgaattacagaaatgatatttccatattaaaaaaaagaaacttaactagtgccattttagaggtaaacaaagaaaaacacattttaacgcactgtttctctctgcttccctcccccaagcaaaataaaaggtgtaactttttctatgaggaaatatgcatggtaatctgtttacagcttatgcttctaagcactactatgattccaatac

SEQ ID NO: 111271 - DNA, 390 bp, Glycine max
agactgcttctacaatcttcccctttgtgatgatgacaaccctgaaatcaagaaacacatacacattctttttcctagtcgatcactcacttaattctacatattctccccctttgtttttgagtttaagctttacttgaaattaagttatttagttatgtgagttcttgatttaatccctattttctctgccccttttgcatcaacaaaaatccaaagtgcataacaaatataaaacatacataaatgattaatcatacacaagacattaattgaaaaatataaaccaatcatgaagcaaaaacatgaaaaacccaaattcaaatataaaccacataggcttataacataaatcatagatgtccagtcatactaagcaaatattaaaag

SEQ ID NO: 111272 - DNA, 404 bp, Glycine max
taagatggggaaatgaatagaggccatcactaccagctatgccttgaagtaagacttcattggttgcctgtgatttgacagtacaaaagtgagggtagaatttgaaataaactccattatctttagcaaacatactgacttagcagatttttagtgattgaaggaacatgtaacaaattatgaagataaagaggaaaattatgattggtaggggacctagaagaaccagaaccagaaccaagaattttcaaaccttcaccattaccaatataaatctgatctggtccatcaaagtggccaagctgatgaatattgtggttctccagtcacatggaatgaagctcccgagtcagggatccaagttgagttagcattttcctgggaagatgagttagctagcatgg

SEQ ID NO: 111273 - DNA, 326 bp, Glycine max
gatactcaagcacctgagctgcagctacctgaagccatctgcccttttcaccgattaagaccaaacatcccagaaaatcactctggaactgcaatagaagtagtctaagttaaaaatcacagatttgtttacttcaaccggagctcatattgacagatcaaaccagacctccatattattgacctccgatgatgtcaacctcaacccttttagtactgatggacgggattttgaggcgaagggtaaggattgtaatgtctattcttagaatctgaaggctccaagacacagctgatataaaatattttatccctatctttactcta

SEQ ID NO: 111274 - DNA, 314 bp, Glycine max
tccatgtgtggggaagcttgactgttgtacagaaacatggttgcaacatgatccaaatgatcggactgattgggtgagtgggaggtgcaactacagcttgctctgtcgttgcacgaatattcttacatgagaaatgctagagatgagcttgcactatcatctatgaccattattaattgaacctactcatcactcagaatgcagccaatatacatcaacatcttcagccttcgataggccctgcaaagatgcctcgggtgagatcaatataatgaatgggtcctctttctctatgaagaacatcttgatgtgaa

SEQ ID NO: 111275 - DNA, 339 bp, Glycine max
ggacggcagggtaaacataacttatcagcatgtggttatggcatcttattattcgttagttagagggaataactaagttgtaactaattaactagaacttcttttattagccatgagcagagtaaactaaccttttagctttgcaaaaattaccggccactatttgggtgggccacaacctctcaaaggggtatcacgcatgtctggatgttatgtgattgtatattctgccaaattcatcccaaagcacttggaaatcagaatgggggtgggtatatatgcgcacggctttaactaatgcaactctcacgcgtgccataataatgctactccccttta

SEQ ID NO: 111276 - DNA, 414 bp, Glycine max
  unsure (1)..(414): unsure at all n locations
acagctntgatggtgtcgagaagaaatcacatgtttgtcatcatctaaaatggggagaatgtgaatgtatgtatacatgattttgatgatgtcaaagaagaatctaacaaggctgcttcaaatgataagcatttgcttcaagaataattcaagattgcttcaacaaacaaagccttgtttcaagattcactaaagaccaagccttgccttaaaacaatgtgctttcaagacatgcaaggctctggtaatcgattaccaggaagtgtaatcgattaccagaagacagggttgagaaatagctgttgaaaaaggttttgaatttgaattttcaacatataatcgattaccatatgtctgtaatcgattaccagcaacgaaactttggaaattcaaattcaaaagtcataacccttc

SEQ ID NO: 111277 - DNA, 382 bp, Glycine max
  unsure (1)..(382): unsure at all n locations
agcttttctgaaaatacttataagaaagttcaaaaganatttttttcataaatcaaaattaccttatttataagttaacatcaatttttttagagaagttaaatgaaagaagcttcttcaagagctgatttcagtttatgtataagctaattttaacttagagggaaggttattttattttccttttttactctggttctctaaagtgttaacagagaataacataaccttagtttaaagtgaagtgattaatgcttgaaaacttgtttgttgagcgtttggattagcttatttttgaaatatttgttattttgtctggagaaagtgagtttgcaaataattaaattcatttcacattaagtcaaactggctatcgagcttt

SEQ ID NO: 111278 - DNA, 408 bp, Glycine max
ctgaagaatcaataagttattggtcaaccttaagatgctatcaaacattataaggaaattagaaccttcaaaactacattagccaaatttgttaatggaatggataatcttaacaaattgttaggatactgtagaaattcctcagaaaaatttggaaatggatatgatggaaaggtatatgttcatgataaggacaccattatctgctacttctatggtaaaattggtcatacgacatccaagtgtaaagaccgactaaaaagggtatagtcaatacttttatggctaacacgaaaggacccaaaaagatttggtaccaaagaaaaagattatttctattacaaatgtccttgataacatgaaacagacacctatcatggtacctgaacagtggctgctcacgacata

SEQ ID NO: 111279 - DNA, 234 bp, Glycine max
agcttccatattagtgtaccacactaccttagctccggccaagctatcctgaaagaagtgtatcaacagcttttcatctttagagtgggcgcccatcttacggcagtacattttgagatggtttttgggacaagtcgtccctttatacttgtcgaaagtcggcactttgaacttcgagggaataacaacatcgggtactaagcaaagatccgtcatgtctgcgaacggatagtc

SEQ ID NO: 111280 - DNA, 413 bp, Glycine max
  unsure (1)..(413): unsure at all n locations
accctcagctttcaattcattctatgcacccttagnggtccattcttgcttggtatgctttcatcttcggctaatttactttcggtatacttttcttccgtttttaatgagcttcgaccgattgtttaagccgttatctctccaaataaataataaaatgaatttcaacaaatcatttgtgttgtaatctcgtttaatcgctgttaaaatagaattcaaccgatcgttcacactgtaacctcagttgataaaaaaagggaaaattttctccaatcagacattttactttgaaagttcttttaaataagttgataagtaaccaagtgaaattaacgctaaaatcaacttacaaaccaagctttgtccgcgaaaaggtcatttgaaactgttttaaggttcaacgccttaagcag

SEQ ID NO: 111281 - DNA, 366 bp, Glycine max
agcttatccttatggcctgcctccggactttaccccccgtgccaccccggaagaattaagccaagcccctacttttgaggggcaactcccaccttatgaagactatcccgggcaagacgatggggaaggagatacccatcttggccccctgctccacctcaaagatctgtcctcgcatgaactaccccaaccgaacatagtccgtcataccccggcctcacccacacccgtaaaagaatctgttcccttcacagaagataagggaaagattgaggccctttgagagaggttgagagcagtcgatggcctcggcaattaccctttctcggatttagcagatttatgtctcgtgcccaacatcctcat

SEQ ID NO: 111282 - DNA, 418 bp, Glycine max
gaccttaaatctaagcttgtccaaaaaatactgaaaaatgtttaaggttcatctccttaaatgaccccctttcaagtaaaaagaatcacttgattcgccccttttaaaagaactatgtaggtctgattttctcttcgatggagggtacgtaggagcaagagcctcgcttttgtcgacctcaaaaataaaaaaaataaataaaagtttagtcacataatttcacacaattctaatctaaggctgttgtcctttgagacaaacgtgagaggtgctaataccttcctcaaacgtaaagataactcccaaatctggaatattattcatgactggtttccttttgttttttctaacgttttcctttcaataaacgttggtggctactccgcaccttttcctcctatggaagacgcacccgtga

SEQ ID NO: 111283 - DNA, 360 bp, Glycine max
  unsure (1)..(360): unsure at all n locations
ctgcagctnagcctaggttgtccatgtgtcttatgtggccccgtaatcctaaaggattttattaataagataattgaatgatacaatttgcgaagggtgaactccaacaattatatttatgacatgtgaaattattttctatatgtgggtgtgtgtgtatgcatattgccatttttatctgcccgccttgaggatcgggtccggggtggttgaccctccacaaattatatttatgtttgggagatagctataattacaaatggtattgtggccaactattatgtgtgacaagtgggtttaccatttaaagaagcctgactgggtccctgagagtagtatgtagaccctagcctcggctct

SEQ ID NO: 111284 - DNA, 408 bp, Glycine max
tctaaactttgtacaagaatgaagctctgataccacttgttagacaagtggcctcagatatcttaagaaggggggggttgaattaagatattccaaactgtttccccaaaaaaaaatctatttcactttttactcaagttatgaattcccttaataacaatcttcttaaatattaattcaaacgaagcaacttgaatatgaatataaagcaataataaataaaggagattaagggaagagaaaatgcaaactcagttttatactggttcggccacacccttgtgcctacgtccagtccccaagcaacccgcttgagagttccactatcttgtaaattccttttacaagttttaaacacacaaggacaatccttcctttgtgtttagagatcctttacaacaagagact

SEQ ID NO: 111285 - DNA, 134 bp, Glycine max
gaatcaaaaatctgtacctgtcgcaagggtttgaggtttgtgctcctctgctgaccacatacagacccttggccttccatgcagcaacctggagccattgagcagacctgagcttatgctacaaatattacaat

SEQ ID NO: 111286 - DNA, 403 bp, Glycine max
  unsure (1)..(403): unsure at all n locations
tgaaggtgtgtaacccaccattttccataatagaaaactggtattgtgtctactatttatcatttttttctccgtcattgaggtgccacttgagctgccaggtctctccacctttgggcgtattctttgaaggattcatgctccttttttcatatgttctatagttgcatcctatctagagccatatcagaattaactgacactgcctaacgaaggcaaccattaagtccttccatgaatggactcgagaaggttccaagttagtgtaccaggtaaaagctaccccagtaagactttcttggaaggaatgtatcagcaattcctcatcttttgcgtatgcccncatcttccgacaatacatctttagatggttcttggggcaagtagtccccttgtacttgtc

SEQ ID NO: 111287 - DNA, 302 bp, Glycine max
  unsure (1)..(302): unsure at all n locations
agcttcagttttggccncaatgtctcatgttgactcgcccaaaatcgngaagtaaacctcggatccctgtcggatacaatactggaaggaagttcatgcaaccttactacttccttgatgtacaactccactagcttctccattctatacttcatattcatcggaataaaatgagcagatttggtgagtcgatctactatgacccacacagcatcatgtccacgactagtcttgggtaaactagatacaaaatccatagatatgctcttcccatttcattccggaatttcaatggctttaat

SEQ ID NO: 111288 - DNA, 404 bp, Glycine max
  unsure (1)..(404): unsure at all n locations
tctcccncattttcctataaatagggggaaaggttattggtgttaatgttcagccctcctggtaattcgagaatcacttgaaattagtgaaaaaaattggttctgtgaagaaaatccatgccgaggtgcttccgtaacgtttccgtgggtgatttctcgaagattttcaaccgttcttcaacggtcttcgttcgttcttcatcgttgttctgtcttcaaccggtaagttcccgaaatcgaacttttcaattcattctatgtacccttagtggtcctcatttgtttttacgtgcttttattttcatttcatttactttccgtacccccttttgacgtgctttagtcatttgcttaagttggtttcttgcctaatcaaaaaataaaattaatttccaccgatcatt

SEQ ID NO: 111289 - DNA, 376 bp, Glycine max
  unsure (1)..(376): unsure at all n locations
agctttntcttatagctttgctacaactttattattcccctttggcaacaacaaatagccaaataactcgggactcagcactagtatgacaatggagggacaagatataagcctctgagtatttactatcatacgcccaactctctaacaagatataactaaaccagaatacacatgactgtaaatgtccacaaccacaaatcattctagactgacgtgtaaaatacacacgataaataagccaagtacttagcataataatgtaaattctaagaaactgaaagccaaaatacacggcttataaaagataaataatcataacctaaaagcttaaaagacggaggacgtggtggaagagcgaaactttgacgaatgt

SEQ ID NO: 111290 - DNA, 413 bp, Glycine max
ctatgaatactcagcttgcacttgaggatattgttttgaaaacgctttgtttctcatgtcatgcatatgggtatcttgtgacagggacgagatcgttttaacgcaatggtcaaataccacaccaaatccaagacagagatgaatcgaggtaagtggtaacgcgatatcaaaaaataccgcgcaatgtcatttcctgcttccaggtacttggggacgggcaccaatggacgctatgcccatgatcaacagatcgctgtcccgcatccgctccggacaatcgaaaagcgctactgggaggcagcctaatatcctttatattcctacctgttattattgttgtttcattaagatgatgatcggatgcctaacttacccaaggggtttcgaataagtgaacactgacccatagagag

SEQ ID NO: 111291 - DNA, 314 bp, Glycine max
agcttgaccaatcccgacccaactcttttttagtcagtcagtgagaacctgtgatgtacctaaataggcgagctcctggcagtcaaccgataaaagaacaaagaccacaaagcaaggaggcttgtgtggtggctggccaactaagtatcttgagtaatatttggaatatggcctctggtaatcgattaccaagggtgtgtaatcgattacaaggcttaaaaatgaagacatggagttaagatggcctctggtaaactaataccaaggatgtgcaaacgactaccaatgcctaaaaatgcgattaggatctcaat

SEQ ID NO: 111292 - DNA, 319 bp, Glycine max
  unsure (1)..(319): unsure at all n locations
cgctgtacaccagcagcgcttcgaggccatcaagggatggtcgtttctccgggagtggcgcctccagctcanggacgacgagtatactgatttctatgaggaaatagggcgccggcggtgggcatcactggttactcccatggccaagtttgatccagaaatagtccttgagttttatgccaatgcttggccaacaaaggagggcgtgcgtgacatgagatcctgcgtaaggggtcagtggatcccgtttgatgccgacgctatcggccaactcctangatatccgttggtgttggaagagggccaggaatgtgagtat

SEQ ID NO: 111293 - DNA, 304 bp, Glycine max
  unsure (1)..(304): unsure at all n locations
agcttgagatgaggaaagtgttgaattggttataacttcctgctctttattggttgaccattagagtggtacactggagatatgtcgncggnggtcagtgagaaccttggtggaagtcagtgtgggggtgctaanttgcccaaaacccaagctttgaccatatcaccgactccaaacccgggccatagtccggtcagtgagaaacctgtgatgtacctataacaggcgagctcctggcaatcaacagataaaaggaacaaagaccacaaagcaaggaggcttggggtggctgccaactgtgatt

SEQ ID NO: 111294 - DNA, 409 bp, Glycine max
aacgggttaagtccaagtacctaattgtattagtccttccaagtatctactaaccttgctccgtttcagaatttggtcttcatcaacaactaccctttcgacacctccaagggaatcgtcattaactttaagtagcttgcaccaagtccattggtgttagttcatgatatacctacttaccaatgaaatatttaaattgtaggcactatttatctagttctttgcatcatgatcatgacatttgttcctggacactatgctgatcatcatcacaggtacgaatgtttgcaatcaattttgatgcttaattttgttatcattgtttttctatgttgttggatgtcattaatgtactttgctttacatacaaatattgttcatgatgagtgaaccttagattcccatttga

SEQ ID NO: 111295 - DNA, 170 bp, Glycine max
agcatgtttcaagtgtacttgcgttttgttttatgacattagcttggcgaaggcccaagatgcatgcttgagatttgctgtcccagactgagaagtatgcactcatatgcaattaaagagctttgttactttatatattatctcatctattactccctgctcttttcccc

SEQ ID NO: 111296 - DNA, 285 bp, Glycine max
aatgacgtaaaaagaagataagtcgtgatatgtgacacaaatttataatttgaagaaataagtgaccgaaatcagaattagaaatagtcgtatagttcctatcatttgtaatgccagttatgaacatggttacgattaaactatttttacgactttaaagttataaggaattttttttggtctgcgactcatgtcatagtctgcccctcgattattgtgatcactgcccacgtattttggaacccacctgcaggattggggcccccccctcttcggtgacagact

SEQ ID NO: 111297 - DNA, 388 bp, Glycine max
agcttcccaatcatcattgaaaagatattttgaagagttgaggtgaagctgaagaagatgggaagtgacgttgtggcagaggactccataccagtggcaacagttggtattattatgattcctagaccaaagcctattggaaggatctatgagattattcttaaacttcaaaagtgtctcacgctcacttgggatgcacacactctctctgcatggtaagctcaacaaccaaagctggacaaagacaagaatataaataatggaggaggaattcatgatcacacaagaatatatagaaaacaagtgtagttgttggttccgcatataaatcatcaaacttctattatttatactgctgccctgcctgtttttttcttcactttcatta

SEQ ID NO: 111298 - DNA, 428 bp, Glycine max
  unsure (1)..(428): unsure at all n locations
tttcactttattatgttgattccaattggcttcctagttttcagcttacctatttggatgtgggatcatggcagttaggtcccagctttccatcgtggattcagtcacaaaaaaaacttaaatatttaggcatgtctaacacaaggattattgattctattcctacacagatgtgggaagcacaatctcaggttctgtatttaaaccactctcataatcatatccatggtgagcttgtgactacattaaaaaatccaatatctatcccaactgttgatctaagcacaaatcacttatgtggtaaattaccctatctttcaaatgatgtgtatgggttagacctttcaaccaattcattctctgaatccatgcaagattttttatgtaacaatcangacaagccaatgcaattagaaattctcaatctt

SEQ ID NO: 111299 - DNA, 386 bp, Glycine max
  unsure (1)..(386): unsure at all n locations
agcttttgtgatatagttgattggttttttgttttttattntattnntctgaaaaaaattgaaagtagtttttatatttttgaaaattttcgttttgaaaacaatgtaatttaaaaaatattttttaaacaaaaaataccctcaagataaactggtgaaaagattaatttgactgttatcgaaaaaaagagattaaattgacatgcatgtctactagaaaaaggaaaaacatactccatccacaagtacatgactaaaaatgataaatctatttgaagcagcatcaacttatattaaatgtgcgaattgagatgcatataactaagttataattataatcttcgttctttcttaccacaatagcattttggtcgtctctcaatgtg

SEQ ID NO: 111300 - DNA, 446 bp, Glycine max
  unsure (1)..(446): unsure at all n locations
cggatgttctgtcattaaagccgtcgagtgatgctgtgctggactctgagacaaaatggccagatttcctatgaaccaaaggagacaatgcctaaggaaaacagcgacacggggcgtgtaaagatgcagcattttcagaaggttgacacgggaagttcaagcgcaattcatgcggtgagagcaatagaagatgaaaatcttgattatgacagcaatgctagctcgtccagttttgagtttgataaaggggagagaccagggaacaatcctgccactagatccctattcaaacctattccttctaagtggaacgacgccganaaatggataatgaatangcaaaacatacaggctaatcactcgaaaaagaatactgcacataaccaagcaaatcgcatgccaacaaatatgggcagggttgcaccagagtctggtattatgatcat

SEQ ID NO: 111301 - DNA, 396 bp, Glycine max
cccgggatcctctaagcaccgcggctgcagctagaggaataccctttttttgtagccttttattttcccgcagaaacccaaaactgtctcagtaaaactatgatcctggatttgttaaccgttggattatattcgaattgggatatgttgttagaaattcaattgcacaaactttcactgttgggatttgcaagataatatttgtggagggagaaaaatgaatcacatgaagatagtgcaagtggagacttcaattccttctcattctctctaacgtttgggaaccctatcagagcaaccagaggaatctcaagaacttgttatagatgtctctatcgctgtcggaagacatgtgaacccgcttataggtaaaggatgggttattcacaattgggg

SEQ ID NO: 111302 - DNA, 409 bp, Glycine max
actcagctgatatgcctctccctcgcagggatctcttcttcgcaaaagcgagatagttgttggcggttatattattaacaagccctccgaagccttccaccgagatatcttgggccacgtgggcctcgttcaaaacctttacaagcaaagcccgatgaggttccaagctcatgagtaattccaacagcgagaccctggccggggttttgttgagctgctcgataaccttgaactcgctctgctgaattatgcggagaaactcactggcttcctctagtgacacctccttcttgccataaccatcccttttcttcggaggacctttcgccggaatatcctcgttcggagtgaggggggtattatcatcttgttcttgcaccacctttgccttccccttgacattcgtggg

SEQ ID NO: 111303 - DNA, 379 bp, Glycine max
agctttgagcaaatttaaatgacattaacattatacacggatgtccggttgagtcccgtaatatatcgagacgctccaaattgaaaacgaaaactcttagaaaattgaggcgacgataactttttactcggatgcccgacagagtgttgtaatttatggagagattctccaaattgaaaatggaagctcgcatcaaattggaacgacaataacatttcgctcggatggctgaatgactcccggtataggtggggagtctcaaaattttaatccgaagctctaagaaaattggagtgacaataactttatacatggatgtccggttgagtcctctaatatatcgagacgctccaaattgaaaacagaagctcgtgagaaa

SEQ ID NO: 111304 - DNA, 452 bp, Glycine max
  unsure (1)..(452): unsure at all n locations
ntcacaatatccaaacaattcaatcccatttgtcatgaatctaccttaaacaatgaaaaacagagtggaggcaaaaatctttgcacaagattcattcaaactccatagagatatttgctaccctcatacctcagcaaaatcctctttgtttcgattcgttaaccattggattaccttgaaaatttaacaaggggttcctaatacagaaatctaaattttgaccgttgggatctgctagaaaatgtctagaacacgagatatactacctttcctgtgacagcaaaaactagaactgcacaaccatttttttctgcataattggcagaatttgctgcaggcaccaggcaccaagtcaataatgaattccacttctctcttaggtggtaattcacaaatgtcatcaagaaagacctctgggaattctgacaccaccggtatactgttaacttcag

SEQ ID NO: 111305 - DNA, 381 bp, Glycine max
agcttgccaacccatggaagctcctatatatctcccacactttttggggtgggccattcttggatggccttgattttctcagggtccacttggaccccatttctaccaactacaaaccctatgaaaactatattatctacacaaaaagtacacttctctatattagcatagagggtgtttttcctaaggactaaaagaacttgcctgagatgtcctaagtgatcatctaagcacctactggacactaaaatatcatcaaaataaacaactaccaatctacctatgaaatcccttaagacatgatgcataagccttataaaggggcttggtgcatttgtgaacccaaaaggcatcactagccattcatacaaaccaaacttg

SEQ ID NO: 111306 - DNA, 450 bp, Glycine max
  unsure (1)..(450): unsure at all n locations
tctaatcctgagggtttatggtgcttccttatggatttcaatagcatcagaagccaggatgaaagaacaggctcatctcaaaggagtgtgggcacatatgatagttctggtttcaatgattggatatcagacatggaaattccagaaattaaaagctttggtagcagatttacttggtgtaggccaaatggatctgtgaggagtagactcgatagatgcttggtttcagaacagtggctacttaaatggcctgattcttcacaacaagtactccacaaggattattgtgatcactgtccaattattttgaaaacagagctggtggattggggccctaagccatttagggtgatggactgttggcttaaaaataaagagtatcaaagactgattaaagaagtgtggtgtggtgaccagcaacttggatggnggagtattgtgcttaaaaac

SEQ ID NO: 111307 - DNA, 376 bp, Glycine max
agcttttagaagattttacgatcttttgtcttagcgatggccggaaccctaaccggacgacctttccgacgccggtgaacgcataacagttttcaaagagagtgccgattcatatgatatggtagggtgtgtgaggagcactggatcttttctaatccgagggatataagatagaatgaacctatatttgagcataactcgtggttgggttattcgatggcgcacacgtgtgtcgtataaaataaatttggaccgttgctcaggtgcactaacttccacgacatgcaattggtgaggtgcaagagagacagcacggggagaaattttaagatgtattggggaaatgggaaaggaggaaagtaattgaatataaaga

SEQ ID NO: 111308 - DNA, 454 bp, Glycine max
  unsure (1)..(454): unsure at all n locations
ntgatgctgcagctagttcgtcactctccgtacctctgcacattataacagggataagcatcaaacctaacaaccaacagcatcctatcaaaagctcagatcctctaagtctaatctagagatcaccaatgatcagcggcaaacggccctatatattacactgattgattaggaattgaagcagtgtatcactgtatctaatttgtacacaaaacttaccatagtataatcatgataaacataagagaaaacggtcaatgcattggatttacattgttgtccaattgcaaacagccacgtatagtaagtctgttgactttaacaacaattaccttaaaagccatacctatcatgattttttatttaatccatttccactataagtggatagaaattaaactctaaacataaacacttaattaccaaacaaatccaagtagcaaataacatttga

SEQ ID NO: 111309 - DNA, 387 bp, Glycine max
agcttatgttcagcatcacctctctatgacataggctttattctattattctatagtctttaacacctatatatatgcaagcgaataaagcaaccttatcatacttgtagtaatttctgtaccaaaaaaaaaaaactgtttgtacctagaaaacttgtaatcagtgtaaccacacaagactcttaagtttttatcacaacttaaaacctttagttatgtagaaaaatgaacttgcaaatagcagctatctatgaataattctaggaaaccctaacacttttctcacatcatatcataaataataccattttgaaaattagtgtctaattaatgcaaagaagtcataattcgtttcaaattctgagttttttgctataatttatatat

SEQ ID NO: 111310 - DNA, 449 bp, Glycine max
  unsure (1)..(449): unsure at all n locations
actccgctgtataattggatatgtatattacatgttaatatattcctaagaatcaactgttaatttgtgaaacaaacacgctctcaatgttaagcaacttttaagtttcaaatattttttattttttattttagtatattgaatattaagttaataaacttaaaagtatgtgaagaaaatatttaataaaaaataattatattaataaactaaacaaactgaactcaaatttcatatgtttcaaattattgaagtttttttgctgtataatatgttaattaagttttaaaaaaaactttatattccacttattaaacaattgtcaaatttaagcattacactattttattaatcaaatctaaatttcaattactcttaaataaatgcttcaataaanacttacaatttaatatctaaactaatggaatgtagctctcatgacaaaaata

SEQ ID NO: 111311 - DNA, 370 bp, Glycine max
cggatttctaagtcgcctgcagctgctaacttttgaggagtcttttttttcgagaggtcacattgcgattgatgcattttcattctcgatttgataacgcaatataccccaccgctgacgagcttaacccctcattagatcaaatctttgtgggagatgcctaacattatgcataactttccccatgaacgttgaagttgtattattcattaacttcgtggaccagacagttcgaccgctccgtcaggccttttcctgcttgggaatacagactgggttgcaatactctgacccaccggacacgtgttgggtccacaccagcggagaaaccctctggcgggttacctgtgggatttatcagtcttgtcgg

SEQ ID NO: 111312 - DNA, 449 bp, Glycine max
  unsure (1)..(449): unsure at all n locations
ggcttgtgtggcttctatggaggctgtatctttgttcttcaatggggtcctttaatggtgattttccaccatggagatgcagcggaagacaaaggaaaagaggtgagaggaggcgtcatccattaaggaataagccatggaagatagagcttcaccaccaagatgagccttggataagaagctnggagaggatgcttcaatggaggaaaagaaagagggagagaaagagagaggggggagcacgaatttgaaggaagaaaaagggagagaaattgaactttgagttgtgtctcacaagactctcattcatcaaagttacaacaagtgttacacatgcttctatttatagactaggtagcttccttgagaagctntcttngaaaaacttccttgagaagcttctttgagaaaactctcttgagaagctagagcttagctacacacacccc

SEQ ID NO: 111313 - DNA, 379 bp, Glycine max
agcttcgtatcaaatagtattgttgtttttaaaaagtgttaaatataatttgaaggaaaataatagattcgtgcggctttacaaaagttgtttcgtactaaacattattttccattaaagttttgaattgtcaactttaattcttgcctgcaaaattcatttaaaaaccactattctactggtgtgtatatcgtgacaatgacaaaagccatcaacattcaactacctccttgctcttcctgacctcttccacaacataccttgactttgatcaagttccaaaccaacagttcactgggaattaattactactaaatgaatgattaaaaggttagtaaattttccaatttttatatttaaagacgctccttcactattc

SEQ ID NO: 111314 - DNA, 447 bp, Glycine max
  unsure (1)..(447): unsure at all n locations
ngatgtttcgtggccttggaacatgtgcttttgctctctttttttatcaagccattttgggcctagtgcttgttccctcatcaagtctataatattagccattagaatacagtggattagggtaatgctgaacttgtattatttttcacgccactcttgaccttaagcttgttaacaatgctttgagtatatgttgataatgataagttaaagagatggcggaaattacacttttgaagtgtgataaagataaaagtagtatttttaagaactagaaagtccaactaaataagttgcaactacttttaaagttgctatactttgcaagttccgaaaacctctggtgtcttgacctatttggcatattgagttctcatgttcagagggaattctgttgtagttgctacgaatgcatttgctggaaacaaaatgatgtaataatacaga

SEQ ID NO: 111315 - DNA, 396 bp, Glycine max
cgccgcatgcaagcttcaacatcagaccactttctttgttctttaactacttcacatggacttgatggggcctatgcaggttgaaagccttggaggaaagaggtatgcctatgttgttgtggatgatttctccagatttacctgggtcaactttatcagagagaattcagatacctttgaagtattcaaagagttgagtctaagacttcaaagagaaaaggattgtgtcatcaagagaatcaggagtgaccatggcagagaatttgaaaacagcaggttcactgaattctgcacatctaaaggcatcactcatgagttctctgcagccattacaccacaacagaatggcatagttgaaaggaaaaacaggactctgcaagaggctgcttaggtcat

SEQ ID NO: 111316 - DNA, 426 bp, Glycine max
  unsure (1)..(426): unsure at all n locations
agatggccatttcagtgctagtattatttttgacaatgcttacaaagttgagctgcccggtgagtataatgttaattccaccttcaatgtctctgatttattactttttgatgcagatggagaatccgatttgaggacaaatccttctcaagaaggagataatgatgaggacatgttcaagagctaaggcaaagatccacttgaaggacttggaggacctattacaagggctagagcacggaaagccaaagaagctcttcaacaagtgctgtccatactatttgaatacaatcccaactttcaatgataaaantccaacgttgtgagttgtatcatggcccatatggatgaagactaaatgacaccactctgtctcaattctaaagtgttcactttgcctaattatggcccaatccttgtgaagtt

SEQ ID NO: 111317 - DNA, 386 bp, Glycine max
agcttgtaggattatggggtacccttcttatgtggtactaggtggcggtcgggcgatggtgcacaacaagttttccacatccacaatgcgcgcataaacccaccatcccctgttgcccacctccaactgagctcacgtactcccacgtaacccatatcctcgtttctctcaacaccgggtccccatcaatcctcctaagcttccacaacatccaagcaaaacaacatttaaacagcacaagctatcacagccaagcaaaacaaagcaaaggcagaaaactctgctcatcacatcaaccaaaatcacagcttttctcacgtaaagaccacagtaacaattccttcgattcaatttgttaaccgttggatcgactccaaaattttact

SEQ ID NO: 111318 - DNA, 459 bp, Glycine max
tactcagcttacagatatagaccatcgtagcctattttctgtttatctggtgaacttgcatgtgctttatgtttatctattgggcgaggaaagtgatcttgaagcaatggattcaacgaataactgcatccttgaaaacttatttgagaaggcagtgacatttgatctactgtctggcattttagattctgaggtaagagagctggacagtttcatggacactctccaagaagaaattgttgatgctcgtcataaaatattttcatgcaaacatttaactgaggttttctttatgatggacaaaaaattgcatggctctaaagagtctgtgaagcagtttcaacagcagttattggagttgaaaattcagtcatcccagctacagaaaaccattgaggcttttcgacatgagaattgtaagttgaaatttttactcagaatatttttgctcaacatatt

SEQ ID NO: 111319 - DNA, 365 bp, Glycine max
ctgcaagcttatatatatcgtgatgctcttacttatttatgaagcccatcgcaaatacgaacgggcataacttttcctccggatcttcgaataaggaaagtaacctatcgtgacggtaaaaatttaacatggaagtactctggtgaattacgacgggccttaatatttaaccgggaggcccattgggggccataatatatcatcgccctctaaagtagaaatggactgaccactcaaattcggacaaccataacgtttgacttcaaatcccagatgaagctaatattttcttgaaatgctcttaggaaaaaaatgacacccaccgctaatccaacgacaatattttttctccgaatcttcataag

SEQ ID NO: 111320 - DNA, 416 bp, Glycine max
  unsure (1)..(416): unsure at all n locations
caacacanaatctaggtgtgcaaaacccttcattttaatggattttcaaggtttggagagtgaaatttataatgaggtaaattggaagcaaactctcaccttacaccagnncataccatccattgagacttgttcaaactggattcacacctacaatctcaccgaatcaaaatatgactcttcaacacccaaatttgccctagaaaaggctctttgttcactttggacattcatttatttctctctagcacagnccaagctttgtaataagtnctaaatgacatttcaagctantattaactcactttaacctccatttaccacataatttaaacttatccttcccactgtacaggcctcctctntttccactcattacaccacattctcactttctaaccctaccttatgtctac

SEQ ID NO: 111321 - DNA, 382 bp, Glycine max
gccgcagcaagccgctgtgttaagtgagtggtattttaccttgaagacaaagactcgcgctgttcatttttttgatgccattcttcatttgccaaaaggaattcggcatggactaacccgatgaattctttatgtgtcggtatactcccttcttcaaaagaacaaaggactaaccggctgaattcttttgtgtctcccttctcccttgcggaagaattcaaaacgacacaggctgagaattcttttgattcttccctttcccatagacaaaagatttgaacggactaaccgcctgagaattcttttgtttcccccttcacaaagtttcgaaggactaacagcctaagaactttgtcttagcacattggagggtacattcttt

SEQ ID NO: 111322 - DNA, 442 bp, Glycine max
  unsure (1)..(442): unsure at all n locations
tctctataatacgggcttgttttgttctccataattatgttagaaggagggacacaagagatttggctattcttggaaacttagagaatgttaatcagctagaagctatagagaaattttttatggtggagataataatgatatggctgatcatgaagaatgggaataaccaactcaagcagatgttagatgcatggaaatcgtattgaaatcaattgccattagtgtcacacaagtttctttcatgtatttagttttaaaatgagcaaacattttaattttgattgtttggtactacaaataattaatgtgagtatagcaaatattttattctgtaaaatcttattaacatggttgttaactnttaaaaaaatatatgccgctttccttctatctattangcatatgtggatgttagcttaataaaaaaaatgggcatatg

SEQ ID NO: 111323 - DNA, 370 bp, Glycine max
tgctgggaatgaggaagtgcttaattatcattgttacgagcatcactcactggacgcttttcaatcgaatggtctcccacccccaatgcctgattgtgtcaggcatcactacttaagtgtcatccttacaattgtccatcttgagatctattttgaacgaacagttctcaacccctcaagtgtacgacctaaaaggcgagagtgcttgttgtgcttattcacctaatttattgggtagtctacaatccctcaattcctacttagccaaacctggttatgcaagtgatctcataactttgtagagatttatttgatatactattggatgaaatgtgtgtgcttgatcattgattacatatgcattcaactg

SEQ ID NO: 111324 - DNA, 444 bp, Glycine max
  unsure (1)..(444): unsure at all n locations
tagaagagaaccaagtcctttaagaggaaacttatattgtgcttgttagtgtctagctctactgagctttaaaagattggctaagattatgttcaaacataagcacttanacaatgaaggaaagctggagttgctgcacatgatgtccaacgctatgtcaaggaataagatcgggctgcacaatgcacaaggcaagataaaatgtcaaatgaagaattgaagttgcaggatccacgatgtccgatacaatgtcctgacatcctgcccgagaatactggagttgctgtacaatgcaagataaaagtcaagtgaagcattgaagctgcaggatccaagatgtcggatacgatgccctgacatctggcccgaanatactggacatataaatctgttatatctttaacagattattgtgcagttagcaagagataagaagatctatct

SEQ ID NO: 111325 - DNA, 378 bp, Glycine max
agcttgtaacagtgggaaaattcttttgttgacgtaactagttggagaaacctactcgcttgaaaaacaagatcatatacttttttaggtaatcaaactcatgccaatatgcagttggattgacttcatgaagatagctataacatccttaaccgtatccagggatttcactaggaataatatggggaatgatatctaaagataagtcatctacagatcgcattttgagattgcaaccacattctttcacttggaatgattgcttcctagaagaaactttaacatatttattttaatgatgatttataaacatgctatgattgcgacatgagatggaacaaatccaccatttgttgaacgaggtttggcaaataaaat

SEQ ID NO: 111326 - DNA, 450 bp, Glycine max
  unsure (1)..(450): unsure at all n locations
gacctatgatactcagcttaccctatcaagaatacttgaccctagttgtatcatggtgaccctaatggagaacgagctatgacaaccttcggaattatatccgatgatcgaaaaggatcaacgagagaatccttatcatgaaaccgaacccaacaccttaggacatagggaagatcagatcacatacatgggaactcgagtataacataatgaacagcatctcataatccaagtgttgaatgtagacgtagaccattaatcaatgccgtcaaagctattgtagccaccccactcttagcaacgaaattatcatccatcactagaaccatcttaatggatcgagcctaccacataattgccttagaatgtcacatggncaattctaggctcacacctattcaagatatactaacaccctacgctgtcctcatagtgacccacatggagtaa

SEQ ID NO: 111327 - DNA, 386 bp, Glycine max
agctttaacctcattgtctctcactttctttagatttgggagccaatccaatccttgtgtccggactctcagccacttatgatagccgccgatgatcccattactgcttcccctaagctctctgtcctttcttcacgccgcatcccatgccttgcgaactccttggagtaccctagcattgtggtcactgaaacctcgtgcgatgaaaggcgtgatgctttcgtctgatggtactcctctcatgggacatccttcgcatgaagatagaatcctgattcttccttccttctagcgagggaaccatttaacagacgcccctccatgctagccaagagttggtcccaattcgtctttcttttttcgacgcacgagcggtgaccttgtag

SEQ ID NO: 111328 - DNA, 398 bp, Glycine max
  unsure (1)..(398): unsure at all n locations
aagctccttcttccttggcttattccctagaggagggagcctcccctctnctcttctnnctttgccttcgctgcatctccatggtgtataancaccatggaaggaccnnattgaagctcaaagatccaacctccatagaagctccacaagcaagcttncatcaagtggtaatcagagcacaagagcttcaagtaggtgctccttaaacctccattaattttttgctttaccttctcttccattgttgtttcttcattttttctccatgtatctcctcacatgtcttgtgataaatgtttttaacatgattctttaaagtttccaccgactaaactcgctataaaccctanatttgattntctatgagtcaaatttcttggtcttgttcttgaaccatg

SEQ ID NO: 111329 - DNA, 375 bp, Glycine max
agcttgcatgatttactttttctctctttctcaagcaaattcttcttgatatcatcaaaatcttcatgatttacattctccccctttttgatgatgacaaccacctgtacgttaggagcaacaacaacagaaatatctatttgcctatagtttactcccccttggttttaccaatgatgcttatatggaaaaattgaagaatttctttttttcatatataaaaagttgtctcataaaacaatagataatttttcttactattttatcttttatctttctctccccctttgtcaacatcaaaaacaaatcatgaatagagaggagaaagatgttaccacttgttgcaatgtatgagaatcaagtgatattccaaag

SEQ ID NO: 111330 - DNA, 440 bp, Glycine max
  unsure (1)..(440): unsure at all n locations
ntgagacgcatgtgatcttttggcatcatctaaacatcggctggatcctttgtctacaatctccccctttttgatgatgacaatccctgaaatcaagacaaactatatacaagatgatagcacgttcacacaacccttactccccctatcttttggcatgtatgcctaactttacttaatgataaatttctaattgatttctaacccagaccatgcggcgagcatcatgactagaataatcaaatttccagtcatcaacaatggtgccctcaaaaggtgcaccttgactgggtaaatgagttaaagaaaataataaggactgatcaatgatcataggagtaccatgcacctcagaggaaataatgccatcttgaattttcaaattgcagtagaagacctttacaacgtcaggataatgtggcagtttaatgacatgaaat

SEQ ID NO: 111331 - DNA, 385 bp, Glycine max
agcttgtaggattatggggtacccatcacatgtggtactaggtggcggtcgggcgatggtgcacaacaagttttccacatccacaatgcgcgcataaacccaccatcccctgttgcccacctccaactgagctcacgtactcccacgtagcccatatcctcatttctctcaacaccgggtccccatcaatcctcccaagcttccacaacatccaagcaaaacaacattcaaacagcacaagctatcacagccaagaaaaacagagcaaaggcagaaaactctgccaaaacaccaaccaaatcacagcttttctcacttaaagaccccagtaacaatccttcgatccaattcgttaaccgttggatcgactccaaaattttactgg

SEQ ID NO: 111332 - DNA, 447 bp, Glycine max
  unsure (1)..(447): unsure at all n locations
tcagaataaagtgatgaggtagaagctctttggctaagcttgaaagagcccgggtagtcaaagagaagttcaagtccatagccatcaaagtctgaaaagagtatgatgaactaagggacgtcaatatggccacagctgaagccttggaacgagaaaccaagaaggcccgataggaagaacacaaccaaagcaaagttttgaggggctttatagggcagcaatactgagctcaagctccgaagaggtgaaaggaatcatcacgggtcaaaggcatgatcttgaaggacgagctaaaggtttgccttaagtcgaaaagaaatttgtcccaacagttangcgagactgaagggaatatgtgggccatcatcgataagtgcaaagagaagctaaatctagcggcgactcacgagcaaaggctagaggatgagtacgccaagatatcagcag

SEQ ID NO: 111333 - DNA, 381 bp, Glycine max
agctggtccttggattagacatgatgatacatgatttgggacttgtaggattcgatttgggcaaaattggatgaaggcaagagtggttttcgaaatttgcactttatgcagaatttgttgttgaaatgtgcagcagaattttgtataagtgcagaataatgctcgtgtttggctgattgtgaaaagggtagtacatatggggttctgaatatttgctagcagatcccaacggtcaaaatgtagacttatgtactagggacttccagtaaaattttccagtcgatccaacagtgaacgaattggaacgaaggaaatgtttctggtgtctttaagtgagaaaaagctgtgatttttggtatgagttttgggcagagttttctg

SEQ ID NO: 111334 - DNA, 350 bp, Glycine max
ctttacttatgaagatggacgccctgtagaaggtaagggtgtatggagaaaaataatagatagggtgcaggagacatatcatttctgacttaaatggtaaagactttgcatatgatggggagaaaagtctgtttactgctggctctcttcctcacaacacgcttgagtttgaagttgttcttgatgatgtcacctctaacacgttgaagacattagagagcatttagttgttgccttgctttcttattgcttttatctctcaaacccggccgcctttttcccccttattctacttcctccttcgaacaattatccttgatctccaccttgcctctaaccacctaatactc

SEQ ID NO: 111335 - DNA, 404 bp, Glycine max
ggatcttaatcacctgcggctgcagctgagatgaggaagtgtagattgttatcttcctgcttttattcgttgaccacagagtggtacctggagatgtgtcgcgggggtcaggagaccttgtggacgtcaggtggggtgccattgcccaaaaccaagcttgaccaatcccgacccaacccgggcatagtcggtcagtgagaacctgtgatgtacctaagcaggcgagctcctggcaatcaacagataaaaggaacaaagaccacaaagcaagggggcttgtggtggctggccagctgagaattttgtgtgtgggttgtggcctctggtaatcgattaccaagggttggtaatcgattacaaggcttaaaaatgaagacaggaggttaagatggtctctggtaatc

SEQ ID NO: 111336 - DNA, 395 bp, Glycine max
ttaattgtttatctcctaataccttgtttagattctatgagagcatatggttcaaagcaaatatactctaaattctggggacgacattcaattataatgaaaagaaaaaggttaatcatcagcacacacaacaaataagttgtatgttaaaaaaaaaagaataatccacaagaagatgagctgtcaagtttgctaagcgcaccgctctaggtcatcaagcacaccgctttagctcatcggctaagcgaaataagcacgctaagccaaaatccacttatgcgcgctaagcgatctagatctgcgctaagcacacgagcaagaacaaggccacctatttaagcctgagatcaaatttgcaaaggagtttggcacttttcttgagaagctcaacatgc

SEQ ID NO: 111337 - DNA, 385 bp, Glycine max
agcttgaggacgcttcagtcgctggagttgatttcttcccgaggtttctactatcataccatgccaagcaaatagcagaacttaatataatatccacaggcaaatctaaatcacgttcaacaacttgaattccttctttctccatagcaagaattaccaggtaagagcttcttctagacattatcatttccttatctacattttgagtatttacgatcataactgttccaggaaaaacttccatgcttttatggccatgctcagttttcacagcaggaactagcggcatgtgattatctgcttcaggtgcaaccttggaagaatttttatcatagctttgctccacaggacaaaagttcagtaatctctccaagttctggttcat

SEQ ID NO: 111338 - DNA, 435 bp, Glycine max
  unsure (1)..(435): unsure at all n locations
tactcagcttaattacgtcctctntgtgtcgatatatactatgtattaatatggcaataactgcaaatgcatgcaatgcactntgtaattatgttattattaccataattgcatagttgcaattcgcaatttaagatgttggacgattagcctaattaaccaaaagggttcactaacaatttcatcagtgataatagcattatattaaatagctattagctactaggtactctataattaggatcacgccattagatgtttttagtgaggatgacatagtatctcattcaatgagtatgaagatgaatatatagtaaccagtttttattttctactagtataaatattaataattattaaatattctactttgtgtttgtaattaaaataaatcatttgagatcatgttttgggcttggaaaatgagaaaatgag

SEQ ID NO: 111339 - DNA, 414 bp, Glycine max
gatcctctatagtacaacccgcgcgcatgcaagcttcaataggaagcaacctgctttcttttgcaacctcctcccccattttttctataaatggacatggggggctaaggggaaggggttcaacacccttgttattcaaatttcacttaaaattattgaggagaagaagaaagaataagataatcacggccgaggtgcttctgtaacgcttatgtgatgtttccgtgatcaattccatgaacattcttcattgttcttcattcgctcttcgtcgatcatcgatcttcaatcggatagttttcaattttgaagctttgaattcactctatgcacccttaggggtccattcttgctttgtatgtctccacctcctcttatatactttcggtattctttttctttcttctaaatgag

SEQ ID NO: 111340 - DNA, 431 bp, Glycine max
  unsure (1)..(431): unsure at all n locations
aaaagaatattaagtgcttggaaaagttttatnttagtgacccctatataacactcctcccatgagttagaatcacaaccacatgatcgtgggcttatgttttaattttaagatagataattgagaaccacaagaataattaggtccttgtttctactgctttgcttgcaattgatacacatctttgatatttgattattatcatatgttgtacattgtattgactgtgctactgcatataccatgcatgaaaaacgtgcctataatatggttaaatatcataattgattgattaatctcatacttccttacaagaggtatgctataatagcattttgccaccaaaaaaatttgcttctacatcaataaataatgaattcatgaatatatgttttaacaatatattcttaggtaattgaaaattaagagac

SEQ ID NO: 111341 - DNA, 386 bp, Glycine max
agctttatattactatactatgtatttttctagtgtgtaaaacatggtttctactttaatttctagtgtctcacaagcttttgttgatcataagggccactaaagcccgcaaggtatctctcttggccacacctttgactgtagaggtagctgagaggttgggtttcgcgaaccatatcattgaagaggctcaattgttaaagaaaagcagggaagttgcagatgccattgtgaaaactaaccaagacttggttttgaagtacaaggcggtcatcaatgatggcctcaagctggatcttggccgcgcactttctcttaaaaatgtgagtgttgtgtaaaatttttgtatctataattacataaaatgaattcaatgaggcaggttg

SEQ ID NO: 111342 - DNA, 386 bp, Glycine max
  unsure (1)..(386): unsure at all n locations
aaaaaactaacatatgtagtgacaagtgatcaagtactggatgaagtggtgcttgaggctgttaaagttatgtttgaaaaagtgctacaaaaggcagagtttgatgctagagtgcaatcaactttggaaacaagtgctgaaatattttttgtanggtctgttgagagagatgcagagctccaactagctattgtacaagaagaaataattgaagaagaaagaaaggttctagatgctacaatgctttagtctgtcattgaatttcattgcaaggatatgatgttgttgttggtttaaactctattgaaacacaccttggagttgcacccttgcattctcgtccagtcccaactgatgatgaagctactggttgtgctctgcttact

SEQ ID NO: 111343 - DNA, 298 bp, Glycine max
agcttctagcgcaatggactttctttgttataatgcctttgatagcccccttgagccttgtttccctttccttgtgttgaagctcactacaagccttaaatgaaaaaccatgatattaccatattcttcagaaataatggagctctggaatcgttttgggaataagtgtggggggattctgtatgttctacaaccggtgatgttcgctatgtcttccgatatcttgagggcgcaactagtggatagatgttatggattacttgtcgactagcttttttactaggtgtcttctcctttg

SEQ ID NO: 111344 - DNA, 452 bp, Glycine max
  unsure (1)..(452): unsure at all n locations
ntggagtttccaagtgccaattcgtcctcttctttattccagtcttcttctggcttcaattcatcagtgggcgttccttctgtgtccagcatcttgggatgttcccagcctttgatgacagctttccaggttctgctatccagtgatttgaggaaggccaccattcttgctttccagtattcatagttgcttccatcaagaattggtggtctgttcactggtcctccttctttctccatgttcatcagaatttatctccccagatctcactctgtgatttcgagtgttggctctgataccaattgaaattctgataccacgggacagatgtcgtacaggatgtcacgacatcacgcttcagaacatgcagtttatgtgtgtccgtatgaacagagtcaacaagtaaataacacaagagaattgtgtacccagttcggtgcaacctcacctac

SEQ ID NO: 111345 - DNA, 380 bp, Glycine max
agcttatcctttgataggcctttatctatatcatattctcatctactctaaactatataacacaatacaataccaaacttaaacttggtttggcagatgaaaaccaaaatcaaaatacagttggtgcacttgttgggcaataggaataatgacattatatagtattgtttatattccaatccaccaattattttcttatatgtaagtctatggggagtattaaataataataataataataattacaaagatttaatatttaagttaatttttgttcatggtattttattttacattatataatttgtaattaaatgattctttattagtaaaacataaaaataaaaataaaaagttatgcactaagtaaaataatttta

SEQ ID NO: 111346 - DNA, 447 bp, Glycine max
tatggcagcgtgaaatatgagatagttcgttgaaataaaattatgataactaattcattattcttctatcaaacattatagttttaaagagcctaaaaatatatttacaaaaaaaaaatcaaataaagaaagcataccttgatacttaggcatgccacactcttcatttccaatggcaacaattctcaagtcaaatggctcaggatgtcccatggaagccctaagagatccccattgtgattttggagaacctctagcaaactcgattccgtctagagcttcctatatattaaataatgaaaagatataaaaaaaaatagtaactataaaaattaagaaataccaactcacaaaaaaaaaaaatgaaataaaagagaaggaaattatacttggataaaaggcgcgatggcagatgtattaacttcgtcgtaaggctgagacctaaac

SEQ ID NO: 111347 - DNA, 426 bp, Glycine max
  unsure (1)..(426): unsure at all n locations
atagccatgcatttctttggaggtacacacctccaaacaaagaggaagaagaaaccaccgacatcagtttgttgtcggccaaagtaacaaatatcacggggctgagcggtatgacccgcagcggtcgtgtatntgcgccccccaacctaccaattcatcccacgaacgtcaaggggaaggcaaaggtagtggaagaacaagatgataaaacgcccctcactccgaatgaggatattcctgcgaaaggccttccggagaaaagggatggttatggcaagaatgaggtgtcactataggaagccagcgagtttctccacataacttaacaaatccagttcaatgttattgagaaactcaacaaaaccccngtcaaggtctcgctattggaantacctatgaactccgaacctcatcgggctttgctag

SEQ ID NO: 111348 - DNA, 378 bp, Glycine max
agcttattgacactctgaatgttattaccagtctagtagctaattgacacttttcaattctcttcttaccacccagtaaaagggaaggtcgatcgcacgttcatcctaaggaatggaaatactgatttggattatttgccaactactgactcctcatctaatcctagaaataagcagtctaaactctcaagtttcaagacaaccaattcaatgaacttgtaattttatctggaaataaaaaataaaataacaaagtccagaaataattaaaaatgaccaaagtcccatcgaaagaaccgtgaaggatttgttcataaacaaccaaaatactccactgcacactcacaaataagagtgttaacagaaagcactgatgtg

SEQ ID NO: 111349 - DNA, 437 bp, Glycine max
  unsure (1)..(437): unsure at all n locations
atatatttttcgttcatgtgatttagtattttgtttttttttttcattcctataatttttttttcgttttagtccttgtaaaatatatttattttattttttgtccttcaagatttttagataatgttttgaatagtgaaaaaaatatattatctaaaatgctttagaaatgaaaaattaaacaaaacacatttggtaaggactgatacaaatttttttacaaaaacaaaaaaaatgtgattaaatcaataataaatgagtttatcaaaaagaagctgagtttgattttcgtaaatatatatctttagatagtgacaaaaaaacttccagtgtntataaattaaacattantttcagtgccactacgtattaaactgaaatnttaaaaaatgcctccagggttctcaaaaatcanaaaccttaattgttatgtcatg

SEQ ID NO: 111350 - DNA, 379 bp, Glycine max
agcttcatggacctaagtcttatgtgttatcatctgatcttcagtcatcctctacaaattataggtgccttcatattgaattgtaggaagtttgagatgttgaataaacaagtagctgtcaacatcctttttgaagtagacacaagcatcatcaaagtggtactttctaacaggacgtagcacttgaatgacatcgtgatgctcagtattattcactttcatcatagccagtagtgaaggcttttttatagtccatccatacaatttgattccataatgtcctggcatcataaacattaggagtgcgaataacttctttgcactaaataatgggcccagttgcaaggaaaattaacaattcccacccttatcttttttg

SEQ ID NO: 111351 - DNA, 338 bp, Glycine max
  unsure (1)..(338): unsure at all n locations
gacgtaaagatctttttttttatctatttaatgatgccctgtatggtcactatgctatcagatcttnattctatnatgcttttgccttgatcatgtagatgcatgtgtttttaggatcattcaacagtggaaactgtcctgattcttataacttgatatgacggggcttgtttgtcgtattttcacgaagaatcggggtacggtaacctagttgttatatgtttgtcttaatgcactcctggccgagtttattccaacaccacgaatctccggattattcttgattaggattatgcangactatcatgacgaattcgcctctactatttaggaaacac

SEQ ID NO: 111352 - DNA, 249 bp, Glycine max
  unsure (1)..(249): unsure at all n locations
agctactaatgctcgattttatgttttngacaagaatatcttcagactgtgcatacatgctcggtggcccatgatgcacgggagatcctgaaatcaactcatgaatgaaccttctacaggagaatgttcttgagcgcacgatttgtctacaaattttaaaatttttaaatgaaagacgaacaatgttttctctgatcttcacatgatacttggggaaattagcatagccttcactggcctttgagaaag

SEQ ID NO: 111353 - DNA, 452 bp, Glycine max
  unsure (1)..(452): unsure at all n locations
tcgtccgcagatccctcatgtaagactatgttctgatttatacaaccatcttagatttagactaacttaaactgagtttcgtccgcatgatccctcatgtaagactagactaagctcaagtagcttatgaaagtttagcctaatntagcctaagctttgtccgcagatccctcatgtaagactaggcctaaactaaacaacattattgtaacaacataattaaaaccaaaacttaacccgcagatcccttatgtgagactaagtttcgatcttgcttcaatcaagttctaaggcaacagtacatttcccaatgctaaagtcacctaactgtgcacacaaatgggtgatcagaccaaaagcatacaaacagtaagcattgaaggaaacattgaacacataaaacataatcaattagatattaggtatttacatcaactgttcattatatatcc

SEQ ID NO: 111354 - DNA, 370 bp, Glycine max
cccgggatccttaacccacctgcggctgcaactagacgacctgtttgttctttatgactttattatttattaggacgagtttgaatatgatgtagaacaaagtgaatgtgagccttttactcctttgaaaggcttgtttttaaaaatgttttaaaaatacttttaattaatatttgaatttttattcctttattagtatacatgtgaggagtagagggtatctcaacatatatatatatatatatatatatatatatatatatggacggtttacttttctggggacatgagtcttattcattttctatttaatagttctatctccaaaatggggggaattacctaaattgtaaccgataaaaagtgttta

SEQ ID NO: 111355 - DNA, 374 bp, Glycine max
  unsure (1)..(374): unsure at all n locations
gctgncatacttgcgcgccaccacctttttgttttttgttgaaatcttggcgcaccggacaaacaagctggaccttatnccttnctttttttatgattcactcacgtttcattgattcaacctttcttctgttncttcanngctggcaaggtcggatnntagttcaacgagcttcgttgacccccgccacaaaatgcataaatggttggtgttagggagtgcttggtttggtttggttagttagagggaaagggaaaaggttatagacaaaaactaaagggtgcttgtctgagtttaataaatatgttttcaaacacaaatcatatgatttttaccaaaatccacgtttataacaaaagacttgagtgataata

SEQ ID NO: 111356 - DNA, 372 bp, Glycine max
agcttggtaatgttgttgaagggattatttctttccctgtcattcaaagagagcttccccggcaggtatatatatagatatatatacatttttggggttggatatgaatgtttgttatatgtgcaattgatgtgtttagtatgattaggagctagtttacattattacattttgtgttggatattggggtctgttttccgagattatacttcctgtttttttttttttaatgggtgttacttgtacattggtttgggatactaacttgatggatgtttgtattggattaacaactgcgctcaggttacactttcaattttgaagccgggaagcaagctttaataaatgtgaactcccttgctttttttcaaa

SEQ ID NO: 111357 - DNA, 463 bp, Glycine max
ctcagcttaacgttatctcttgtgcagaatcttcttttcataattgatcatctaactttaaagacaacataaatttcaaaagaatgaatgaagaaatgctaaatggatacaaacgtacacaaacacacagtacattaataaacagtcactgtggccagaaggcttctgcagcaatgtaaccaggattcagaattaatctagttagtatatcatacaatgcatggccagttacaatacatacacataaccataacagtaacattaatggagcagtaatatgacactattgaattttttgttatggaaacttcaaagaaaaaacacaagcattttggccaaacaaggtattagtacatagctacatggaagagacctacattaaaatggctgcctaactatttgcaattataatccagtagtgaaataagatggggcaattatgacaatctcggaaagcctctgg

SEQ ID NO: 111358 - DNA, 360 bp, Glycine max
agcttccgttttcaatttcgagcgtttctttatattacagggctcaatagcacatccgagttaaaaattattgtcgtctgacttttcttagagcttccgttttcaatttcaagcgtctcgatatattatagggctcaatcggacatccgaattaaaagctattgtcgtttgacattttttagagcttccgttgtcaatttcgagcgtcttcatatattacagggctcaatacgacatccgagtttaaagttattgacgcttgacttttcttagagcttccgtttttaatttcgagcgtctcgatatattactaggctctatcatacatccgcagtaaaagttattgtctgttgatttttc

SEQ ID NO: 111359 - DNA, 444 bp, Glycine max
  unsure (1)..(444): unsure at all n locations
aagctgaacaatttatcaataaacacaagttgagttntattcagaanattagagtgtatctcttttatcttagtgagagtgattctcctaaattcttgagtgattcaagaacaccttggctgtatcaaaggactttcacaacctttgtgtgttgccctcgctggaaagagtgattctttccttcctttcatcatcacccttgttctttcaacccacaattccaaaaaatccacctctgcccagaattatctcgtggccataactcccattttacgcactcaaattaagtgattcttgagcctaaattgaatttcaaaacgagacctttcacctcgttttggaatcacctcatttggagccctgtagcttcagttattgccatttctatatttctgtccagccaccacttaacctacgttttaccatcccattcatccattttat

SEQ ID NO: 111360 - DNA, 354 bp, Glycine max
gagaaccatgaccctcatagtgtggtgttgtgtttaggggacggttagattttgcatcaactccgacataggccatatattataacctttgttcaagtaccttgctcctatcagcttcctacatgagatatacatttcaaattttccattgtgcttaagaaacaactacagcatttgcagctgatatttctatcttttctctacatttttcttacttgaaggacattaacaaaagccagtttttttatatatttttcacacgtttttgttttggtatttgacattttttatgcattaattaattatattatattaacatacaattagagcatgagagatgaaatctattaacag

SEQ ID NO: 111361 - DNA, 434 bp, Glycine max
  unsure (1)..(434): unsure at all n locations
tagacaacatgcatntcattttttttcttgtcagattcatacagattgttcacattcatgggagcaagacgcctaaagggtaccttcacatcaagatgcaaatattgtaataactctttaaaccttctatgttcaacaaaagagaatggaagatcatgctcaataatcatcatacatataccacactttgatctatttttttatttcttaatctcccaacatgatcgagaataatatttccaacatcattattagaatgtgtcttaaaatatacatcacatttccccatacgacattgtaaggttgaagtcccattcttattgtcaccgcccacataatctttcaaacaatatttgcatttactcctcacttttccatcactatgcataacaggtttctcaaaaaaattccgcatatgtgatgaataatttcta

SEQ ID NO: 111362 - DNA, 384 bp, Glycine max
catgcatgcaatgcttttagcacgtgtcaattttaactacatagttcaatctgacgttggagcgcttgcaatgtgatcgcatcatggctcggctctatctttttatgatggagaaatattaatttggttagaatattaattaatgttagtagtagaaggaataaaacttgtgatttttttatcaataattaaccattcatctcaccttatcttatgattaaacgaccatgtaattccaccattttcaaacaactgaagcactcttccatttgaagcctggaagtcttttaattggaccttatatgttcaaactgaacatgttccatatggtgtttcacttttctatatggatatttaaactcatggaagacatgatgtggtact

SEQ ID NO: 111363 - DNA, 415 bp, Glycine max
  unsure (1)..(415): unsure at all n locations
cgctgaagcanaatttgttttcttgatgaattattcttatggcaggctgagaggctatgtccttcccaatatgtcctggaaacatggcaataccatgccctttgtcctgaaaagagtttgcagccctgccgggaacattcccatgcaactctgtggagggtacaacattaaaattgctgggcttagccccgtatagtgatgcagaacctgctgctgctggccagaatgaattcatcctcgcaatttgctggtgacacaatatattgcgagcaatgtatcagtgggttgcacaccttttctgccgaggctggttaaaaagaagatggggaggctgtaatttaagggagaaagtgattaatcaggaattcaattccacattgtttcataatcataacgtttaaaaaggggaaagtac

SEQ ID NO: 111364 - DNA, 350 bp, Glycine max
caccgcagctgcagcttattcactatcattttttcttatggtcagactgaacgaaccattcatactctagatgatctacttcgggcgtgtattatagagcaacaaggtatctggatggattgtttgccattgattgagtttacttacaacaatatctaccaagccagtattggtatggctccttttgaagctctatatggacggaagtgcaaaactcctatttgttggtatgatgatggagaagcagtacttcttggacctgaaatgttactacagattaatgaacaagcgaggttgattctagagaatataaaagcatcttaggatatgcctaagatctattatgatat

SEQ ID NO: 111365 - DNA, 446 bp, Glycine max
  unsure (1)..(446): unsure at all n locations
cgcctcanagagatccaggaaggataaagcggctgttgaaccagttccactcccgaatatgacagccaccgttttatgagcgctgagcaccagcagcgcttcgaggccatcaagggatggtcatttctctgggagcgacgcgtccagctcaacgatgacgagtataccgacttccaggaggagatagttcgccggcggtgggcaaaactggttacccccatggccaagttcgacccagacatagtcctcgaattttatgccaatgcttggcctacagaggagggcgtgcgagatatgcgatcctangtgaggggtcagtggatcccgttcgatgcggatgctctcagccagttcctgggataccctttattgctagatgagggccacgaatgcgagtatggccagacgaggaacacgtccgaccggtttgatgatgaggccatcgc

SEQ ID NO: 111366 - DNA, 325 bp, Glycine max
  unsure (1)..(325): unsure at all n locations
gcagcaagngagggatggananttttttttgtgtgatgaacaaaagagcaaaacggaatatttaatgcgaaaaaggatggccctagggctgcaaactcgtcaatgcctggggtgtgggttatgaaaggggggaaaagaagtttttgaatgttaaaacgcccccccttttgtcattcttataatttggtgcaggggtggctactccatactatgctcactctgttcgttctacatattcccttgtgaggtgcatactgcgacatatctccctcccttttctttgattaacatatttgctgtcttgatgtattcttatggttcaggt

SEQ ID NO: 111367 - DNA, 368 bp, Glycine max
atatatatcgattcgctcagaattaaacatcagtaactctcacgaaattcatatagtcataactattcacacggatgtccgattcgggcgcataatatgtcgagaggctcgaaattgaacaacggaagctgttgagaaattcaactggtataaccttccacacggatgttcgaatcgggcgcataatatgtcgagaagctctatattgaacaacgaaaggtcttgacaaattcaaatggtcataacttttcacacggatgtccgattcaggcttataatatattgatacgctctaaattatccattcaaaactctcgccaaatttaaatggtcataactcttcacacggatatcccatcccggctcat

SEQ ID NO: 111368 - DNA, 381 bp, Glycine max
gcggctgcagcttgttactatataagttctcttgcccccagagagattggtgaagctgttgctcgttgatctttaaaattcataatgaggtagtatctagggaaagattcttttctcagatgaaatgacagtctattgatatgcatagctcactcttgaaagacagacttggaggcaacatgcaaggtttcttgattgttgttgaaaatcacaattaatatgctgattatattaataattgcagtttataggatcataatctctgatttagaggaaacataacatcctctatttatgtacaattaatgcaattaacctatataaacattcacccgctgtgtactctaatacggttttcagttcattatacctctgtgttct

SEQ ID NO: 111369 - DNA, 396 bp, Glycine max
  unsure (1)..(396): unsure at all n locations
catgcgaagtgggtggaattcctatttctattcccttatgntatcaaacataagaagggaaaaggtgatattgtacccgatgctctttcttggcgtcatgcattactttctatgcttgaaacaaaattgattggtcttgaatgtttgaaaagcatgtatgaaaatgatgaaaattttggagaaatttttaaaaattgtgaaaaattttcagaaaatggtttctttagacatgaaggctttcttttcaaagaaaacaaattgtgtgtgcctaaatgttctactacaaatttgcttgtttgtgaaccacatgaaggaggtttaatggggcatcttggggttccaaagactctacaaacattacaagaacatttttattggccctatatgaaaaaagat

SEQ ID NO: 111370 - DNA, 386 bp, Glycine max
agcttgcatatgtagcatggttatttttaaacaatagagatgacacaaaatcattaaaacaatatcaagtagacttaaaatctcaaatctattgttgatttctttgaattgtaacatgatcttatatgacacaaattgattatcccgataatagtaatcaacattaaatttagtattaaaaagaagataaatgctatcaacacactctctagcacattcttttaatcacactctaccgttttggttgaaatttattgaaaaagacaaaatttagaaggtcctacattatatttaaacaatttttaaaaggcactcaagagatgtgaaggtgtattatatatttgaggctcattaatcttggagtctccaaaacaaaaaaagggaga

SEQ ID NO: 111371 - DNA, 409 bp, Glycine max
  unsure (1)..(409): unsure at all n locations
cactnggaatctagacactccatcaacttgtctgtctatgatgggaaaagggtatgcgtcctttttgaccatgatgacattggcgagctaggtgaaatatctgacttttttgatcaagttggcattgaggagcttgtccagttattctctgaccgctttgcgttgttcttctcccatcttcctcttcttctgtgatatcaggttggcctgcgggcaaacttgtggaagataatgctggggtggattctcaccatgtcagatggttgccaagcaaacaagtccatgttcttttgtaggacatcagctatgcgtttatgctcatggctattgaggtccctactaagctgcatgagttgtccgggtttgggtcccaactatagcttgatgagctcttcaacaagctttgggc

SEQ ID NO: 111372 - DNA, 375 bp, Glycine max
agcttcttcgaagggcatggttatttccagtttcctgaaaatatctaaaaatctcgccagatgacgatctttttccttcttggaacgtaccacaagatatggtactttcacaccttcatccacagctttttcacttctactcttctttgcattcttattatttttttcttctttttcattttctatttctttttctacttctttttctttttcttgggccttcaattctttattcttggccattatttattcctctttttcttgattactttcacctctcaccttatttttcttgccatcagtacctttcttgtcaatagttttcttcttatgcacaacactatcctcatttttcttgattactttcacctctca

SEQ ID NO: 111373 - DNA, 439 bp, Glycine max
ggacactataaatctcagcttctaaggaggtgagcttagttatgagaggggtgtgtgtagctaagctctagcttctcaaggaagttttctcaaagaagcttctcaaggaagttttctcaagaaagcttctcaaggaagctacctagtttataaatagaagcatgtgtaacacttgttgtaactttgatgaatgagagtcttgtgagacacaactcaaagttcaaattctctccctttttcttccttcaatttcgtgctcccccctctctctttctctccctctgtcttttcctccattgaagcatcctctccaagcttcttatccaagggtcatcttggtggtgaagctccttcttccatggcttattccttaatggatggcgcctcctctcacctcttctcctttgtcttccgctgcatctccatggtggaaaatcac

SEQ ID NO: 111374 - DNA, 380 bp, Glycine max
agctttccagcttttcattggtgtattttgatctccttttggtgctctaaaatgtgggaatatgctcaaatatgtggggcaattttggtttgttttcttgcgtgattgggttgaattgggggtttgtatgggatggccctaagcctataatgcattttgaagcaatgggacatgccacattgtccccgttctcttgctattgatgcctaaacgcgcgcccaccaagtgttcggtgaaatgcctcaatggcattagcgcgtgatttttgtaaggaaacaacccatggggcattttggtttgcccatattttccattttttttgggacatgcattcatttccgaaagggctagagtaattgccccacatatatcctaggcct

SEQ ID NO: 111375 - DNA, 449 bp, Glycine max
  unsure (1)..(449): unsure at all n locations
ngccgccacggagttntccgactatgctcttgtgttgtggaacaagctacaaaaagagagagcaagaattgtggtttgaaagaacaagggtgatgatgaaaggaaggaaagaatcactctttccagcgagggcaacacacaaaggttgagaaagtcctttgatacagccaaggtgttcttgaatcactcaagaatttaggagaatcactctcactaagataaaagagataaactctaattttctgaataaaactcaacttgtgtttattgataaaatggttcagcttatatagaagctttacagcagattttagtaatgacccactaacctagaattaaaataacttaatgccattaacctagggaattaaaaaaaacttaatggctgagtgtaactgaaattgtggcaaccaaaagtcacccncaacagccaacaagtcagccaccat

SEQ ID NO: 111376 - DNA, 430 bp, Glycine max
  unsure (1)..(430): unsure at all n locations
attactaanacanacatatacagaagtacatatatatgctatgtcattgaatcaaaataaaacatatgttattaaatttagttataaatactacatttaataaatgtgataactaatagtatataatatgatatttaataaatgtaataacacacaaagaaaaatgtgaaatagccaacgaaatcagcaatgacgatacatccgtgctcttttaaaacagagaccgatttaacaactgaaagaatattagtcaacaaaactcagcaacacctcgtgaccgagggtaattcgaagcaactatttcgtctctaaatccgtctctaaacgaaatctttcataattgaaattgtacacatttagcgactgatattgagaactgaattaattaaattttaccacctgaattattcgactgctaatgacttgcaat

SEQ ID NO: 111377 - DNA, 242 bp, Glycine max
  unsure (1)..(242): unsure at all n locations
acatctcgatatattatgcacctgaatcgggcatctgagtgaaaagtgctgtcatatgatgtatccgagagcttccttgttcgatgttcaccgtcttcacatattattggcctgaatcggacattggagtcaaaagatatggcgaggtaaactttccatgtgcttccnnntttaatgttgagggttagatatagtatgcacctgaatcggacagctgagagaaaagttatgccctatgagat

SEQ ID NO: 111378 - DNA, 382 bp, Glycine max
  unsure (1)..(382): unsure at all n locations
agcttctatgagagaacttccttgttattctttatttnaactacacacacccatctaaaaactaggctcacctccatgagaagctgccttgagaagctagagctttgcttcacacggttataatagctgagctcaccggattgaccaaagaacatgaaaatacaaaaaaaaattcctactacaaagactactcaaaatgctctaaaatactaggctaaaaccctatactactagaatgggcaaaatacaaggcccaaaagaataaaacaacctattttactatttacaaagaagagtggacccaaccttggcccatgggctcaaaaatctaccctaaggttcatgagaaccctgaggtcttctatattcaactctagcccaa

SEQ ID NO: 111379 - DNA, 441 bp, Glycine max
  unsure (1)..(441): unsure at all n locations
tataatatattatcacgctcgaaattaaacatcatatgctctctataaattcaaatggtcataacttttcacctagatgtccgattatggcgaatcacatatcgagacgctcaagattgaacatcggaagcccttgagaaattctaatggtcataacttttaactctgatgtncgattcaggcgcatcacatatcgagacgctcgaanaggaacaacggaagctctcgagaaattcaaatggtcataactttccacactgaggtccgattaaggattataatatatcaagacgctcgaaattaaacatcgaaagctctcaagaaattcaattggtcatcacttttcacacggatgtccgattcgggcgcataatatattgatacgctcgaaactatacatcggaagctctcgagaaattcaaatggtcataacttttcaca

SEQ ID NO: 111380 - DNA, 452 bp, Glycine max
  unsure (1)..(452): unsure at all n locations
tcaagcctcgaagaccttactttaagttagatgagaggatctaatatttcatactcaaaagntaaaagatagatatgaatcatttataggactaatgaccaaaataaatttataaaaaaagataatgaactaagaatacattttataatatttggataaaacttacaaacaattggtaatctaaaagactttattaatcacgcactatctttaaaagaataaatagtttagacacacataaaaaatgagccaagcatctccttaaaagaaatctattgggtttttatttatcggaggcctaacaaaacataaactctaataaaacttgcaanttgttttcattgcttactcacttaaaatataccaacgctcttaaacatacatttactattacaattactattacgtgttgaacttgactcttcactcttcaattttagaatcaccaacct

SEQ ID NO: 111381 - DNA, 381 bp, Glycine max
gtacacccgcaggcatgcaagcttctagtgaaatggacttaccttgtttttattcctttgatagcccttttgagccttgtttccctttccttgttttgaagctcactacaagccttaagtgaaaaaccatgatattaccagatccttaaggaattttggagctttcgaattgttttgggaataagtgtggggggttattgtttcattggacaacttgatttgttggctatgcttcatgatgtattatgggccatacttgatgtacattgtatattggttaaatgttggacatgctgaatgaaatgttgtttctcaaaggtaatacataaaaaaaaaaattcgtaaaaagatagaagataaactctattatgttgaatgatt

SEQ ID NO: 111382 - DNA, 433 bp, Glycine max
  unsure (1)..(433): unsure at all n locations
aacaggtgagagtgtgatcttaaactgtgagtgatcgactagctntgagtaatagtctttgcatcaatctctgaaatttagaatgaaatgtatgaatgaggacatcatgaaggccatgattgtatatactatccaattgaccaaaatgcttaccttgaatgataattgtatcctttgcaccctttgtgagctaaattacattttcaaaattgaaccttgaacttgaatgaatatctcgagataccttgcttagattctaggagagcatatggttcaaggcaaatttaccccaaatttgggggagtggagttgattatgatgtaaagtaaaaggtaaagcattagcacacacaaaanataagttgggtgttaaaaaaaagagcaatcaaagaaaatgtgtgctattgtaatacggttgaattaaaattaaagta

SEQ ID NO: 111383 - DNA, 367 bp, Glycine max
  unsure (1)..(367): unsure at all n locations
agctttgatacacatgcaggttatttttaaaagttcttaacttgcacctttggtttcttaactattgtatttatgcaattttggcacctcatattcaaattatgtgagttaggtcttcttgaattataagtgtgtgttntttctccttcgattagtcagtcataaatatttaatatattttgtcaacgtgatactagatgatcacatataaattctcatgagaatggatgaattacttgacatgtatattgttgtgactcaatacacttttggtctctttgttgctccaatatgaagtaccaaaagaacatataagctctggatgttatattattattgaccagagataaccatttgttgtgagtat

SEQ ID NO: 111384 - DNA, 453 bp, Glycine max
  unsure (1)..(453): unsure at all n locations
tcttctcaagaggatcatagaacctgtaaccatattcattctcaccataactaatgaagatacactgccttgactttgcatccaacttggatctctcatcctttggaacatgcacaaaagccttataaccaaaaactcttaaatgatcatacttcacattcttgccaaaccaaattntgttaggcacctcaccattcaaagcaacaataggactaagatttggagtttataagattataaatgggttcatctataaagtgtctacataaagaaacttgacatcacactttaaccaaaaacttcaaggctcaggtttatggatcttctcctcacttatacagtgttcaacttttccacttctactcaatgtgagactttatggtccttggttcgttaactttatcttccaataaatatgatgtgattctaaaattaaatttgattctaccaatt

SEQ ID NO: 111385 - DNA, 202 bp, Glycine max
  unsure (1)..(202): unsure at all n locations
gctttttacctattgatgccaacttttaatatagttgcatctactgcctgtcaacataaaacctagcagacttttatgaatattctcaattatcaatggtgttcacacaatgccctatttctgaataaaactctgtctaataagcaacttccccganttctacccccccatcattcccttttaattttcaatactcggtgac

SEQ ID NO: 111386 - DNA, 360 bp, Glycine max
agctgctctagaagtacttctattttattaaacaaagaagcaacaaatgaaaggggcttcttcataagctaaaatgagttttccattgactaatctggagatggcatctcatcctttatagaagctatttgagagaacttctaccaaattagctaatgattagataatggagaactctttttagctcatggagaagttcatctcatattcctcttatattcttggcttaaaagtgcttttaaagaagctcacccaaacaagcctttaggatataaaggaaacctagaaagaatcgggggagagttatatctcaaatttcccacataaattattccttgtcaatcaaacccgttactaatc

SEQ ID NO: 111387 - DNA, 455 bp, Glycine max
  unsure (1)..(455): unsure at all n locations
ctcagctaataagggagagattntcggctgagttgcatcttcttaacacactntgtataattagggttgtgcaattataatatcccataatataaatttgtcaaaattatatgaaaatcttgccatttaattgctttaagtatttttttactattttcattagaaagacaaagtagtagttgttactatctgtgtaaagttgccataactatatccttactgtctacttttatttgaacgagtctttagtgatttcttcgaagaccaaaaaaaaaaaaaaagaagaagaaaaatactactacttcttaaacaacactactacttataaatgtggttgcaaacaagatgagaatcattaacggtacatacatattaatggttccgttacgtcacaacctttcccttgcccaatgtttcanacacacccactcttcatacacaagctacgtatacct

SEQ ID NO: 111388 - DNA, 370 bp, Glycine max
agcttgcctcaaagagatccattttgataaagcggctgaaggaaccagttccgctcccgaatatgacagccactgttttatgagcgctgagcaccatcagcgcttcgaggccatcaagggatggtcatttctcctggagcgacgcgttcagctcagggacgacgagtataccgacttccaggaggagatagtttaccggcggtgggcatcactggttacccccatggccaagttcgaccaagacatagtcctcgagttttatgccaatgcttggcctacagaggagggcgtgtgagatatgcgatcctgggagaggggtcactggatcccgttctatgcggatgccctcatgcagtgcctaggatatcct

SEQ ID NO: 111389 - DNA, 402 bp, Glycine max
  unsure (1)..(402): unsure at all n locations
caattttataatagggggagaagtgtagtgaaaaagggttcagccccttaggcacttctctctctttcgaatttgcttggaaaaattgtttccgtgaagaaaatccaagccgaggcgcttccgaaacgtttccgtaacgtttccgtgaggaatttcgcgaaggtttcgaccgttcttcgacgttcttcattcgttcttcatcgntcttcgatcttcaacgggtaagtacctcgaaccaagcttttcgattcattctatgtacccgtggtggtccacattgtgtttcgtgtatttttattcttgtttcatttactttttatacccccttttgacgtgcttaagccattttatttcattcatttctcgcttaacctataaataaaataaatttccaccgatcgt

SEQ ID NO: 111390 - DNA, 338 bp, Glycine max
agcttgtagaatggcttttattaattcatggaggggttaggtatggttcagagataaaagggatgccccacattatttccatgacacaaatgcaaagatgatgactaggaaattttatgctaaattggtcatgcatgcacctatgcggacactcaagtgtcaaatttttatgggcacgtgatgctaaggctaacgattcacttcctctattttaaatcaacccgttgtttccaaaagatgttcttttatcaatttgtgcattcatgctaccccattttgggtacttgggaaaatttcacagcattcacccttcaagtgtacacacattttttcataaa

SEQ ID NO: 111391 - DNA, 452 bp, Glycine max
  unsure (1)..(452): unsure at all n locations
nnnnatttggacaatnggctggtatatacactatcatggtcatcancatgtcctcattcatacatttcattataaattnnnnagattgatgcaaagaccattactcaaagctagtcgttcactcacagtttatgttcagactctcaccgattatggttcaagcttttctttctcaatcaattngtctactaactaacatttctaattgcaagttcacgttattgttctttctttgtctaacatacatacttgctcaaacttatgaaaataacacaaacttcatcataatcatgcattcaaaccataatcaattcatacaccaattttcataaaaagagtttcactgcataatcatccaagtcaagtcaaactgttctatatgcttcaaaataagcataccaactaaccataaacaaaaaacagcaatgcatatatacatcaaccataatcac

SEQ ID NO: 111392 - DNA, 382 bp, Glycine max
agcttggttttgggcaatatctttttatctgacgtccccaaggtctcctgacccccgcgacatatctccaggtaccactctgtggtcaacaataaaagcaggaagtttcacccttcaacactttctcatctcaagcttgtagaaatatggggtacccatcacatgtggtactaggtggcggtcgggcgatggtgcacaacaagctttccacatccacaatgcgcgcataaacccaccatgctctgttgcccaccttcatctgagctcacgtactcccacgtagcccatatcctcgtttctctcaacaccggggccccatcaattcattcaagctttcacataattccagctaatcaacattcatacagcactagctttcaca

SEQ ID NO: 111393 - DNA, 462 bp, Glycine max
  unsure (1)..(462): unsure at all n locations
gacctatgaaactcagcttctttttagacctcgatcggtcgtcttttctggtctacgccgactgtcatttttttcgatcaatatcggtgaataatattttttttgccgaggtgggctaatgttttcctggccgaataaatcggaacatgccagtttcggccgaaacgaaacatcggttgagctcgcacggaaaaacctagccgacctacattgtaagttttttatgcaacaccgaaacaagaaaacttcccctgccgtaagaaaaaacattatcggccagcgagcgttttttttaaaaaaaaattgcgcaatgtcggctttaaaatatcagtcggggccatttcacgaccgatgtcggctattgagttttctattcaatccctgaatgaaatntgcatgatgtcnattangaaatgtttgatcggcgtgatccggttgatgtgaatcttacggggcggatcg

SEQ ID NO: 111394 - DNA, 326 bp, Glycine max
agcttgctaataattggtaatcctgtaatcgattatcccgattaggatagcttgtttcaacataattgatgcaatcctaccccctaagggcattggatagaaaactccaagaagattgggccagaaatgcaagagaagtccctaaggtttctaagagccttagggtagattctaggtccatgggcttaatatgagcccacttatctttgtacatattagattaaggtttcattatttttgggccttgtaggctccataatgtaggtagggttccctagaaatgtacgatctttcagccctcgtattttaaggcacctatactaact

SEQ ID NO: 111395 - DNA, 305 bp, Glycine max
tgtgctcttatcactctctatgacaaacatcataatggcgctgactgctggaggaggacccatcttctcagattaatcactggcttcagcatgagatcatgtataccaggctgacaccgctcagcagcaatctatcaatactgcatcttcatattactgatgtgcacatcaaaatcttggagacgcagctgctctgaaatctggtggcgagggcaactggcacataatatttaataatctctcccatggttcatacatgctctatacactgcgttagctaatgcctgaaatatcctatctgattg

SEQ ID NO: 111396 - DNA, 380 bp, Glycine max
agcttggaagaatttatatttggttatcttatctccacgaacagaaagatgcatttagtttattgggataaaatgtgtaatcccaaagagcatggaggattgggactaaggaaaatgaggcctgttaatcaagcctatatgatgagagcaaactaaatattttgtactagagagcctaaagtttgggcttcattcattcttagcaagtatcgttgtgggtctaatcttctgccgatgatcaacaagcaaagacaaggaaataatttttggtggggactttgtttttcttgggacaattactgttaaaatcttacttggaaggagggggatggaaaaacaataaaattcttgagagcttaagactattttgattctcaaat

SEQ ID NO: 111397 - DNA, 395 bp, Glycine max
aatctttaataaagagagataggaagctgtgactgaaaaaagggttttgtgattttttttatcaggaattttttttgaggggttttgagatttttttgaaagggaattttttttttgaggggttttgtgattcttttaagagggaatttttttttgtcgggaaaaaacatgatttattttattttaaagataaaagagtggaaaaataatatttaattagcagaggttataaacctccgcaaattaagcacaaaaaattatagtttttaataaattaaggaggtttctaaaacctccgcaaaataacctccattatttaacattttttttgtagtgaaaccatgcatctccttgtgtatcctttcttgatgaatcatctggacagttggtctcat

SEQ ID NO: 111398 - DNA, 378 bp, Glycine max
agcttatccaaagtggcattcggtgtttcacctttttcctaattcacccacctttatagtcctactgaattagtgcatagtaacttctagcaatttggtgagtaattcaacactgtatataataagtacctttgtctggaaaaattttaaaaacatatacatatctaacatgaacttaatcttaatgttaggatgcactgagtactatgtactcatttatgaaagatgcaaaatataccaatgtttatttggaagggactacaaaggcaacattgttgactataattggaggaagtatgcatattatcaaaatttggaagttggccaagaaattatatctgagttcccagatgcaaaatttaactttgggctattcta

SEQ ID NO: 111399 - DNA, 433 bp, Glycine max
ctataaataggtggagaagtgtagtatattatggttcagccccttaggcacttctctctctctcgaaataactgaggaaaattagttccgtgaagaaaatccaagccgaggcgcttccgtaacgtttccgtaacatttccgtgagtaattacgcacagattctcgaccgtttttcaagattcatcgatcgtttatcgttttcttcagtcttcaacgggtaagtacctcaaaccaagcttgtcaattcattctatgtacccgtggtggttcacattttgtttcatgtattttttattctcgttttcatttaatttttatacccccttttgacgtgcttaagccatttatttaagtcatttctcgcttaatctaaaaataaaataaatttccaccgatcgctcgaattgtatcatccattaatttcgggtgaaat

SEQ ID NO: 111400 - DNA, 408 bp, Glycine max
ccctaagtcacctgcggcatgcaagcttcctagctttgattggtgtttttttatctcctttcggtgctctaaattgtgggaatgtgctcaaatatgtggggcaattttggtttgttttcttgcttgattgaggtgaattgggggtttgtatgatatggccttatgcctttaatgcatttttatgcaatgggacatgccacattgtttccgttcttttgctattgatgtctaaacactcgcccgtcaagtgtttggtgaaatgccttcaatggcattagcgcgtgatttttgtatggaaacaacccatgttgcaatttgtctttgcacatattttctattttttgggacatacatttaccttctaaagggcgttagtatttggcttacatttttccttgcctgtgatct

SEQ ID NO: 111401 - DNA, 421 bp, Glycine max
tgcttaattacatgatgttgattatgggagattttatatgccattcttgctttaagagtaacgatccactggtaaaactaactttccaaatgtttgccttcgcaggaatggccccgaggaagcttgcctcaaagaggtccacgaaagacaaggcggccgacagaactagttccgtcccggagtacgacagtcaccgctttatgagcgttgtacaccagcagcgcttctaagccatcaagggatggtcgattctccgggagcgacgcgtccagctcatggacgacgagtatactgatttccaggaggaaatacggcgcccgcggtgggcaccattggttacttccatggccaagtttgatccacaaatagtccttgaattttatgccaatgcttggccaatataggaaggcgtgcgtgatat

SEQ ID NO: 111402 - DNA, 411 bp, Glycine max
  unsure (1)..(411): unsure at all n locations
cctccaccctttgtttcnnggaggggggattatgttatggatatcatcagccaatgctctctgagccagaattgcccccacagcagcacaagtggttttgttcttggtagaagccaggtcaaacttgatgcccttggaaatggaatgtgccacagcgacaaccttgctagttaccctatgaacaatgcaagcacgaacccaggcttttgatacgaaaatgtccaaacaaagcggttcatgataaggccccgtaagctggttaaacgtgggtgtcctctgcctcttgttcacagtaaacccatcattgatttcttccacccggngcacaacacttttacttnttgtnaattcattaactctgggaagcttgtgatctttggaaaccacatttggagatgtttaactttgttt

SEQ ID NO: 111403 - DNA, 377 bp, Glycine max
  unsure (1)..(377): unsure at all n locations
agcttagcacttgaaatccanattttttaagccatgtgtggtcggctccagagtctattatcactccactgttattatctgttattgatctatcaaacaatgttggatcaatatcaagctttctccctcctatacttatagcttctagattaacataatacacaccattgatcacattcaaagtagttgagtcaccttgcatatttgctttgtcccccaagactaatcttgtaaacttataattagtatttcttaagttaccaatacagtatgaaaatttcttaccaaagctaggttgcaaagaaaacctttcactaccaagtccaaacaccccattgattccttggtaggggtatccattggatgatatactaaac

SEQ ID NO: 111404 - DNA, 448 bp, Glycine max
  unsure (1)..(448): unsure at all n locations
tccatctgatgacagggaagtgttcatattctatttaacaaggcttcagaacaactcgcctgttccaccgccggagcaagttgatattcccagtcatttggagcctccactgccagcctcctcccatgatcctcacccccttgatgatgcttcggatcctgctttgaaggctntaccttcttacgagcggcaattcaggtaccattatcatcagggtcatgtgatttatactggtaccatgatgaaatatgagcattgtgagaggcttttgagggaacagatggtccaagaaagagcggtggaggttgcaaggggtaatttggatcagtactatcgaatgattaaccaaaactatgtggacttcatgaaacgttatatgcaacaacacaggatgcattctgatctattggtgaatttggggaaggatgttgagaaactaagatctatc

SEQ ID NO: 111405 - DNA, 362 bp, Glycine max
agcatatgcgcatatttcctttcattctttctcttgcacaaaacatttaaccgataaaatgcacccatatacaatcaaggcagcttcgtcatctatattatttacacgtaccttcaaggtgtattcgttacttatatcacacacatctccttggctaaattcacatacatgcatactcaaagcattttggggtaccaaaaattgcacatgtgcacctttaggcatttctaatacctattcatacgccaactttatgatgaatcttgactatccacacaataaggtgctacatttcatgctctttttctagtttatgctacctaaagccgcatgcaaatacaagcatattttcctttgctgac

SEQ ID NO: 111406 - DNA, 451 bp, Glycine max
gagaagcgtgtgatgtgaatccttggcatcattttaacatttagcttgatcctttgtctacactaaagagacacataaaatgaataacaagagaaaaattcaaagccaattttgctatcattaatcacaacactggtcatttctaaagtggcacacaacattattcaaaaggttgtactcatcattcacattagagacacaccactcaaactatttttcaagcattctaaatttgtcatgaaagtcatgcatgttagagattgagggagcaacatgacacgggcaacattttgaacaacctctcaaggaaaagcatgaagaagtttttgaagatgttttgacttttacatgccaactcccttgagtggcatttgtattgattgttattttgtgtattgcatcatagtatcattcatcatcatgggttgtgtgaagaaaactttctaagtta

SEQ ID NO: 111407 - DNA, 377 bp, Glycine max
agcttccaaggagagaaggatattttatctgaagttaatgcactcaacaaagcattacatgagaatatggtcatgttgcgtcaatcttgtttagaagcaaattacaggcttcttgtgtatgaatttgtttgcaatggctcacttgaccaacatttattgcgtaagagaaaattggtattagaaatagatattactatgaagtatgaacatgaattaaaattaccgcatgaatcttctgatatgattattacagataggagagactaacttagagcacaatgatgcagaacactcacataaaaggcttattgttccagtggatgacggccaacatccagttcacatcggggtcggtgtttctttaggccctgcaaaca

SEQ ID NO: 111408 - DNA, 447 bp, Glycine max
  unsure (1)..(447): unsure at all n locations
nggactagctagtgatggaatgaatccatatgactatttaagcactcaacatagttcatggccagttctactagtaatttacaatttgcttccttggttgtgcatgaagtgaaaatacatgatgttgtctatgatgatatcaggcccaacacagccaggaaatgacattgatgtttatctaagtccgttgattgaagacttgacaaagttgtgggacgaggggattttagtgtttgatgggtttcagaatgagattttcaaatgtgtgcaatgcttttttgtaccattaatatcattctagcatataggaatttaagcagttacagtgttaagggtcatcatgcatgccccatctgtgaagaagacacaagctacatacaactgaaacatggtagaaaaacagtctacactaggcatcgacgttttctaaaacctcatcacccttac

SEQ ID NO: 111409 - DNA, 384 bp, Glycine max
agcttcaatttagtactacatttgtgattctaatacacttggccaacgtaaattcaaatgttattaaaatgttaacaagtttctgacaccgttgttataggctaagtgtaacccattcatgatgtattaactgaactatcgcccaggtcatcttccaaagaaaaaaagaagggatttcatgtaattatttaactaagaactaggtgtatgtatattttgctttgtgattgccctgaaataaataaaataaaattaattgcattaaaaattaaatgacgataagataattaagtgaggatagaaatactattcttgtctggtgacatcgttcttgatgaatgaatgattaagtttggactcggaattctcttgatctactgtaac

SEQ ID NO: 111410 - DNA, 466 bp, Glycine max
  unsure (1)..(466): unsure at all n locations
actatgaaactcagcttaagcaggcttatgggaatggattanaggtgttttgatgataacaatgatgacaacaaaagatgatgacaaaggtgatgaacaaaaagctcaaagatcaaagaacaactcaagtgaatcaaagaacatctcaagtgaatcaagaacaagtcaagagatcaagaatcaagaagaattcaagactcaagaagaaagcctagaatcaagaatcaaggttcaagatctcaagaatcaagatcaagattcaagactcaagattcaagaatgaagaaaagaatcaatcaagataagtattaaaaagttttttttcaaaactttgtatagcacatgagtttttgacaaaacctttaccacagagttttttactctctggtaatcgattaccatattggtggaatcgattaccagtagcanaatgagtttgaaaaagttttcatactggaattacaac

SEQ ID NO: 111411 - DNA, 93 bp, Glycine max
agctatgctcagagggactgttgttataatatcatgagtgtatggagggagcagttcgcgtcctatatggatcgaacgtacaaaggtggaaga

SEQ ID NO: 111412 - DNA, 435 bp, Glycine max
  unsure (1)..(435): unsure at all n locations
tattctatctntgataacaggacatctttgtcttatatatgcagaggacaaaacaaaaaaaaataatagaataaacttccttatggatttaggtcacatcccaacagttattgtattgaaacaaattccttgtgtcaaattttaatgcttcttctacattcttgcatcttttcttctcattttccttaaaaataactttggatggtgattgtaacctaacaaatgccttattagatatgtacaatatgatgattttgttgcctacactcatccctatctcttacgatgaaatcaacaattggttttgctgcttatatttattataaaggttttaaaacttcaaaacattttgaagattgaccaatgtaccgtggaatataattataacatttttaagatcctttctcttccggaactaccatttacaacatatat

SEQ ID NO: 111413 - DNA, 115 bp, Glycine max
taccttgccgtattggtgccctttactgctctatgatatttcttccctgcctgcccttttggtagcctgttgaactcataaccttttagcggaccttgaagacttattacggttt

SEQ ID NO: 111414 - DNA, 376 bp, Glycine max
agctttttggtcaattggcttgttataaaatcatggccttcatcatgtcctcattcatacatttcattctaaaattcagatattgatgcaaagactattactcaaagctagtcgttcactcacagtttaagatcacactctcactggttatggttcaagattttctttctcaatcaacctatctattgcctaacaattctaattgcaagtgcacattcttgttctttctttgtcaaagatacatacttgctcaaacttatcaaaagaaacacaaactccatcacaatcatgcattcaatccaaaatcaattcataacaccaatttttacaaaaagataaaaatgtgtcactgcataatcatctaatttaagttaaa

SEQ ID NO: 111415 - DNA, 436 bp, Glycine max
  unsure (1)..(436): unsure at all n locations
tgtcgaaatggccatgtntgggtgagttatatatacccattctgttttanggtttttgtgatgatgtttgtgatgtttatatgctgaaattgctgatggaaatctgttagagacgaagggtagaactaacccaaggttagaaagtgagaatgtgatgttatgagtgaaaaaaaaagagtgagactttgagagttggaaggctaagtctgaattctgtggtaaatggaggttagagtgagttaatactagcttgaaatgtcatttagaacatgtgagaaaggttaggctgagctagagagaaaaacaaatgaccaaagtgaacaaagagccattgctagggcaaatttgggtgttgaagagtcaaattttgatttggtggaattttaggtgtaaatccagtttgggcaagtttagattgatgttatggacttgtgtg

SEQ ID NO: 111416 - DNA, 380 bp, Glycine max
agcttttggacagcctatggacccttcttttgaagatggaattcactagtggatctttctcccatttctggcgcattaagtgtgcgccagaggttaaaacttgttaatcgacaacattggcaaaatgaaattttgagctgtgatggcagttttcttaggtttgatgctaaatttctatcaattcaatgcttaaagttgcttactttttgttagataaagttctattaccaatatcttggcaaacaataatcaaaaagatatttttctgtatggctcacaatcttgatttcctaatcatcccaagtctactattaaatggtgcatgcagatcatacacattacttcctgctcatgaagctgccaagaatcccttgaagccg

SEQ ID NO: 111417 - DNA, 398 bp, Glycine max
  unsure (1)..(398): unsure at all n locations
tgaatgnagctccagattaagattacttctcgaaaccaattattcttcggattattcaattcaaaataatgttttcatgattcccgctagtgttctgtaaggataaagttcttggtctatattctggattcgttattatgaaacccaaaaaatagtactcctaaatgcctataggcttacgaaagagtagttttggaacccaaaaatagtcctaaagggtgtttttgattgttcaccttgtatgtggtgcaggaagtaaacaatggatcgcaagaagcaatttccttagttattccctttccgattcacttgcaatcgctaaaactttatntttaaggaatgcttgagacatgacaacttatgtaattccaataattcattttcaaaaatatttccat

SEQ ID NO: 111418 - DNA, 360 bp, Glycine max
  unsure (1)..(360): unsure at all n locations
cttatagtcacccgccgcatgcaagctngtgatagttaatactatatatgtttttgtcttcgcttatctctacctgtttaaaaatgtgataattcactcctcatggggtgttcatatttggatcatgtgatgatcttaaccctcgtgtttgagagagcaaacgactcggtgaattactgtatcaaaccttgggaaggatgactccgaaacacaatatgttgataaaatgttacctcggaacaaaagttttgattttaattgcctgacggtataaacatgtcattttactttatgtgaaaaacctcacctgtctgtgtttaagtcatcattatcaccttaaaattttatttggcatcacga

SEQ ID NO: 111419 - DNA, 395 bp, Glycine max
  unsure (1)..(395): unsure at all n locations
atggtgatgtcaaaggacactttaaaatcctttttaatcaactgacctacgcttaacaaggtttgggcaatgttaggtacataaagaacatctgatnattaatttgatacctgaacacgttgaaatngcaacagttccttttccttttataggaatatagccaccattcccaattctgacctttgagacattagttggcttcaaatccttgaataaagtcttatcatatgtcatgtggttcgtacaaccactatcaatcaaccaactttcacttgattcactactcaaggttgataatttttctttntatccttacctttgttttggttgttggcactattttcgctgcttgctggctggttcttcttgaaaaaatcctttttgctttcatcaac

SEQ ID NO: 111420 - DNA, 388 bp, Glycine max
agcttgatgaccaattctcatgcatgcttttatatgttgggtcccctcatgcaattggattgcccttaaattagctattgtcataccctaatttcgtccggggaccatccgttgttgggatgcaaccctcgtttgaccacttcgaggtacttggcacccatcgttaggcaattcatgaagttccgtgacatgccgaaagtcaaaagaaaacattgttgcacaatccgtgaagttccgtgacatgccgaaagtcaaaaggaagtgttagtgcgcaatccgtaaattttcgtaacattccggaaggcaaaaaagggatgattacgtaatccgtaaggttccgtaacattacggaaagaaaacaagtatcgttacgtaattcgtaagtttc

SEQ ID NO: 111421 - DNA, 456 bp, Glycine max
tccatcactcgctaagtgagatctgcagattataaatactttcttcagcgtgaaaaacacgattgtcctcttctcctcctctccaaacaccacccaaaccctaacaccttcttctccaccacccacgactattggtggccaccacgagccgtcgttgcttgccgctgaaaccccacaccaagaggaactttttaatcggagcagaatcctcataacctacctcaaggattcgatagagaaaactccctcaatccttccttttgtagcttctctgaggtaatcttgacttataagcctttctcttagttaatttgagtttctcttagtgtctcttgtgttttgggtactttaatagggtgtttttacacttcctttgaaaacccttgaaaatgagacattgtaaaagttatcttgttataacattgatgttattttcgtgaccttcactgaaccctc

SEQ ID NO: 111422 - DNA, 388 bp, Glycine max
agcttccaaattagtgtaccacacttttttatctccggccaggctatcctgaaagaagtgtatcaacagcttttcatctttagaatgggcgcccatcttacggcagtacattttgaggtggtttttgggacaagtcgtccctttatacttgtcgaagtccggcactttgaacttcgggggaataacaacatcgggtactaagcaaagatccgtcatgtctgcaaatggatagtccccaaatccttccacagccctcaatctttcctcaaggagatcgagcttcctcctttcttcagttgccgggggcggcccttccataaacaaaactattggcggtgctgcgatgttgggttgaggcaatgtgcctggtgccggcccttctgggatc

SEQ ID NO: 111423 - DNA, 371 bp, Glycine max
  unsure (1)..(371): unsure at all n locations
tgtgccagccatccatggggccaaacacaccaaatgaatattatgatggattgcttcaattctcaccaagggtaactcatcactttcaaattgagctttcaaaactatcatgacatgttgtcataccctaatttcgtccggngattattacttgatgacatgcaacctttggttagccgctttgagatacttggcgtcctttgttgcacagtaaatgaagtcccgagacgtgtcggaaatcaaagggaagcaggcttacgcgatccgtgaaattcggtaatgtggcgganatcaaaaagaggtgtttttgcgcaatccgtgagtntccgtaacttcttcgaaaggtaaaaaagagtanatacataatccgt

SEQ ID NO: 111424 - DNA, 313 bp, Glycine max
agcttagggtatccaaaggaacctttcttttctcacttgtatgatggcaagcaaagagttgttcaaccttcatttcccaatctaaataagcctctacattgtcctccccatggaagcatgggaggttaaagttagcctcttgaggctttctttcattttctctcctatgggagtaaggactaagatgtgacctatgcctttctccataataatcactaagctcttcacttaggctctgggaggagccatgattactatacgacacatgtttttcttttcttaactcatttgtgtgaaaactaggctgattcta

SEQ ID NO: 111425 - DNA, 366 bp, Glycine max
  unsure (1)..(366): unsure at all n locations
ttatatattgacttttaatataaaacattgctttgtttatgaatttctatttttatgtattacatanaagtcctatatataaaaatttttccaattcttttcataaaaaatattatattcttttatatagggactctttttttataaattttcaaatgaaaatacagctctagtaatacttagttttttaataaattatatataggaggtgtaggaagcaattgctttggatatgcaatgtttatcttatccttattgttctacggtgtaaatcacaacgatgaagaagacttggattcgtagacagatgataatagaatcaaaggagagtgagagagtgaattatagaatagagtttgggaggaa

SEQ ID NO: 111426 - DNA, 380 bp, Glycine max
  unsure (1)..(380): unsure at all n locations
agctntgagaagtgaaaaaanattttcttatatactgtaaaatatacctcataagtttaactcacttcaaactaatgataaataagtcattactttttcattttataaagcttttcactttaaaagagtaaaatccgtctcagataataattgatcttataaagggtaataattatttcttttagttaattgatttatttttgttgatgtatagaataattagtgttaaatcattcctacgggtcatcaatctgacacactctttttgtttaatcccccacatcttgcaatcgaagtgacgataaccacatataatttttcgttagcagttaaaaaaatggaaaggtgtgactcttgcaacaaaccaaaaggcacatggt

SEQ ID NO: 111427 - DNA, 444 bp, Glycine max
  unsure (1)..(444): unsure at all n locations
ngctatagaatgtgattggttgtgaatgctaatagatgcaccatgcccatgaccgaaccggacatgtctgattccaatgtgaaaggctgcccaaaatcaggggaggccaaaattggtgcttccgtcatagcttgcttcagtttgtcaaaggtctattgggcctcactagaccactgaaagttgtccttgcgtaagaggacagtcaaaggttcggtgatttaggcatatttgcagataaaatgaaaatagaatcatgtcaagcccaggaacccttggagttccgtcgtggatgctggagaaggccaattcctcatggcactaatctttttcgggtcttatgctatgctagcgacaaacacgatgtgttcgagatactggagagtagttttggcaaataaacacttcaattttcataagaggaattgctctatggacaaagtggtg

SEQ ID NO: 111428 - DNA, 398 bp, Glycine max
  unsure (1)..(398): unsure at all n locations
ggaatcggacatccgtatgataagatatgactatttttattttgcgagagcttncgctggtcaattctgagtgtcactatatgtgatgcgcctaaattggacatgccagttaaatggcatgaccatttgagagtctcaagagcttccagggttcaatactgagcgtctcgctatgtgatttgcctgaatcggaaatgcgtgtgaaaagttatgaccatatgaatatctcaagagcttacgatgttcaatttctagcctctcgacatattatgcgcccgaatcggacattcgtgagaaaagccatgatcatttgaatctctcgagagctacgcgatgatgaattgctagcgtctcactatattatgagcccaaatcggacatccgtgtgaacagatatg

SEQ ID NO: 111429 - DNA, 385 bp, Glycine max
agcttgggggagcttcaagatctctttcttggaaccaccaagggactgaaatagagtagtgctgttaacgaaattgcaaagacattgcgtgttattctcttgcatctccttcaatggctcacaacaagccggagaagggttgtttggagatttcacgtattcttggcatggaagaagcctttgcatgcattttgcatcttgaagaaacgcaccttgtcctatgccaggcttatgctgatctagaaaagtatcaaacatgcccaggtgaagagatgcataaattaacatgtcaaacaggaagaaggccttgttgggatacgccatgttattcatcatggtgagagagattatttgaaattgattcatcccctaccatacttgatgt

SEQ ID NO: 111430 - DNA, 452 bp, Glycine max
  unsure (1)..(452): unsure at all n locations
tgagttcataagctcgagaganaaagaaagaatttattatttaatgattgataatgtagtgtaataataaaagaaaaaaaatattgatccgatgtttgaaatttttggttgtcaaaatataatcccttttaattatatatgaattagacgaagaaaaaaagggatcttatttaatttttgaacacttatgtgaaattgttttaacttaattataagtgatcttaattgtgttaaatagttaaaaggataacttcatcacttatagtcatcttagttagtttgagcaaatttgcttctagtgagagatacatgtaatctatctacaaataaaataaatgaatactacttattgtaaatttttttttttggatttattgaaatttaaaggaagggaatgacgatgtagtccaagacatgaaaaaactttagattaaacaaatacttacatttta

SEQ ID NO: 111431 - DNA, 379 bp, Glycine max
agcttgtgtgtggcatatactcttttattttaattctctcttcttcatgaatgcagaatccacgtagttgtacatgattcatgtgctgaagtttaaatataagcattatttcatttttgaattccacaattccttgtgtagatgtgtttgaaagtcttttgatggtaacttcttgcccagatggtaggattccctaatatgatgaaacaataaagattattatttctgtaaaagaatcttgttacaacacaaagtgaattggttcatgtcaccttattaacaggtccaaagccttcttgtgctaacttgttttaagttgaaaaattatcgggtgctggaagtgctgatgtatagttaaataactttagatcctgtctct

SEQ ID NO: 111432 - DNA, 400 bp, Glycine max
  unsure (1)..(400): unsure at all n locations
tggatttcctttagtagggaatctatccttcctatgatatagccaaacccagtcaccctcattaagaactagctcttttcttcctctatttcctttagttgaatacacctttgtttggttctctatttggttcttaaccctctcatgcaacttctttacaaattctgacctagattccccttctttatgtataaaagaagtgtccagtgggaggggaatgaggtctaacggtgttaggggattgaacccatagacaacctcaaaaggggactgcttggtggttctatgaacccccctgttgtaggcaaattctacatgaggaagatactcatcccaagacttatggttgcctttcagaagagcccttaanagggtggataaagacctattcactacctct

SEQ ID NO: 111433 - DNA, 382 bp, Glycine max
agctagccaagatcattttttatttttaggcctggttgaaggagttagagtccaagctgaaggagttcgagcagcgggcgactagggagagagaggtcacgcaccaacttgaagaagagttgctgatctacaagaatgaggttttggagcagcatgagaaaggctttaaaaaggttgtcaagcaggccggattcttccaaaaggaccttgacttgggtctttttgaccctttcaattgtttttggaaggttattatgactgaatttgattgtcaatgtctttcaaaagacctagtcaattacccatgcatttaaatttggcgggctcatctttattcatgttctgaaatcacttaatcatatggttattaaatttaaaaata

SEQ ID NO: 111434 - DNA, 406 bp, Glycine max
  unsure (1)..(406): unsure at all n locations
tgcaccaacttntcatttatgcataacatacttgttcgtattttaattctatgttcagtaacaagactaaacttcataataatatgaaagataaattttttatttaatacttgttagtatatattgaaaagaaaactgttgaaattagtaatttttgattatttttgcaacatataagaaaggtgttatgtgtgctttctttagtgatacgatgttacgtgttttaatagactaataatgtaatgtaacattgaaacatcaaattataaatattttgtataaaaattaatggtatatttttgttggatgtatttattctccaaaaaatttnattggatgtgatctatttcttgtgatcggcccttcctgtttttcaaattaagttgtgcctgctagacattatttt

SEQ ID NO: 111435 - DNA, 353 bp, Glycine max
agcttggagaggatgctttttgtgtgaaaagaaagagggagagaaagagagaggggggagcacgaaattgaaggaagaaaaagggagagaagttgaactttgagttgtgtctcacaagactctcattcattaaagttacaacaagtgttacacatgcttttatttatatactatgtagctctcttgagaagccttcttgagaaaaattccttgaaaagcttctttgagaaaactttcttgagaagctaaagcttagctacccacacccctctaataactaagctcacctccttgagaagctttcttgagaagattcctaaagaagctataacttactacacacacctttttat

SEQ ID NO: 111436 - DNA, 448 bp, Glycine max
  unsure (1)..(448): unsure at all n locations
tcaacctctccanatgggccctaaactttattaatttcaataattttaacaagaacttcacactaaaaacttactttntaaacttttacagaattgttatcaagttttttatatactaaatatagcctaataataactaaaataagtcaatgttaagatttgtactaaacgaaatatgttcaagctggaagtatcttgcgtacatttgaatgcgtcgtaaattttacaaatgatttaccaaacaaacgtgggtacccaattaccagttttggtcaagtcaagggagcttgctttatacacctgaattgtagtggaacaccttcaatcattcttggcttattctactggctctagatatgctgtgaagacttggttcaattataaaaaataaataacatatgaatgatgctatatctcaccatcaaaaccaaattaattgaattatctt

SEQ ID NO: 111437 - DNA, 380 bp, Glycine max
  unsure (1)..(380): unsure at all n locations
agcttctcccctattttcctatttattggggagaagtgaaggaaaaaaatgttgagccctcctggtaattcgagatcacttgaaattagtgaaaaaaattgtttccgtgaagaaaatcgaagccgaggcgcttccgnaatgtttccgtgggtgatttcgcgaagattttcaactgttcttcgacgttcttcgttcgttcttcgtcgttcttcggtcttcaaccggtaagttcccgaaatcaagcttttcaattcattctatgtacccttagtggtcctcatttgtcttcacgtgcttttattttcattttatttactttccgtacccccttttgacatgctntagtcatttacttaagtcattttctcgcctaattaaaa

SEQ ID NO: 111438 - DNA, 422 bp, Glycine max
  unsure (1)..(422): unsure at all n locations
tcttatgcaggcacattcttgagggctatgctccttcttacatggctcattccctagtggatggcgcctnctctcacctcttctactttgtcttccactgcatctncatggtggaaaatcaccattgaaggaccttattgaagctcaaagatccaacctccatagaagctacacaagcaagcttccatcaagtggtatcagagcacacgagcttcaagtatgtgctctttaaacctccattaattctcaactttaccttttcctccattgatgattcttcatttttctccatgtatttcctcacatgtcttgtgctaaatgttattaacatgattctctataatctccaccgattaatcttgctataaaagctagatttgattttctatggctcaaatttcttgttcatgttcttgaaccat

SEQ ID NO: 111439 - DNA, 316 bp, Glycine max
atgcttctttggccgtcgctgcgtgggatatcttctcatatgtatcttcatccaccgatcgataaatgagaaagagagctttcttcgtctctctgtgatgactcacccaacgtctcctttacaccctggcttaccgaggcttcatcttgctcctcccagccattctctacgatatctcacacatcttgagctcctagtagcgccttcatctcgatactccaattatcatacttgttctttgtgagcatctgcctttggaaaggaaaacctccatttgccatcttttgaggatcttgaagctctgataccactttgt

SEQ ID NO: 111440 - DNA, 362 bp, Glycine max
  unsure (1)..(362): unsure at all n locations
gcaagcttaagttgtttgaactgcacattgttttttttattnaaagagtatcctggtggaaccttcatccgactaagacactgacaaaaacttatcttctcctttttcgacaaaccatggcaggatggggggaaggatatttttttcccattttatcttttacgcaactgggatctgtatgcccatctcagttagatcataacggttatttatgctattcctttgagtggcgttgaattgaaatgacctttcttatgacatgtgctcatacaggtttttccacatgcctaacaatcaattctttgctttacatttatatcacactagtacggaagatcagaaaattgggcttgttttcatat

SEQ ID NO: 111441 - DNA, 417 bp, Glycine max
  unsure (1)..(417): unsure at all n locations
tggtgtcgcattctatccttcngcgggaggacgatgcgagactcactggtgcgtcttccgaggaaagaaaacgcacggagtcaccaccaacgtttatttgaggaaaacgttagaaaaaccganaagggtctataatttgaagataaaggtttgggagttgtttacgtgaggggaaggtattagcaccccatgcgttcgcctcaagggacggcagtcctttaatcaaatgtgcaaaatcatgacttcaatatttgtttattttcccttttttatgtttgtttactttntgggttcgacaagagcgtggctcttgctcctacgtatccttaattgcgatgaggaactcaaacctatgtnattctttgaaagccanaaaagttacgcgtanggttgattttagacttttgaaaggttcat

SEQ ID NO: 111442 - DNA, 380 bp, Glycine max
  unsure (1)..(380): unsure at all n locations
ccaagccaccngccgcatgaaggtaggaaaaaatttttctttttttcgggcagaatatattgccagagagaaatatgaaactntatcatactgagtttgacgagactcagggggtgtnggagaggtgtttttagactcatgggtttggaaatgttgaggatggaagcataaacctggctttagctaaggaaatttatgttactctatacaccacacataaccaatcctctaagcaagtcaaagtaaaaggactcctgatctaaaataatgcacatgggctgaatgagtcccctctaacacctgcggtgtaagaataaggggatccttcccctcacctctcttaactttcgcaagtaagtactaaaaaccacagatatgga

SEQ ID NO: 111443 - DNA, 429 bp, Glycine max
  unsure (1)..(429): unsure at all n locations
tcanaattcagacactagtggacatgatctgtgatgtggaaatatcgtccttatttcttctatgtttcctttttgtttcattgcatttgttttattttatattcttatcttccaatgcaggttttcatctactgagttcaatgcatgccaagaaaaacctaaagaatattgggttggaaagcgaagactaccattttttcaaacgtgttgggaagggcttactttgtacctatgtagtacttgatttaacggtatttataattttagttgtctcgtggaagtatcatatttgaaaagtgtttatatttttaatgatacaatttcttgtggatgtaattattgttctcccttttttgcaagtttcttggtcttctacctttatttgtagttaaaatcatcaagacgctccctatatgtgtaatggctttt

SEQ ID NO: 111444 - DNA, 220 bp, Glycine max
gatccttacgtccacctgcggcatgcagctgatagaggttaatattttttctaaaacaagactcatgacgaagattgtttacccttatttgttaaattaatcactaacaatcaagtgaattcattttgacttgcgatatgatttacatacggaatagtcatgttccgcatcaatattataagtatctctactattactgctttaaacttccggagcaccc

SEQ ID NO: 111445 - DNA, 439 bp, Glycine max
  unsure (1)..(439): unsure at all n locations
cattctatgcacccttagggggccatttatgctttatatgtnntcatcttcattcttctactttcggtattctttttctacgttttaagtgagtttcgaccgatcgtttaagccgtaacctcacttacttaatatttaaatgaatttcaaccgatcgtttgtgttgtaacctcgtttaatcgcctttaaaataaaattcgactggacactttactttgaaagtcctctttaatgagttgagaaataacaaagtgaaactaaggctaaaatcaactcacaaatcaagcatttgcccgcaaaaaggtcatttgaaaccatttcaaggtccaacaccttaacggtccctttttacttttattggtgaaaacgaaccgtttaaaagtctaaaatcaacaccctgcataactttcttgctttctaaagaactacgtaggtctgg

SEQ ID NO: 111446 - DNA, 194 bp, Glycine max
ttttaccccccagcacccggaaaacaaaccagcccatctcagggggcaaccccaccaagaaacagccaggcagaacaggggaagaaaaacacagaagcacccgcccgacccaaaaaaaggcccgcaggagcaccccaaccaacgaagcaacgacaccagcccacccacacccggaaagaaatggccccgaacaa

SEQ ID NO: 111447 - DNA, 425 bp, Glycine max
  unsure (1)..(425): unsure at all n locations
cttgtccacaanaatcactgtaaaaatgttnttttgtccaacgccttaaatgaccccctttcaagtaaaaagaatcacttgattcgccccttttaaaagaactatgtaggtctgattttctcttcgatggagggtacgtaggagcaagagcctcgcttttgtcgacctcaaaaataaaaaaaataaataaaagtttagtcacataatttcacacaattctaatctaaggctgttgtcctttgagacaaacgtgagaggtgctaataccttcctcaaacgtaaagataactcccaaatctggaatattattcatgactggtttccttttgttttttctaacgttttcctttcaataaacgttggtggctactccgcaccttttcctcctatggaagacgcacccgtgagcctcgcctcgctctctc

SEQ ID NO: 111448 - DNA, 429 bp, Glycine max
  unsure (1)..(429): unsure at all n locations
atggtcatcgcttcattcttatggcgattgtttatttcaccaaatgggtcgaagcggcttcttataccaatgtcacgaggagtgtggtggtcagattcataaagaaggaactgatttgtcgatacagactccctaggaagatcattattgacaatggcaccaatctgaacaacaaaatgatgcaggaaatgtgcggggatttcaagatccagcatcataactccaccccttatcggccaaagaagaacggggctatagaggctgcaaataaaaatattaagaaaattattcataagatgacggtgtcatacaaggattggcatgagatgtttccttttgccctgcatggatatcgaaccttggtgcgaacttctactgnggcaacgccgtattccttggtttatgggatgaaagcagtactctgcgttg

SEQ ID NO: 111449 - DNA, 412 bp, Glycine max
  unsure (1)..(412): unsure at all n locations
gagcatgccatgatggtgatgagatactattttatgttgaacantcaacatttatgaaggagcttgaaaacttctttagggagaggagcatggaattcaaacctcccaaattctacaaagaaggactgaattgccttatgtgagttatgcatgatcatttaaactttcttttatcattaaatatgacataaatacacaattttaaaatgttatcattttggtctaatgcttaattattgatgagtataaggttgtggagtgttgtaacaagattacgtggctatgacaacgtattcaagtaattttacacttgatgagacaaattttaaggggttgttatttgagccaaattaactttgattaccctctcactattannttgttatatcatatcacttgtttccattgtttt

SEQ ID NO: 111450 - DNA, 234 bp, Glycine max
caagccactgagctgagcgggagaaaatccagtataagcaagaggccaagggcaaacaaaaaggctgaaggagaaaccaaagggcagcaccggaggaaaggggaaagaggaggggcccggagtcaaaggaagaaaagaagcaccggggccacaaagaatggaccaaaggaaagaaagacgaagggaaagaagaggcgtagaacacaaaggaaaaagagagggaaaaaggaaaac

SEQ ID NO: 111451 - DNA, 446 bp, Glycine max
  unsure (1)..(446): unsure at all n locations
ggggaaatcaagcctaattntaaatcaattattgttgatgttattatagccaatgaaaaacaaccaatggagagaatattgcaattactggagttattttggatgcaattgttgttaagagtactattaactcaatagaaataagctatatctctctatatagagaaagcacttacttattgtaattgtatattttatcattgtccattcaatatgagtgttttctatggaacttttcttctattctttgagttgtatgatgaacggtcacaccaatagtgaaccatcacaacctgtcgcactggaatcactgagaaggaaattgttcaccacatctgacgaattaaagaaactcaaatgcaatacggaaatagaatggaaaaatgaaaaccctatatatataatcgggaaaaacatgtgaccttgatcaatgatggaacacattg

SEQ ID NO: 111452 - DNA, 371 bp, Glycine max
  unsure (1)..(371): unsure at all n locations
gcttcatagtacataggagcagncatctctctattagtcctctcacgagggggaggttgagccatgttctcagtataaaaattactaatggaatgctcaaaatcaaaatattcagaatcactagtgtgataccctaatttcgatcggagacctttgcttgatgacatgcgacctttctttggtccttgtgaggcgcttggtacccatcattatgcaatttgtgaaattccatgacatgccgaaaaaccaaaaaaatattgatgcacaatccgtaagtttccgtgacacaccggaaatcaaatggaagcatcgntgcataattaantgacgttccgtaacattccgcatgtcnnaaangggatcattctgta

SEQ ID NO: 111453 - DNA, 303 bp, Glycine max
tttatttagccgagatcataccaaagtgttttttacaaaacctaatgggttctaaatatatgggccaataatctatcatgtgttgacagtaattgattagcccatgaatttcctctagggttgaacacacttcggcgatggcttttgctttggctagtaatcgcaggagatcttgacttccatttaaggtcaaggcgaacctatccatccacatggtcgcttcttgatgcaatgcatcaatcaccctccctcttgcttccttctcggcgtacgcttgtgcgaagtcctctactagtttttgtt

SEQ ID NO: 111454 - DNA, 304 bp, Glycine max
tgtaccaaacatatgaatgtcccattctttttttcactttccaagcattgaaacaaacaaccttaagggttaaaatcccactcctgtacatgatgattgcttcactgtcctattgtcaatttttccactaccatcccctggtcctgctttagagcaaccatcagtaccttgagcaaaggctctgacacatcagtaaaaaaaataatttctaaaagattttgaggattaatggatggagaaccattgaatggcaatggaaacttatgatggtgtcatgatgtgcacatatataggaatgtagatc

SEQ ID NO: 111455 - DNA, 277 bp, Glycine max
  unsure (1)..(277): unsure at all n locations
caccctnctttctcttctattttgtcatattcttaaattcaaatgttatcaattcaaataaagaatggaaaaatgaagttttatgagcgagaatacgtgtacctccctttttggctagcataacctttttcgtactacggttggacatcataagagtgtgtaatagacacatactaattccatcgagtgttgaacacactttgtgtataacactggttatcttaccagcattattggtgctgtagtgcattcgacattggttatatttaacaaaaac

SEQ ID NO: 111456 - DNA, 285 bp, Glycine max
  unsure (1)..(285): unsure at all n locations
agttctgagccccnccttttttgaacccttctgaacctaaaccagctccttggcctcctttccctttcaccatcccaccctttttcatgccttagcctttggtaaccaagcttgccaataggaaccatttggagagtaaacatggtgggtttttcaggagtaaaacaactcattaggacaacaaaaacttaagagagaagagaattatgagagagagaatgtgctaactggtgtttatcttctcttgggagggtttgctttttctatagtagttgggtttctaaa

SEQ ID NO: 111457 - DNA, 297 bp, Glycine max
tgtattgattcagtctgacgagggatttgtttcttattaatttagactacaacatagaatacaagagcgtgattgattagagaaagatatttatatgcatcaacttgtttgttagaaagacacaacatttctacctactgctgtcacttttacttaccttgcattttatagtttttagcataaaggtttagattatattctgtttgaaattatcaatcatacatgttctctcaacaatgctttatttctgaacttaactcaggctaacattagtttcgtgtgttcgatacttggatt

SEQ ID NO: 111458 - DNA, 301 bp, Glycine max
ttattatgccctctcccctcggcagtatttcttcttcggcaaaagcgagatagttgttggcggcaatattattaacaagccctccgaagccttccaccgagatatcttgggccacgtgggcctcgttcaaaacctttacaagcaaaacccgatgaggttccaagctcatgagtaattccaacagcgagaccctggccggggttttgttgagctgctcgataaccttgaactcgctctgctgaattatgcggagaaactcactggcttcctctagtgacacctccttcttgccataaccatc

SEQ ID NO: 111459 - DNA, 267 bp, Glycine max
  unsure (1)..(267): unsure at all n locations
ataccntgaataaaaggagggggcggtcacatgtcggagccaaaacagaaaaaggacttcggagataccttggcccaaaaaagacacaactcttaccctccgaggggccccagggaggcgaccccagttatcaatttcactcgcgggacaaagccctcagcgtatcaaaatcaacatggggcgaatacatgtcctagggaaacaacgaagggcaaaccctgcgacgcgtgagagggcccctaaacgaaaccagatatgggcgaccta

SEQ ID NO: 111460 - DNA, 299 bp, Glycine max
ctaagcttaatggctagtgaggatggaatttttgttaggaagcaagcggagttggatatttccattggaaaagtacaatgataaggtgctttgtgatgttgttcctatggaggccagccacttactcttggggagaccatggaaatttgataagagggctaatcatgatggtttcaccaacaagatctctttcacgtatcaaggcaaaaagatagtgctcaaaccattgagtccacaataagtgtgtgaggatcaaataaaaatgagagataaaattcttcaagaaaagagaaaaaaag

SEQ ID NO: 111461 - DNA, 327 bp, Glycine max
ggaccttagcctgcgctcagctgtagtcccatatgttttgagaattgaatatctgttatggtacactgcttaaacattcattggattatgatgactctggcttttacgtgaaaagtggcttaattttgaattgcaaaaaagtagcacgtggggctaagtgcttatcctccgctaagcgcagcttcaacgcgcttattgcaaaggagaatctggcagagcattaacatcatagccatgtgctaagcgcgagatcaagtgtgctagcacagcatatgccttcagtcaagctaagcacgagattggcgctatgcccaattccacttactc

SEQ ID NO: 111462 - DNA, 299 bp, Glycine max
tgttgttctctattgcgctgatatatttttacatgttcgctttgtttcgtctacatgtgttgatctattgaataactgagtcttgctgccactgtctgtgttgggttcaaggtaagcttcatgtcttcattgtaactttgtgcttccgcgtacattctctttgtgctcacttctctctgaagcattgtttatgttcccattgtaattttttcttatgaaaaatagttggttataaattgttagttagtttcgtaattattaactgctactagggtttggaatgcaatctagtgcttata

SEQ ID NO: 111463 - DNA, 365 bp, Glycine max
gggggggggttcataaccggccccacagaaacgaagtgactattgtttaatagaatgatttatatatgtagcgcaaggggcgatcctcgttttctaacaagcggagatctggagtgacgtttaaaatcggagtaacgaggctttaaattttagtaaatgatttcacagtattacagaaatgtgcataattattttcaggaaaatattttacttatgattgatttatcaccctctatcattaactatggtataaattattggaacagaattgattcatcttacatgttcaggacgatacatggaatgattgtgaataaaaataacattagtctaaaaaattttttaaacgggaatatgttgtaata

SEQ ID NO: 111464 - DNA, 136 bp, Glycine max
tatagtgtacatttaactatttaattacattgattgaaccaataagtcttataaagctacatcttttttacagaccaattgttcgtataacgaaaggaacaaaacatctggggccgaattcacgaaatacaaaatt

SEQ ID NO: 111465 - DNA, 313 bp, Glycine max
tcacgccgctgcagctaaatagggattcttggcttttttgtccagaccgccttgctcggtcttattcttcatggatgttaagttgaacaatttttataaaaaaagaggaaagaccttgtaacgcatttcttggaaaaagcaaatctgcctaggctactattctataacttaagtaatgacaattttaatatagaaccctatttataaagagcccattctctccctataactaacacacccagtttgggatatcagacatgaacagagcttcagacttcttttaatcttttacctaccagactcctctctcctc

SEQ ID NO: 111466 - DNA, 318 bp, Glycine max
ctatgaatactcagcttggggggtttcacataggcattcaagttgtcttttaagtctaacaccttatgatactaatctggagaaagtagcagactatcaatgactaatacatctttctctcaaagtcaattcattttctgcataattataatttctggcggctatgtctgttttgctaacaagttgaaccaacatatgatggattggggcactgtttaatctgataaaaagctaacattgaggtttaatttgcataaaagtttctggtgctcattctatttgaattgtcaccagattgtctccaaacaagtcagtttc

SEQ ID NO: 111467 - DNA, 257 bp, Glycine max
cctcatacatcctctcaccttagagaaagcaaatcccatgcaaagcggatatatagaatgcaccaaggacataatccatgcaccctggatactaagcaaaccaagtttcgggtagatcaaaaagaacacagccacgctatactagaaaatctgactaaattacggattgaatgaaatgtgaatgttagataagctatagctccggccggggactactcatatatctagaagttaataatgataccaccgacttttgg

SEQ ID NO: 111468 - DNA, 249 bp, Glycine max
  unsure (1)..(249): unsure at all n locations
tgtaatcgattacacacatactggtatttattaccanaagagtttttcagaaaacattctcaacagtcacatctttttgggtggatcttgaatggctatcataagcctatatatatgggacttgagacacgaatttgacaagagtttttcagaacaaaaaggtcttatcctcttaaaaagcaaaatcgttttatcctcttacaaattccttggccaaattacttgtgattcaataaggaattatttgag

SEQ ID NO: 111469 - DNA, 409 bp, Glycine max
ctgtgggggtttttattttttacttcctaatataaaaagcatattgggaaatatgtagttcattaaataaattaataagtacctggacccactcaaagtagcttactgtaacgcctcctgagtttgcaaatatgtctgggaggataacaaacccctttcttcttcataatctgcaagttaggaaggtagttaacaatagtgcatttcttctttcttgtttgaagaagggaatgaaagagaaaatctaaactaacctcatcagcctctgggtcagttgggtgattagctgcttccacaataaatatggcctcgatttcatttgccattttccttcaaccgtaccagaagatggataataatattataaaaacagaatagccttagaccttgttcttattatataattaac

SEQ ID NO: 111470 - DNA, 299 bp, Glycine max
ttattgcaatccaattcaaaactgaaaatgtttctttgactaccaaaccaggcaacttaatttaaggattaccaaagatttgtaagttggtttaaaagtagcagacaaaaatgttaccaatacgtatgcaagtatttatttggcataaatagtgttaataattatgtggtatatgaatatctagttgcaaggcatagccaactaatctcagaatgaagaaaaaatgacaaatcttggaggctgaaacacatgaattgaattgatggattatatgaagattctaggagcacctgttcatc

SEQ ID NO: 111471 - DNA, 279 bp, Glycine max
  unsure (1)..(279): unsure at all n locations
aatgcctcccacactctggagaaattaccattcaatgcgttccacttaaagctgagatcaatggaggctcgtgccttctagggcaccctccgagaggttaggggagaaatcgatctctcagaacagataggccctcacacctgtcaagttaccttccaaataatggatatttcgtggatccactcagtacgagttgttcctcgacactccaccaaaagntgaaattcgcatgagagggcattcggccatctatcaggagaagaaaacatttggtgagct

SEQ ID NO: 111472 - DNA, 305 bp, Glycine max
  unsure (1)..(305): unsure at all n locations
aaaacccacgcttgctctaaatagacattgatgtttgtatttttgttaggaggcnatatgccattggcgctttaagagtagtgccccactggcaaaattaactttccaaatgtttgcctccgcaggaatggccccgaggaagcttgcctcaaagaggtccaggaaggacaaggcggccgaaggaactagttccgctcccgagtacgaccgtcaccgctttaggagcgctgtacaccagcagcgcttcgaagccatcaagggatggtcgcttctccgggagcgacgcgtccagctcacggatgacc

SEQ ID NO: 111473 - DNA, 503 bp, Glycine max
  unsure (1)..(503): unsure at all n locations
ctgagctgcaactggggctctcattcccttctttgcagcaagntgccccaaaacaggcgttgtaagtgtgatggccgttccactgaatatcatacgcgagtctcccttgtctgtttctcacgtctttgttggcaccaccctttagcagcaagagcttcaccatgctctcatctcctattgctgatgccacgngcaaagcgtgtcacctgttataaataattaataattagaaataacgccctattattagctactatatataccatatacaagagatgttattatggtttggcattaactaatgctatccaatattagcgtgatatgtgtactttttcttttagaaaaaatttattctttctaacacgactgatatttaagatttttccccacagccaacaaagtagtattttaaaaaattgacattattaagaaaaactncatcaacaaatttatctgttcctaattacatacaaatagtcatcttcaaaacaccgaataaa

SEQ ID NO: 111474 - DNA, 300 bp, Glycine max
tgaaggtgtgtaacccaccatttttttcttatagagttgtggttgggggcgaaattgaggcccttccaaagtgtttttgcaggggtataccacccactgcttgcccttcagtggcatatccgaggcaaggctcgaactctgctatattgtggtggggaatttcatgtgtctcccccatgggttgagagacatgtgcatgatcagattgaggttgtcggctctcaatgagtatgggagtggagttattgaaattctcactgggagtgtacgccacattgggtggtgtatacttgggaggca

SEQ ID NO: 111475 - DNA, 268 bp, Glycine max
  unsure (1)..(268): unsure at all n locations
ccgagaagaggaagcgncgaccggcgtttcttcctgnccctatcgatgaccacagagtggtacctggagacatgccccacgggccaggagaccctcgggacccccagtggggcgccattgcccaaaaccaaacctgaccaaacccgacccaacccgggcaaagtcgcgcagggagaacccgggatggaccccagcaggcgagctcccgccaccccacacaccaaaggaaaacaagaccacacagccaggaggccagcggcggccggcc

SEQ ID NO: 111476 - DNA, 380 bp, Glycine max
  unsure (1)..(380): unsure at all n locations
tgcagctgggattggcttatacttngtgttttttatctaataatattatgaccttttgttgttacttctatagaccctagcttcattctggtagaagtgtgtccaaaggataatctaagctctgccaccagtagttttgagaattgttgacgatctttctcatctcttaggaccaagttgcatgtgtccatgagctgcactacaacggtgatcacttttcttgttgcgtttcttgaccagtgaacggcgttgtttttggtgagaagtgcaaggtttccttctctggttatggctaacttggtggattgtacttgtctggattatcacagttggccacccacagcatggttattatggggatgtttttgaactaagtaccg

SEQ ID NO: 111477 - DNA, 298 bp, Glycine max
ttacaagattacggtgctgaagtttgttttatcaatgccacttcatttttgaactcttcctacccttgtccagacttctttgaaagccttttcacagctaactctttcccatctaacagtttgccctgaaaaataatcttctactatttttagaaagcttttaaggaaaatagaagttaaggatatcaattttctttatcaccttgtatacgggaccatagccaccttctccaagcttgtttttggttgaaaaattttcagtggcattagctaagactgaaaagctgaaagttggcaa

SEQ ID NO: 111478 - DNA, 324 bp, Glycine max
aaccccccccccaaaaaaaagaagaaagagaggggggaaaagagaaaaagagggaggggaggagagggaaaacggaagaagggggagaggaggagaaagaaaaaaaagggaggaaagagagggaaggaaggaagagagaagaaaaggaacaaaagggaagagaggagaagaaggagggggaagggaaagaaggggagggaaggaaaaaaaggagaaagagaaaagaaagaagagaaaaggaaaagaaaaggaagagaaggggggaagagaaaagagaagaaagggagaggagaaaaaaaaagaaggaggggaggaggaagaaaa

SEQ ID NO: 111479 - DNA, 126 bp, Glycine max
tttattttttattattttttatttttttttttttaatttataattttttcttttttttattttttttttttattaatatttttattttattatttttttttttttttttttttatttttttttttt

SEQ ID NO: 111480 - DNA, 388 bp, Glycine max
  unsure (1)..(388): unsure at all n locations
tggtagaagtctccatagaggccattgcctccctcgcccagtactatgatcagccattgaggtgcttcacctttggggacttccagctgtcacccatggtggaagaatttgaagagatcctatgatgtcctctatggggaaggagaccataccttntctcagggttctatccctcattagctagaattttcaagatagtccaaatctcggcgcaggaattagaccatataaagcaagtcaaaaatggggtggttggaataccgagaanatgtttggaggcaaaagcaagatacttggcatgcaaaggccaatgggccctgttcatanacattctcgcactgttgatcttcggaagagtcctctttccaaatgtggatgggttgatgga

SEQ ID NO: 111481 - DNA, 300 bp, Glycine max
tcccctgcaccaaatggcctttttctattaatacctaagcagaggaagggtttcacggactagcaattgaaagaatagaaggaaatatctagggagaaagagaagaagaaaaaaagaaaagtcaagatgccggcgaattgaaccgtggatcatttcctacatcctttctcttggtagccttgtaccctctgcaacagtcaggtaagttttcttaagattttgatgtaatctatgtacctttatgggtcctctgtgatatcatgtgggcatttatcttcttcgcttatcgttggtaatttt

SEQ ID NO: 111482 - DNA, 375 bp, Glycine max
gcgaatgtgcacaacaagtttttcacattcaccatgcgcccctaaacccaccattccctggtggccaccctcaactgagctcacgtactcccacgtagcccatatcctcatttctctcaacaccgggtccccattaatccttccaagcttcacaacattcaagcaaaacaacattcatacagcacaagctatcacagccaagattaacagagcatatgcagataactctgccaaaacaccaaccaaatcacagcttttctcacttaaagaccccagtaacaatccttcgatccaattcgttaaccgttggatcgaactccaaaatttactgtgagtctatagtacataagcctacattttgaccgttgggatcta

SEQ ID NO: 111483 - DNA, 297 bp, Glycine max
tcagaataaagtgatgaggtagaagcctctaaaggcaaagcttgaaagagcccgggtagtcaaagagaagttcaagtccatagccatcaaagtctgaaaagagtatgatgaactaagggacgtcaatatggccacagctgaagccttggaacgagaaaccaagaaggcccgaaaggaagaacacaaccaaagcaaagttttgaggggctttatagggcagcaatactgagctcaagctccgaagaggtgaaaggaatcatcacgggtcaaaggcatgatcttgaaggacgagctaaa

SEQ ID NO: 111484 - DNA, 306 bp, Glycine max
agcttagaacaatatacttgtccttcattaatttgtctttgggcttggcgaccacaatcaacaaagtactttcggcacctactatatgttgacttgaccaatgctgttatcggtatgttgccacaattcttcaacaccttattcacacattatgagaggttggttgacatgagaccatatcttcatccttcttgatcataagccatgctccaattttcccttgaaaagcgatcaaatcatgtcgtgatggccagactcaatagaccaaatagttctaagtcttgattcaaacacatgcttgcaagg

SEQ ID NO: 111485 - DNA, 269 bp, Glycine max
  unsure (1)..(269): unsure at all n locations
taggtggcgancgggcgatggtgcaagtcgactttccacattcacaaatcacacataaatccaccatccccagttgcccaccttcaactgagctcacgtactcccacgtagcccttatcctcgttcctctcaacactggggccccatcaatccctccaagcttccacaacatccaagcaatttcaacatccaaacatcatgaactatcaaaaccaagaaaacagggcagaggcagaaaactctgcccaaaacacaaaccaataccacaa

SEQ ID NO: 111486 - DNA, 403 bp, Glycine max
  unsure (1)..(403): unsure at all n locations
cccctcaatttagtggattttcaagtttgagaagtgaaaatgagaatggggtaaatttggaacaaactctcacctcacacaagtctataacattaatctaaacttgctcaaactgattttacgcctaaaattccaccgaatcaaaatttgactcctcaacacccaatnttaccctagaaatggctcttggtttcactttggtcactcatattcctcatttgcacagcctaagctttctcttaagtcctaaatgacatttcacactaggattaactcactttcaaccccaattaccactgaatccagatttagccttccaactctcaaagcctcactcttttttcactcataacaccacattctcactttctaaccctatggttactctacccttcatctctag

SEQ ID NO: 111487 - DNA, 304 bp, Glycine max
tataaactctcaagctttcaacagaatatgcaatgtgccaattgttttcaaaatggtgtaatcgactacaagatattggtgatcgattaccagtgtatttgaacattgaaaattcaaaatcaattgtgaagagtcatatccctttataaaaagcctcgtgtaatcgattacaaggatttggtaattgattaccagcgacaagtttttgaataaaaatcaaaacatgtaacccttccaatggctcacaggtttttctaaaggttataacccttccaaagatattcctgaccagacctgaagagtc

SEQ ID NO: 111488 - DNA, 68 bp, Glycine max
tttccaacgagcagtgacaagccaaatgtttataatatacttgcagtaacagtaacgatggggggggg

SEQ ID NO: 111489 - DNA, 308 bp, Glycine max
gaatctcccaactctgagaggtgacttcaaatccctatgtatgagagtcccagtccatctttgattatttttccagaattctcactatttcaaatcaactaaaaggaaatggtgagaacttagaaaatgtaagaattatggagagaagatactacgctcgttagatcccaaatttgagaacattgttataactatccaggaaaccacagatttagaaaccatgatgatagaacaacttccaggatcactgtaagcttatgaggagaagcataagaagaagcaagagatcattgagccactcttcagat

SEQ ID NO: 111490 - DNA, 361 bp, Glycine max
  unsure (1)..(361): unsure at all n locations
ctgcaacctgtgagcttgtcaggctaccactttctcgatacttggattttgtggaccttngatgatcaacatagcctgaagcttgggtttgacaagtatcatgcgcaacataagtgttgtgctcttgcatacctggcactaattgtgggtggcatgtgttaaagacaaatcgacgtgctgttgcatacgttcctcttacaaagtggcaggtactaaagacatggtggtgtgaatcaatatgactcacccagggcagaccttgagttttccaagccctttgaactatggaccacgggacctgctgacgggttatggccatcgtgctcttgcatacataccactcgtcgtgggtggcacacac

SEQ ID NO: 111491 - DNA, 487 bp, Glycine max
gcaaaatttccaatatgaacagaggattcttttcctcatggttgctaaatcaaaattctttttacactggcaaaggaaacaagagttaagtacctttgctataggtactacttactatgttatggacaacacaatggccctcaaatcccaaaatagaggctaaccgtgcaagcaaccccaacctaaacatcgttggctaacactactggaggtagcaggcaagtaaccaaccaatctaactatgccccttactcctcatcacaacatcaagaagtatgtttgtatatcaaaaagcatattgcaagtcttaacgcatattgccttccattagggatatcctcagcatagtccgcacttaaatatatacaagaccaaagtatacaataagtgaatcaggccacagcactccaagtggacgcacaacatttaattgcaagtaaatcaacattattacaaatatctccattcaatataccaataatacatt

SEQ ID NO: 111492 - DNA, 288 bp, Glycine max
tgtcatgatttcctctacctgcattttttataaagatacgttcaatttcatcaagttttacctgaatttcctcttgtgttgcttcttccattaactcaaaaaggagagaagaataataagaagtttaggatattaatgagaaaagaaagtgattatcaatattcaatattaccttaaagcccttcagactcttgggtgtgccaacctgtgccctcttgcttcaaggtcttcttgctaggatctattaacaaacccttcaattctggatcaaaattattccccatgaca

SEQ ID NO: 111493 - DNA, 353 bp, Glycine max
  unsure (1)..(353): unsure at all n locations
tcgacccggatccttaagtcacctgcggcatgcangctntgantgctctattcaatggagttgactattatatcttcagactgatcaacacatgcacagtggccaaggatgcatgggagatcctgaanaccactcatgaaggaacctccaaagtgaagatgtccagattgcaactattggctacaaaattcgaanatctgaagatgaaggaggaagagtgtattcatgacttccacatgaacattcttgaaattgccaatgcttgcactgccttgggagaaaggatgacagacgaaaagctggtgagaaagatcctcagatctttgcctaagagatttgacatgaaagtcact

SEQ ID NO: 111494 - DNA, 298 bp, Glycine max
tcgtccgcagatccctcatgtatgtctttgcctgatttagacaaccatcttagatttagactaacttaaactgagtttcgtccgcatgatccctcatgtaagactagactaagctcaagtagcttatgaaagtttagcctaatttagcctaagctttgtccgcagatccctcatgtaagactaggcctaaactaaacaacattattgtgacaacataattaaaaccaaaacttaacccgcagatcccttatgtgagacttagtttcgatcttgcttcaatcaagttctaaggcaacag

SEQ ID NO: 111495 - DNA, 289 bp, Glycine max
  unsure (1)..(289): unsure at all n locations
ngtccattatttgcgcattcattttcttttgtgacccaatgaagaaagactggttcaccggacaaacaagctgcaccttatcccttcctcttactatgattcactcacgtcttatcgattcaacccttcttcagttcctccatctctggcaaggtccggatctcaagtccaacgagcctcgtttgacccccgccacaaaatgcataaatgggtggtgctcacggagtgcttggtctggttcggttatcttattcggaaagggaaaatgttacagacaaaaacttaaagg

SEQ ID NO: 111496 - DNA, 298 bp, Glycine max
tcaaatacgcaatcgtcttatcttttattggttatgattccaaaccgggcgaattaccaaacgaatagctgatgagacaataaaactaataacgcgattgtaagccgacttctagcaggtgaatggggatgaattcattgagcggaacactaacaatgttgcaatggctcaaaatccatctgccgaataaaatttgatgagtgctacattagaacattagcaagtgggagttgtaactctgcaaagcatagttgcccccattgctagatatgtacattctcaaggtagtatcgcaacc

SEQ ID NO: 111497 - DNA, 250 bp, Glycine max
tttccgggagtaattacgcgaagattctcaccgttcttaagattcattcgtcgttcttcgttatcttcagtcttctacgggtaagtaccttaaaccatgcttttcaattcattctatgtacccgcggtggtgcacatttagcttcatgtatttcaattctcggtttcaattactctatatacccactttttgcatgctcaagccatttatggaagctctttctcgcttaatctaaaaactaaataaatct

SEQ ID NO: 111498 - DNA, 301 bp, Glycine max
tctagtcgtgtcatagacctcctctgtggttttgtctagtaaacgttgcatctgtgatgtgaacctgagtatgagcggatcgtttgatacaggttacagagatttggatgacgccactttcagtgaaaaaagataagtcatggtagacgccacttccaatgaaggaagataagtctgggtagacgccacttccagtgaaggaagataagtctgggtagacaccacttccggtgaaggaagataagtcaggatagacgccacaaggattaccttgataagtctgataattggtttaaccagg

SEQ ID NO: 111499 - DNA, 461 bp, Glycine max
  unsure (1)..(461): unsure at all n locations
tgcaagcttgcagttggcgctganaacacccaattgttttttccatgttccacagcaagacatgtaaggtcttccttctcctttccaatacctactgctttcacaagaacaccaagtccaacagtggactttaaagaaaatatgtattcttctaaagaagctctgccctccgtatatgacttataaacctgattatagacaaaagcaaactgagagtgaagcatataaataaacaactgaaaagataaataaataaaaatccattggccataaaggttcaaataatcaccagtgtgcatcacaattcacaataagatcataatctaatcagttattcattccacttaaattccattgttctaatgtaacatcggatggccagagaaatacataagttggtttgaactcattacagatgtttaagtacttccaagaatgaatcctttattgctatgtctcta

SEQ ID NO: 111500 - DNA, 299 bp, Glycine max
tctaaacaagttaaggattgtgagtacttattcaaaaatttatctataagtgcatgaggtgcacaagtgctagttgaaagttcaatgaggaaacttcttgatttgttttattcttatctcctgtaagtgttttgttaagatataggaacataagcatggttagaacacctccaagtgacagtggagacttatttttgaaggatactctacgcattcccgcaatgtcattctatttcaaatagtagtatatgtttccctactccctgttgctcaacatgattttatagcttttaagtatc

SEQ ID NO: 111501 - DNA, 308 bp, Glycine max
  unsure (1)..(308): unsure at all n locations
aagaaggagcttcaccaccaagatgagccttggataagaagcttggaaggatgcttcaatggaggaaaagacagagagaggggggagcacgaaattgaaggaataaaagatggagagaagtggaactttgaagtatgtctcacaagactctcattcatcaaaagtacaacaagtgttacacatgcttctatatatagactaagtagcttccttgagaagaattcttgagaaaacttcctcgagaagcttcttngagaatacttccttgagaagctagagcttatcttcacacacccctctcataacta

SEQ ID NO: 111502 - DNA, 299 bp, Glycine max
tattttagggaaatttgtaacatagattcttttatatgtaggactagggtcagatatagtcataaacaaattgtattttggttctttggtagtagatcattgcttttggaatgtgtttggtttcatcgcttgtgcaagcatttcaaccacttccctcatggttggtctctccacactttgttcctgaacacatagcttggccacaaagtatacctgctttgcttcatctaagggaatgtgacatagcctctcatcaagaatcttcaccaccttgtcattgctccaatttgtttgcaact

SEQ ID NO: 111503 - DNA, 298 bp, Glycine max
tgtctagtcgctaaaggctttactcaatttgaaggcattgactataaaaaaaatcttatcttcggtatctttaaaagattcttttataacaatgatggcgctaatagctcattttgatttcgagtttcatcaaatgaatttcaagactgcatttttaaatggtaacattgaagaaacgatttatatggtgcaaccagaaaactttgtgtcaagtgactcaaagtctgcgatgtgtaatctgaagaaatccatctatgggctcaaacaagcttctcatcaaaggtattataatttccat

SEQ ID NO: 111504 - DNA, 292 bp, Glycine max
  unsure (1)..(292): unsure at all n locations
cgggaggattggtggggacccggcttttantatgaacgaggatatgggagttcgtgttttcacttggaggtgggcaacaagggattgtgggtttatgctcgatttgtggatgtggaaaacttgttgtgcaatttggtccaaccgtctcctagtaccacatgcgaagggtgccccttaatcctacaaccttgctatgatgaattgtataaaggtgaaactcattgcttttattcgttgaccacacaatggtaccttggagatatggttcccgggtcagaataccttgtggacc

SEQ ID NO: 111505 - DNA, 379 bp, Glycine max
tcacctgcggcatgcaagcttgttagaactatcattacatgacgcttttttttatagaataagtttctttctaggaaacttgagattttaacagaaacactcggtaagttgccaactaaactgtctattggtcaacctacacattcttctgttttgcaaagttataggttgtaccatctgtggtgaggctcatgaaacagaccaatgtattcccattgaagaaaacattcaagaagttcactatatgggaaatcaacagagacaaggatttactcaatgaggattctcaggctttcagcagggtccttataatcaacaaggacagtggagatcacaccttggatatcaattcaacaaagaccaaggtggaccttctaac

SEQ ID NO: 111506 - DNA, 292 bp, Glycine max
tgacgcacaaagtgaaggatacaaagtttgcttcaattttctgtcttggttttgacttttatcttgttttgtttttgacaaattgttttcttgtttttcctcctcctcttttgcttttcaccaaccgcaacttccttgcacttcatgatcatggacaatttcactgcttcaaaatcatcaaaacactttatattttcaaaagaagccttagaaggatgcaaagtattggtgatttcttgaaccttaccaccacttccaacactcccactagacacatgagagaccttttttt

SEQ ID NO: 111507 - DNA, 299 bp, Glycine max
  unsure (1)..(299): unsure at all n locations
tgcgcatcattggaagctatatgttgtttatgtcttcgttgggcctacagaatgtaacttttgaacttgatgcaaagttatagtggacaagataaagagcaatgtcacactcataacccacctcattcatagctcactattagaaaagtaggattctacatcggttctttaagagaaattaactacatcggtttacgaccgtcgggtagtctattctacaacagttgacaaggaccgtcttagaatggtcaacattctacatcgatcgttgaaggactgtcgtanaatactcagcaggg

SEQ ID NO: 111508 - DNA, 299 bp, Glycine max
tagtttcaagtttgaataccatcacatttcctttggagctttaggccatggtacaggtttgacttattaaataccaacctttgagtttatgaatatatgtgtcagtgaggttgcaagtagcacaccatcaacaggtatgtgtctttgttaatcatatagcacaaacaaaagtgtagtaaaaaatagaagtgcagacatcactatcatagcctcaagataatgtgaagttatatacaataaccaaaatgaattgcagttagaacctgaaagtttcatgcatttgcacctcattaatggga

SEQ ID NO: 111509 - DNA, 402 bp, Glycine max
  unsure (1)..(402): unsure at all n locations
agcttcttaggaccactcaacaattgtaatgtttgtctaccctttgtntaatggcttgtncacgcacatgggccacttctctttcttttttgtaataagtcaagttgcatcttacaactttcttcattcctttcttgttgaaacaagttgaccttgtgagatgtttccctgatctctaccagtatcaagacattagttccaaatgaaagtcagagtggggtttctctggttgaagattatggagtgatatgataagaccacaaaacttgagggagctcatcgacccttggncctttagctttctttaagtgtctccttattcctcttagcatgactttgtagccgcttctgcttgctcgttggtctggggatgcttcaccattgtgaatattttctttatct

SEQ ID NO: 111510 - DNA, 295 bp, Glycine max
ttgtcttctttggatgctgacttgtggttataagccattaataatgagatggattctttagaatctaacaagacctgacatttagtagacttgcctcctaactacaaaccaattagatgtgaaatcattgttgtgtaacaactttgatatgaaagagctcagagaagcaagtgtaatccttggtattaagattactaggttaaaagagggaatttgtctggatcaatctcactacattgagaagatcttaaagaaatatgactactttgactgtaaaccagctagtacaccatat

SEQ ID NO: 111511 - DNA, 439 bp, Glycine max
agctggtggctaattagggtgggaatatgttatgccaaaccaagctttaaaaggcctgagcctatcctacgattaatttttgaggcctggacctggcctatatcctatcaaagcttttattttggctcggcctgacctttttaaaagcctagcttggcctggtagcctatttaaaaatcttcttcacattaaatctttaataatcctaggtgtttttaccaaaaaaaaataacacaccttctataataggctaaacaaggccctaatatataatttgccttaatttttaatctaacgttaatttagttggtagtcctaaaaatattttaataatataaacagaaatcacccaatgatataaaatattctaagacacaagaacacctcatacttgaggtagtatcatccaagtctatcaaaccaacatattaattattac

SEQ ID NO: 111512 - DNA, 297 bp, Glycine max
  unsure (1)..(297): unsure at all n locations
tttgaaaacaaactttgctactggtaattgattacagtaaactggtaaacnantaccagagagtaaaaactctttggtaaaagcttttttgaaaacttcatgtgctactcaatgttttgaaaaactttttagtacttatcttgattgagtcttttcttgattcttgaatcttgatcttgattattcttgattcttgattcttgaaacttgaaacttgattcttgaatcttgaattgttcttgactcaatcttgaagtcattctcttgggctttttgtcatcatctttgttatcatca

SEQ ID NO: 111513 - DNA, 342 bp, Glycine max
  unsure (1)..(342): unsure at all n locations
accatcattccctcttctccctctttcttcttcattatgatcnctattctccatttgatccacctctcatggaacgcatcatcttcgttgttcattaacctctccaaatgttgcatcaaagcttgcatttggaattgcgaaagccccactccatcataggattatacctgacatttaaaacaacaaatcaaacgtaacagacattatagttgttgtttgaatcctccccactcaagtgatcacacataatgggcttttctatgaacattttgcttttacactctattgccctgagtcttaggcattcagagattatgcccaacaagacaatcccatatgtgt

SEQ ID NO: 111514 - DNA, 296 bp, Glycine max
ttgatggtgtcgagaagaaatcacatgtttgtcatcatcaaaaagggggagaatgtgaatgtatgtatacatgattttgatgatgtcaaagaagaatctaacaaggctgcttcaaatgataagcatttgcttcaagaataattcaagattgcttcaacaaacaaagtcttgtttcaagattcactaaagaccaagccttgccttaaaacaaagtgctttcaagacatgcaaggctctggtaatcgattaccacgaagtgtaatcgattaccagaagacagggttgagaaatagctg

SEQ ID NO: 111515 - DNA, 170 bp, Glycine max
aggaagaagacccaggtataccaccctcacctccaccacaacaacaagagcagaactatcgtcaccaagctcacccaagacgagaaaacctcggggacataataaacccgaacttggcaactcgaaccgaagctcgaaaagcccaagcagaaaagggcaggcatggaaaa

SEQ ID NO: 111516 - DNA, 284 bp, Glycine max
acctggactatgtccagagcaagcgtcctttcatcatgtcttgcgcactaagcaaaatgctccaactccaacatctcgttttcatattctagtctttgcatcaatttacctctaaagcacttatgattttccttcttttgaatcttgcttgtccagaattaaaataacatttaagtctaaaaaatctaaccattcttgtctgaattaactatcaattaaacctaaattttcgagtatcaatagctttagatgaaaatattaatgatgatccacttctgtgctca

SEQ ID NO: 111517 - DNA, 301 bp, Glycine max
  unsure (1)..(301): unsure at all n locations
ntcnccactcgtacttctggaaagccctttttgatcagaatctccggcatccccgccctctcccttggttcctctcccggcccctctctctccgccaccgcccaccgcctctccgacttcgccaagcttctcgacttgaacttccacttcactcctattctcactcccattcaccaactcgaccgcaacagcttctgcattgacgacactaacgaagccttggctgttaacttcatgctccagttgtataacctcctcgacgagcctcccaccgctgttgacactgcgctcaagttggcca

SEQ ID NO: 111518 - DNA, 299 bp, Glycine max
ttagcctttgggtagttcaccatgttgtttatgttgctacccctatctttaacagtgttctcacttttaaaaaaagaacggaaaagagagaagaagaaaatgcttagaataagtgtgcaactcacaactttctaaactttgttttttctaaagctctcatggtaaaaagtgagttgtgaatcacatgtgagatcaagagacttattcactcaagcaaacatttttgcgtgtgattgattacgtttttttctctctttgactcaagttttttgtgggtttttcatgttgctagcatatac

SEQ ID NO: 111519 - DNA, 317 bp, Glycine max
  unsure (1)..(317): unsure at all n locations
acactaaaaaaactcaagctntaggagaaaccattaaaactaaagtattttctaaacaaaaatcaattgagggagcttcgccaagtgtccccatcgaaattgaaaaacctttattcaaacctttcaaagttagtgaaaaggctaaacggaaaattagggaacttggaaaaactaaatccttaactgagggcgtaggtgacaatcatagtgaattactaaacaagattggtagtttacttaaggtcattccagatactccccaagccttggaaaatacttctaaaatggtaacaagaagtacctccaaattaattaat

SEQ ID NO: 111520 - DNA, 302 bp, Glycine max
  unsure (1)..(302): unsure at all n locations
actcagctttgaatgctctattcatggagtgattttanttcttcgactgatcaacacatgcacagtggccaaggatgcatgggagatcctgaaaaccactcatgaaggaacctccaaagtgaaaatgtccagattgcaactattggctacaaaattcgaaaatctgaagatgaaggaggaagagtgtattcatgacttccacatgaatattcttgaaattgccaatgcctgcactgccttgggagaaaggatgacagatgaaaagctggtgagaaaaatcctcacatctttgcctaaaaaat

SEQ ID NO: 111521 - DNA, 298 bp, Glycine max
tctggtgggacatcttgacttgctttttttttgacattcaccacagattctgccttcttctattttcagattgggaatgcctctaacagcacttttgtcaaggattttcttcatgcctcttaagtgcagatgtccaaacctttgatgccatattctgacttcatcttctttggaggatagacatgtagaggagtagctggtttcttggggtgtccataggtaacaattgtcctttgatctgctgcccttcattagaacttcactcttctcatttgtcaccaagcattctgactttgtg

SEQ ID NO: 111522 - DNA, 300 bp, Glycine max
  unsure (1)..(300): unsure at all n locations
cgcgacacnatacacnacccaagctccgnggggggaggcagacttgcacttttaatctcacccggcagccaacacagccggtggcgccgcacgcacacggaaccacacagaatctacggcggacaggagggccacgggcacgggccccctcccgccggaagggatctggaccccagacccaccgaaaaacccccttgcgaatggccaagcaccacgcgaacccgaaggaaagaaaacccttcgggaacccactaacgcacccccggatcttaaaccccgcggcctccggcgcacaccggg

SEQ ID NO: 111523 - DNA, 297 bp, Glycine max
  unsure (1)..(297): unsure at all n locations
tgacttatatgatttctntgtaatttctttgttggccagtataatgtgatttactcgtgtttttcatgttctaaatgcatgatttaattggaaatgacatcgtttttttttttaatgaaaggcatgaaggtactactagaaatatggctttcaaagacgattgtgagagtcttttaaagctgattttgaattatctttgaagccaatgtcgtagaaatttaatcctctttgaaaggcatgagggcactaccaaaaatatggcattgatttaatactttccacgatgattttgtgacc

SEQ ID NO: 111524 - DNA, 305 bp, Glycine max
caagcttaaacaattgcagtaaataattaaaatttatttaaatccaaataattacataattttaactaggtatagaataaacgagagatgtaagtgtagaaagaagaaatctttctattgtcgatggccacaaagaggttctgcccctttatgttaatcgggattgaaattgaaaaaaaattgggacaattatttatgtcttcaaataagtagttattaaaattgaattagttagttgttttgtccattgagctcgaataaaaataatttgacaatcggctaagttagataagtattcggctgaa

SEQ ID NO: 111525 - DNA, 275 bp, Glycine max
taatcaaaatttttgtatattaaactaaagggggtgcattacatcaaagaatttagttatagaaacatatcaaattattcacatgtcattgtataatatggatgaaaaccaacgtgacctgtgcaatacccatgaaaaaaccccctctatcaacaaaaaaaatagacattatggaactttattgcacctgaaaaaattatattatagactctagcctttcattaaattttccccgtaaaatgaaacaaacatatttgtagaaataaaaaaaaaac

SEQ ID NO: 111526 - DNA, 306 bp, Glycine max
  unsure (1)..(306): unsure at all n locations
gctttgcggattaggttcttaccggcaaaattgatcnatttcgggcccgaaaagaggcggattttatcatcccacttggacgaatgaaaaaaagctggggcaaataaagagggtgaggatgaaggagaagcccgtgctgggactgtcattcctatacagccaagtttcccaccaacccaacaatgtcattactcagccaataaccaaccttttccttacccaccacccagttatccacaaaggccatccctaaaaacacccacaaagtctgtcttcccgcacttccaatgacgaacatcaccttta

SEQ ID NO: 111527 - DNA, 260 bp, Glycine max
ctcaactctgctaccacttgggctttttttcaaacaatcctttagggtgcttctgaattttagccctgatcatacctcaattgtgatacatgaaaaacctttatacatggttgcccaaatcacaattaaaaagctcaactaccaatctttcagagtccttcggttaattcgccttgccaccttatgtggtggggttttgctaataatatattacttttgcctaccaataaaacttatgactgattctcttttcattaatc

SEQ ID NO: 111528 - DNA, 297 bp, Glycine max
  unsure (1)..(297): unsure at all n locations
tgcttgggcgagctaggttgcttcttttatatgcaaccgncttttggaggaatattctataaggtcttagtaggcatggctgctatttgaacccccatttttactaaatacacccccttgctcttttttggtgattcttttatcgtaatgttacgaaatgttatgaatttcgtaaccatgcttgttttctttccgtaatgttacgaaaccttacagattatgtaatcatccattttttgccctccggaacgttacaaaactttacagattgcgcactaacacttccttttaatttcc

SEQ ID NO: 111529 - DNA, 264 bp, Glycine max
tccattgaagcatcctctccaagcttcttatccaaggctcatcttggcggtgacgctcctacttccatggtttattccctagtggatggcgccctctctcacctcttctcctttgtcgtccgctacatttccatggagtaaatcaccattgatggacctattgagcataaagatccgccctcctggaagctccacagcaacgcttcatcaatttatgccttcttggtaatgccaaaggaaaagcataaatttcttgcagaaaat

SEQ ID NO: 111530 - DNA, 300 bp, Glycine max
tcccttacctaaaatagtcccctatgttttctagcccttgaagaaggaagcaaggatgagcttagtgaattctgagtgaacctcctcaacttgtgatctaaggcctgctctttgatcctaggccaacatcaaagaagtctcacaacaagatcctcacacaacccataaaagagctcatgcaaaagagaagatgggctcaagggaccaaaaaagagaggaatttgttactcatctactgaaatcaagcaagggacttctatgattcagagaaaacaagctaccattgctcggggattatca

SEQ ID NO: 111531 - DNA, 299 bp, Glycine max
tgtaatcgattacacacatactgtttttttattaccagaggattttttcaaaaaacattctcaacagtcacatctttttatctgtttcttaaaaggccatcaaaggcttatatatatgtgacttgagacacgaatttgaaaagattttttcagaacaaaaaaggtcttatcctcttaaaaagcaaaatcgttttatcctcttacaaattcgttggccaaaacacttgtgattcaataaggaattatttgagtgctcaaattgttcaatctatctctttcaagagagatttcttcttctc

SEQ ID NO: 111532 - DNA, 99 bp, Glycine max
aggacccaccggagaccaatcatagcaaaaaagccacacgcccctcaaacaaatcgcccaccaaagcatccccgctcacccaagccgaataggacaaca

SEQ ID NO: 111533 - DNA, 412 bp, Glycine max
  unsure (1)..(412): unsure at all n locations
gcaagcttcatacagtggcgagaccgagaaagtgtttttaacaaaaangaattatatactcagagaaagaaaatggttaagatacagcatcagtgaataaactgcccagaataatgagttcaatgactgtgacctcataatcaatcgcagctcatggcagataaagaatggccagcatccacaaaatatattagacatgagtgcgacttgattaaaaaaaaaagcaaaaccatgaggaagactcggatataaggagtaagaaaaaagaatattggtcctcaaagggcaatgccataataaaagaggctaaaagcattggcatggggaactgcgacaaatctctctttccttttaaaaaaatgaataaaaaaatcctttaatggggaaaagaaaaccatcaactatccataca

SEQ ID NO: 111534 - DNA, 296 bp, Glycine max
tgtgttgtgataagattggattatgtgtttgtttttaaaaaaagggaaggcatccaattactaatatcattgcttggattatccagtgagcagcatcaagagtactcagttcagttgctagcaatcttaactgaccaggtcgatgacagcaagtgggcaatcactgctgctggagggattccaccattggtgcagttgttggagacaggatcacagaaagcaagagaggaagcagcaaatgttctgtggagtttgtgctgtcacagtgaagatattcgtgcttgtgttgaaagtgc

SEQ ID NO: 111535 - DNA, 296 bp, Glycine max
tgaaggcatgtaacccaccatcttctttagtagaacaccagtaacgtgtctactatcattgttatcatcttcttctccatcattgggggcgctacttgagctgtcagatccctccacctttgggcgtattctttgaaagattcatgctccttcttacacatgttctgtagctgcattctatcaggagccatatcagaattgtactcatactacctaatgaaggaaagcattaggtccttccaagaatggacccgggaaggttccaaattagtataccaggtgacagttgccccaat

SEQ ID NO: 111536 - DNA, 293 bp, Glycine max
ttaacaatgccacaagacttttccattctgaccatgctgatctttgctaatgtagaatcaacaattgctagtctactgaaacctaataactaggccaaatttacggctaaattagaatacatgttcttattcgctcattttcataatctacattaatccattctttccaaaataggaaatgggaaatactctttaggtgctaaaatcaggttttcatgttgcagatccatattatgtccattgattttattatactttccacatttgcaccattctgggtttacaatgatatg

SEQ ID NO: 111537 - DNA, 178 bp, Glycine max
cgcttatctttatcaaacataccgcttcatcgcatccactgagcgaaaaaagagcgctcagcgaaaatccactaatgtgcgctatgtggatcataatctcgctaaacgcgcaagcacgaacaaagccacctatttaagccagaaaatctcattctgtgaatagagtttggactgggat

SEQ ID NO: 111538 - DNA, 304 bp, Glycine max
gcttccgaccaaagcaactcaaaatctaggttttttttacccctcaatttagtggattttcaaggtttgagaagtgaaaatgaaaatggggtaaatttggagcaaactctcacctcacacaagtctataaccttaatctaaacttgctcaaactggttttacgcctaaaattccaccaaatcaaaatttgactcctcaacacccaaattttaccctagaaatggctcttgccttcactttgggtcttttgtttttctctcttgcacagcccaagctttctcataagtcctaaatgacatttcaa

SEQ ID NO: 111539 - DNA, 109 bp, Glycine max
caaacctataaactgacacacaaacaatataacagacgcacaaaaaagggtaaaaaccattaaaaatcttaaaaccagaaactgaaaaactaaaggccaagaaccaaac

SEQ ID NO: 111540 - DNA, 298 bp, Glycine max
ttgagattttgatagcacaagtggaagttttatcaaaagcaagagggacgtgactgagttcatgtacctccaaatgtacaaacaaatccaaacactgcaagaaagaacatatgggtctctggaacaaacattttttcttcggccctgaggttttcttgttttctattttaatatatggaaattgtgggggtgtgggtaagaaaaaaggtgcaaccatgcacccttttgagtatagtgcattgtagaattgttgcttgtttccttatttaaaagtctcatgtttagtgatctaaattct

SEQ ID NO: 111541 - DNA, 261 bp, Glycine max
acatcaattttctccgggctgaggctcccctgcggctgtcttactgggagaaccccgatcttaaaataaaatccatccctacaatgcggatggggcaaaacccggaatgtacgcacacgagcgaccctacatccgacttatgcctcctgagaactggaaacgactgcttccaatgcttcgacagcaagggaggcccatataaccactggaaaactcttactatcatccacgtaaccgcaaattaaagacgatgggatgggc

SEQ ID NO: 111542 - DNA, 244 bp, Glycine max
ggagagaaaggtctttccaactcgacggagcccgccccgcgtcgagggagacacgcccgacgctggggtaaccacccccacaacaacgacggacgcgagctagcggagcccccacacatgaacaacacctcgcccgtgccgacagaggacaagcgccagagaagccggtcaccgaggcccgaaagcaagccccccggagccagaaagcccaagaacacccacagaaacggaaaccccccgcccc

SEQ ID NO: 111543 - DNA, 298 bp, Glycine max
tgtggaagcctataaaacctttggcattcttttgcctaaatgaatttttgttgaattattgggcccagccttttccaagagctgatttgtaggggtcaccgggtcagtgctctctgaatgaggcattagagaatataaaagtgtattggataggcttctgtgggattcaagtattatatcatatttatgatttcctttctgtttttatatatatacatatattccccgttgaaaggttatgtttgattaaccatcaaaacatctgtagtgccaaaagaagaaaggtgtattgggactt

SEQ ID NO: 111544 - DNA, 298 bp, Glycine max
tgtgtttttctcacagataggacatgctttttgccctttcacactgtatccacttaaatttccatatgctggaaaatcattaactgtacaaaacaccattgcgcgtaacctgaatgtttgctacacatttgcatcccacacatctaccccttcttcccataattttttcaagtctttaattaacggcacaagatacacatcaatatcattccctggctgccttatacccgcgatcatcatacacaggataatgtatttgcgcaaaatgcacaaccaggggggaaggttgtaaatcatt

SEQ ID NO: 111545 - DNA, 58 bp, Glycine max
gggataacctgagagtagggaacctattcttcctctgatagagccaaacagaggggac

SEQ ID NO: 111546 - DNA, 290 bp, Glycine max
tgcatactgtctgcagacgagcttttttttcattcgccaactacaataccacggtaactgactcggcaatactccagatcctttaacataactggttatttgttccctacttctctgcatgaagtctactgattccgacgccccacacgaattcctgcatgtacgtgggaaaccgtcgaaccgtgttaggcctgtcttcacgctggtgaccttgtaacttctgtgaacccactgtcctattcggaacacatgcacaacagcgattaccaccctagcgatgcctttcaacc

SEQ ID NO: 111547 - DNA, 253 bp, Glycine max
tcgatgccttgcaaaatgacctttttttttatgcacacaaatttcaaactctcaattgtgacaattgaatctttactgtataaactttattataccttacatcctgggggaatgcttctgacacttacctgtttatcacccttataatatcttgtcaagacttgtccttatccaaatatatgcattctggaatttcatttcatacacatgcacgtctacaaaattcctttattcacaccccagtctaactgtt

SEQ ID NO: 111548 - DNA, 264 bp, Glycine max
cagccctaagaaggagtccacttttttttttcctaccaccgtaaacgactggtaagctgttaaaaaagacacctctgcaatttttcacataaggtatataggatgggcaggccaacaaaacgtcttcctctcctgataccattgaccaaatgcccttcccctaccaatatcaaattttggtggagtgcatagggaacaactccctactgattggatccatccgcgccctcacaaacctcccactggggggggtaaaaatccttt

SEQ ID NO: 111549 - DNA, 303 bp, Glycine max
tatagcttacttattatccacaaaaagcttcacttccatcactttccttgatttttaattcttgtaataatgtgtccaacgagacagcttggcaagcactcattgtagctggaacatacttagcttcacctgttgataaagccactatgggatgcttcttagaacctcattaaattggtgttgccccatacatgaatatgtaacctatagtactctttctgtcatctttggcttctccccaaaccggattaaattattccacttattcctcttaagtggtggtggcctttatttggaaataaa

SEQ ID NO: 111550 - DNA, 298 bp, Glycine max
  unsure (1)..(298): unsure at all n locations
tatcccatgcttatttggccgccgntgctttggatatcttcccaaatgtatcttcatccaccgattgataaatgagaaagagagctttcttgtctctctttcttgactccttcaacgtctcctttacaccttggcttagcgaggcttcatcttgctcctcgaagccattctctacgatatcccacacatcttgagctcctagtagcgccttcatcttgatactccaattatcatagttggtctttgtgagcatcggcatttggaaaggaaaacctccatttgccatcttttgaggatc

SEQ ID NO: 111551 - DNA, 111 bp, Glycine max
gaaaaagaaatggaaagaaaaaagtcagaagaaatcaaaaaagaaaagagggggataaaaagaaaaaagaaaaaaagggagggaggggaaggcaaaaagaacgaagcagag

SEQ ID NO: 111552 - DNA, 298 bp, Glycine max
tattgatttgtcatgaattgaaccctgttttttaaataaatatctcttgataccttgcttagattctaggagagcatatggttcaagacaatttactctaaatttgggggaggaaagacaattagaatgaaaagaaaaaggttaagcatcaacacacacaacaaataagttgtatgttaaaaaaaaaaaaaataagtgtgttgtttcaattaggtcaaaagcgacttaagagaagaaaaatagtgagaaggctacttgtttgatacaagaaaaaatcattgggataagtctaggactt

SEQ ID NO: 111553 - DNA, 285 bp, Glycine max
tgaccaattttgtatgataatttttttttttcaagctaaatcttagtggataactctgataaaatagtttcaactcaagacaaattgtacacatagctaaaaagcgaaaatgatcacgttggctgagaatgatggctctgaacttaatagtaggatttattaacttatagatggatgaaaagactatgtagatgctgacaactatatccctttggatgatctcctttctaaacttactcttttttcctctattatgaatgtagggtatcccatctaattatttaa

SEQ ID NO: 111554 - DNA, 299 bp, Glycine max
ttataataatattactaaggcatcatttatcgaaaatgattttaaatttgaaaacaacaagagaagtacaaattcatctttctgtcctatttacaaaatcaatcacaggtataaagcccacagacttatctaaattcaatatacaaatactatatagttaaaactgagattaaaagcataattccactgatataaatacggacttatgtaatgttgttgaaacaggtttgggccattgggcaggcttacctcaccatatgttttgagtgggttgggtaaacaatgtcatgatccataat

SEQ ID NO: 111555 - DNA, 293 bp, Glycine max
tgcgccgccagcaccacatcccctgatgttggtgcgagaataatcgccgccggggaggcacaaatggcagcagctgcgccacgactgataccaacgtttaccatcaccggaaatagggttgccatcagcaaaacacccagaccggttgcggaagagacggccagagacattatacaggcgacaaaatatgcggcaatcatcagcaggtaaggggagttaatatactgcaatggttttgacgccagcttgaccaccatatcattcgcgccgatatgggtcatgtaagcggcaaa

SEQ ID NO: 111556 - DNA, 298 bp, Glycine max
tgtatggttaagccacacctgaaattttattataaataaataaaaaggcaggcatgttatggaaaatgaatgatcaagaagagtctgtttggaaccacaaatttcttaaattgatttgatttgtcattgaaagtaaattagattacaggaggaaaagttgaattaccagcctgcaatcacaagagggtgaattggaactgtttcagcatgcattgctctgcacattgacattagcaaatagcaatcagattaaaaaacatacatacatacataagcatcaattccaatatacatacta

SEQ ID NO: 111557 - DNA, 234 bp, Glycine max
tcttgcatagccgctcttggtgctttttattttccaaaaacaaatccctcttattactagctattttgaattctctagttcctgaatgtacaaccttcaaattgttgcttgatcccctctttgagaataaggaggatctttataggacttcatcccgaccatcctctattcttttctaataaatatgtccctccgtctggatccttcccttcttggatcatctctctctattac

SEQ ID NO: 111558 - DNA, 293 bp, Glycine max
tcaaaacccatttgtaccccttattgctgtttctcctccattttctgatgcatgtttagcttcagaagcataatagaatttgaaacccttcttccttgaacattccacaaaacattacctctatttttacttttgttcctttacacatcataggattatttttacattatgctatttttttaaatctaatttgtcatgtaatttttctattaatttcaccatcatctttcattttttgacttcattactatgttcttattgctcataaattgatggtgattgtgtgtataaac

SEQ ID NO: 111559 - DNA, 293 bp, Glycine max
tagaagtacttgatcctttagcattatttagacatcaaaacatcttgcttaaatccatcagctgaaaaatccttcaactatttctcgtccttggaaaattctttttgcaagaatcaactgcttctttcattcttcctcactacgaggtcgtgaaaacaagacaacacttggtacctctaagccgtacactggggcgatgaggggcaccgcgcatgagccttaagtgaacctaggggcagattaaaagttctcacccaataggttcccttctacaaggtcatgccctaagacaa

SEQ ID NO: 111560 - DNA, 256 bp, Glycine max
taaagtctgataacaatggtcacatattctgaatgacatggcaaactctactagccttgcttcactcgttgctatccatctaacaatgtgctgactcttggttctagccatgattcagagggaggtttgatgatactgatgctagtatggtgtgtgtgctattatgcatgtttcagtcacgattagtgttatctacatgtagaatagcgctttgtttctctaacattcaacctttctttcttctctctctgtctat

SEQ ID NO: 111561 - DNA, 192 bp, Glycine max
ataactcgtcatattaatgccttggatggaatcacatcacaacataactgtgggtttccccacgttaacttacatcactatgtgtaccaaagtgatacatctgttctaaaagtgatctgtattttaatccttactacctttatttctctagcttcgttttattagggcatcaaagcttttgacttattttgt

SEQ ID NO: 111562 - DNA, 289 bp, Glycine max
tatgaaactctggtgtccgccgcgaccacatttaatgatcggcggacacttcctacgtgagtgcgagctagtacgtcccgctaatggattgtgcagcgctatgtgtgtatcggaaactgtgcaataccattgacttagacttctgatgtgttgtaaacactcgtcgtgtgtgttaccgtaggagactttgtatgtgggacgaccgattcgcgggtgcgagataattttagcaacggcgaagcactgcccgcttatggtgaaatgggaaagcttatgattcgttagccat

SEQ ID NO: 111563 - DNA, 433 bp, Glycine max
  unsure (1)..(433): unsure at all n locations
gctatatgagcctgccatgtgaggaaactgtgtatagtgacttatacaaaaaacttccaattcttatctctgaaccacgcctcaaagtctctatactaatgtcgtcattggcatcgcgagatggagctgactatctaacttggtccaacgtctgtcagctctccaaatctgaggaaacctggactctatagaactatctagatggccccatgtattgacatctacttattactgaggcgactttcacgaaatatgattaagggaagaatgatgactatcattatcacatacccaatgatctaactctaggtctagagtctccacaatctggaaacatccactcatgggatctanggtgtactctgagcctatgttattgctttatacagagctaaaatctactcttatgggcacaacttctatctgacttgag

SEQ ID NO: 111564 - DNA, 290 bp, Glycine max
tgtttgatgaaaataaatccatgctcatgacgctaatactacctgtagagtactccatctagtactttatatgtgataattactacatgctttgctaagattcttaataacaactgatcaactctgccaattgaaccgaaaagtatgtgaaagaaaacagttgaattgattttaagaagtgttatattataaaaggttttcattggtatatatgcaaatttattgagtacaatttgtaaagaattgaccaataatgttaattgaatcattaattaaatataagttattga

SEQ ID NO: 111565 - DNA, 278 bp, Glycine max
  unsure (1)..(278): unsure at all n locations
cgaagcgccacactacatgaagccaccgcaggcggcagactgacagctgaagagacatngaattcgaacactgagcaagagtccagcgggcgacctatgccgggcgatttgtggaggtctggcgagcatagcgcgacgggagaagatcgggacatgagtatgctctctgtgtgtgctgcaggacgcatcctgaatccgataactgcgcgcaccaagtcatggcgcatgactatggcatggcaccgtactaaagaggagctgcagtggagaccggtagg

SEQ ID NO: 111566 - DNA, 244 bp, Glycine max
  unsure (1)..(244): unsure at all n locations
aaaaaangnagaaggaataaaantgggaaagaagggagaaaaaaaagaaagaagaagagagaagaaaaggaggattgaaaaagaagaggaaaaaggaagaaaaggaaaaagggagagaaaagaaagaagggaaagagaaaaaaagagaaaagaagaaaaaagaaaaaaagaaaaaagagaaggaaaaggaaaaaaggataagggagggagaaaaaagaaggaaaaaagaaaagagagaagaaaa

SEQ ID NO: 111567 - DNA, 233 bp, Glycine max
actagaatttgtttttttcttgtaaacgcaggtaattgattttcatattcacctccttgcattttaaaataatgatttctatagaccgccaattattcttgcttttgataataattttggccaagaaatttatttagttaatatgatcagatatgctataataaatgaacgtgaattatttcgattaactaaaaaagcatttttagctaataaagctaacacttactataaca

SEQ ID NO: 111568 - DNA, 95 bp, Glycine max
aattaatagggtcactctttgccgatgaccaccgacctacatggttcctccgagagtttacaactattcctgttccacaatcgatcgaatagacc

SEQ ID NO: 111569 - DNA, 271 bp, Glycine max
  unsure (1)..(271): unsure at all n locations
tcactntctactgtctactttcttcttcttcacttcaaaaaaccagcttcacaacacagaatctatgagatgggggagatgaatgagatacatacacatttcgataattaacatttactatgactcttgtgtgtcctanacaatgccactggttattanatatattataaattatagatttggggagcttataccatatcattcaccangaaaacctaaatattcttgtgactatgcagcacaataatcttttatttacgcacataaatat

SEQ ID NO: 111570 - DNA, 358 bp, Glycine max
  unsure (1)..(358): unsure at all n locations
tcgtggcttcttccttcatctatctatggtgaatgactggcaattctgcagacaaagatttcctcattgctgcaatagagtacttgtgcattacttgaaattctcatatgagtgtactcctccatttgatcaacagatatagctcccanacagcagcttgatcactttggaacctgctctttcctttgtgactaataacctagcggaagacaaaaatgatgaaggagatgccaagatttacggaaatcttaaggaaataaacccgaccacataatttccttanagtaatcatgctttatcagagattctacctacatagagatcattttacttacagggagaatactttttcttattg

SEQ ID NO: 111571 - DNA, 390 bp, Glycine max
tcagctaagtggttccaaaatgcgtcgttttgtctatttcctacctgtgacatcgtaaacaacatcaaacttcaattttatttgttaagcctacagctaaagagtttccacatgcttttggagttgtcacaaagcacatattgtgctcgccaaatcttggagttctctataacagcattaccattcatatggttatttccctatgacccattgtgggaggatgtctgaatatctaatcgctctaaaatataatattgaggatcttcgttctacataactaataaaccattgttaatcattgattagacactcacttatgactaaaatacactctgtatcgataacagaatatcatagagatatagcacaatgtatatactatgtgttact

SEQ ID NO: 111572 - DNA, 238 bp, Glycine max
tatctagtccagaagactttgcttgaactcgagttcatatattctatgttaagcattatactcaatgatctgtcatgatagtcatataataatgaatactcaaggagaataagataaaaatgtcgattaagggtgatatatacttgggctctgtacttgttatgaaattttttactattattgcgtatacttactactatgaactaacattgtcttctaatttatatgtcacaactat

SEQ ID NO: 111573 - DNA, 348 bp, Glycine max
  unsure (1)..(348): unsure at all n locations
atccctatcgcaccatatccanatctagaacgatgggtgatcaagaggagacgcangaacagatgaaagccgacttgtctgctctgaaagaacaaatggcctccatgatggaggccatgttatgtatgaagcagctcatggagaaaaacgcngccactgccgccgctgtcagttcggctgccgaagcatacccgactctcttggcactacgcaccatcctctctcatacatagtatgacggtgaagggacacactgttgcacgatggcagccctcacctgtgatacaaccgagcggcttacccttatggattgccgccaactattcacctcccatcttgcaagaagat

SEQ ID NO: 111574 - DNA, 191 bp, Glycine max
ttcttggtggagaagctccttcttcctggctattcctactggatggtgcctacgctctgcttatgctactttccttccgatgcatctccatggtgtaaaatcaccattgcatgacccacactgatgctcaactatccagccctcatataagcctcacaagcaagcttttcatcagtgatatcagagcacat

SEQ ID NO: 111575 - DNA, 160 bp, Glycine max
  unsure (1)..(160): unsure at all n locations
atacctgctgactcatcgccagtgatgactctgtatcaacatatccatgagatagaggcatagtctagactttaatgaangtaagactactgattgatcatcttcaattgagcttaccaaactcaataatagtatagctgaactatgaccataccatgaa

SEQ ID NO: 111576 - DNA, 171 bp, Glycine max
gagaatggagaactgcacagagcaatcactacgcatagcttcaaactcgaaggtggaggacacatgaacgataacgcaattcatgggctccgaaaaagggttgagaatggagaattgcactaagcaatcactacgcatggctccacactcgaaggtggaggacacatgaac

SEQ ID NO: 111577 - DNA, 341 bp, Glycine max
ctatcactatgttcttttatatggagattgttgattatcaatccatctgacattctatacttgaatctgtttctgagtaacaatgggattacagctcttacagtagctgctggtctaattttctgtctctggagaattgagcagtctgcccacttttagctggaatgaagccagttttaagatataggatgaccattgggtgtactggctaggactgaagaagtctgctgaataatctatactactgagctcctcattttgacagactgccaatgtatcatgctctatgggttctaacctatatggagatcccaatgacttatcttcttccaacttggacc

SEQ ID NO: 111578 - DNA, 481 bp, Glycine max
  unsure (1)..(481): unsure at all n locations
taagctatggatatgggccncgtctatgggacaggtggcatcggcatgggcaataactctccatttcacagtaggcatagcacccatcttagttgccanctttaaatgagcaacgcactctacgtacccttantctcgttctctcacaccgggtccatcaacncttcagcttcacaaatcaaacattcattcatatgtatgaactacctaaccataaaatgagggaggagaaactttgacaagctcatcaatccaagttttctactacatgcccatacattctttgttcgatcgtaacattgatcgcttgaaatttatggaggtctaatcaaaatatattntgccgttggacactaaaatgccaacacagagacaccttctggatacatgacacatttctgcattgtaaacatgacattacatatttctgtatgtgaattcaattacttgtgatcattactaatgatctcagtcaacatgt

SEQ ID NO: 111579 - DNA, 238 bp, Glycine max
gatgatccaactacttacttaacattctgcatcatatttcttgctcttggcaatactagggtaatacagggaaatgattatctaaatatgtgcactgaaactgagctgtggtgctttctactatttatcattgtaaggattaccatccctattaccacttatttgttctctttatctttctttaggcaaaattaagcacaaatttaactgatggtgactaagaagctctccttctcac

SEQ ID NO: 111580 - DNA, 240 bp, Glycine max
tattattatggacacatgcttcagcccagcaaatatgaaaattttttaaatgttggctttaaatgaaaaattgtcacttataagtaaacttttgtaatctatgacttgtaacattttattacaccattgtttcttttctctaccttctgataataatgtcttttttcctaaggcaatattgtgcaatataaatgcactaaattatttagtaccactatattacatggatcctttttatgc

SEQ ID NO: 111581 - DNA, 242 bp, Glycine max
aaaaaattccttgcctttgtactccctgggttgcagtggtttttaacgtgatatttttctttttggcaatggcctaccttaaatgctaaatttgttatttttccctgtactaaacattataggggtatgtcctgtgctgtaataggtccaagctacttttatttagaaaatcatctacccccttcactctattatatattatcctctttcttttttaaaataaatataacatcataatatta

SEQ ID NO: 111582 - DNA, 405 bp, Glycine max
  unsure (1)..(405): unsure at all n locations
catctcgcttggtatcatacctgattggtatcgatacagtgatgttgtgacaaatctaagtactctcatacttcactttctaagtatactttcaatgttttagttttctaaggtatactcttctatggctcttgctagactganaatctataaagcaaggcttgattgcatttattaatcatctctaacacaaactttccatgattctgaactctctcttcttctctttgcaaacgttcaagtttttgttttcaacctgaaacggctttctctttcatccttttcttgccaaaaaatccagaatacgctaatctttggttcctctccttacaaaacaagacaacgctaatcttgtgttccttcctgcaagatcaatgaccgctgagatcttgtcttctttctttc

SEQ ID NO: 111583 - DNA, 311 bp, Glycine max
  unsure (1)..(311): unsure at all n locations
actctgccaaactcatcaattcacaatatcctactcaatacccagtacattcttcgtttaatttgttaccattgatcgcctaaatatttactgaaggttgctatacagaaatctacattttgaccgctgggatcttctataaaatgcctggaacacgagatgtactaccccttctgngactagcaatgcacaaccattgttctacactttggttaaaatctgctgcacaagttaacaacatgtttctgcataatatggttgtattcgatatccaacttgctcacattcagatttactcatattggatccta

SEQ ID NO: 111584 - DNA, 282 bp, Glycine max
aacttgctgtcaggctggttgtctgattgagacttaagtgaagaagccataagatggctgctaattttaaataatatagggattttaaaattaatatcatatacaatttcatggtatataaatatgtttaaatgtatatttacttcttaatatacaatcatatgttgttaataatgatagatttaaatctctttaatactattatattatattcttcatttttatgctactatctagctctaaggctaaacgaatacatatttattattatttaaagaaaat

SEQ ID NO: 111585 - DNA, 331 bp, Glycine max
agcatcaacttagtgaatatctaaactgacggacgagtattcttcagctcaactatacacagaactgattattagataaatattctcatatgcattaactatgattgtaagaaagacccaacactctttacctattgctgtcgacttttacttacttgctatacagttttcaccataaaagtaattatttatgtttaatcataattacaatgttgtcacaatccttctttaataacttattaaaaccagcctgattaactaatactcttattaaactacaccatccttaggtcattctattttttaaagaaaagacttgaatactacttac

SEQ ID NO: 111586 - DNA, 360 bp, Glycine max
  unsure (1)..(360): unsure at all n locations
tctganaatcacttaacatgagtgagaaatattgtttcgtgaagaaaatccaagccgaggcactttcgtaatgctttcgagacgtgtccgtatgcgaattcgcgaagatttccaccgttcttcatcgttcttcgttctttcttcngtcttcaaccggtaagtgctcgaaatcaaacttttcaattcattctatgtacccttagtggtccccacttgtttcgcgtgctgttattttcatttcatatacttttcgtacccgcttctgacgtgctttagtcatgtatatacatcatantcttgcctaatcaagaataagatacatctccaccgatcattcgtattgtgacatctattaatttc

SEQ ID NO: 111587 - DNA, 431 bp, Glycine max
  unsure (1)..(431): unsure at all n locations
atctagctgcgcccngtgacctagatcctggccactcttttccttgtgagctttcatacggcgtgttacacgcataactggaaaccctgcgtaccactaatcgcttcacacatccctttcccactgcgtattctaaaagcctcaccgatcccctccaacattgccacctgaatgcaatgccctgagcggattactcctacgctattgcggtttcacacgatattggactctanacaactgctctatgcgcatattaaccaccacgaccctccacactgtgaccgatcacttcggcggatggaaacgatatatatttccccgtcttcatttgcggtactaaagttcatctcatgcgtgtgcattatatgatacttatcatacgtttacgtgactgatttctgtatattataattatatctttatacaatcgt

SEQ ID NO: 111588 - DNA, 208 bp, Glycine max
actgacttttgttttttattataatcctgtctcttgtaatcgtcttttgcaccagtacacggttcccatggagatcccatatgtaactgatgatacagatccaattaacacaacaaatatcatcaaatcagcattattataggaaacctccaaggatggacttgaacattatacacgtgttgcataccctaattcattcaggaccatc

SEQ ID NO: 111589 - DNA, 86 bp, Glycine max
ctaaacatgattttccccttttatggcactctatcaggttgtggttactaccttgtttgctgataattgcagatgttggttgtcca

SEQ ID NO: 111590 - DNA, 316 bp, Glycine max
  unsure (1)..(316): unsure at all n locations
aatgtctcttatgatgattcagataattaatatatatccttcttaataaaactctttttgaagcaaataataataatacgaatgtntccatcacattctcacattggcaatttatgcatctttatgacatatttacagagcaatttatgcatttttatacagcatatctaccaaacaatatctcatatgaacgagtgatcatgtgtgtttaataattaacattacctgatctttatgatcttacgcaggaatgccattagactggtgcaataatttgaagatgtttgcagaacatctttactactacaaaacttta

SEQ ID NO: 111591 - DNA, 320 bp, Glycine max
atgagatatatgagaggttggcttgacttctggttaacaattgtgtatgagatcaaaactgtactatcttgctgatgcattgatagggacactgtgtgttacacagcccccagtgggaacttgatcatctgtgcatggctgtagaagttcaagaactcattgtatatatagcttcaattattgttcaaaacatggttattaaaaaattaggaagttgcttccccttctgattcaatattatgctacaactgtggctttgcaataacctcatagttcttgtaatatattgttccggtttgaaaattctttactatgagtga

SEQ ID NO: 111592 - DNA, 63 bp, Glycine max
tcttatactcgctcacttgatagaatttaggtaactctgcttattctttacacaaatgtcctg

SEQ ID NO: 111593 - DNA, 473 bp, Glycine max
  unsure (1)..(473): unsure at all n locations
atgatataagtatattatattttaatattatgaatacttaaatattataatgatagataataaatattagtaataatggactggtnatatcaaaatggcgaatgaattaattntggtcactaaaattgtacgttctgaaagccttcttgagatggaaatctatttcngtggctacttcgannaattatttgggtaaaatagcaactaannattgattgatcgctaagaaaaagaattagtgttgtaactagtgagcgagaaaaaaatagtgttatttctgacatcattgacactattagggactaaaatgcagtcgatcactgagttattgaaaatanggctcnaatcaatcgtagaattccataaacanattanatattaaatctgtgaagcaagcttatgatgatagtcagttgatcaagagtttgatatgacaaagccaaagaccaaagatgattcagatgatacagtca

SEQ ID NO: 111594 - DNA, 353 bp, Glycine max
ctgactgccatgattagtactaatttctgagttttggatcacaatacttctatcagtgggagcatgactcagatatttgatgagcaaaatcaagtaagcaattcaagatcagatcagatcagatcagatcagttcaaatcagatcagatatcagtcagatcagactcagatcagatcaagaactatcaatagtctaaagtttcacatgatccagattttcaatttacccaagttctttggataacttaccactgttaactgatcagtgacatcttactgatgatcagtaactaatcattaagccctagaacttcaattaatgtacatgcactgataacggttacgtattaata

SEQ ID NO: 111595 - DNA, 122 bp, Glycine max
tatatcttcgctcactcgataagaggcactacaaatgctcttctgatatacaatccatcctaattcatttgtgatgaagacactcatatgatccggcccaacaaagtgagggggtatgcata

SEQ ID NO: 111596 - DNA, 193 bp, Glycine max
  unsure (1)..(193): unsure at all n locations
aattaccattctatgctatccacttaaagccgagttcaatggtggttcgtgccttctacggcacccgccgagaggttatgggagagatcgatcatccagtacagataggccctcacacctgtcaagtcaccttccaaataatggatattaaccacncctacagttgtctagtagggcgcccgtggatccactc

SEQ ID NO: 111597 - DNA, 347 bp, Glycine max
acatttgactttacatagacatccgtgagatatcaactaaggtaatcttaacacacacacacctattttaatgtgtggccacacatttaaatgctgcacacccaaaacagaacatgagctctcgcacttccctgaaactgtaggaatgattgcaaactgcagttataaagacgacctctcaactactatattgacatcctccagtatacacagcaaattggaaactctattgcaatccattgatgctctgaacgaacagtaactactccagacgcactcttccaaaaaagaaatgaaagtctaatcagcgattaaaacttcttttccaactccaaagaagaagatga

SEQ ID NO: 111598 - DNA, 279 bp, Glycine max
catctcagaaatgcatttgagggctttaatgccatctagggaacttaatgctcctcaatatttgctgtttactcttgcacgaatccctcttgctaaatgtttttggggaccctcatatttttgggggtaaacatttacggctgaaaactaacttcaatataattgcaactattaattgtttcttatctctaatgcctttgggctacacgattttgtaataatatccttgatcttcaggaatttcgacacattttttttgtacacattaaacacatggtc

SEQ ID NO: 111599 - DNA, 414 bp, Glycine max
  unsure (1)..(414): unsure at all n locations
cacaacaagttntccacatgcacaatgcgcgcattaacccaccatccnctggtgccacctncaactgagctcacgtactcccacgtagcccatatnctcgtntctctcaacaccgngtgcccatcaatcctnccaagctttcacaacatccaagcaaaacaacattcacacagcacaagctatcacagccaagcataacatagcaaaggcagaaaactctgccaaacaccaacccaaaagtcacagctttcccactcanagaccncagtaacaattccttcgatcccaattgtaaccgttggatcgactccaaaatttactggaagtcatagcgcataacctacattttgaccgtggatctactacnacgtcagactatttacatactctttccaaccacaaaacatgattttc

SEQ ID NO: 111600 - DNA, 346 bp, Glycine max
  unsure (1)..(346): unsure at all n locations
tctaagctctctngaaccntctgcctgcaccgattctcataaactccttggttgcttcataagctntggcagtgaccttcagctgttcacgtgcatcacatattgaacttgacagatgtgtgcatttcaagtcattagagagaaaatctttgcaatcttgcattctgtntcctactcttatctttgtatgcaatgtcacatccttctcatanaaggtgccatttgtatgcttcaattccaactggttttcactttgtctctctattcttactgtcctcttcttctaatgttcatattctacacaagaatctgattcgtcagtatacatggaacaagcatcttgatg

SEQ ID NO: 111601 - DNA, 226 bp, Glycine max
tttttttgtcctgctcttcgctgctcatcatattatacatttgtcacaggagaaaaagctagtgatttttgataaagattattgctgccatgctatgggaacatctttatgaaatatatctcattgcattggttctttcttctctctaagtaacacttcgtttttgttatctgaaaggaagacagattgaattcttttaatgttatgcttcacggttctataatgg

SEQ ID NO: 111602 - DNA, 243 bp, Glycine max
gcactggtcacttaaactacttatatcactgtatatccaactgatcatacatgaaattaaaactttacaaccttttactttaaagcatggctttttggttgatcaaagaaagaagaattctaaaaactatcgcaaagctcttaatacaatggcaactctgcaattatgaaatctttagacttaattgttatctacttaaggaaaatctttgacattattctcagtgtatcaaaatgttgctct

SEQ ID NO: 111603 - DNA, 389 bp, Glycine max
  unsure (1)..(389): unsure at all n locations
gatgaanatgatgcaccaaccagatatgtcatagctcgtcttgataaactatttcagacatgaactngaagctctgaagcagaagactaagcttacaagcatggattggtctaccatgaagatgttctacagactcaaggctcattgctctagtntggaacctgatgggaagcctatacagatgccaattatcatgagataaagaagtngtattagaccttgaaccactacctgctctactcaataattttttcaacatggtctgcccttggatatgggagtactcntttgtgtctgaatgcaccttctnncttttggtgttcttgctctactccagaatgactntcactcattgtgtcaacttataattgaagaaatggattctgatg

SEQ ID NO: 111604 - DNA, 163 bp, Glycine max
ccgtaactgccaccctcacctaggatgttttcgacacctcgctagacacagttctatttcggagaaatggcgccgcgtggcaccctgttactccatggccaagttgaccacaatagccttgagtttatgccatgcttggccacataggagggcgtgcgtgaca

SEQ ID NO: 111605 - DNA, 407 bp, Glycine max
  unsure (1)..(407): unsure at all n locations
ctcagcttctccgcatttctataataggggagaaggaagagaaagggttcacccttggcactcttctctttcgaattgcttaggaaaattgtttccgtcaagaaaatccaagccgaggcgcttccgtaacatttccgtgagtgatntcgcgaaaggtttcgatcgttcttcgacgttcttcattcgttcttcatcgttcttcagtcttcaacgggtaagtacctcanaccaggctgtccaattcattctatgtacccgtggtggtccacnattggtttcatgtatttttattctcgnttcattcactttttattacccgctttgacatgcttaagccattnntattaagtcatttctcgcttaacctaaaagataaataaatttccaccgatncgttgaattgtata

SEQ ID NO: 111606 - DNA, 229 bp, Glycine max
attgtcgagaatcaaccagcctctagttcgggattgcagttgatgctatctatactattttgctatcggagtctacacttatctcatgccctgggcttgttacgctattattatacttcgcccctgcggtaaccttttacatttgctattaaataaacattccgaggtgaagatacctattcttaaaatttacgggtgggcgcccttgtgtaaaagcgatattttatta

SEQ ID NO: 111607 - DNA, 351 bp, Glycine max
  unsure (1)..(351): unsure at all n locations
actgatgacactgaaatttgattctctgccatgatgctcgccagtggtttgcaccaacatgcngatatgacccgacgtcttcttgctcggtcattggctnttgaaagccgcatccttcactatntaatngttgcgtatttgcttncacggtcttccaacctttgcccaggttctgaggaagatactaatatcatgtgggcctttcatacatggcgtcaactngactgggcacacttagtcagatatcgcatgcataaggcattgcgattaaatgctccactaccatatncacagcttgtcactctcttttttcgccattttcaaaattcctcttgatcttgacctttacgt

SEQ ID NO: 111608 - DNA, 399 bp, Glycine max
  unsure (1)..(399): unsure at all n locations
atctagctgccgctgcaagcaatgagtaaaaaatatttacattctttataaaaggagtacttggtgttggatactatttgcgtaatttgaatggaaaatttaattaataaatgattatagtgcaagtttatgttcaaacatcgtcgctaaatttttgtggatccacttttcttcacttgattctgaatttttaatctatcctaaaattaaatcatatttatgccataaatataattagttatctttaaaatttgtaatntagctctaagtaatcattttatcctacttatttaaagtaatctctaattttataagatacactataactaataatgtctaagttattaatgtcactagctcaatgctctgactttatctcacaatacttatgctataggg

SEQ ID NO: 111609 - DNA, 171 bp, Glycine max
ctttaatcgaatgtgcaaacatgactatgattatatgtccctctatgttctatatacttagacccttttatattattctctattgtggcgacaaggtgttccctttgtcctacgtattctaattggatgagaaatagacctacgtagtcttttatcaatgatctttttact

SEQ ID NO: 111610 - DNA, 338 bp, Glycine max
  unsure (1)..(338): unsure at all n locations
catgtggaaataccatgatcctttatacaataacatacaccaacataccaaatggtagattcgattacagaccaatatcaacatcaagagctctttatgtcactaatcaagaatagtggcgttcggcggtgcgcatgctttattattgtacgtgtgtgtgtgtgtctatgtgtgtgctctcaaaaatgattatcaaacaagataagtcataagtgattactcgtgcttntcattgtgattcnaacangatagatgtatagtatgagaaagttgatatatcaaatctgataattgtgttgatgattcttgtatacctgtgcttaaattctttcagacat

SEQ ID NO: 111611 - DNA, 306 bp, Glycine max
actgcaatgtggcaccattcgctttttattaccttagaagtctaactagattcgatagtcatagactcaaccttgatggcaatgacctttagcctctgtggacggaatatgtttatccaaaaaatgactacacgggtttattgttcaaataaggaagttatgcataaatgaattactgatcagtataaatgaacagattttccaatgaatagataggcgctactacttctagtagcttatggtcaatataagccctaaccatcatacttgaacccatcttaggtcaaaggcactagattgtcctac

SEQ ID NO: 111612 - DNA, 479 bp, Glycine max
  unsure (1)..(479): unsure at all n locations
aacananaactcacacagatctgcaagtaatgaggtaattctcagtacactaataaagctaacttacaccaaaaggctatcggttaactaatatgaataagatacttaatctcataaagtgaaccatctagtcatagaattaagttggaattagaatgttacatcacatatgctaaataaacgtcaactgaccaagaagacacanatcttgaatttaccttctcaccgccactcaatagtgaaacttttcggtcaagcatatcagctttagaattacaacgcccaaggagccctttaatatcatcaatcctccagtcctctggagcgtcctctactgtctcaagcacgggtgtttccagatcaagtgcctcagcctggttaatataatgaagtcagcactaaatatatatgaaccacacagtatttttgacatacagaactggaactgagtacaaactatcaatttattgacatagcat

SEQ ID NO: 111613 - DNA, 394 bp, Glycine max
  unsure (1)..(394): unsure at all n locations
gtctacatattccacttctgcaatggataaagcaacactggtttatntcttactatgccaagaaactagagcagatccaatgaactgacaagttccacttgtgctctgtctatctgttntagaaccggcatagtctgaatcaaaatatccaattaaggtgcatgtggaatntctaggataccataaacctatgctcataatgcctactaaatatcttatgattcttataatagcactaagatgtgattgtctaggaattgattgaaatctatcacacatacacacactagacattatatcaggtctgctaccagataaataaagaactgatccgatcatacctcgatattgcttaacatctattgactggccggngtcatcttatctagatagc

SEQ ID NO: 111614 - DNA, 266 bp, Glycine max
  unsure (1)..(266): unsure at all n locations
agtactctggatcaatcccgatccagtcaccagagtcgctgatcatagacaccgattattggccttgatcaccagaggacttccagctaaggagatcccaggatatcacagacacgctagaacataccatatcagttatgcaatacgaccaacctctcaactgaatcngagaatgtaacatgtaaacctttcttgaccccgaaaccagaatcagctctaccaccaaaccagagcactaaacttggagagcactttaaaaaattaaa

SEQ ID NO: 111615 - DNA, 459 bp, Glycine max
  unsure (1)..(459): unsure at all n locations
tactgggtacgtgtctactatcatttgtgatatctctntctctatttgtggggtgctacttgagttgccaagtccttcatctttggcgtattctttgaaagaatcgagccgccatattgcacactgcttgtagttgcattctatcacgagccatatcagaatngtactgacactgcctagtgaagggaccattatgtgctttcaagaatggactcaagaaagttcctaagttagtataccaggcgacagttgtcctataagactttctctgaaaaatgtatagcagttttcatctttgcgttgccccatcttccacggtacatcttagatggtcttgagcgagagtcccttgtcttgccaaaccgcacctgaactggaagatctgttggttaagacactctcttgtagcaagctatcttacctctcatgcctgacttcttaatatcacttccttctgct

SEQ ID NO: 111616 - DNA, 193 bp, Glycine max
tgccaatgaattaataggaatgtttatcctacttgatgctctgcgctgaaaatgcaaactggaaaacaacttcgaatgctaagcgctaggcaactgataatatacttgtcttactactactgtgtaaaataacgttgtctgagaaatatagtctagtcagctcctgactacacacagcagacctcatctctga

SEQ ID NO: 111617 - DNA, 316 bp, Glycine max
  unsure (1)..(316): unsure at all n locations
aagcactgagctcactgaaaggtaaataaatgtagcttgtttgttangataaggatccactattctaccaatcaaaaggattgaatttcaatgctctccctttgacctagtaatttggaggagcaggtagatatttcttttatccccaattcaattgtcttatattggcatctcaatcatttggagcaggaatttacacttacctagggagaacgtttctcacatcgtgactagattttttcaaaaaagtggaatattctttacacatgcggtttaaaacaatattctttttaactttcatatgcatttaacatat

SEQ ID NO: 111618 - DNA, 241 bp, Glycine max
tcagttcctcagctttttttaaaataaataatctggccctatggactcctctagacataactcattctagcattaatgtgggagtggaaccacttctaatcaaatcctacctcagagggtctataccagagctcgcactgcggctcatctactctctcatgtgtagtcctctcgaatataagaagagtgtcaaatctgtgggagcacttgcccattctgatcttccatctctcagcttttc

SEQ ID NO: 111619 - DNA, 169 bp, Glycine max
  unsure (1)..(169): unsure at all n locations
caagaaagagcgtctgtcaactggatccctctatggaaagaatgaagaaccgaggttcttatttcatgcanangatctccgaatgttcccttgatggagacaatgcgttgcatcagctacaatcctgttcttgctataatgcaacttggctaccctatgagatgtgcac

SEQ ID NO: 111620 - DNA, 288 bp, Glycine max
  unsure (1)..(288): unsure at all n locations
agctgatgcttttgaaattcaattaagaaattcaattaagaaaatcttgtaagaaacagttgccttctagaaacttgtntgacatgcttaagaaaggcattcctacagagtctgacagaanaacaaagtcactttctcatgtgggtagagtaaaggacgatcttacttncgaacttagagagctgggatggtctgatatggatctacataatgaagacaaaaagtcatcaaacttgagttagagggtgaattctcatcccgattggagaacctttacanaaactggtg

SEQ ID NO: 111621 - DNA, 355 bp, Glycine max
  unsure (1)..(355): unsure at all n locations
gcactatcacatcacaatacacattaatcaccatccagtgccacttaactgagctacgtactccacgagctctatctcgttctctaacaccggttccatcaatccttcagcttcatacatcaagaattcacatcaacatatgaacttaaactagcnaacggcaaagaaaacttgccaaaccaacatcccacttttattaaaccatactttttgtcatatacgtgacataaattacgagtctatcatatttaattgacgtggactcaaaactcaaccattgctatttcacaccaatcctatttgtgccaacaattgtgcattacacaacttgtaatgaattaaccctgctgcattc

SEQ ID NO: 111622 - DNA, 415 bp, Glycine max
  unsure (1)..(415): unsure at all n locations
gcttctcttttctttctatanatggggaagggggaagaacanaatgttctccctctggatctgagattcacttaaatagtgagannaaatggttccgtgaagaanatccaagccgaggcgcttccgtaacgcttctgtgacgttntcgtgggtgatntacgaagatttcaaccgttctttgtcgttcatcgttcgttcttcgtcgntcttcggtcttcaatcgataagtttctgaaatcgaacttttcgattcattctatgtacccttagtggtcctcantttgttcgcgtgcttnntatttcatttcatttactgttcgtacttcctttntgacgtgctttaatcatntatttaagtcattgtctcgcccaatcaanaataaaagtaattttcaccaatctttcgtatataaca

SEQ ID NO: 111623 - DNA, 135 bp, Glycine max
aatatgttatttcgacaccagctatctttcgtcatgttctggaaaggatatactactcttttttccactaaaaaacaaccactaacataagtcatatataaccattgttttacatcaggactaccaaacattaca

SEQ ID NO: 111624 - DNA, 230 bp, Glycine max
ccaatcatgccgactataatctatcattgattttattactttcacttgatattacataaattctcatgtatatgctctggatctgagggcatcttggaacaagcttacttgatattactaatgaggcaaaaacggaattaactaacttaatatttgactgactatactaagatgaatttacttatttctctcattctttacattagagaattgcaaaaggctcatgtagg

SEQ ID NO: 111625 - DNA, 279 bp, Glycine max
caacacatgtcaacacactattaacctgcgcacatactaagctattagacgactaactgaatatgtattactaaactaatactatgtaatccaataagtcgtctgggtgctggctctatgaatcacactgatatggatctaaaagcgttactgaggtgtaagtgatctagatgtgggaatgccggattgtttccattctccctacatgcaccctaaataagtagagagacttctccctgtcgacgccttgctagtctgcggagccccttaagaagtggt

SEQ ID NO: 111626 - DNA, 378 bp, Glycine max
actctcacgtagcccatatcctcgcttctctaacaccgggtcccatcatcctccaagcattccaacatgcagtaactaacattctacagcaccactatccatgcagaaacagagcaatgcagaatatctgcaaaacaccagcgaaatacagctttctacttaagacctacaacaattcttcgttcaattcgtaaccgtggatcgactcaaatatactgaagtcttagtgataacctgctttgaccgtggctacagaaaatcagactacttgactgtcttcacaccagaggatagatttctgactgtgaaatctgtgcaatccagaaatctgcaaagaattcacacaactcctatcatatgcaataatctcagccaaat

SEQ ID NO: 111627 - DNA, 284 bp, Glycine max
  unsure (1)..(284): unsure at all n locations
ataaaggttttgcactagaaattacaggatgctttttcaatatatgtcactgctgatcaaagtattaagggtaaatatgaaacgcgagggaatatatgaaaatgcctcaaccatagatgtcccttctctcttttattctaaactgactagacctgctatatatttttttgtgtaanaaatttattcttctaagcggcttcagtgcccatcctttttttctctcactatattaaaggtactgtgcaatgtcatctctttaacattattgctcttaatacaacctt

SEQ ID NO: 111628 - DNA, 133 bp, Glycine max
ctttcaatcctggcaatactgtgataatagaatattgagtgtcaattgtcatctatccttcagagagatcttctttcttttctcatttgaaagggataaagaccgaggtctctgtggaatatttaaacacaag

SEQ ID NO: 111629 - DNA, 287 bp, Glycine max
caccatatgttccttttcttcaactaagaacacccataggtggtctatataaacattctcctcttaatctctatgaagaaagacaattgtcacattcatctgatgtaactctaagtcataataggctactaatgacatgataatcctgacagaatcctgttgggagaccagtgaaaatgcatctctataatcaatgccatctttttgagtaaattacttagcaacaactctagccttgtaacgtttaagggttccatgagagtctatgttagtcttgaagacccact

SEQ ID NO: 111630 - DNA, 401 bp, Glycine max
  unsure (1)..(401): unsure at all n locations
cacctgacgtccncaatgtcttctgaccttcgcgacatatctncaggnaccactctgtggtcaacaatataagcaggaagtatcaccctttaacacttcctcatctcaagcttgtaagattatggggtatncatcacatgtggtactaagtggcggtcgtgcgatggtgcacaacaagatttccacgtccacaatgcgcgcataaacacaccatcccnctgttgcccacctacatctgagctcacgtactcccacgtagcccatatactcgtgtctctcaacaccgggtccccatcaatccttccaagcttccacaacatacaagcaaaacaacattcaaacagcacaagctattacagtcaagcataacagggcataggcaaanaactctgctcaacaca

SEQ ID NO: 111631 - DNA, 74 bp, Glycine max
aaatatggcgatgaagtactcatactcccttaagccattcatcgaaaatgatatgcaactatcattgacgtcat

SEQ ID NO: 111632 - DNA, 391 bp, Glycine max
  unsure (1)..(391): unsure at all n locations
atctcaacaaatgtactctttattttaatgttaccaaatcatatagacctnaaactattatcttttccatactatatattggcatcccacctcttctattaatgtaagactattatattttattgataaaataacaattttatactatgttataaatatcatggccaatatttttttagaatataatacacattaattaatgtgtttaggaatattaatttatgaataaattaattaatcaaaagaagtttaagtgaggattataatttacttgtgataaatgcacggcagcgatggttgttcattaccaccatcccctgtctttcatatacgtaatatggatctatcttccgtcataatagaaatttttgaagaaattaattattaaaaa

SEQ ID NO: 111633 - DNA, 298 bp, Glycine max
aaacaccatagaactgatggagcatgtgattcaaactcatttggcagaccccatctaacagctatgccatgaagacaaacctgatcatagctttcaaatcacctgagacatactgttctgctttctgcttctaacactattgaaatacaacctggagattgcactttatgaagtgatgctttataattaccatcatacaacctattataacacactgcatacttatctacacttcggattagcatacatgatgatagatgtcattagatcatgccaagaacttattcttagaactgct

SEQ ID NO: 111634 - DNA, 299 bp, Glycine max
tgtgtgtgctgccactattatctggtgtgctgaaataccttgtatcataccatctggtatcatacatggttaaatgaacagatgtaatacctctgtatcataccaatggtgtatcataccatggaaggcctgtatcatacagtgggaatcatacacggcatagtatgtatcatacattatgttatcataccggtacttacttcattgcaagcggattatttgcctggatcatacaaagatcttgaaactttattcgaccgttgaccatgtgactgggtaatttgaaagtcctttttatt

SEQ ID NO: 111635 - DNA, 258 bp, Glycine max
  unsure (1)..(258): unsure at all n locations
ccgtctcttggcatatctttctctaaggagaatgaaactatcatctggagctgataatcaacttgatcactcnttgcatgtgggtgataatattaattaaacaaagaatcacatgtactaagaaggaccaataattgatgtcctagcacttatagatagtgcgtgttcttatttcgcctagggaaatcatattcatttaactagtatgttaaacaccacgtgcaacgacatgtatgagcattgatgcacacatatctg

SEQ ID NO: 111636 - DNA, 188 bp, Glycine max
  unsure (1)..(188): unsure at all n locations
caaaccaatcaaatgtaacaagacaattatagntgctgtttgaatacctcacccgctcaagtgtatcacacaatgatggctgttctctaatgaaacaatcttgccttttaccactctaattccccttgagttcttagacaattcaagagattatggccacaacaaagaacaattcaccaatatgcgta

SEQ ID NO: 111637 - DNA, 381 bp, Glycine max
  unsure (1)..(381): unsure at all n locations
acactcaagtgtntctgctctcaggacaaagaagcctcttcacacaccanaatatatatcagacatcgcaacggtcagatcgtgaacatctgtcctgtgaaccaccagaccacatttcgagaagatccaacggctaatgaatgcatgagggcacttttactgagacagccttacgaagcttgcttgagaagctcttctcgatatgctgctttgagaagcttccttgagaggcttctttgagaagcttcctcgagaggcttccttcagaggcttctgtgagaagctcagaatgtaactattcacacncttctaataacctcacctttgaatngacatggataaacacacaatagatanatcaacatcaatataataatatat

SEQ ID NO: 111638 - DNA, 361 bp, Glycine max
attcgatactacagttgctgtgtagatcctttctcacgtaggtataagtatgattatttgaaatgggttctttatttttggttgccactatagaatgctgtgatttggtaatgtcttaccattcatttgcaaggaggagctacttggggccaataatcattatcactatcatccagaatcttcatcatcttacaaaaataacaatgaggtcaactatcattatctagaggtagacaccctaattaaacactgatctttcatatatgtaataatcacttataagattgggatttacacatggggatttagatttagatgatatttggcactatagtttgcaatgcactttttgcagcatgga

SEQ ID NO: 111639 - DNA, 367 bp, Glycine max
tgtgaaaataattaatcgctttttctgtgcaacgagtcatgcttattcttctcattttggaaattcggataaaaaatcggttaggttcgaattgaaggcatatgacacgagtaataaacgtggaaagatgaaagctgaatgaagtggctttgctgcaaactgtgaaatttgaggcgtgtgttctttgaattcagatttaaatttgctacattcggaagaatttttctcaacttctctttcatttatcataaaatatttcaaggctattttacgacttatttcaaaccatatgagatatactactgttgcatttgtttctgcagtgcggttggtgctaatgtttgagacttcttagagacttattaat

SEQ ID NO: 111640 - DNA, 383 bp, Glycine max
  unsure (1)..(383): unsure at all n locations
ctgtgcacgcttcatgttcgattaattgcctctatgcttaaatagcgtttgtgcttaatgaacaaagggttaataggtgtatgtgttgcataatcacatatcgacagccctaaaattgatttcgtttagtaaatcaacatagggttggattaagtggttaactgctagggatgaattcttcataacctacgacaagagaatggcttttgaatcaggggaaacaacacatntttactattattaatttcatatttcagttcgcttgttctttaattcacacaacatacacccgcccccattgctattggtactgctagtatattatgaacaattgcgttatcattgctcgttgggaaacgacctagtatcacttcctagctact

SEQ ID NO: 111641 - DNA, 364 bp, Glycine max
tccctaatttggctatattttgtgggagaagcgaagaagaaaatggttcacgcccttaggcacttctctctcttttgaatttgctgaggaaaattagttccgtgaagaaaatccaagccgaggcacttccgcaacgtttacgtgagtaattactcgaagagtctcgaccgttcttcaaagattcatcgctcgttcttcgttttcttcagtcttcaacgggtaagtacctcaaaccaagcttttcaattcattctatgtacccgtggtggtccacattttgcttcatgtatttttattctcgtcttcatttactttttatacctccttttgacctgcttaagccatttatttaagtcatttctcg

SEQ ID NO: 111642 - DNA, 363 bp, Glycine max
  unsure (1)..(363): unsure at all n locations
agcttctctctaccttcccactacttttaccanattcatggacaaatatcattgcattttcacacaattccaacctggtcctggtcttcctccagttgtcaagctcactcctcaagccttgtccctccacaaagaagaaatggctgtttataaaactcccattaatcgtgaagacactgttcagaggctcgcaaggcttctaatgcttgctggcatggaaaaattgcctctttatgtaattgagaagctaaaatgggatatgggacttcctcatgattatgtgacaacccttttggctgattaccctgattattttgatctttgtgttgtggaagatccatcatctggaaaagaaatgcttgc

SEQ ID NO: 111643 - DNA, 473 bp, Glycine max
  unsure (1)..(473): unsure at all n locations
taagcttgcgtgtactgaaactcgcanacttagcanagctaagattctctttttttctcgagtttccttcatctagtgaagatgacagcgttacaacatttgttcgctttgtctctgattattctcttatgattcgacgttcttaacacaaacatctttaagctttatatagactttagagcttcaatctgttgagagatcccaactaaccattgtctaatagctatgtcgcttgacatagggccactattgtgcagagagagaaagtgaagaccacaaacactttttgcagcatatcttcaaaagagtacaatntgtcagtgccgcctagttctcacagctaactttcagcatacaagtcgatagaaacgttaacgacatagaacaaaatgaattaagaatttcaagacacgacaatctataatctccctcttgagcactatggcacgggtntcttattgaacatatggatg

SEQ ID NO: 111644 - DNA, 370 bp, Glycine max
  unsure (1)..(370): unsure at all n locations
gatccttaagtcacctgcggcatgcaagcttctcaatatattatgtcccctattttgacatccgngagaaaacttatgaccattcgaatttctcgagagcttccgttgttcaatttcgagcgtctagatgagttatgtccacgaatcgacaattcggctgaaaagttatgaccattccaatttgtcgagagcttccgttgttgaatttcgaacgtctcgatatattatgtccccgaatcgaacatccgagtgaaatgttgataccattccaatttctggataggttcaggagatcaatttccagcgtctagatgagttatgtccccgaatcggcatcagagtgaacacgtttgaccatttttattttctc

SEQ ID NO: 111645 - DNA, 388 bp, Glycine max
cgggatccttaagtcaccgcggctgcagcttaagcattcaacgacatgtcttttactcggatgtctgattgagtcccgtcatatatcgagacgctcgaaattgaatgttgaatctcttaaccaatccaaacgacaataactttttactcggatgtctgattgagtcccgtaatataacgagacgcttaaaattgaatgttgaagcttagagccaattcaaacgacaataacttcttactctgatgtctgattgaatcccgtcatatatcgagacgctcgaaatttaatgttgaagctcttagccaattcaaacgacaataactttttactcggatgtctgattgagtcctgtaatatatcgagacgctcgaaattgaatgttgaagct

SEQ ID NO: 111646 - DNA, 369 bp, Glycine max
agcttgagaatatgttcttttattttgaaagggtacttgatgcaatgagtaatacgtgatgaatagctccaactagcaaaaggaactatttgttttcttagtcggtttataatttgtcatctattgtaggaagaacttggagaaataacaagggactttgattgccttagtcacttatatattaggcggaaactattacaggttagtattctacctttttaagccaccttaactaaatttttgaagtatgtgaaacatttacctttaggctattatataaatccaagagaaacattcttactatttttgaactatctctactctccactaggaagttttggatctcttcttcaaggtttgtaattagtt

SEQ ID NO: 111647 - DNA, 402 bp, Glycine max
  unsure (1)..(402): unsure at all n locations
gtgatcatgtattccgatatatatttggagaaaacggatgcacattntatctatatacaattgtttgttgcttgcttgaatcttgatttcaggtattgtattgtcatcatcaaaaagggggagattgtagatgcaattggctttgatgttctgatgatgatcatgatgatgtgttgcaattgatgcaaatgggcttttcaagattaaaattcaagacaatacttcaagattacaaggcacaacatcaagatgatcactagaatattaggaagggaattcctaattgaattagcaaaggtttggccaagtgatttaaaataaaaagtgtttttcaaaggttttactctctggtaatcgattaccagaggatgtaatcgattaccagtggccaaatacatttta

SEQ ID NO: 111648 - DNA, 370 bp, Glycine max
  unsure (1)..(370): unsure at all n locations
agcttcctcggngccatttcctgctaaggcaaacatttggaaagttagttttaccaagaaatgctactcttaaaacaaaaatggcatacaaccttctccaataaacatcaatgtaaatttagagcaaactcatgcacatacttccttatgaacattcactcgcacaagatattcttctacctaagaaaaatgcacccatgcacaatcaaggcaccttcgttacctagattatttatatgtacttccaaggtgtatttgctacctacatcacatgcactcccttggctaaatttacatacatgcatactcaaagcattttggctaccaaaaattgcacacgtgcacattctggtatttccaatacctatgc

SEQ ID NO: 111649 - DNA, 515 bp, Glycine max
  unsure (1)..(515): unsure at all n locations
tgtaattcctgatcctcagataacatangtggtaaaggttgtgactggaacgagtcaccaatgactntcttgangaaagagacatgaaagaccggatngaatttactgtgagatggaagatccaacttgtaagcaacaacacccacctttgttaacacctggaaaggatcataaaatcgaggggagtttttcattaatccttttagcttattttccataattatcaacaaacctcctgttataaccagtaaggcctaagaatccccttaagctggtgacattcttgggcgtaggccataatgttattgcttccaacttttgaggatctgcggatacacctccagcgaanataacatgtcctagatattccaagtttgctcgaccgaaggagcattttttgccgttgatctttaattcactttgttgcaataatgtcaatacatttcgaaggtgtngcttgtgttcttccatggaagggctatatattangatatcatccaagaatactaaaacgt

SEQ ID NO: 111650 - DNA, 367 bp, Glycine max
agcttattgattttgaaatttttattctacgttacgaacgccaacaacagttgttccccaccattgctaactttgttggccgctcttaaggttcttaccatgggaagaaattcaccctctctcataaggcctccttcaactgcaataacctatttcctcatgacaacaatcaaggtgccaaatgctccatgcctgtgtgccaatattgtgttacacggggtcacatgataggttaggaaaaccactcatggctaggttcaagaaatgattggccaagcaatgaagtcctttgccgaatgccaacggtaagagaatgagcaattttgcctctctttgcaaaatgccataaacacaattctccaacctt

SEQ ID NO: 111651 - DNA, 506 bp, Glycine max
  unsure (1)..(506): unsure at all n locations
tcatcgtaagacatcaggttcaagtattctaatagatgtgtgtatgaaaaatccacctgattggtagagaaaaatatcaaataatacatcttcggcaaataaggcatgctaggtcctaacattcccatttcattgaactccctattatttcttttgttttctattaatatctaatattcattgtcctgttcttttaaattcatcttttatacctcatcttatctttttctcttataaattggaaattatcctatacaagtacaaaacaaagtccttgtggaaatcaacactcggacttccgagtctttactacttggacatttggtacacttgccaaactgttaacataacaatattaccttttgggttgggaaatttcatggtgagatgcggngtggagacaatggctctcanaacatttagagaagttcatccaataagtatgttgtaggatgtgtttgatctatanggacatatggacgagtaatgtctaacaaattcctact

SEQ ID NO: 111652 - DNA, 368 bp, Glycine max
agctttgaattctagtcagaaaactcttcaaatacattctaatactcatgcatcttttacattcaaaaccggaaaattggattcctaggcatgagtcatccttttcgcactttagtctagcttccacaaactacccacacactcacaatgcgcacaatttatttcgcaagctaagttcaacaaaatcatacgcaaatgccattgaggcatttcatcgaacacttggtgggcgtatgtttaagcatgaaaatcaagggaatgggggccatgtggcattccctattatctcaaaatgcaccctaggcctaaggccatcccctacaacccctcaattaaaaaaaacaaacaataattcatggataaatccc

SEQ ID NO: 111653 - DNA, 453 bp, Glycine max
  unsure (1)..(453): unsure at all n locations
gctagccaaatggacttacctngtaattaattccttgatatctcttttgagccttgtttccctttccttgtgttgaagctcactacaagccttaagtgaaaaaccatgatattaccatatccttaaggatatttggagctttggaattgttttgggaataagtgtggggggtttttgtttcattggacaacttgttttgttggctatgcttcatgatgtattttgggccatacttgatgtacattgtatattggttaaatgttggacatgctgaatgaaatgttgtctctcaaaggctaaagagttaaaaaaaaatgtaaaaaaaaaaaaatctaanaaaaaaaatgtataaaaaaaaaaaattctaaaaaagaaaaagaatagcaattaagttgagtgaataagatcttacatggcacaagaatgatgaaactcttggttctactcttcatg

SEQ ID NO: 111654 - DNA, 365 bp, Glycine max
agctttgaattgaagttgtgttgtgttgtgagtgagtttgtttagtgaggggtgagggggttcttatagaagttgaagagttgtggtcctatctcacattggtcgagtaaagagacaccgatggggtatgaaaggttgtgcaccgcctccaaacccactagacaaacagcaattgggccccacccctcaccatttgggaatccttaccctaataaccaggaattggtaaaaaaaaaaaaaaaaaagccacaagccattcatataggcctctctttcttgcattgctatgccacactctatagtcctatgtgtaggcaccacccaccaacataatggggcctccccttccaaaactatgtggtagc

SEQ ID NO: 111655 - DNA, 409 bp, Glycine max
  unsure (1)..(409): unsure at all n locations
acggacctatgatactcagctgttattctatntagaaatccatgaaggtaccctaatgtctatattntatgggattaagatggtcattgaccaatccctattttatgatttaacaaaattgcctagtgaaggtgtgccttttgagggtgcactgattgatgattgaaaattcaatttttctgtgcatgatgcccgccggttggtttgcaccaaccaagcggatatgaccggaaggattcttgccatatcattggcttttgaaagccgcatcctccattaccttattgttcacattttgcttcctagatcttcaaatcttgctcaggtttctgaagaagatctcattgtcatgtgggcctttcataaaggtttacaaattgattgngcacaccttgttagatatcgcatg

SEQ ID NO: 111656 - DNA, 361 bp, Glycine max
agcttatccttatggtctgcctccggacttcaccccccgtgccaccccggaagatttaagccaagcccctactttcgaggggcaactcccaccttatgaagactatcccgggcaagacgatggggaaggagatatccatcttggccccctgctccacctcaaagatccgtccccgcatgaactaccccaaccgaacatagtccgtcataccccggcctcacccacacccgttaaagaatctgttccctttgcggaagataacggaaagattgaggcgcttgaagagaagttgagagcagtcgaaggcctcggcaattacccattctcgaatttagcagatttatgtctcgtgcccaacatc

SEQ ID NO: 111657 - DNA, 500 bp, Glycine max
  unsure (1)..(500): unsure at all n locations
taacatgaaggatggagagtntgtggatgatatgtttgttatacttcaagttcttttgaacaatctagaagctcttggatagatgtactccaacgcccaaataaacttgaaggtgctagatagctntcctaaggtgtggaaaccaaagaccacaaccatctaagaagcaagggatctgaagaatcttgcatgtgatgagctgatgggtattctaagtgtccatgaagttcaccttcaaaacatggagcatctacaaaagaagaattttgttgcccttgggtatgaagaaacaagttttataagagaagaaaggaagagctcatctaaagttcttaaagtgaagatgaaggaatatgatggatcaaacaactatgatggatccacanatgatgagggtgtccttatgtccaaaatgttagatcaaagcttganacccttagttttaagtttggttgacattttgaatgtctaacatattaatagatacgcattcgataaat

SEQ ID NO: 111658 - DNA, 359 bp, Glycine max
agcttctattgatgcttgtttctctacaattctctctaaactcctcgtacttggaaccttcaacctttgcattatttactctttcttcactatgagggaaggtaacttctttgtgtgggcgcttttggttctttgtgagcgctttcgattttggttttgacgcacgtacgtggaaagttataagtgaattttctttataactatcttttaatcaccttgcagggcatggactgtttactaagagagtgggtgagagagcgctatcaacaatggggaaccctcaccatcccccttaacgtgatggcatcacctactcctctaccattgccactgaggaacattaactgccggatcactcc

SEQ ID NO: 111659 - DNA, 417 bp, Glycine max
  unsure (1)..(417): unsure at all n locations
gtggctataagtactcctgacagatccaagcatggctctctcaatggcccctataaggccanaagagggacgcatcaattggagctcctcgaaatggaggtccaacaatcctatcaacaattgaccatggttatggctctagctctgtagttggttgcggctgccatcgctcgtcaacaaggtgggcacgtgttgacgcaatcactctacgatgcctttctgcaacatcttccccttcttacgatgtgccttcatggcgaagatgggttgcatcctacaatgtatgatgtctgctttgtgcgagccatctgagaaaaaggaaaaaaaagttagtaatccttcataataaccaattatatctaactaagagaataagatataataaaaaatacattcgtctaacaagtaataaacatg

SEQ ID NO: 111660 - DNA, 374 bp, Glycine max
gcaagcttgatataacaatttgcactattcataaaatatgagccatgcacagcaatctcaaccttggtgaatatttagcctcgtggaagataaataacaaatccacctcagtctcctgggttaagggtcctgtcacatctagcatgagcaacattcaacaagtccaagcaaagtttgcacttgttagttttgactatcattgtcaagatattaactgcattttctgtagtgtgaaccttccatagcaaaacctggctagatgtgattaactccctgatcttgtgaaacatcacatcaatatgattggttctcgaatgatacaactgagtctttgcgaaatcaatagtattctatctattgcaatgcaactgaac

SEQ ID NO: 111661 - DNA, 424 bp, Glycine max
  unsure (1)..(424): unsure at all n locations
atgggccttgttgctatttgcaccctcctatttactaaatacaccctctgcctttctttatgattctttttccggaacgttacagaaacttacgaattacgtaacgatacttgttttcttttcgtaatgttatgaaaccttaccgatcacgtaattatcccttttttttggcttccaggatgttacagaactttacagattgcgcactaacacttccttntaacttccggcatgtcacggaatttcacagattgtgctacaatgctttcttttgacttctggcatgtctcgaaacttcatgaattgcctaaagatgggtgccaagtacctcgaagtggtcaaacgagggtcgcataccaacaacggatggtccccggatgaaattatggtatgacagatagcataaggtgagactaaatagtct

SEQ ID NO: 111662 - DNA, 401 bp, Glycine max
cttctcgccccggatccttaagcaccgcggctgcagctttataaaatcaatagtttttaatataatgatttgaaatataaatactcttaggcttttcacatatataaggtgagaaactgtcatttcatttaatttaattggaatgattgtaataaattgtttgttcagcatttcctattgagattgtagtttctgtttctatatataatatagatcaatatcaattcatgattggtgtaattgattcccagtaatttgttttcaatcacgttatggtataggagcaactataattggcacattgaagcttactattaacttcatcttccacatgttgtgcgctagtttatatgtgtgtgaaattaatattgtttgatattatgttaattttaatatatgaa

SEQ ID NO: 111663 - DNA, 365 bp, Glycine max
agcttctatcttccaccaccttttttcttatcatcttagaatcatattttaatcttattactactttgatcttcagccttgtattttggctatattactatggtatttgaacaatttattatttccttatttgcatggcttggctgaacaagtatgttatttgactatgtggattttataagttaatctgtttatgattgttacttcatgtcgtggttaatattttttatgaatgctatatgaatggttaagatatatttgcatactttaagtttgatacacactttatctttttgttgatgcctcagggggacagaaatatggataaatcaagaacttacatgagtaatcaatgcaattttaag

SEQ ID NO: 111664 - DNA, 331 bp, Glycine max
tctgcatacctacatcataagatccacaacaccgcgacccaggtgtgatatagggtatgatagatacatgtctgtccatcacacctcgtgcgtgcttcaatgctacaccattgggactgtccatcatggtatgcatatgacccgtaacgcgttactcattccattctgaccacaatttgaatattaccgtatacaaacacatcttctgcctgaagagattcacccatgatccatgagatggctctgtaactccaattgcgacacatttaggaagactgacatcctaatctatatcaatactataatgctgtaggaacaaataccattgagc

SEQ ID NO: 111665 - DNA, 369 bp, Glycine max
agctttggttgattttggaaatcgttaattatattgagaaaggaatttcattgggactgggattggaagaaaattggtactagtgaattataacccctggtcattcttatcatcactcaagttgctatttgcattattttatttgtttcctactaaaaaccaaaatcataaaaatatttaaatcctctttttaatcacatcatctgttaatttaataaacttgactaattggaaatacaatgggtcctttgggttcaatatacgaaattttgagttcattgttactactgtgtaggatacatttgcccttgtgtgaatctggattaatttgcataggtagaaaaaaataaagactttagatgacaaaag

SEQ ID NO: 111666 - DNA, 474 bp, Glycine max
  unsure (1)..(474): unsure at all n locations
gctacatgcaacattccgcatgaaagatcttgttcatctcacatgttntttaggattggaggtacatcatcgatcaaatgacatatttttaaaccagcataagtacattcaagatttgataactttggctggtttggaaggcactacttcagttgatactcctatggaagtaaacgtcaaatacaggaaagatgaaggggatcttttggctgatccaactctctatcggtgtttggtgggaagtcttatctacctaacgacaactcgatctaacatatcatatgtttttcaccaagtcagccagttcatgtcttctcctagacatcttcatcatgttgttgttcgtcgcattatctgctatcttatagggtaccctacaacttatggcatatagcgatgctgattgggcagggtgtccggataccctgtcggtctactacaggttggtgtatgtttctcggcggtgccctcatt

SEQ ID NO: 111667 - DNA, 366 bp, Glycine max
agctttggctcctggggagagccttcttctgtagcccacaaagcggcaaccagattgtatctcagacactctaaatgctggcgccaatgcgctacttgtgatgtgacttttacccccctatgacaggactatattaaacaagcactgcttgcccgtagaatctactgctcattcttaacacaaggtaacatgcattggaaagtccatggaatagctctgcattggagcatgatacacacatttgtgaagccgcgaaaagatgttatacgaacatcatgctcggttagcggaacattgggagatactttcatgaagatacaaaactgactgttctttcttctatagggggaaccctttatcatacgc

SEQ ID NO: 111668 - DNA, 264 bp, Glycine max
  unsure (1)..(264): unsure at all n locations
acatctcacgcatcatacatccctcactgacacataccaacgtgctctatcactcgttccaaacgttcaccggtcccgtgcatatctcatacaaccaaatgcgcacctcgccagtctgatgtacccgatcctttcggtgagacgattacaatgattgatntgttcatataccacgatagcccgtcccatgatgcacgcactatttctactgctcatatgaaggatagcagcttatgaccggttaagtggataatcacgagccag

SEQ ID NO: 111669 - DNA, 368 bp, Glycine max
agctttgaattctagtcagaaaactcttcatatacattctaatactcatgcatcttttacattcaaaaccggaaaattggattcctaggcatgagtcatccttttcgcactttagtctagcttccacaaactacccacacactcacaatgcgcacaatttatttcgcaagctaagttcaacaaaatcatacgcaaatgccattgaggcatttcatcgaacacttggtgggcgtatgtttaagcatgaaaatcaagggaatgggggccatgtggcattccctattatctcagaatgcaccctaggcctaaggccatcccctacaacccctcaattaaaaaaaacaaacaataattcatggataaatccc

SEQ ID NO: 111670 - DNA, 516 bp, Glycine max
  unsure (1)..(516): unsure at all n locations
gctttagccaatggacttaccttgaattaattcctttgatattctctttgagcnnctgttccctttccttgttntgaagctcactacaagccttaagtgaaaaaccatgatattaccatatccttaaggaattttggagctttggaattngtttgggaataagtgtggggggtttttgtttcattggacaacttgttttgttggctatgcttcatgatgtattttgggccatacttgatgtacattgtatatnggttaaatgttggacatgctgaatgaaatgttgtttctcaaaggctaaagagtaaaaaaaaaatgtaaaaaaaaaaaaatctaaaanaaaaaatgtaaaaaaaaaaanaattcgaanaaagaataagaaaagcaatanagttgagtgaataagatcttaaatggcacaagaatgatgaaactctnnggtctactcttncatgttaatnnttaatcttacttctttntaatttcttaaattttttcttaatatgcacttattcc

SEQ ID NO: 111671 - DNA, 368 bp, Glycine max
agcttctagccaaatggacttactttgacttaattcctttgatagcccttttgaaccttgtttccctttccttgttttgaagctcactacaagccttaagtgaaaaaccatgatatcactatatccttaaggaattttggagctttggaattgttttgggaataagagtgggggattttgtttcattggataacatgttttgttggccatgcttcattatatattttgagccatacttgatacacattgcatattggttaaatgttggacatgctgaatatgatgctgtttctcaaaaggctacagaaaaaaaaaatattataaaaaaaaatcgaaaaagaaaaagaaaaacagtaaagttgagtgaa

SEQ ID NO: 111672 - DNA, 509 bp, Glycine max
  unsure (1)..(509): unsure at all n locations
ccctaccctctcccattcttaaatttataataatctgctttaggtgttatcgttatgcattgtgaaatatataagcattntaaggttaaatattttacaactaatttcagtcttatattgactacttaagttgaagttggatatattcttagttaccatttgtatttcttcatatcaagttattttattaaatactattttgttaatgtcaactctnttttattatgttattagtataaaatatccactagttttactcatgatttattttcgttaataaatttggttaatcatctttggtgaaatctctcctctcaatcatactttttttatccataagactagaattcaaggttntattgaaggattaaggatcaaacggagtattacttaagctaatgacttattgatcggtttgacaatggttagattatantaaattattaataagtaaaaacttaatggtgaanatacatangatcccagcaagatctncatgttcttattat

SEQ ID NO: 111673 - DNA, 362 bp, Glycine max
agcttcttgaggaagccttttaatgaagcttcttgaggaagctacatgaagcttccttggtaaaaacgctgcccagcgtttgttaaccgttggatcgtctcgaaatttggtgtgtagctttacgagacacttgtccacgatctgaccgttgggatctttgagaagatgtctgtagtgtgctcgaagcttccgttcccgagagcatttcttatttaagcattgcagcctttgctttcatgtagcttaggaaaaatgccatttcttctcctttctttcttccaaagtcatttctaacattccaagcgctttctccatcacccacaaccaccattagccaccacaaaccgtcattgttctccgct

SEQ ID NO: 111674 - DNA, 450 bp, Glycine max
  unsure (1)..(450): unsure at all n locations
tactcagcttcttataagctggaaccatttatcaataaacacaagttgtgttttattcagaanattagagcttatctcttttatcttagtgagagtgattctcctaaattcttgagtgattcaagaacaccctggctgtatcaaaggactttcacaacctttgtgtgttgccctcgctggaaagagtgattctttccttcctttcatcttcacccttgttctttcaaaccacaattccagaaaattcacctctgcccagaattatctcgtggccataactcccattttacgcactcaaattaagtgattcttgagcctaaattgaatntcaaaacgagacctttcacctcgttntggaatcacctcatttggagccatgtagcttcagttattgccatttctatatttctgtccagccaccacttaacctacattntaccatcccattca

SEQ ID NO: 111675 - DNA, 371 bp, Glycine max
agcttgctaacccatggaagctcctaatatctcccacactttttagggtgggccattcttggatggccttgattttctcagagtccacttgaaccccatttttaccaactataaaccctaagaaaactatattatctacacaaaaggtacatttctctatatttgcatagagggtatttttcctaaggactgaaagaacttgcctgagatgtcctaagtgatcatctaggctcctactatacactaaaatatcattaaaataaaaaactacaaatctacctatgaaatcccttaagacatgatgcataagcctcacaaaggtgcttggtgcattagtgagcccaaaaggcatcactagcaattcatacaaa

SEQ ID NO: 111676 - DNA, 235 bp, Glycine max
taacgctgcggaacttttccaatcccgtaccgatactagttgtccttccgctatgttacggaaccttacggagtacgtcatcatacccttgctcgcttgcggaatagcatggaacctcacgggttggagaacaatgcttccttctgatttccggcatgtcacgatacttcacagagctggcatgccatcatacaatggtccacacatgaaactaggtgatgacagatatgaatgt

SEQ ID NO: 111677 - DNA, 372 bp, Glycine max
agcttgtagaatggctagacatgatacatgtcatggtttggtttggttcaaggataaaagggatgccccacattatttccatgacacaaatgcaaaaatgatgatttggaaacttcatgcaaaactggtcatgcatgcacatatgtggacactcaagtgtcaaatttttatggtcatgggatgctaaggctcaggattcatttcctctattttaaatcaacccaatgtttccaaaatatgttcttttatccatttgtgcattcatccgagtccatttcgggcgtccggggaaatttcacagcattcacccttcaggtgtagacacattttccaaaaattggttatgatcaatgaatttttttcaaagaaaag

SEQ ID NO: 111678 - DNA, 314 bp, Glycine max
tggagatatgtcgtgagggtcatgagaccttgtggacgtcacgtggggtgctattgcccaaaaccaagcttgaccaatcccgacccaacccgggcatagtcgttcagtgagaacctgtgatgtacctaaacatgcgagcttctggcagtcaacagataaaatgaacaaagaccacatagcaaggaggcttgtggtggctggccagctgtgaactttgattgatatgtgggttatggcctctggtaatcgattaccaagggtgggtaatcgattacaaggcttaaaaatgataacaggaggctaagatggtctct

SEQ ID NO: 111679 - DNA, 367 bp, Glycine max
agcttgtctcagctgtatgcgaatttttacctcatgctagctatcatcgctaagtaccaagaagagttaggtctagccgcggcccacgagcataggattgcggacgaatatgcccaagtatacgcggaaaaagaggctagaggaagggtgatcgactctttacaccaagaggcaaccatgtggatggatcggtttgctcttaccttgaacgggagtcaagaacttccccgattgttagccaaggccaaagcgatgacagacacctactccacccccgaagagattcacgggcttctcggctattgtcagcatatgatagacttaatggcccacataattagaaatcgttaggaaaacttgtatggtc

SEQ ID NO: 111680 - DNA, 361 bp, Glycine max
agctttttggagtagaaacatgttatccaactcattttatttcaaaaaggaagtcatatctagtcaaggtctgagagaccatacaagtttcctaacgatttctaattatgtgggccattaagtctatcatatgctgacaatagccgagaagcccatgaatctcttcgggggcggagtaggtgtctgccatcgccttggccttggctaacaatcggggaagttcttgactcccgttcaaggtaagggcaaaccgatccatccacatggttgcctcttgggtaaagagtcgatcacccttcctctagcctctttttccgcgtatacttgggcatactcatccgcgattctatgctcgtgggcc

SEQ ID NO: 111681 - DNA, 394 bp, Glycine max
  unsure (1)..(394): unsure at all n locations
gtgcggatttggtcttcgccagtgaaaggatcgatgtgtgttcgataagaggcaaatntgatcatcctactaggacgatcgagaaaactggggcaaatgaataaggtaagaaagagggagaaacccatgctgtgactgccattcctatacggccaagttttccaccaacccaacaatgttattactcagccaataacatacctcctccttacccaccacccagttatccacaaaggccatccctaaatcaaccacaaagcctgtctaccacacttccaatgacgaagaccacctttcgcacaaaccaaaaacacaaacaaaaaggaagtttgcagcatatagcctgtatggttcacctcatattccgttgtcatatgctaaacttgatcccata

SEQ ID NO: 111682 - DNA, 331 bp, Glycine max
agcttatgctaaattaggatttatttttcttattctcttgaactgagcctagtcttaaatgagggatctgctgatgaaactcagtttaagctactctaaacctaacagggcagtctaaatcacgcctagtccaacaagagggatctaaggacaaaccttggattaattcggcctgatgaaggatcgagggtttactaatttaggctacagcgttcaacacaacagcccgatctattacataaatatattcccttcgcatcaccttgtttgttggaaacactcaacatttttacctactgctggaacttactctaccttgccttttttcgct

SEQ ID NO: 111683 - DNA, 311 bp, Glycine max
  unsure (1)..(311): unsure at all n locations
gctctaagagtagtgtgccactggtaaaattaactttccaaatgtttgccttcgcacgaatggtcccgatgaagcttgcctcatataggtccacgaatgacaacgcggccgaaggaactatttccgctccggagtacgacagtcaccgctttaagagcgctgtacaccagcaccgcttcgaagccatcaatggatggtcgtgtcttcgggagcgacgcgttcatgctatggacgacgagtatactgattttcatgatgaatatnggcgccggccgtgggcaccactggtcacttctattgcctagtgtgat

SEQ ID NO: 111684 - DNA, 367 bp, Glycine max
agcttttgaaagcttgactcttcttactcatgatgtagatccgatgtagatccatgtcattcttgagtagtcatcaattatggacagaaaataccttccaccacctagtgaaggtactcttgcaggcccccaacagtcagcatgaatgtaatcaagagttcctttggtggtgggaattgctttaggaaatttaatcctatgttgcttgccgaaaacacagtgctcacagaatttccgttcatccagtttctgatttcccaatagctgatgtttttgaagtatcatcatacctttttcactcatatgacctaacctcatgtgccagaattgagttaagtcaggtatgctcttattggatcttgatgca

SEQ ID NO: 111685 - DNA, 466 bp, Glycine max
  unsure (1)..(466): unsure at all n locations
atactcagcttacatggagctacgtcattgacggtttctcaaattccttttactttaataagcatacctctgtatgtctccatcttgatgtagccttccattgattcctcaaacttgcagactcccccatatttagtcctgcaactgctttccaaactgcaacatcaatgatcatctctacatcattaacagtagagtataaattgccttccatatcaacacgggcacatgtgtagaaaacctttaccaactcaaggtagaagatttttatcttctacaccaatcttaacaaaccatatgcttcaagaaggtagagaaatttaaatccctgttgagagaaccattccaagttcagaaactttggttattcttacattctccatggcataaatcatcttgaagtcagtcttcttgttntcattagtgaaccatgtatccaacctattgagagctgcttaagagcact

SEQ ID NO: 111686 - DNA, 368 bp, Glycine max
agcttggagaggatgcttcaatggttgaaaagaaagagggagagaaagagagaggggggagcacgaaattgaaggaagaaaaagggagagaagttgaactttgagttgtgtctcacaagactctcattcatcaaagttacagcaagtgttacacatgcttctatttatagactaggtagcttccttgagaagctttcttaagaaaacttccttgagaagcttctttgagaaaacttccttgagaagctagagtttagctacacacacccatctaaaaactaagctcacctccttgagaagcttccttgagaagctagagcttagctacacacacccatctaaaaactaagctcacctccttgagaagc

SEQ ID NO: 111687 - DNA, 447 bp, Glycine max
  unsure (1)..(447): unsure at all n locations
cctagccgtcgttccnctctctttcttatatcgtcgtctcctctctcaaggtaactcccaatatcgttcattaacgctnttcatgcaggagcttgtgctgtgggataatcaattgaagcggcattntctttgcccattggtacctccatccatttcctcccttcactccttcccttatttacttaaacagcaatttgatgatgttgtttctttgtgtcgcagcgatttcgcggaggttctagacgtgtatgagaggggagatgggctctactagtacaccgaacgcaaaccttcctccgaagccatgcatttgggacacgtgattccctctatgttcactaagtgagtgagttctttgcgtntntcgaatttaatttgaagaattttgaaatggaatntgacttctaatttgtgaatctagtgtgtgggttttgaaactatgagttg

SEQ ID NO: 111688 - DNA, 367 bp, Glycine max
agcttggagaggatgcttcaatggttgaaaggaaagagggagagaaagagagaggggggagcacgaaattgaaggaagaaaaagggagagaagttgaactttgagttgtgtctcacaagactctcattcatcaaagttacaacaagtgttacacatgcttctatttatagactaggtagcttccttgagaagctttcttgagaaaacttccttgagaagcttctttgagaaaacttccttgagaagctagagcttagcaaaacacacccctctaaaaactaagctcacctccttgagaagcttccttgagaagattcctaaagaagctagagcttaggtacacacacctctctaatagctaagctca

SEQ ID NO: 111689 - DNA, 379 bp, Glycine max
gataactcagctgaacatatgttcgcacactcattctagcaatcagacgagacacacaaatcaaatattgtttgtcatcatataaacgagtttaattaaagagaaattgcaacccacttaatgttaaaacataatggctttgatgttacctttgtcatgattcaagtgcttagatatttaaagatggaagtcagacttctgtttttcttacttgaacttcttgagagatgttctcatcactttcataatcctaggatagaaggttgatctccttctccgaaccatcagatgagtcatagtcatcccaagcaatatacgccttcttggatcttctatctttatagctgttcccctcattcttctcgggtcatgactcatt

SEQ ID NO: 111690 - DNA, 355 bp, Glycine max
agctaatgctgcaatcatctactttttacctcctcaacctcagcagccaaatcagctccaacagaataactatgacctctccagcaacaggtacaatcccggatggaggaatcatcccaaccttagatggtcgaatccttcacaacagcagcaacaacaacaaccttattttcaaaatgctggtggcccaagcaaaccatacgttcctccaccaatccagtagcaaaaacaataaatagttgagacccttccgcaacctttccttgaagaacttctgaggcaaatgactatgcaaaacatgcatgtttaataagagatcagagcttccatttagagcttaactaatcacatggga

SEQ ID NO: 111691 - DNA, 422 bp, Glycine max
  unsure (1)..(422): unsure at all n locations
ctcatcatctcttccttgataatgaggaaagtacctctttcttgtgtgcatattcaaccacagtcatgttcccctgcttgagctccatgaactccatctccttcttgttcctaacatcttcaggaaagtatttctctagaaataccctcttgaagacttcctaggttacaacttgaccttcaacctccaagcattggcgagtgttctcccaccaatacttaacttcttccaacagagtatatgtaccaaaagcaactttctgcccctccaaacatgccatcactcggaagatattcttgatctcccttatccaattctgagcaccatgaaggtngtatcctccattgaaaccaacgggattgttttcttggaagcggtccaacccttggtactcaacatcttcaatagcttctcccctattc

SEQ ID NO: 111692 - DNA, 360 bp, Glycine max
agcttactaacaaatctttctaattttataaaatacaaggatatccaacattagctactgactcatccactcttaggggcaatgttatgatagggacataagtattatgggtgcctaattccacatcaagtagtatgggacgttcagtgaagtacttaagtggcttggttttgcccccttggaagctaggttttaagggagggttccccatttgcttaggtgcttatcagggtgttagtgtatacatctctggaattgagtgtgtcgaaaaccactataacgatagagtaaaaagggacaaaacccaaaaaagacaaaggggtagattataaaggctgagtgaagtgttgtatagtgtta

SEQ ID NO: 111693 - DNA, 469 bp, Glycine max
  unsure (1)..(469): unsure at all n locations
tatgtccatgttgttatcattaaataaatgtatactttatattcaacatgtgaaggcaaaattatntaacagacaaagttttctattttacttgtaagcaaaaataagtttgtttaaaagttatttgtgataaaaaaaatctagttataagtttgggctaatgatatctagttatctagttttagcttagtcataattagcacaatgagagactgtgtagcttttctgtttaagctcttgctgtaaaagtttagatgtgtgcaaaaactaagtgataaatctctatacacaagagattagttttgcttatttcctctacctcttttactttccattctattttccaacacattcaaacacacctttggagtacaaatgtctattgaccgttgatttatatttaaatctctcggattttaattcatcataacttgaatttagctttccaatatttactatgcttaagtaa

SEQ ID NO: 111694 - DNA, 291 bp, Glycine max
cattcctcttctaagcaattcttcttgttatatttaaaacaccatgatatacaagaatataccttgtgtatggaatcaatgcctcattctcttcaattttagagaaaaggaattattctgtagaagagctaaagttgatgtttcgcctaacgagctcaatgctgcttacgagtgtcatttgctaagcgaggcatcaacacgcttatccgattggaggaatctggaagggaattctgtacgcatgcacgcgcttagtgtgtcatcatctcactcagcgagtcatttgtcacc

SEQ ID NO: 111695 - DNA, 246 bp, Glycine max
cgcgagtttgttctttgttttgtataactagatgaattacgaagattacacgctcttaatcaacgctcactccttcctttcgagtagacgctctatggattgatgagatattttgatatatctaattacttccttatgtacacaaatagacatagctgatggatgtggaagctctaagatcgaactcctttatctcgtattctgatattgagactttaggcgcgcggcacccactgccattgtagg

SEQ ID NO: 111696 - DNA, 368 bp, Glycine max
  unsure (1)..(368): unsure at all n locations
agcttaagggccatataccctnttttcttctactacttnatcttcgggtagtggaagattttaaaagctgagagggcattgccaatgatgaggcgccccgggacaaagggattctagttctcggacaccacctcaaggaggatcacctttaatctgttagttatagtctccgtgatgagcttgaagaccatgttacacggactgatggggcggaattgactaacatggtttgggcacttgaccttggagatcagggcgatgaaagttttgtttaatctttaggagtcaccattgtggttaagaacatgaaacacaaggttgatgacatcttgacccacgtgctttcaaaacttttaatataagagggc

SEQ ID NO: 111697 - DNA, 495 bp, Glycine max
tcttcatcacagaatagtacctgtgaaagaaagagttgttttatttatcccaattggggattctattatcttgaagtgctcctagccactcccaagcttcttggtagagtgaagaaaatacaaccaatttatgattcgtactaacgctggactgcctaatagtgtcacacaacctcttaaaccaccttatatgcatcatggagtctttgtgggatgctccactaaacaggttactttcaatcatttgaaagaatgcacgtttgaaatcaaaagtaaccccttgaggaagtgttggcagttgaatgttgttggtttctcccaccttgtgggtgagataatccatcaatatcttcaagagattctttaccacaagtctagccattgctcttggtctcttagcaacactgtaaacataagaacaagtgatcaaacacaattggtaatatgcacacgcgcgcgtgcacactctcactcacacacagatatatatatata

SEQ ID NO: 111698 - DNA, 368 bp, Glycine max
  unsure (1)..(368): unsure at all n locations
agctntgacttgagtcatcaagatatttatatatgtgaccatagcatgagtttcaataatcatcaatcatctttgaatcatctatctttcaatcttttttcaacatcatctctcaaacatctttcaatcaatctttcaatgtctttctacagaattttctgattcatttctcttcatcattctaaaagttttttatcaacactttctcttccaagaaaagttctttgctcaaaaacttgtgctattcatctttttcattctcttctccctttgccaaaagaacaaaggactaaccgcctgaattcttttgtgtctctcttctcccttacaaaagattcaaaggactaaccgtctgagaattcttttga

SEQ ID NO: 111699 - DNA, 186 bp, Glycine max
agccggctaagaatctaagcattttaagggatgctaggtgctttttttgatcatggtctatgacacttgctgtgggccgaataaatccttgctatctcgtgtatgatcatggaggtggagtgcactcaccttgacatatggaccattcagggagcacaagcatagtgaagaatatagcacacttga

SEQ ID NO: 111700 - DNA, 369 bp, Glycine max
cagcttccgtcatgggattacatgtttcatcattttattacctcatggttttcaggcaaatgcagttgatgattgtgtataccacaagtttagtgggagtaaatactcattcttggtgttatatgtcgatgatatactgcttgcaagcaacgatataagcttcttacaagagactaagaaatttttgacaaaaatttttgagatgaaagatcttagggaagcctcttttgtattaggaatcaagatactaagagattgctctcaaggtatcctaaggttatcacaagagagttatatcgataaggtcctagatagattcgacatgaaagatagtaaaccaggagataccccgatagctaaaggagacaa

SEQ ID NO: 111701 - DNA, 369 bp, Glycine max
agcttgtatctgtagctcagatatttttgctggatcctggaacgagccaattgaatgacatattaagttcagtgcgcaatcacaactagaagtgaggaaaagtaatgctgataccaaaatgaactaaaaaaaacaacagcatcaatggcatcaaacaaaagcatagtgccaaaccaaataacttatagaacattaagaagcatgagtttctagattcatgataataccgtaacaaaagaagaaacttccctatttactaatttctagaaaagccatgagttttctattcagaatcccacactctcacgttctgtttataaggacaataaaaataactaacaataatatggctttgccacttctaaaatt

SEQ ID NO: 111702 - DNA, 460 bp, Glycine max
  unsure (1)..(460): unsure at all n locations
acatctccctctntctcaagcaaattcttctttatatcatcaaaatcttcatgatttacaagtataagccttgtgtatggaatcaatgtcaatttctcttcaattttaggaaaaaaggaattattttgaagaagtgctaaagttgatgtctcgctaagcgagctcaatgcgcttagcgagtgtcatttgctaagcgaggcatcaacacgcttagcggataggaggaatctggaagggaatctgtcacgcaggcacgcgcttagtgtgtcatcagctcactcagcgagtcatttgtcacctttagggcttagcgcgagtttggcgctgtgcaaaagttcacttactcgcgctaagcgcaagaatggcgctaagcgcgacgtcgaggtcagtgagcccttnttaagcctggaatggcagaagagaaagggaggctgaaatacagagcgttcaataatcgtca

SEQ ID NO: 111703 - DNA, 364 bp, Glycine max
agctttgtagaaatggtagattttttttgtttagtctgcttaattattaccatttaatggagcgtgtgaatattgataacggacctttccatgagcatggtgactaatctcgaaggatgtgcgctgtgcaaagccaacttttatgctttcctatggattagccgggcaatctctacgtgagtggtatttagctaagtctcatggtattcatattgagcatcaatcatcacctaatcacgtaactgacagatggaggaaaatcacctacaaatgtaatcttgcccctgctgtgttcagtgacacgagacagtagtttgggcatgttgcttgtattaatttttttatcaattaatattaattatta

SEQ ID NO: 111704 - DNA, 438 bp, Glycine max
gaacaatataattgtccttcatttaactgtctataggcttggcgggcacgatcagtactttcggcacctactgcatgttgatttgaccaacgctgttaaggatatgttgcgactatccttgactaccttatatatacattctgagaggtcggctgtcatgtggccatatcgacgtccttctctatcataagccatctgccatttttcctctgaaatgcgatcaatccatgcttctatggctggagtcagttgacagaatgtttctacactctgatcaacaacgtgcttgctgggagtttctcatatttgatcgaatacgtgctcgctaggagtgtacactgcattaaactacttatgaacgaccattctaagtatatatgagactcatattaatgtgacaatcctatatgaaatactacccaatttcttcaacatatc

SEQ ID NO: 111705 - DNA, 363 bp, Glycine max
agcttgtagggttaaagtctcttgtttgtcacgtgctcatgcaacaattgttagccgtggctatacgagacatcttgccaaacaaagtcagattcatgataactcgcctgtgctttttcttccatgctatatgtagcaaagtgattgatccagtaatgtttgatgagttggaaaatgaggccgcaattatactctggcagttggaggtgtattttccccctgctttctttgacatcatgattcacttgattgtgcatctggtcagagaaatcaaatgttggggtcctgtttatctatggtggatgtacccggttgagcgatacatgaagatcttaaaagggtatacaaagaatctatatcatc

SEQ ID NO: 111706 - DNA, 456 bp, Glycine max
  unsure (1)..(456): unsure at all n locations
ctaagcttaacaacgcttagttctcanagaactacgtaagtctgatttccttatcacaattgacgaatacgtatgagcaagggaaacacccttgtcgaccccaaaaaagataaaaaaaatgtaaaaaagcacaaaaagacataaagacgtaaaagggaacataaaacaaattgaagtcatatttgcacacttgattaaaggttgtcgtcccttgtgacggacgcgtggggtgctaataccttccctgtgcgtaagtataactcccggacctttcacttaaattttgtagaccacacctttccagtttttccgacgttttcttcgaataaatgttggtggcgactccgcgcattttcctcccttggaagatgcacccgtgagccctcgcgtcgccctcccgtcgaagggtagggtgcgacagttntcattctaagacaattnntgtaaaactatctt

SEQ ID NO: 111707 - DNA, 366 bp, Glycine max
agcttagggatggaacacttactttgtggttatgaacaaaagcgcaaaacggaatcaaaaaatgcgaaaaaggatgaccctagggctgcaaactcgtcaatcccgtgggtatggcttttgaaaggggggaaaagaagtttttgaatgtaaaaacgccccccctttcgtcattcttataatttggtgcaggggtggctcgcccaggcgagctaacctgcatttttttttttttttttgaggggaacattaaccatgtcccctcccttctcatggattagcatcttgcctaacttgaacttacttaggttagaattaggcgttgattacttattcttacaaatagtaaaagaaagctgcaaaatacaa

SEQ ID NO: 111708 - DNA, 426 bp, Glycine max
  unsure (1)..(426): unsure at all n locations
tcagcttctcaggaggtgagctntagttttagatgggtgtgtgtatctattctctagcttctcaaggaagttttctcanagaagcttctcaaggaagttttcttaagaaagcttctcaaggaagctacctagtctataaatagaagcatatgtaacacttgttgtaactttgatgaatgagagtcttgtgagacacaactcanagttcaacttctctccctttttcttccttcaatttcgtgctcccccctctctctttctctccctctttcttttcctccattgaagcatccttccaagcttcttatccaaggctcatcttggtggtgaagctccttcttcaatggcttattccctagtggatggcgcctcctctcacctcttctcctttgtcttccactgcatctncacagtggaaaatcacca

SEQ ID NO: 111709 - DNA, 368 bp, Glycine max
agcttattgggatcgtgaaggtggtttgatgctaatttagcaatggctttctcgattcgttccatattggacttggatcgtgtggattcggccatggacaacactctcaatgaaggcaccaaagttgttatggccgaaatccctaatctgcaatttcctagaattcgagagctaggactctccagaagcaagatagagaagatgagttttattcattctgccctctttcattacatggtaattgctttatatagtattcttgtgaattgatactaactgaattgaaaaattctggtgctagggcctaacagaaaaaaagctttaaaagattcaagaagattccatcctaacagaattgtaaagctcgt

SEQ ID NO: 111710 - DNA, 432 bp, Glycine max
  unsure (1)..(432): unsure at all n locations
cttctacggaggctggatctttgagcttctatgatgtcctttaaaggtgattntccaccatggagatgcagcagaagataaaggagaagaggtgagaggaggcgtcatccactatggaataagccattaaagaaagagcttcaccaccaagatgagccttggataagaagcttggaaaggatgcttcaatggaggaaaagaaagaaggagagaaagagaggggggagcacaaaattgaaggaagataaagggagagaagttgaactttgagttgtgtctctcaagactctcactcatcaaagttacaacaagtgttacacatgcttctatttatagactangtagcttccttgataagctntcttgagaaaacttccttgagaagcttctttgagaanagttccttgagaagctagagcttagctactgatg

SEQ ID NO: 111711 - DNA, 363 bp, Glycine max
agcttgccctaaagacttgtatcttcttccgagtatagatggcctagttgatgaagcatttagattcctcaacctccctttcttagatgcatatttcgagtataattagatcctgatgtttaagcaagatgaagagaaaactacattcattattgatatgactatttatttctattcagatatgccattcagtcttaagaatgtcggagcaacctactagaggttaattgacatgatatttgtaaaccaactcaaaaagaatttaaaagtctatgtagatgacatggaggtcaaaagcacaagcaccacctttcacgtataagacttagcagaaatctttgcaaaaataagtaggacaacatg

SEQ ID NO: 111712 - DNA, 493 bp, Glycine max
  unsure (1)..(493): unsure at all n locations
attcataaagagataaatngaatntataaaaatttacatcacacaaacacatcactaccaaatcaaacgctacacacacataagcacacatgagatgcgatgcacattagactcataggctcgtacacatggaatatcattctcgaaaaacactgcaaatgtagccctgaagtccatgagtcaacgaattgtcacacaataagcaacctgacactatcactatcacaaagataacatcgacaatggcgcattaaggtgttctggccttgcaaggatactcgattcgacccatgggatcaacatgagctagaaggagatttcaaaatgttgcattgcacccctaaggttagagtcatatcttaactcgttcatgacctcccttagttgggttcataaacttccttcacttcanaacacatataggcaacatgatngcatggtcacanacactatacacatgatatattttggaagtcccttggagatcctatcc

SEQ ID NO: 111713 - DNA, 328 bp, Glycine max
atgctatagatacttttttgcttttcacaccgaagccgcggagaatgtaaactaaacactttaaatcatccgccggtcgaaaataagataatatggcaacatacctgtctgaccaatttgtatattaactttgtccaatgtgaataacacataccgactggctcccaataattgctcggcattcatctttaaacttggcattttcggctgatccatcaagcaagttgtacaatgcattcataaatctaaaaagtatggacaatcaattcagacgtgtaaagaacactcacttttcttgggggggaggggaggcttgcgatatgttgtg

SEQ ID NO: 111714 - DNA, 401 bp, Glycine max
  unsure (1)..(401): unsure at all n locations
ttatagtaattgttttagaaattgttattagtatttttaattaattaatgatgtgaaaacttntacaccaataatactcgtttgttaaattcttttaaaaactatataaactttccttttccgcttaccatgcattacagctgtatatatgttcctttgaaaagaaaaaacatgaaactcatccatcagacagcttcaaattcgtaaaacttcacgaaagatctgtcaattttcacttttaattatcgctcggaatgtttgagtgtcttgctattttatatctgattaattcgacttgaatgaactgtgtaaaaggataaatttctcactgtattattcatgtattgttgtcatgacactttccatatctagctttgttagaaaaggcaaatgttaaaatt

SEQ ID NO: 111715 - DNA, 357 bp, Glycine max
agcttatgagcattcgatatcctatgttcatattattaatgatagtcaattcaaaataaatagggcatggataaggggaaattctccaataagaagaacacataaatgaactgaatattcactaaaaaagggaaggatttataaattatacaattgatgataaattcaaaagaattaattaatactagattgatattaacattatacatatttttaatgacagttcattatttaagatttttaaggttaagtatacttaaagaaattttgggatgagtaattttttaaaaagtttccttaaaaaatatgataataaaaataaaatacgttgaaaatatttgtgttagtttataaggg

SEQ ID NO: 111716 - DNA, 491 bp, Glycine max
  unsure (1)..(491): unsure at all n locations
tgatgctggacatagatatttattagtttcatagcggngatgttgcaagaagaatactcatatagctatagaagaagaagtatttattgatttcggatgatgttgatgatgccatcaatttggagcagttgggaattcctagtcacgtcaacaatggcggtaatggagtaattgccactcgactccctcgagtatataatgtgaataatgtgcagaaggtcatcaaagtcatggagttatctcctgaggaagcatggaagatgtttatagatactgttcatgcctttaatcctaagattgattcccttgaaattcaacctatatccaaacttgtatgcaaaaggtgctctcgtcttccacttcttatttacaatatagcgaattctcttagattgaaagagtctgcttcaagttggtcggcgggacttgaagatcttaaaccttggcctgaacttcaaaatcaaaggttagaagagtcgtactcatgcctg

SEQ ID NO: 111717 - DNA, 148 bp, Glycine max
ttttagaccccacaacccagcgagagtcgagaaacaagacaagcagcagaacccaatcccagagccgagaagcaagaaaagaaacccagaagcaccaaagccacaccccatatagggagagacacaaaagaagtgtccaaaaaccaaa

SEQ ID NO: 111718 - DNA, 435 bp, Glycine max
acgcacatggcgatcgaaggtgtaatcctatatacagacccgtcggatgaggacactctttcgaacacagacggtgatgagtatactctatgagccacaaattagcgacggattgaatgtaaaaatcgcctcaacgaaccacaggttaataaccgagagtcactgacacatgcttaagaatgtggtacatccgatacctgcagcatagcataacaagttgatcgaagcaaccaatggcttgatacaagagatcatactcaggcgcaaatgactacaactgagccgcactccaccctcatcttccgaaaagaaaacgaggatgaaagcaacaaatagaggtctgaacatgagtctataaaggagatgcaatattttgctgattcaatgtcaacaatgaagcatgcacacgaatccgcaaatattagatgacttaga

SEQ ID NO: 111719 - DNA, 362 bp, Glycine max
  unsure (1)..(362): unsure at all n locations
agcttgaagcatagaacaataataatttttcaattatttntaacaaaggtgttatcatagtgcacatgaacaccaaaactcacttaatcaaaatttacaaggatctcacttaattttaaaatgccaagactaaagcaaataaattacaagacaccaaaactcaacaactcgagcaatctagtattgaattggaataccattttctaattcaccatccactaaaacatggggtgcattattcctcaagccagacaaaaatgtggtaattaattaaaccttgggagtcggaggaggaagtatccatttggagccttcaatcatcgcaagtgttatgtaaggtatgacctccgtttcacttagtt

SEQ ID NO: 111720 - DNA, 351 bp, Glycine max
accagaaacaaagtatttttttgtgacaaccacaacacacacacgcgcagacacagacacacaaacacacacacacacacacacacacacagaaacacaaaaacacacacacacacacacacacacacacacaaaaacacgtgcgcacacacaaacagacacacacacacggacacacgaacaaccacacacacacggaggcggccacacacacagacacaaatacgcacacacgaacacacggaaaaacacagacgcaaacacaggcacacacacacaaccacacacagacacacacgaacacacacacacacgcacacagacagaaacacacacatccacacacacaga

SEQ ID NO: 111721 - DNA, 367 bp, Glycine max
agcttgtatgatgatggggtaccctctttttttgttacaaggtggcgatcgggccatggtgcaagttgactctccacatccacaaatcacacataaatccaccatccccagttgcacaccttcaactgagttcacgtactcccacgtagcccttatcctcgttcctctcaacactgggtccccatcaatccctccaagcttccacaacatccaagcaattgaacatccaaatatcatgaactatcaaaaaccaaaaaaatagggcagaggcagaaaactctgcccaaaacacaaactaatactacagttttccttactcaaataccccagtaacattctcttctctccaatattttcaccgctggat

SEQ ID NO: 111722 - DNA, 445 bp, Glycine max
tcactaagaactagctggtttcttactctattgccttaattgaacacaccttctgttggttctctatttggttcttaaccctctcatgcaacttctttacaaactctaacctatattcccctgctttatgtataaaagaagtgtccagtgtaggggaatgaggtctaaccgtgttaggggatttgaaccatagacaacctcaaaaggggactacttggtggttctatgaaccaccctgttgtatgcaaattctacttaaggaagatactcatcccaagacatatggatgcctttcatatgagcccttataatggtggataaagacatattcactacctctgtttgccatcagtttgtggatgaccgtggtagaaatataagttagctcctagtgataccataagggtgctagacatagtaaggaattaacatcttatctgacaca

SEQ ID NO: 111723 - DNA, 360 bp, Glycine max
  unsure (1)..(360): unsure at all n locations
agctttcgaagggtgcggnttttttttttcgaaaacttgcactatccatcggtttcattctgttcctacctttgccaaaaagaatgtcgccaacgactaacccggctgaattcttttcgtgggtctcttctccctatttgcaaaagaacaaagggactaaactgcctgaattattttgtgtctccctcctcccttggcaaagaattcaaaacgaccccgtctgagaaatcgtgtgattcttcccttctcctaatacaaaagtgttcaaaggactacccgcctgagaattattttgtcttcccattcacacagtatcacaggtttaacagcctgagatctttgtcttaacacattgcaggg

SEQ ID NO: 111724 - DNA, 367 bp, Glycine max
agcttgtaaggttaaagtctctacttttgtcacgtgctcatgaagatgttgaattttgttcagaatacttagagaaggctaaacctgttcggcttcctgagtctcggcatgatgacagagtgggtggtaagggttcaagaggactgcaggtgatcactccaagtgtagaatatttgttacaagctcacttgtatgtcttgaacaacagcaatgaagttttgccatacattgttaagcatgaagctttagtcaaacagaataatccgaaaatgtcaaagaattgggtgttgaaaaagcataacaagactttctgtgattggtttaaagatacaatctttgcagatgagaatgcttcagaaacattaac

SEQ ID NO: 111725 - DNA, 425 bp, Glycine max
  unsure (1)..(425): unsure at all n locations
agatgatgacagaaaacccaaagaatgatttgaagattgagtcaacaagttcaagtttcatgagaagaaatcaagaagattcaagaatcaagagaagtttgatttcaagattcaagagaagatgaattcaagtttcaagagaagaaatcaagaagacttcacaagggaagtattgaaaagatttttcaaaaaacaaacatagcacagttttgtttttcaaaagagtttttctcanaattttctaagttaccagagttnttactctctggtaatcgattaccagtttcctgtaatcgattaccagtggcaaagtttgatttccaaagcttttaactgaatntgcaacgttccaatggattntaaaatggtgtaatcgattacaatatattggtaatcgattactagtgtatccgaacgctgaaatt

SEQ ID NO: 111726 - DNA, 368 bp, Glycine max
  unsure (1)..(368): unsure at all n locations
agcttgtacctgcaaagactcctatatctctttctaaacngatngagaggtgttctggctaaagaaaactttacatcttttgtattttaaagcccggccaaatgcagcttcctaatcacaaaggatattcttcaaaataacattatcttgcaaattttctctagaaaacaatcatccacgaataataaatgcaaaatcccaggtgctttcccacaaatcttaatgccatgaatatccctcctattttcaacccttctcaataaagatgtaagaccttgagctaaaattataaatataaaaaagggagaagggatctccttgccacagatctcccatgggagataggatcaaccttgtcatgattcact

SEQ ID NO: 111727 - DNA, 486 bp, Glycine max
  unsure (1)..(486): unsure at all n locations
ctcagcttctgcttgaaataagaagacttatagggagtaatttctttcctacaagtacttggatggaagtatattttcaagtaaatccaccatgtaatattcttgtttactactacttcataacctactcataaaaaactattgaatctattgactaacaatttttatttttcacttttctttgtcaagagtatgttgttaggtctggatgatcattcatacctatattangttttgatgattaacaaagaatataacgttgtgatatattaatgatgagtttacgacaagtggatatgatcaatgttattaacgagcttaactgttacgacaagataaaaatactntgtttattattaactagcatctaacgcgctaatatcaagagcatccattcattatattaaccagtgtcatacattggtataatntacactcacgtccagtaggcatgagttttgtacatactttcaaagtaatcaacac

SEQ ID NO: 111728 - DNA, 361 bp, Glycine max
agcttgtagagatcgccagattaatgttatcacttacagaaattatttgagctctttcttttgctgcgcatgctctactttagtgtcgacaacctctccataacgggtccatgttccatattactaacaaaaagaactttaatactatacctctgtggactcaaaatatattggatcccctagtatcagctgatggatcgttacttaacataatataagaaatcagtaaatagcaacatttaggagtacgcacctaatataatgctatgaacctccggcaatgaagctaataattattgctaagatacattggttggttagcgcctatacttatgctcaataataatttgacgacgtttcc

SEQ ID NO: 111729 - DNA, 346 bp, Glycine max
tctataatacctaagtgctctcacatatgaaatgtcttcgttaaagaatggacttgctctccaacttttgatgtgacgttcatgcatgcacaagcaagagtcctaaaattaggacataatatataatgggacggaccgtctacattgactgtaacatgaacgactatgaccacatgtcactctgaccgaatcagtgtagtggcgaacgatcgtatccggatctacgtgcttcgctcgttgaaagaagatagagactgtgatgtatatgtacgatgaagacgatgtacatgctatgcaggaagtaaattacaagtgctatagatattataggctgagttgcactata

SEQ ID NO: 111730 - DNA, 365 bp, Glycine max
  unsure (1)..(365): unsure at all n locations
agcttggccgacgtcagtngatcatatctttttctgccatcaacagaaaacaaacttagccgatgtcagcataaaaataacaatgactgaaaacctagcctatttaaacaaaaaaatatccataaaatggctttggcaaaaactctagcttgatgtcgcccaaaaaacctagcatatgtcaaccaaaaaatggccttggcattgaccaaaaatagccttgaccattgtcgaccgaaaaacatcatcaactgataagttctatcctattttattgtgtacttttttactcttaatgtttttgtggccaggccaaccatttgaatgatgtgaaaatatactgcgatcggaaagtcatgattttatat

SEQ ID NO: 111731 - DNA, 511 bp, Glycine max
  unsure (1)..(511): unsure at all n locations
tgcgcatatttccttacgaacgttctctngcacaagacattctattaactaagaaaaatgcacccatatacaatcaaggcagcttcgttacctagattatttatatgtacttccaaagtgtatttgttacttacatcacacacacctccttggctaaatttacatacatgcatactcaaagcattttggggtaccaaaaattgcacatgtgcacatcttggtatttctaatacctatacatacacaaacttcatgatgaatcttgactatctacacaataaggtgctacattccatgctcttttcaaatttttgctacctaaagccgcatgcaaattcaagtatattttcctttgctgactagaattgtattcaaattaaagggtatacattnttntgtaatgtattttctttacataacatgcaacatatntatgtatatnttttgtgagaacatttgactaccanannatatatgcacatacantccaagtatttgctatcatacccaa

SEQ ID NO: 111732 - DNA, 363 bp, Glycine max
  unsure (1)..(363): unsure at all n locations
agctttgcggatnttgtctttccttgtgaaaggatcaatgcgggtccgaaaagaggcaaatttgatcatcctactacgacgactgaaaaaactggggcaaatgaagagggtgagaaagagggagaaacccatgctgtgactgccatttctatacggccaagtttcccaccaaacccaacaatgtcattactcagtcaataacaaacctcctccttacccaccacccagttatccacaaaggccatccctaaatcaaccacaaagcctgtctaccgcacttccaatgacgaagaccacctttagcacataccaaaaaaacaccaacaaaaaggaattttgcagcacaaagcctgtagggttcac

SEQ ID NO: 111733 - DNA, 488 bp, Glycine max
  unsure (1)..(488): unsure at all n locations
ctcatgcatgcagatgcttcttctatataaactccaaactctatttgcaaatctgatttcacgcttaaataggtggccttgttcgtgcttgtgcgcttagcgcacgttagtagaatttggtttagcgtgcttgtttcgcttagcagatgagctaaagcggtgcacttgatgacctagagcggtgcacttagcgaacttgacaactcatcttcttctggattcttcctcgcacttagccactgaatgtcgcgcttagcgaatgctcgctaagccaacatattggcttagcgagaaggtgaaaacaacactantttccaatttcctaattaacctgaaattgagagaaattgattattaaacacacaaaacaaaagtataaattatctattacttatatttaacacaaattacttataatataacanaacaaccatatattgctgagagtttgatacanaatacacatgtttcatacatgaaagttagtc

SEQ ID NO: 111734 - DNA, 316 bp, Glycine max
agcttaacaccgatttttatctcttttatagctcacaggatggaatcatacgcgtcatcaactgttctgatcttccaaaatggagaaaagaaagaaagcgtttttggtgcatttcccaattccactttgtccgcaacagtggagaaatatgtcgatgtataaactgtaaaggaatataatgctcttacaaggaacgcttgatcataaattatggaccaccttgcttttaatgggttccaccacttcaaaaagtactttgtatgcacactttttccaacatttgttaaagacacattggctcaatctccctctctct

SEQ ID NO: 111735 - DNA, 464 bp, Glycine max
  unsure (1)..(464): unsure at all n locations
ttaggaagcatcaacaagaatcaagcctatgctattgtgcaagctatcaatggggcaaaacacaccaataaattatgatgatggatggctcaaattctcacaaaggtaaacttatcactttcaaattgagctttcaaaactatcatgacatgtagaggaaaaacaaggatttcaaatcacaaaatgtcaagagacttttattttcagaacaattacccatttcttgaacatatcctataattcaacgaaaaatatgcaaagntgtacatgcaaacaaaattgacctaaaatattaaactagaaacccaacaaaactaacaaaactaacaaatttatcacacaacagaactagcaaaaccaaaaccaaagaacaccctcgcccatacttaaacaacacattgtcctcaatgtgacacaattaaaagatataaagccttaataccttctatagaatctgacaaatg

SEQ ID NO: 111736 - DNA, 179 bp, Glycine max
agcttcttagatccggttgatcgatgtcttaccttattcaaataaacatgaaaatgcagtaactaggaagtgatccttggtcgtttcccaacgagcagtgacaaaccaaatgttcataatatacttgcagcaacagtaacgattgggggggggggtgtggcctctcattattttctgcg

SEQ ID NO: 111737 - DNA, 309 bp, Glycine max
  unsure (1)..(309): unsure at all n locations
acgtcttaggaacttaccatactaaaaagcgcataggctccgctataacacccgatccaaaagtatgatgcataacgaatagggagtgcaagaacagatgaatgccgacctatcggccttaatagatcaaatggcttctatcactgaggccatgctaatacttcaaaatactatattagataatgctacggcggccgcttccaatacagctttggaagcggaaccggtgctacagcccgcaatatacttgtgccgagacagaaacgcgacgggttntaatcggaggtatagtcctcaagcctaccctta

SEQ ID NO: 111738 - DNA, 266 bp, Glycine max
ttcgtgacaccagcctacgcacgtcgcatggaccgtctaatcacaaccgcgccaacgatatactgacgaacgcgcgcacagctctcccaaacatttttgttcaaaacgaaccatataaaaataaaaccaccgcctacatatatttgcacaggcctaagaaggacttgccactcgcaaaacacgacatgtgaacagaacctatgcagagaggaattgacgacaaaatcaaccacaatgaatctgcaacaacctgagggagaaggcgc

SEQ ID NO: 111739 - DNA, 430 bp, Glycine max
cctatgcaacttgagagcctgggatgatagagggttgcctatgttgtcgttgatgaatactccagatgtacatgagtcaactttatcacagagaaatcagacacctttgatgcattcaaagagtcgagtctaagacttcaaagataataagactgtgtcattattagaattttgagcgaccatggctgagagtttgaaacagcaagcttactgaattctgccatctgacagataactcatgatttgtctgcagtcattactccacaacaatatggcatagttgaaaggaaaaacatgacttttgtatatgctgctaaggtcatgctttatgctcaataacttctctatattcttcgggcttgagccatgaacacagcatgctatatcctcaacagactcatacttataagagggactcctaccacactgt

SEQ ID NO: 111740 - DNA, 56 bp, Glycine max
cacttcttatctgttccccaacactataaaagggtggtcaccttttcatctgaaaa

SEQ ID NO: 111741 - DNA, 330 bp, Glycine max
cttctttgagaagcttgatccttttccactaacaccccttttaataaataaactaacttctttgaaaataattagcgataaaataacccaataaatataatcaaacatcaaaccattattagtaataatatatagatatatatcagggtgttatacagggagaaggagaaaaggagcacgaaattttatgccacaaatgaggtctgaaatttgaagtgtaattctcaaatgatcaaagttgaaaaaatgcacacacaacacctttatttatagcctaagtgtcacacaatattggagggaaattgaatttctatttaaatttcacttgaa

SEQ ID NO: 111742 - DNA, 418 bp, Glycine max
  unsure (1)..(418): unsure at all n locations
caaagtactttctgcacctactatatgatgacttgaccaacgctggtattggaatgttgcgacaatctttcaacaccatattcacacattctaataagttggttgtcatgtgaccatatcgtcagccatatgtatcgtaagccatgctccatttttcctttgaaatgcgatcaatccatcttgctatggctggactcaattgacgaaatttttctaagttttgatcaaagacatgcttgccaggagtgtacgctacatcaaatttgtatcatcaaaagttgtatgtagacatgaaactcacatcaaactactgtataaaataaaccttactcaatttctagaacatctctntttgtttcgcgttgttgacttgcgactgaattgctggctatgtgtctgacgcttacacatgataacc

SEQ ID NO: 111743 - DNA, 62 bp, Glycine max
  unsure (1)..(62): unsure at all n locations
agctngtacaacaagtaactaaatttattttttgtaaaaatagcgaataggcatggggggcg

SEQ ID NO: 111744 - DNA, 457 bp, Glycine max
  unsure (1)..(457): unsure at all n locations
ccttccttttgttattacattccttccttatacttgccctttttcttaggaacttagccttcatacctgaatttatagcatacacacttattaacttattttatacttacagcttctttatagaacataagtattgagtatatacaattttatttgaccatttcaatccttacccattgcctcccccacatttgaaacaaatttacctttataatacctccccaaatatgggacaaatttgncttgaaccatcttctgtggatgatgctctcctacaacctaaaataaggtagcagaagatacaactgaatgggctcaaagtgtaatccatcaaatcattcattcaggttatattgagtgctagggagtatcattcaatcacacggttagctctgtggctagtagctttcataataaacgtggcttcatcatctcagttcatgatccaatcgtactt

SEQ ID NO: 111745 - DNA, 364 bp, Glycine max
  unsure (1)..(364): unsure at all n locations
agcttctaaactttatacaatatatatatctctgataccacttgttagacaagtggcctcatatatcttaagaagggggggttgaattaagatattccaaactacttccccaattaaaaatctatttcactttttattcaagttatgaatttccttaatgacaatcttcttaaatattgattcaaataaaacaatttgaatatgaatataaagcaataataaataaaggagattaagggaagagaaagtgcaaactcagatttatactggttcggccacaccctngtgcctacgtccagtccccaagcaacccgcttgagagttccactatcttgtaaattccttttacaagttctaaacacac

SEQ ID NO: 111746 - DNA, 491 bp, Glycine max
  unsure (1)..(491): unsure at all n locations
tgggctatccatcacatgtggtactatgtggtggtcatgcgatggtgcacaacaagtggtgcacatgcacaaatcgcgcataaacccaccatcccctgttgcccacctccaactgagctcacgtactcccacgtagcccatatgctcgtttctcttaacaccgggtccccatcaatcctcccaagctgtcccaacatccaagttattcaacaatcaaacaacacaaactatcacagccaagatagcagggcaaaggcagaaaactctgcccaaaacaccaaccaaaatcacagctgttctcaattaaagactccaataacaattccttcgttctagttcgttacccattggatcgactcgaaagatttactggaagtctctagtacataagcctacatgtggaccgttgggatctactagcaaacatccggaattcattctgcactactctttgcacaaccagcaaaacatggcattnttctgcacttatg

SEQ ID NO: 111747 - DNA, 367 bp, Glycine max
  unsure (1)..(367): unsure at all n locations
agctngaagtgtcatatttagattttctaattctacaaaaggtatctaattaagatctacaaattaaagatgtgaacttttcgcaatcaaattgatgcaactgtatatgatttatacacgagacttgcggtgcccatgtgttttactttgtgttccgaaacatgttgtagatggagtaaatcacgtcaaacgttgaaatgatgtagaagctataactagttgcttccacgaagatgtgtaaaatcacactactaaaaattgagctttttacgtcggtgattctaagacaattgtaaaggaccattttataaagtgcagcagtgacattttcataattaactcaaatctaacgacgacgtttccgaaa

SEQ ID NO: 111748 - DNA, 451 bp, Glycine max
  unsure (1)..(451): unsure at all n locations
aagcttgtcctggttagacatgatggtacatgattgngacttgtattattcaatntgngaaaaattggatgagggaaagagtggttttcgaaatctgcactttatgcagaattttgctgttgaaatgtgcagcagaattntgtataagtgcagaaaaatgcttgtgtatggctggttgtaaaaagggtagtacatatggggttctggactttttctagcagatcccaacggtcaaaatgtagacttatgtactagagacttccagtaaaattttcgagtcgatccaacggttaacgaattggaacaaaggaaatgttactggggtgtttgtatgtgaaaagctgtgattntgagttgtgttttgggcagagttctctacctttgccctgttttgctttggtttgttagtccatgatgaatggatgtggaattacctggatgttgtggaagc

SEQ ID NO: 111749 - DNA, 381 bp, Glycine max
gccccggatccttaagtcacctgcggcatgaagcttgctttgcgcccaccttatctctcttacagagagacatgctcactgagcgtgccttcataagctgagaagcccaaaagcctttaaaaactgagagaagaggggaaacgaagcgtcaatcaacgtggaaaggaaggaacaaggcagcaaggctaaaaagaaaacattttcttcacatttttactttatgattccatgcctacatcattttcacccttgtattaaaccctccttgctaatggagggctaaaaacctcattggtggggagtgtttccactgagcactctccgagtaaaaactttaactatttatttacaattaattgtagggtaccttgcctctatccg

SEQ ID NO: 111750 - DNA, 495 bp, Glycine max
  unsure (1)..(495): unsure at all n locations
ccttgaatcttgattcttgatgcttgaaatcaaattttctcttgaaccttgaaatgttcttgattcaatcttgaacatcttgaactcattctttgattcatgagatcatcatctttgttatcatgaagtgttcttgacctttgagctttctgtcatcacctttgttatcatcaaaacttctttgaatcaatcttgattcatcatgaagcttgcttctacaacggtgagctattanggccctatacccaggtccttgggaacataggaagtgggggttgatctgtggtcatactgagtcttcgactcgcttgatgttaaatgtcttcttgaatcaatgttaaaagtatattntctagtaatgcatgcttgttaaagtagtatgtttccaatctatatcactcgtcaaattcattggatccataatgcatcgttataaaactctctgcacttacctacccanaatatgtcatcattaattgtcactcaactaaattt

SEQ ID NO: 111751 - DNA, 353 bp, Glycine max
agcttatcctcgcctgatagccttttttatttccttcttaaaagccgtgttcacattaaatgcttcgctctaggaatgtaataggaaagttaaaggaaacggaaattttaagaggaatagtaggaaaaccaataaaaataatgagaaatataaagggcacatgacttacacctaaattgtaattaaagtcttaattcagcttcaaaaaaaattaattgttcccaaaaaaataatataagtatatatatatgtcggcctatcaaacttataaggctttttaataagcctaagcctggtctatttaatttaataagcttttaaaaaagtttgagccttaccttttaattaaatgg

SEQ ID NO: 111752 - DNA, 433 bp, Glycine max
  unsure (1)..(433): unsure at all n locations
tgttntcttactaattgtggttattttatttttgtattaatttcttttataataaactcaccctcgcnaattttgtactgtgtggttggtacctgtgatgatcgcgaactcttgttcgtaggagtagaatgacagcagtagagtacgagaagtgagattcttttgtggagccaccgagctgatgtgatgatgttgagattattttgggagagagttgtgttttgttaatcaactcctccatagctagttccataattcttttgttgaatcgaggatgtaaatcacaattntaattatatgtatgaacaaatttactttccattatgtgaatgatgtgtatggagttactataccaatatatatatgcattcacttaagtattggtgcattggttggtgaatgtngtataaannaaatactttcattntttttt

SEQ ID NO: 111753 - DNA, 357 bp, Glycine max
agcttgtgcaaatcaaatcacttctattttttatatctagcacgcattttctttctttacacaatcctcacgtttggcttcttagggaaaaacaccataactaaacgcgccgcaaggaatccctatggcaccaaatccaaatctagaacgatgggtgatcaaaaagagactcatgaacataacaaagtcgacattttggctatgaaaaaacaaatggcttccatgatggaggccatgttaagtatgaagcacctcataaagaagaacgcggacactgttcccactgatatttttgctgacgaagcagaccctactctcttggcaactaagcaccatcctccctcgaacatagtagga

SEQ ID NO: 111754 - DNA, 381 bp, Glycine max
  unsure (1)..(381): unsure at all n locations
ngcttgtggagcttctatggaggctagatctttgagctcttatgatgtccttcaatggtgattntccaccatggagatgcagcgaaaggcaaacgagaaaaggagaggggaggctccatccactatggaataagccaaggaagaatgagcttcaccaccaagaatgtgccttggataataagcttgaagaggatgctttaatggaggaaaagaaagagagaggagggagcacggaattgaacgaataaaatagggagagaagtggagctttgaagtgtgtctcataagactttcattcatcaaagttacaacaagtgttacacatgcttctatttatagactangtagcttccttgagaagctttcttgagaaaacttcat

SEQ ID NO: 111755 - DNA, 316 bp, Glycine max
agcttcatcaccctttttccttcccataacaagaacttgctatgatgcataatatcactagggcattgctttatacccgggtatctggctatctcatgacattgcgagattacaatcttactttattagcatggaccgattgaacggttatcaattatgtaatatgactatgtggcccctacatatgtggacgattcatgaggggtggtccatcatagggtaaaaatccttccatgaatggcttgcgcacgacaaactgtacatcactgcatcagccttcctaccaagttttgcctcttcgctgattccaaaaggg

SEQ ID NO: 111756 - DNA, 376 bp, Glycine max
  unsure (1)..(376): unsure at all n locations
gacctataaaactcagcttacctctctctgatacatgactacaaacattcttgtttattctcttacacatcatgatnttgaaccaagtgactcgtacccttgaagaggagatgaagtgagacactccgataatgtccgtgcccaacctctaatcttagagagaacctacatagatctacatgacacactgagcggtaatattgggacctataaaactcgtgcaagccttgaccacagaccactcgatcatctatagacaaagcttttagttcatagcaaacacttaagatgaaacagcacgtgatagtatatacactctttgtcttcgcacactcatataaagtatttcactaaaacagactacataacaggtcac

SEQ ID NO: 111757 - DNA, 368 bp, Glycine max
agcttgccacccagctcgcccaggttatcaaggttgcttcctccagaagcaacagccttctggaggaatcttctggagggcccaagtgggcctggttgctatttgcacccccatttttactaaatataccccctgcctttttttggtgattcttttttcataaagttacggaaacttacgaacttcgtaacgatacttgttttctttccgtaatgttacggaaccttgcggattacataatcatgccttttttgacttacggaatgttacggaacctcactaattgtgcaacgatgcttccttttgatttccggtgtgtcacggaaccttacgaattgtgcatcaatattttcttttgatttctggca

SEQ ID NO: 111758 - DNA, 420 bp, Glycine max
  unsure (1)..(420): unsure at all n locations
acacgcggagatntacgtcatcttgcgtactcacattatctttcatactcacattngagtcacgctgacgcggggaaatacccgagtggttagccgtataaacattcttctggctatatgtatgacgaaaagcctgatagcgtgcgaagactgacatcgtcttctgcgcccttctgtaatcgcggacgaccagcccattgacacgcggacaattacggcattttcggcgctcacaagatctgtgatactgacattagagttacgctgacgggcggagatacccgagtggttatgcgtatacacattcttttctgctgtctgtaagacgagaagcctgatagcacgcagagacttacgtccgtttgtgcgcccttcgtatatcgcggccgactagcccttggacacgcggagatttcatca

SEQ ID NO: 111759 - DNA, 337 bp, Glycine max
  unsure (1)..(337): unsure at all n locations
ttctacaaagtncatcaaccgaaatctcaaatagttttcctctctaaaaacactttttcaaaccaatttacatgtgattatcctaaaaactggagtttctacagaccatcatggtttgcttatggcccagcccaatgagaattgacaaagttaactactagtcatgccaacattgctgctaaaccagatacactatgacagtctccttctaacttgttgcgacaatagctttgccagggctggcctcaccaagcctagatttctgttagcactccgtatccatattgttggtgaattccatgcaactttcactatattacctcaactcgatctcgat

SEQ ID NO: 111760 - DNA, 332 bp, Glycine max
tgctcaaaagtagcatattcacaatcaccagcaacagagtactcagaatgctccaaatgcgcagactgatcaggacgcacactatgcctaactaaatcacctgagttaccgctagttatgcactatatgcagccaacaatgtgtttttcagacaagcaccaggggagggttcaaactacgactatagtccaacgatatccaaaagaactgatattatgtgagcaacaccctaacatcatgaacatatagcacaaaagttttcagactacaattcaaagtctactatgaacaccgcctaatgaaaggttagaaaataacacatattactacaa

SEQ ID NO: 111761 - DNA, 366 bp, Glycine max
  unsure (1)..(366): unsure at all n locations
agcttgcccaagcgagctggntgcttatgcatgattctatttcatggcccaggtgagccaaatgctagcctgggtgagccacggtctataaaaatccaaaaaaaaaccttttgcccccttccttggggtccttttgattcctcgatcaaaacactgagtgattacttgcttcgcgctataactactatcaaacaccgtaattcaactagcaagaatcaaaatatcagcaaacgatagtccccggacgaaattagggtctgacaccccccattaacagacccaccaaacttctaatttcaaagctccaccacctcagcctttaccacatataagccttaatgccctttttatctttgccacccctgt

SEQ ID NO: 111762 - DNA, 374 bp, Glycine max
ctaatgagagcaacctccgctcaatcctgtgtgagaaatctacattgtgagttcaaccatctctgttgagagtgaccgcatttctgtgaaaaagctcgtgatctatcatagatcttagatggatatatagactgttatttcttgggtggaaaccctttgtgaagagaagatctgtatctgtgcgaaccaaacacataaacctctttgtggtgaaagtccccaaggctgaaaggtaaaatccagggcgtgtcggttattcaagtatgtaataaatctatcttgaagggaggatggcgtatccaacgtagaaaaccatataaaaactggcttacatttcctcatcctaaggttgtactaattgaacagtttgttat

SEQ ID NO: 111763 - DNA, 367 bp, Glycine max
agctttacaacagatgccactctatgcttaattcctgaaagacatgctaactaagaagaacaagtatatccacagtgacaccatagtcatggagggaaactacaacactgttattcaacgtatccttccactgaagcataaggatccgagcagtgtcactatactttgttctataggtgaagttttagtaggcaaggctcttattgatttaggagccagtattaatttgatgtcgctctccatgtgcaggagacttggagagctggagataatgcctactcggatgaccttacagttggctgatcactccgtcactagaccctatggagtgattgaatatgttctggttaaagacaagcatcttatc

SEQ ID NO: 111764 - DNA, 444 bp, Glycine max
  unsure (1)..(444): unsure at all n locations
tgcctgctcatggaactattttcttttactnctccatatatgtcccgataagaaaggcactttcactggatggctcactatcatttacccttgctcattgaccattggaagatataagttcttggtggggaatgatactgaggatcaacttgggaactacttatgtgctatacaattccaacaagatccactatccacattgagagaacaacgtttatttacacatttgcatctctgatgaaagatgctctctctttgggattgagatagatcacaagattgacctccaagaagccttcctaccattaggaggtcacattctttgtggaggtagacttcctctctagactcttcaccccttacttcatcttcacttccactagagaaaggggaagaagtagtctcctctttactactatcaatgtattgcccctcataatcatg

SEQ ID NO: 111765 - DNA, 368 bp, Glycine max
agcttaggggctggtacgaacaggtgttttgtccatgatcgatcaccaccccgcgcctggctaaagacgttaaagaagtgctcctgggagttagcctagtacctttaactttgctctttaattttcttgtttcatatttgtttgttttcttgaactatatcctgaattcacctaagtttatatgcaattataggatttttagagagaaaatataacaatgaacaacacaactttgcagaggattttttgcaaacataaaaaggggaggggtgaagccattttcaccccatttcttccccaaagctcaaaaccttcaacaagtttatgggagccaccattggcagcaacccctgtcataccctaatttc

SEQ ID NO: 111766 - DNA, 368 bp, Glycine max
agcttacatacagtggcatcacactttattaacgcgcaaccagtgctcctgaaacctatattaccaatcaggctaaccgtcaacgttgaagcatattcatgctctctcaccatgcattcactcaaaagtgtaaacttaaacgcgcgtaaccagattcaatacaaactccatcaactaaacttgaaaaacaagctatagttgaccttacaaggcacacaactctatgcactacgctcttgttaatgacacaaaaccgacatgcgaacatgatccatccagcaaagggcagacattataggcgcccaatgatccacaatcaaagagacacctcatcttccatgtatatcatctcctaaaaagactggacc

SEQ ID NO: 111767 - DNA, 367 bp, Glycine max
  unsure (1)..(367): unsure at all n locations
tgatgctatcctaccctgcatgtgtattgngtagcatactccagaatgctggagctgcagctgctcaagcaagccctgaggtacatcacaccctataagtatgatgatggacgcctcgaatactgacatgagcacactactcacgttcaaatagaacatgaaaactattatgacacgtctaggaaaaacgacgatctcaagtcacaagatgttaacatactattattaggaaatcaatgacccattacgtagaacatattctattatgtcaaagacaaacatgcaagtctaacacgagagctctactctgatatgccgtgagcaacagaggtctatcttccgtcgcaaagactatacctacctatca

SEQ ID NO: 111768 - DNA, 367 bp, Glycine max
agctttaatatcacaagtaagttttttactcttttctttgttatttcattgaactttaggatagagaaccttagattatgttttagatttttagggttttactgttttagaagtagttaacattttaggacttttcacatgttttgtattatgtacattgtattgagggttgtgcatgtttgatatacatgttagaagcccggaaaaaggaagaaaacgagctgtgttttctgcatttctctggaaaacacgatgaactcgctaagcgagttcatcaatattcattgaatatatgagttttctggaagaactcgctaagcgcgcctaccgcactaagtgagtttatctttcgaggatgaatattcat

SEQ ID NO: 111769 - DNA, 387 bp, Glycine max
  unsure (1)..(387): unsure at all n locations
aaataagaactccggagcggattatactatcattattatactactaaatatatatatatccatgtgtaaatgtggcaaatgtggattgatagccaagcatatatacttgatcaaattagttncatattatatatgcttggcaaataagaatcatattaacactaaattggcataacaattaaacatacaagggaatggtatcttataactatgcgtactctatacacgcagggctccatagagagaaggagaatatgaataatttctcttatgttgccgccggttgtaggtgccaccctactgatgaagaacttgttgattactacctaatgaagacaattacctcaagaaggattgacctcgatgtcataatagatgtggacctgt

SEQ ID NO: 111770 - DNA, 365 bp, Glycine max
agcttaggttcaaccagtgaattatttaaagagagctttatacatagataaaactaagaaacattatcacaccagacgcaccctttgttgaaaattggttttcttgctctaaaagagaaacagtgtaagagtaaataaatgccctgcgaagatgatgaaagaaagaactctaacaatcaaaattacctaaactctgtttgatgattccttctgaagtagatccctcagtttcctcaatgctttcaaagttacgtcttttaattctgctttcattcatgaattacagtatataacacagtgaaatttgaccaaaaacaagttagaaaaacaaactcatagcattatctctcagaatagaatgacat

SEQ ID NO: 111771 - DNA, 506 bp, Glycine max
  unsure (1)..(506): unsure at all n locations
tctaataacaatgataaagtgatcatactggttaatgtatattcttatgattaatttatccttcgtctgtgtctttatcattgtcttcaattntgattgtcttttcttgcttcttctttagtgttatttgaactatgaaaatgttttttctctttttgtttttcatttaaaaaatgccaccttattggagaatgtcccttgaatattttgttgtcttgaagcctctatttggctagtgagcataataatcatcttggtggaaaacacaaagcagtgatacctatgatgacaatgagagtctacagaagaaagccaagaaggtgtggagttgcaagttgtgtcaaattactacaacaagtgaaaaaggcttcaatgatcatattcgatgaaagaaacataaggctaacaaagaattcactagaactcataaaatatgtaagagaataaaacaactttatcattgaagaaaagtaatatggtatgaactataataaagtcattgtacc

SEQ ID NO: 111772 - DNA, 364 bp, Glycine max
agcttaagaaaaagcttaacaaacttagaaatcaagtgatcatgtattccgaaatatagggggagaaaacggatgacggatgcacattttatctatatacaattgtttgttgcttgcttgaatcttgatttcaggtattgtattgtcatcatcaaaaagggggagattgtagatgcaattggctttgatgttttgatgatgatcatgatgatgtgttgcaattgatgcaaatgggcttttcaagattaaaattcaagacaatacttcaagattacaagtcacaacattcagatgatcactataatattaggaagggaattcctaattgaattagcaaaggtttggccaagtgatttaaaataaa

SEQ ID NO: 111773 - DNA, 423 bp, Glycine max
  unsure (1)..(423): unsure at all n locations
cgaccacgaatttatgttatttcacctagacacgtcgctctcattaattgcccaagataataaatattgagaataccccacacgttntttgtattcccttgaatattagaaatattntatcagttgaaccaagagaaacaaaaaatcttgaacagtatcaatactttggaatcatattaggaaatccatatctttttccatatattcttatttgtgtatcgtgtgactgagggcgaaacacaagaggcacactatactcttgcttattgcttaggctattatccattttgtgcgttacgctgagtaaatgtgggggcagaaaattgacttaagcagtcaaagtttcatttggcgggtgctctgcagtttgcatcagattatgataaactgctggtatcttctagcaaatcttggcctacttta

SEQ ID NO: 111774 - DNA, 315 bp, Glycine max
tagcttgaataggaccttcttgcgtttagttatgaccatttcaattcctggagagctttcgtagatcaatgccgagcatctctccatgttatgccctctaatccgacatccgcgtgataagttatgaccatttgagtttttcgagagctctcgcgggtcaatttccagcatctggttatattacgtgcccgaatctgaccttcgggggaaaagttatgaccattttaattcctcgagagcttacgatgtttaattcccggcgcttcaatatttcgaagcctgaatctgcgcccagcgagcaacgtcatgaccatt

SEQ ID NO: 111775 - DNA, 462 bp, Glycine max
  unsure (1)..(462): unsure at all n locations
tcaccttctggtcctcctcatagttgtggcatgagataatatgctctattttcatctcccactccaagtaggcctccggatcattctttcctttatatggaggaatgttgagtttaataccatcaattcggttttgtctatgaacaccatcattccctcttctcctcctttcttcttcattatgatctctattctccatttgatccaacctctcatggagcgcatcatctcgttgtttcattaacctctccatatgttgcatcaaagcttgcatttggaattgcgaaagccccactccatcattaggattagtacctgacatctcaaacaaacaaatcaaacgtaacaagacaattatagttgctgtttgaatacctcacccactcaagtgtatcacacaattatggctnttctctaatgaaacactcttgccttntaccactctaattccccttgagttct

SEQ ID NO: 111776 - DNA, 362 bp, Glycine max
  unsure (1)..(362): unsure at all n locations
agctnctcatcacatactttatctgtttgaatcagcggcaccttcaagaccgagacaccattcgaccatacctcagttcaggtcacacgactctctcttatctttaccatgtagtatagaataccatgggtgagcttggggaactcgtgcttactgaaaggattaggtttgtggaattcgagctctctgcggatttcaatcggggtgcgaactcaggctaacggttggggcgctcgctgggacttatttagaatgaagcatgacctatagctttgtgtccttggtataattgacggctatgtaggttggagcatgtctgaatgtgtgtgcctccatggcgtatgagacattggactgctctc

SEQ ID NO: 111777 - DNA, 306 bp, Glycine max
ctcttcatggtgtgatggtgtgcgtgcatatcgctgggctattgcttatagaatgcagatctactatcctaacgcttggttgtgcttctttggaagctccacatatcttttgtttttgcttattcgcagagtgagactaatgatggcaggatgctcatactctccctctacatacacatatctcaggtgatgaagcgaagcgttctctttagtcaacgtacatggattggctattttattttccacactttgtttatgaatctaaggcatgatgcattcgcacgctcttgatttgctactggtgag

SEQ ID NO: 111778 - DNA, 357 bp, Glycine max
agcttgttgaaatttttcatgtttttatgagttaaacatacccattctgttttagggtttttgtgatgatgtttgtgatgtttatatgctgaaattgctgatggaaaactgttagagatgaagggtagaattaacctatggttacaaagtgagaatggggtgtttgagtggaaaaaaaagagtgaggctttgagagttggaaggctaaatctggattctgtggtaaatgaaggttaaaatgggttaatcctaccttgaaatgtcatttacgacatgtgagacaggttatgctgtgctacagagaaaaacaaatgaccaaagtgaaccaagagccatttctagggcaaaattgggtgt

SEQ ID NO: 111779 - DNA, 499 bp, Glycine max
  unsure (1)..(499): unsure at all n locations
tccttctacttctgcagctcctactctagcatccacttcagtatccnctcctgtcccagtttagatagattctcagtgctttgaagccatgcttcagagcattcatcagggacaaatcattttactacaaagtttgcaaatggtggcacctccagactctactccttcagtagagcagattaatgagatggtagcctggcccgagacccaaccttctcttcacaaggaagatgcaggtcccacagcccaggtaccttagcatgtggaggatgagtcatctgatgccaccatcctagagccatttgttataagagaagaggcagaggagacacaagtgagacaggtagctgctgccacacctgagcgatccattgaggctactntagaagcctttgcacaaagggaggatataccctcacctcagtctgcagcaaacccctccactcctcttctagagatgccagaggacctagctacattagtcctggctatggacact

SEQ ID NO: 111780 - DNA, 257 bp, Glycine max
ccaaaaacacacccacaaggactaaccacctaaaccccctttgaggcagtccacaccgcccccaaaagaacaaaccacaaaccgcccgaatctataggtccccttcccccctccaaagaatccaaaggacacacgctgagaatcctcccgacacctccctcccattaaacaaaacaattcaaaggactaaccgcccgaaacacctctgcttctcctccacaaagatacaaaggaccaaccgcctgagaaccttgacc

SEQ ID NO: 111781 - DNA, 358 bp, Glycine max
tcaacatcgattttaaccgatgtagaaaccacctgacgtaacattatcaatgctaacattggtgttcaaaaaaccgatgttaatatacactacacgacatcggttgtttgagaaaaaccgatggcgcataatacaaaatgtcataacaacataatctacaaaaacaacatcgcgtgtagtcaaaatcgatgttgaattgcgtattctgaagcgctcactacatcggttatgaacaaaccgatgtagaaagtaccttttcaacatcgatctttggaaaaattgatgttaaatgtgcttatgatatcttgtttagtcaaaactgatgtggataatgcctgttacatcagtcttagactaa

SEQ ID NO: 111782 - DNA, 335 bp, Glycine max
cagcaagctagtagatgagtggcaatttttataccttcaactacgctccactggggaaaactaatgacatgctaaccaagaactatggatagcctgctcacagaaggtgaacaagtaaacaaggtttgataaacaatggctggttttgtgtctatagcgagcggaaaacatgcctatcgccgacagctaggggagggcaccttaagggcgggagggctcttctttggagtcgcaactcatccgagagccacaagaaacgaacaggccgtcagggcccctggaaatagcgtgaccttatataataatcacaagttacatcgaacacggggagacaa

SEQ ID NO: 111783 - DNA, 458 bp, Glycine max
  unsure (1)..(458): unsure at all n locations
tatcactgtgtatgatacatgggctatatctttttattatagttctgcctctgaagaaaagtctcttactaagaatactattcttcacacacaccatgataatgcatgatgtaatacatatatcaaatgtactaagatgtaacaaccaagattacaaccaatactaatgccactcaatggaattggggatgttaaaaccacaacttcttcaagctttaacccttatgttgttcagaagctagctagttagttaagttgaacatcctttagattgctagctggttgaaatcaagcttaacgaggtggatatagataaataatatgaggaagaaagttgtataatataaaattctattaaaactcttaaattattataagatatttataagtttaataagattacanagaatagcaactatctaatgtattagttgcacatactttgttaaacaaatgtg

SEQ ID NO: 111784 - DNA, 274 bp, Glycine max
gacttaagcaccgcggctgcaagctgcaccagctggccattttctagttgtttcccaaacaaggccttctggagattttcggaagcccaatgggcttgtggcttttgcacccccattattactaagtgcacccctgcctttgggtgattttttccatacgtatcaactttcgaatttgtaaggacgcttgtttctttcgtatgttctaaaccttacggatacgaatcatccctttttgcctcccggagcgtcacggaactttatgattggcact

SEQ ID NO: 111785 - DNA, 467 bp, Glycine max
gctgctctgtgggcttctatggaagctggatctttgagcttcaatgtggttctttaatggcgaatttccaccatggagatgcagcggaagacaaatgaaaggaggtgagacgaggcgccatccattaaggaataagccatggaaaaaaaagagcttcaccaccaagatgagccttggataagaagcttggaaggatgcttcaatggaggaaaagaaagagggagagaaagagagaggggggagcacgaaattgaaggaagaaaaagggagagaagttgaactttgagttgtgtctcacaagactctcattcatcaaagttacaacaagtgttacacatgcttctatttatagactaggtagcttacttgagaagctgtcttgagaaaacttccttgagaagcttctttgagaaaacttccttgagaagctagagcttagctacacacacccctctcataactaagct

SEQ ID NO: 111786 - DNA, 263 bp, Glycine max
aggaagccctttcccacaacctcctcaaggaagttctctaacaaagctcctctagaagctacttactctctcaactcaatcatgtgtgacaccttgttggaccttccacgaataaactcttatgagatacaactccctggcgcggataccaacctcttcctccgctcagtccctaatggacggggccacccgcctgctatttacttggccttccgcgcatctgcatggtgtacaatcccatcgaacgacccattgaagctcaa

SEQ ID NO: 111787 - DNA, 458 bp, Glycine max
  unsure (1)..(458): unsure at all n locations
tccttgagaaaattcctaaagaagctagagcttagctacacacacctctctaatagctaagctcacctccttgagatgagaagctagagcttagctacacaccccctataatagctaagctcacccccatgacaaaatacatgaaaatacaaaaaagtccctactacaaagactactcaaaatgcctcgaaatacaaggctaaaaccctatactactagaatggccgagatacaaggcctaaacaaaggtaaaatctattctaatatttacaaagataagcaggctcatacttagcccatgggctcgaaatctaccttaaggctcatgagaaccctaaggccttcccttggatctctggcccaatctacttggagtcttctatccaatgcccttgcgggatatgattgtatcattcctccctncttctcattctctctatttggttcaaggctttttt

SEQ ID NO: 111788 - DNA, 352 bp, Glycine max
agcttaacatgacacattatattctctttcacttgacaatcaatcacagcacacatatgctacatgcagaactatcaacataatatgtgattatctatttcctactacttcgcaataacatacatacatgcttacatacatacatgtatatacaacgctaaaaccaccaatccatgtcaattcaatggaaaagaaactataccaagttatcacaaggtcaaaacagagaaaattacgcgacatatcaatacgggatcaaatgtgccataggcagaccgcccaagggttacctatccttttatgcttcaaacgaagtaacagagaaaaccattttcattttcacttccattat

SEQ ID NO: 111789 - DNA, 469 bp, Glycine max
  unsure (1)..(469): unsure at all n locations
atgtgtgactaattgattattattattnttttttttggaagaatcataaatcaaaacagatcttacctatggaattttccaaaccatatctgcacaaggaaggaaatgctacgctntttgttgacgatggcagatcttgggatgttgggttaagggtcaatcactatggacaattgacattttccagaggctggagaaaattttcgttagagaataaatngaaagtaggtgatgtttgtggtcttgagctacacaatagtgaaaaattntcattcgaagtttctatttatcgtctcgaagagaattctagcactcccatcttcaaaggtagtataatatatttaccttaatttcaaaatcgaagtattaattcctactatttttttttcattttgatctcttattattgtcatcagttcttttgggggactaaaaagacagcgaaagggcaaaatgtattcccaatgac

SEQ ID NO: 111790 - DNA, 328 bp, Glycine max
  unsure (1)..(328): unsure at all n locations
agctagtaatgaggaagagngttattgttactattcctactttatattcggcgaccatagagtggtacctataaatatgtcgcaggggtcaagagaccttggggacatcaggtggggtgctattgcccccaacctagcttgaccaatccccatcccacccgggcatattcattgagtgataacctgtgatgtgcctatacaggcgagctcctgctgtcaacatataataggaacatagaccacaaaccaatgaggtctgtgtggtggctggccaactgtcaactttgagtgttatatggtatatggcccctcggaatcaatatccaat

SEQ ID NO: 111791 - DNA, 518 bp, Glycine max
  unsure (1)..(518): unsure at all n locations
ctggtttgggcaatagcaccccacctgatgtccncaatgtcttctgacccccgcgacatatctccaggtaccactctgtggtcaacgaataatagcaggaagtttcacccttctacacttcctcttttcaagcttgtaggattatggggtacccatcacatgtggtactaggtggcggtcgggcgatggcgcaagacaattctccacatccacaaatcacgtataaacccaccatcctctgttgcccacctccaactgagctcacgtactcccacgtagcccttatcctcgttcctctcaacgccgggtccccatcaatcctctcaagctcccacaacatccaagaaattcaacatcccatcatcacaaactaacaaaaccaagtaaaacagggcagaggcagaanactctgcccataacacanaaccaaaatcacagcttttcacatacaaatactctagtaacattnntcttcgtccaattgtaaccgtcggatcgactcgaaaatttactggaag

SEQ ID NO: 111792 - DNA, 73 bp, Glycine max
cggacttaagcaccgcagctgcacttcgtggaatcctttttttttatccaacacgaaggggggtgcagtaaaa

SEQ ID NO: 111793 - DNA, 363 bp, Glycine max
  unsure (1)..(363): unsure at all n locations
gcttcctaaggagatcgagcttcctcctttcttcagttgctgttggcggcccttccgtggacaaaactattggtggtgctgcgatgttgggttgaggcaacgtgcctggtgccggcccttcggggatcggnggatagaactcgacatcccttcgagcataatcttgagggtctttgtggacttcgtcgggatgctgaggaggctctctttcatggacgggagaagcaatgtggcccgcatcttcttgcaagacgggtggtgaatagttgggcggcaatccataagggtaagccgctcggttgtatcccaggtgagggctaccatcgtgccccagtgtgtcccttccccgtcctactatgtttg

SEQ ID NO: 111794 - DNA, 345 bp, Glycine max
cctgcggcagcaagcttatgcatgtatgaacaatttttgcctttgactataacaaacaggaaacaatgcaattcattgaacataagccctacttaagattgttgcttgtcaagtcctcctaatgactatgtaattaagccgctgccacaatgatcttgtgatacaacgtacaatattttgtaagcactagggagtagatgccctcctaaattcaatcatactttattcctcattttgactctcatccttgattagcttgatcatggcatcaattccaaggatagtagctacacttgcaaactggggaaaaaaaaaaacttcatgcccacgcagtttggtaaggaa

SEQ ID NO: 111795 - DNA, 487 bp, Glycine max
  unsure (1)..(487): unsure at all n locations
aaggaagtggctagctanggttcanaagagtgaactaatgtcgcttcatatgcgaaagggagaatgaaggttagggttcataacagtcaagaggctatgggcgcttcaaatgcgaaagggagcgagaaggttagggttcaaaacacagtcaagaggctaggtgcttcaaatgcgaaagtagtgagaaggtggatggtcagaacaaaaaaattattttctttttttatttattttgatttacaaaggtttcttttaatagaaactagcataaattttattacacaaaacattctaaggcggttttcaataaccgtcttagaatgtgcgtcgtgaattgtaattttcagcacaataattacaaaattgtcaccgtaccactttctaaagtggtttcctttataaccgtcgtaaaaacgatgtcgtanaaagccattcttgtaatagtgagtgctctctcacaaagtgtcatttcattcgttcttaatca

SEQ ID NO: 111796 - DNA, 363 bp, Glycine max
agcttgctgcaccattttctgatttatcttaaaaagaagcactcaagtggagatcagaggcagaaacaacatttgttcaattgcagaacggcatgacttctaccccactgccggctcttgctaatatcccagctgcccttcgttctggaaaccgatgcttccgacactggttttggagcagtattacctccaaacggccacccaatagcgtttttcttcaataaacttgcacctacagtgcgaaagaaatcggcctactttacagagaagttagcgacttgtgaagctatagctaagtttagacacctactgctgggacacgaatctattatcagaaccgatcaaaaaatcttgacatcattg

SEQ ID NO: 111797 - DNA, 497 bp, Glycine max
cgagaccttagttcctccaattcatgaagttggagcttcctatgtgcaccacctgcatttgggtcaaaattcagaaacttcaatgcccaataagctatgtgctccaactcaattggtaggtgacaagagtttccatagaacaattggaagggagtgagtcctgtaagagctctgtatgctgttctttatgcccacaaagcttcatctagttttcgggaccaatccttccttaactaagcaattcgtttctctaggatcttcttgacttctctgataaaaacttcagcttgcccattggtctggggatggtaaggtgaagctaccttgtgtctgacactatagtgctggaggactctcttgagttggatgttacagatatgagatcctccatcacttatcagtacccttggtgtgccaaaccttgagaagatagtcttcttgaggaagcgaataataatctatgcatttgcatgtatcacaactatttcttccaccca

SEQ ID NO: 111798 - DNA, 495 bp, Glycine max
  unsure (1)..(495): unsure at all n locations
tataattatcgtttatattttaatgttgtgtgtatngacagcttcctacttccttgcatagcattntaggttaaatagtatattccttattgtatattaacttccatagatttaggtggttggaggatgatcttcatgcaactctggcaagcaaaagacaaagagaatgcaactagcattgcacgtgaattaaaccagaaaatgaagcatacatagtgctttgttgatgaattgttatctataatctagatatacaacgctntttcataaaaaagaagctatatatattggataaagtgttgtcttattttgtatatatagtgtttgtttatatgagtgttgtacatcagtttcatatatataacactntnntgctagtgctatatttaaatatatatcgcctacaacaataacgctcanaaagcactatctatttgagaaaaaatggtgtaaataagcanatttggcatagttactgctagtgacttagcatgt

SEQ ID NO: 111799 - DNA, 499 bp, Glycine max
  unsure (1)..(499): unsure at all n locations
taaacattcaactttgagcgtctcgatatattacggtactttatcagacatccgagtaaaaagttattgtcgtttgaatttgctcataggttcaacattcaatttcgagcgtgtcgatatattacgggactcaatcagacatccgagtaaaaagttattgtcgtttgaataggctcataggttcaacattcaatttttagcgtctcgatatgttacgggactcaatcagacatccgagtaaaaagttattgtcgtttgaattggctcagaggtttaacattcaatttcgagagtctcgatatattacgggagtcaatctgacatccgagtaaaaagttattgtggtttgaattggctcagaggttcaacattcaatttctagcgtctcgatatattatgggactcaatcagacatccgagtaaaaagtacttgtgtntgaatagctcataggttaacagtcaattcgagcgtcttatatattacggactcatcagacat

SEQ ID NO: 111800 - DNA, 280 bp, Glycine max
cgcaactatcgtattctcctcgaaactagaggaatttacaagacttgtgcgtgtctactgcgataactccctgccagcagcagcaccacccccaaatatgcttgttgacttaaactagcccaaaattgaacgtgttaactagacattttaaaagatgccgttacaacgcaaaaatccttatttattttttacactatgtttgaaacataccctgcctgcacatacaggaagacgaaaaccgtgtaacagcctgctataattaaagcccctatgtcaactt

SEQ ID NO: 111801 - DNA, 216 bp, Glycine max
atgtttggtaatgggactgcgagaatgtgtctcaagtaaataaaaaatgtaaaaaaactaaaaaatgaaaaaaaatcaaaaaaagaacatagtgggataactatgccgatgaacctgtcaccagtattactctcttatctatttttattgactatctgtcttctgatacattctattctctgctgcatcattaactgacagctgttgtgtgattac

SEQ ID NO: 111802 - DNA, 147 bp, Glycine max
tcttcatttaatgttttaattatttatacgatagaaacatctatatatgatgccacatatggtcactcatttctcttggtaattgtacatgaagtcagctctactcaaatcgactaactttatgcaactttgatatacactagcttg

SEQ ID NO: 111803 - DNA, 88 bp, Glycine max
tttttcattatgaacgtaatcagaagagaaggatcttggtagccctctatcgtgtggggaatttttccacacacactcaatttttgtt

SEQ ID NO: 111804 - DNA, 281 bp, Glycine max
ccccacacgcgtcaagaggcacttgggtgctgtgaaatgatttctcttattaccttgcttaacacatcaaaatacttgcaatattgggctatcattcgcccatatgattgccaagattaacaacctactgttgaaactatgacagacttattgctttttcgtctccatactcttactctctctttgctacctttaaccgatacactttctatctataatcattctagaacaacactacactgctgggttcttcatctggacccactcatactcgggattta

SEQ ID NO: 111805 - DNA, 261 bp, Glycine max
  unsure (1)..(261): unsure at all n locations
gatgaattttatttaaataataattatttatataaggagttaaaatacattgattttaaaaagatggggggnagaaaataaaatagattttattataataatattgtatattagaatttatattttattttattttaaatttattaattgtaaattatttatttaattttttgttattttttaaattatattttaagttaatattttttttataattatttaatttaatatatttaaaattatattaatgtatttatgtat

SEQ ID NO: 111806 - DNA, 247 bp, Glycine max
acatcttgtaactaaattaataaaaaagagacgtattaatttttataagaatagtcagtgaaatatacattattttttttctacttttacgtcttacaatactacaatgatgtctctgtgatcctttattaaagcatattaattaaactgcaagaaagtacgatctcaatttgtgtgtcaatttgaacaaactagatttatattctttttgtgagcacatgatatctcaatttttaaaaaaatatac

SEQ ID NO: 111807 - DNA, 318 bp, Glycine max
tatacttctgtaggtgagccaactgtgattttttttgtacgttatagaccatttcccccactctcgaaattcttgaaccttgaatactgtcattgctaactcacatgcatgttcacatctactctcacaatttgccatcactttcctcaactgctctcgaattttgttctatcatttacactgagtgtctctgaacagggtgttctgatggcacctgtctactgcatctcccctttgtccctaccgctagtaaatcgttgcatctttcactgccctccctagttactgagatcccataacgacatcctctagctctgt

SEQ ID NO: 111808 - DNA, 101 bp, Glycine max
ataaatgataactgtatacactctaaaaaagtacccctaaccgaaaacatgtatatgaaaaatgtcattatttattctcatttattcaatggcaacttttg

SEQ ID NO: 111809 - DNA, 183 bp, Glycine max
atgttgataatcctctgttcaccacagactctcacaagtattcacaagtaaaatatagatgatatttttcatcaccacgcacacgaatacatttttatgataacacagtttttccgcaacttaccgcctcactgtttgtgcattactttatgaatcaataagagtatttgtgaaaacacacaa

SEQ ID NO: 111810 - DNA, 218 bp, Glycine max
ttaatatttttcttttatttttatttgattgtttattatgaatattaataattaataatgataaatatagttgataatttttaacgtaggatttatttaatgattaaattatagaatttaaaatgagtttgaataaatttttgatgtgaattgtagtattaataatttttaagatgtggtatttttagaatatgtatgatagttgttttttatagatt

SEQ ID NO: 111811 - DNA, 238 bp, Glycine max
  unsure (1)..(238): unsure at all n locations
actgctgaactttggctaaaaaggtttcctttctatattattagcatgccatgttcattgatgagcaaaggccacttctttgacgtacatctagcacaaggagaaattgacttaacctaatctgccgntgggcattttgtcagtctccgttttgtcgcggcagttgaagacatttttaaagtcaaaacccacggtcaagtgtataatttatgaccaaatattttctatttaattacta

SEQ ID NO: 111812 - DNA, 327 bp, Glycine max
gttgtataattaatgttggatttatacgaatgtttgataaatatagaatgttaatgtttaattgtaatggtaaattttaaagataatttaaaggtattgaagaatgaaaattaaagaagtgagttgattaaaataatcttaatataaaataattatgaatttatctgttgaaagtttatagtttgttttaataaatgggaatatttattttcttataaaatacagataagtatgtttattattacttaaaaaaaaaaaaaattagttttatgatataagaaaggattttgtatgttaattatgaaaggaatttaataaaaaagtaat

SEQ ID NO: 111813 - DNA, 259 bp, Glycine max
ggtctgaccaccgccccgcaacacgacttagatgaacgtcactttttcgataatcgtcacacgtactttaatccgcgtacgagtacaaatgctctggtgcgatacgtatactccatcttctggttcgagctaacgaacaccattaagctgttgtgactaatgacagtctaccccacgcatctgtgcgatcgtgatccgctactgtacactcaaccactgtgcatcgttacgcatatcttgtgcatcaaaagatcattgt

SEQ ID NO: 111814 - DNA, 141 bp, Glycine max
atgaattattattttaacaagaatcagttccagcctactttaattgcagcttctttctattccagcttactatgtttatcccatagaggtactcctgaaaatgccaattccagatctactcatccacatctaactaggggg

SEQ ID NO: 111815 - DNA, 267 bp, Glycine max
  unsure (1)..(267): unsure at all n locations
agatgtgatcaccatcacgtcactttattggtcactgaattatgactggagctgagttaaacattattatatatttcttagtcaatggttgctgcaaatatacnaatattatatttatacatgatatctactttttatacatgttgtagcaatcattcaatatttatatttcacatattggtgctatgatgagttatattgttaaacaacaactgaaaaacactgtatataacgctaatgatttaacattagtaacgtaattcatta

SEQ ID NO: 111816 - DNA, 390 bp, Glycine max
aaacttatgtgtatatatagagatcatactctttatcccaccgctcccaccaaacgccaaaatgatcgtaatctcagtattgttaatgtctgtcctttgacctaaaagaattcatttcctgtacatgacaaatctgtatatcttactatacacattatcgtagaatcttatgttaacgttgaactacctcaagctagacactggtataatacataagtggacataaatgaagtttctcgagatttcacttgaattctatttatattctagcagcacatacataacttttcatgttcttcacattcatctccgtcttccttggctacagcaattacttccaatacccatgagatactctgttattgctgacaattattgcttatcctattt

SEQ ID NO: 111817 - DNA, 198 bp, Glycine max
tgattgcaccgaagcatcttattttgaacactgatgttgtgaaaactgctgaaatggaatttggtctgtacttaattagactgggtacatttctataaggtacatttctcgatgttcactgtcgaaacccttgtactatattaaatataccggtgaaaaattattaattacttattaattattctctaatgactttaa

SEQ ID NO: 111818 - DNA, 278 bp, Glycine max
  unsure (1)..(278): unsure at all n locations
tactggatatggggtgnttnnttttttttattctctattttctccccttcctacctctctacctatattttcccctttccatccctctctccctccttttctcttccctctcttctcttctccctccttccttccttccctcctatccactcttcatattttttctttctctcctcttccctctccccccttattctttttcttttcttcttcccccattacaccactactccccctatttctatttatctccctcatcccccccttcccttttcctc

SEQ ID NO: 111819 - DNA, 454 bp, Glycine max
  unsure (1)..(454): unsure at all n locations
attaatatatntaacacatttgaatcaatagtttaaaagacggagaggttagtcagcttatcattacctcagttnttctataagtagccataatttcttcaggttntctaagtcttggctttaaatcatcattgttggtcccaccttcacaatagttctccctatctngtaacttatctgcaggtagaagaagaaactgtcactaatctttgtagttaaaatgtaatatatgttttgaaagtgacttacctttctgtnttattttaacatcaggagaggaagtaaaagccttaggtatgggctgatggngctcgtctatttcaatgtcatctgtgccaaaantatagcatgtttgaggctttgttttttaaagttcacacttcatagtgtgaaagtattcaaattataaaaacttanaaacactaaatgnttaaagaaaaatgtaacctatatc

SEQ ID NO: 111820 - DNA, 357 bp, Glycine max
  unsure (1)..(357): unsure at all n locations
tttggttttttaggttaactatcaaaatacacctctccaaaaagctgagctgtcaatttcctactgtgtcatttatttgtacaatactatngcaacatgaaaaatattgcatggcaaaaagtgaatagagttcggcatcnaatgacttccanatagtntattacagaatatcatgatcctaatcggaatatttgtaatagaaatctctctaatntctctgttattgtggattagcctttcttcttctgacagtcttccgtgcgcctacagtaacactgttttcaccttcatctttctgtgctngctcactgttaaccgcaactttngaagaattgaccttttttcacctcatctttc

SEQ ID NO: 111821 - DNA, 457 bp, Glycine max
  unsure (1)..(457): unsure at all n locations
cacctgcggctgcagcttcggatttaattgcactatgttccaaaatagttatggtgcccctttgtgagtggtttactagaattttttagttgaaataaaggcccaaacttgtattaaagtggctgtcaattctcttgggatttgcaccacctatgagcttgttttaatttgaagaaattaagatttaataaggtggaaaatctaggcttgtggctgcctcttgcttaccaggagttgtgccattttcccatgtattgtgtcttaattctagttttaattaggtataatgacaccatcaattgttgttattggtgaacattngtcttaattctagttttgattangtgtaatgacaccatcaattgttggtattggtgatcatttcatcttctcacttttgtaaccaacttgatgtcattcctatttatgggctatgcattttcttgttggattaagt

SEQ ID NO: 111822 - DNA, 366 bp, Glycine max
  unsure (1)..(366): unsure at all n locations
ccttccttcctggaggaattccccttaatggatataccattggttcttgatgcagaataacaganaatactatatttctaaagattggtgggtgggtgagtacaacaatctcactttgagcttcttctttgaggattanggagaaaacattaccaattgaatgcaaatgatcagagatcatgatctgacctcgtatttgagagaaagaatcattcanacccatcaagaatgacattacatactcagattcgttgttgagttggagttgttgaagaccttcgcaagtgcatggaaaggttggtttgtaactggtcaattcttccctaattgactntaagtttgtgtaatacgtgctgatatcgtcag

SEQ ID NO: 111823 - DNA, 284 bp, Glycine max
  unsure (1)..(284): unsure at all n locations
atgataagataatattgaacatatcatgtntttaagagtggttgatgtagtatcttgcatgttggagtataagtataaggtgaagtcccacatcgggttaaaatggacaagttgagcaccatataagtgaggagaagacccataaaccacagcctaaggttttgggttaaagtgtggtgtcaagttcacttatgtggttgctcatgattcattgatgtaaatctctccaatttttaccccccctcagttgcacaacaattggtattaaagccaatggtttgact

SEQ ID NO: 111824 - DNA, 80 bp, Glycine max
ggctaaagtggtaaatgatcttttaattcactgatgactgctataaactgattcatttcttggtcaaattttgtcatgtc

SEQ ID NO: 111825 - DNA, 493 bp, Glycine max
  unsure (1)..(493): unsure at all n locations
agctnggttcgagggtacttacccgtgaagatctaataatgatgaanaacgaatgaagaacgtcgaagaacggttgaaacctttgcgaaattcctcacggaaaacgttacggaaacgtttcggaagcgcctcggcttatattttcttcacggaaaccaattttccaagcaaattctaaagagagagaagtgccaaaggggctgaacccttttcttcttcacttcctcccctatntatagcaaataggggaggtggttgccgcccagctcgcccaggcgagctatgttgcttcctccagaagcaacagccttctggaggaatattctggagggcccaagtgggcctgggtgctattngcacccacatttttactaagtaccacccctctgcttttttttgtgattcttttttcgtaaagtacagaaacttacgaatttcgtaacgatacttggtttctttccgtaatgttactgaaccttgcggattacataat

SEQ ID NO: 111826 - DNA, 401 bp, Glycine max
  unsure (1)..(401): unsure at all n locations
cattgtcacgaaagcagtctttgctcgtgtttgtacttggaatcacnaaggtaagttttctcaccccaccctcgcagtcttcgccattatgttaacttcccttaattataagttcccttatactgagcttttaacttcccttagttggtcgcaacctgcattngatctatttaggaaagttgttgtttaattgtttgaaggttcaaatacctcgagactatgtttatgccctttgattgcactatatcacaagtgagttagcctattggcaattacccctttgttcttagtgactattatttgtgtcgtggtgatgaagctccagtgctgcaggtttatgaagttgtagtgctatttctttatccaacatgtaatgcataatttcagttccctctgaaatt

SEQ ID NO: 111827 - DNA, 462 bp, Glycine max
  unsure (1)..(462): unsure at all n locations
agctttatgtctcaagcaactgctaagatcatctgatgtcnctatgctaagtgtcatggtgtttgtgtgatagtaaataaatgttaaaatatgtgtttcgtcctacaacatatgtaaatgttcataatttgtccctgtaaaattttcagtacgttttttctcctcacaaaattgaaatgtgttgctctctggtttggagcaaggtttgaacatttgaacctgcatgcatgaactttnttactcggttatatgcataattgatgtaaaaagcatcatattctacatcagttatatgtataaccgatgtaaaaaagtgatcattataggtttagatttactagaacctatgtttggaccagaaaatgatacattttaattgtatgaagataagaaacatattaaaaagtttggaggaatgaattcacacattttatgttatgaggacgaaaatatatttaacct

SEQ ID NO: 111828 - DNA, 388 bp, Glycine max
  unsure (1)..(388): unsure at all n locations
gcttctccacgtnntcctccatacctagaacttcataccttcgattctcactcgatgcttcaccaaatcacgtcccgtagagcccaatcttcctctctttcactcctctgtcacttccaccgatcaaaatccagaaaaacttcatcacatggcagagccatcaaagaagagatagggatcatcttccaccgccaccgctggtgtccatctgcgtcacggcccattcggagcacccacagacctattcctccttctttgtcatcttcaagatcataacactgtcttcatccgatgatcaacgggtacggtacctttctcagttnttcttctagaataatcttacaccctaagtacctagacgtagaggtctttaatgatgaaacgtttg

SEQ ID NO: 111829 - DNA, 361 bp, Glycine max
  unsure (1)..(361): unsure at all n locations
tgatgacagtattaagaattaagaatagtacacaaccaaagtcctgttacgcgaacacttacaacttcatgagcaactatgtccaataactgagaagtgctcgcccctatggtgaaagcagtggaatctggcataccaagaatgccgtatattttgtacagttgatctatttcactgtcaatggagaaaaggaatnttattttatcagcgagaaaaggaatnttataagatgtaacagatagcacaacggatcattgttatgaataagcatatcccacttgaatcaatatcaagtacaatacagtggacaaaagtctgatcaatatatgtgatatgatatgannaaggaaaagatcacaat

SEQ ID NO: 111830 - DNA, 476 bp, Glycine max
  unsure (1)..(476): unsure at all n locations
agctntacagcagatgttagtaatgaccctctattctataattaanataactcagtgctattaagctagggaattatataanaacttactggctgagtgtaactganatngagagaaccaaaagtcacccgcaacagccaactacagccaccatgtggtctcccaaaaggctgatgcctacgctgccaattgagcccttattacaacttgaactaaacctacctaaagccgctttaattgataacccacaacatatatttggtcagccaactttacaaggattgggccattatntggacaaattatacactctatgaantgagacaaagtggtgacatttagtcctgctccatatgggccatgatacaactcacaaccttggacttttctcactgaaactagagctatgattcaaatagtacggacagcacttgttgaagagcatccttggctcttcttgctctatcccttgttat

SEQ ID NO: 111831 - DNA, 456 bp, Glycine max
  unsure (1)..(456): unsure at all n locations
aaaacatacttagacacttcctgagcatgtacgagcagttatgcatgtgggatcaacaactgtcattatcagagtaatcaagcacagcggatattctgcaagttgcaagtgcgttccaggatgtcaagacatctcacatgacatcagctgtctgcttctgctccccctgtctccatgctcttactacagcatcttctatcagctactaatcttttccaggatgtcaagacatctcatgtgacatcagctntaccttgtctacatgctcttactgcagcatggtctatcagctactagttgcttacatgagtcatcatcagcagcagcagtctccccctcataatcatgtacatacaactccgcctcataatcatgaatcatgcatacatcgtatcctacttctctaatcataagtcatgataatactactactgatacacatatcatcatatatac

SEQ ID NO: 111832 - DNA, 367 bp, Glycine max
  unsure (1)..(367): unsure at all n locations
acaaaacagnntaagnnnagcacaaacgacagacaccacatctaacgaatcactgaacatggggagggatgacaactgattcatgccaatactgtcatttttatgaacgctaaacggctaaagccactgacaatatatactacaagtcanattaagtaacagaacgtctctcaactnntgtttgttcgattgtattctagttatacaacaggagttcgcataaaacctgtttgttagaaatatgcctgacatagtaatcctattctacagccgcagactgcaatatatacaatctagcacatgcaaaatgatagtaggaggtttacttcatcttgtcgactgtgattgagaaggtatgcaatttggt

SEQ ID NO: 111833 - DNA, 308 bp, Glycine max
  unsure (1)..(308): unsure at all n locations
ttggcgtcattctgaattcggtatgtttgtttattatgtaatctgactcacattgtgcagttgaaagcactaattgtcccacgctatcacctcacactaactgacaaactcaataacttataaataattaattataatattcattcatttgtataatattgttattttatttatgtttcttgcttatgccatattatatagttgattacatctgtcattaatctcatttcttttcttccatctctcagtaagtttatactngaccagagtatataatactagtatctcttttcagagttataaaagca

SEQ ID NO: 111834 - DNA, 365 bp, Glycine max
  unsure (1)..(365): unsure at all n locations
agcttcaatggaggaagagagtgagagagataattataggggtgtgggaactgactgaggatagggagagaagtcgatcttagaagtgagtctcacaaggttctcattcatcagaggtatcacaaaagttacacctgcttctatttatagcctctggagcttccttgagaagctagtgctcacccttccaatagctaagctcaccccatgccaaaatacatgangatagaaatcttcttgagaacgctcctcgggaatgtatgtgtacaccaccccaataactaaactcacccccatgggaacacacaccactccaatagctaagcgtacctccgccaaatacatgaaatactaagaagtcttac

SEQ ID NO: 111835 - DNA, 344 bp, Glycine max
  unsure (1)..(344): unsure at all n locations
tactacttcggcgtaaatatcatatctcatactccatatcttattntgtatatttcaatggtctacacgtgcagtggtcttgcgacaagtaaccaccactcgtggcattcaccgatggtccgtggccgttgacgaagaaagtcgaggtcgttccgcactaattcttttgtgtctcccttcctacttatcaatgaattcataacgacacagtctgagaattcttttgattcttccctttccctaatacataattgttcatagaactaaccgcctgagaattcttttgtatccccatttacgaagtatcatatgtttaaccgactgagatctttgtcttaacacat

SEQ ID NO: 111836 - DNA, 304 bp, Glycine max
  unsure (1)..(304): unsure at all n locations
gaaaagaacatgaacaaagtgaagtcttctttggtgctttgatgttgcataatcatcttctaatgaaaggatggttagtggcagcaacgcttctactaactatgtgaacaagtctttggcaccactagatttatgaaatactgaatattgtgtgtgcaaaagaagctcgcccncaatgaaatcaaaattaggtgtttatcttgaagaaagtatntatattcttgacagcaataactcttcttttaatacnttggagtggtggaagagctatagtntgaaatataaatcaaagatgacacatgat

SEQ ID NO: 111837 - DNA, 298 bp, Glycine max
cgcctatctactagggctatttaagggggcttttttcttcagattttaaaaacttagaatttaaaaacttacccctcctctttatgactggacctgtgacttggagaagtataaccactagtcctttcctttatttaattcgcccccccttttttctctaactctttagctttcagacattggggaaccttctgtatttagaagctcctctttctgctcatgttctgggaaactgagacatataaatccctaactcacactctgggaaactaactagggctacctattgtctttctgg

SEQ ID NO: 111838 - DNA, 191 bp, Glycine max
agtcacctgcagctgcagctgatcgactccggtgaaagtatgattctttattctcagactccgtgtcaattctaccttcgcatatatgccccaatcggacatcgggaaagactgacatttgccctctcggagttccgatgttaatccgagcgttcgcttatataaccctgtatcctacctaatgtgaaagt

SEQ ID NO: 111839 - DNA, 273 bp, Glycine max
  unsure (1)..(273): unsure at all n locations
acatcataaacaatctgataatgatatttcgttaaggtggagggtggactcatagttatggcaatatcctctcatttgcaacagtcagaggagcctccatgaaactcctttctcacagcctgaaagatcactngttttgtcaagcattctggaaatagccctaccaaattttgactctattgtttaattattgaagatgaagaaccaaattgacattatataaggaagatatcaggatattcaaaaaagtggaacgaattttgatggagggac

SEQ ID NO: 111840 - DNA, 446 bp, Glycine max
cgggcgatggtgcacaacaagtattccacatcctcaaatcgcgcataaacccaccatcctctgttgcccacctttaactgagctcacgtactcccacgtagcccatatccttgtttctctcaacaccgggtcctcatcaatactcccaagcttccccaacatccaagtaaatcaacattcaaacagcacaaactatacagccaagataaacagggcataggcagaaaactctgcccaaaacaccaaccaaaatcacagcttttctcacttaaagaccccagtacatttccttcgttccaatttgttaactgttggatcgacacgcaaattttactggaagtctgtagtacacaagcctacactttgaccgttgggatctgctagcatacatccagaactcattcttcactcctctttccacaaccagcaaaacatagcatttttct

SEQ ID NO: 111841 - DNA, 291 bp, Glycine max
  unsure (1)..(291): unsure at all n locations
gaagtggaactgtgaagtgtatctcataagactgtcattcatcanagttacaacaagggtttcacatgcttctatttatagactatgtagcttccttgagaagctttcttgagaacacgtccttgagaagcttctgtgagacaaactccttgtgaagctagagcttagctacacacacccctctcataactaagctcacctccttgagaaacttgcttaagaagattcctaaagaagctagagcttatctacacatacctctctaatagctaagctcacctccttgagatg

SEQ ID NO: 111842 - DNA, 511 bp, Glycine max
  unsure (1)..(511): unsure at all n locations
gcttaagtggaatcagacacaagagcttcttattgtgctccttacctccattagttgtcagctgtaccttctnctccattgntgnttctttagttttctccatgtatctcctcacatgtcttgtgctaaatgttgttaacatgagtttttataatttccaccgattaaacttgctatagaagctagatttgattntctatggntcanatttcttggtcttgttcttgaaccataaatgggttaagtttaggttcctttgagttntgttttggtattttntgtggctgaaacctaaaccataaaattattacaaaaacattaaagtagaagaaaacctcaaaaatctagagtgacttgttcacctattggtagtttttcatagaagtcatgtctagtcatgaaacttgttcancctaacaaatatagctgaatnnttattttcttgtttctttgtctaactcatctgttcatgattgtatgaaattcttttagcctattaattgatttgagt

SEQ ID NO: 111843 - DNA, 395 bp, Glycine max
  unsure (1)..(395): unsure at all n locations
ttctttctccacatatacactatgcagcttgcagttagcatgaatggccttcccaatattacaggaatgtcattatcttcacagatatgcattaccacaaagtctgcctgttttactctgaccagcacatcttcaattactccatatggtctggtaatggagcggtcaacaagttgtaaagtcatcctagtgggcatgatctcctactcttccaaccttctgcacatggagagtggcattaagttaatactggctcccangtcaatatgagcctttcccacagtgacttctccaattgaataaggaatggttacactcccattgtctatacgctcgngtggaaggaccatttgaatcacaacactacaatntccattccacaacaatgtttcctg

SEQ ID NO: 111844 - DNA, 462 bp, Glycine max
  unsure (1)..(462): unsure at all n locations
gctngcacttaagtgtgattgtagatctatgagtatactatatgacacgctcgtactggtctcataacgatgccataaactcacagacctcaagctctacgtgtgtcatggacttgccgacatcgaaatggaagagttcacgaagaactgcaagggaatgaataagctctcatgtagatcatgcacgttcagatccaacggcatgaacctagtgctcaacaatcacactacgctaaagaagcctctatctctagaggtgggtatgcagacctattcgacctatttaaggcgagtctagaagtccacattntataccaaccgattaaacccgctagataaatggtcttatntttntggtcctatttggtgtgcaaagtctgcagacaaacaaattacttcacaggcccaaagtaaatcttgataaaaaaacaaaaactaccanaataaagaaattttttcttt

SEQ ID NO: 111845 - DNA, 310 bp, Glycine max
agataagacaaaatctagatgaaataatatctagatgaaataaaatctagataagataagatttggtagaataaaattgtctgctctcttcaagtccaagcccaattctggattcaagcccaattgcttataattctgctgaaattaaattaaaaacacaaaattagtccagtatgcccaattgataaaacggcataattaaattgacaattaaggctaatcagtaattaaaatggtgacaaatagggttaagatatatgagaaaatgatgacaaatcatattccctcacacttatcactttgcactcct

SEQ ID NO: 111846 - DNA, 453 bp, Glycine max
  unsure (1)..(453): unsure at all n locations
ggtcttcgctgatgatatgttcttagtgggtctaanaagaggcanatatgatcattatgctttgataaatgcanaacaactgctgcaaatgaagagggtgagaatgagggagaaacccatgctgtgactgccatttctatacagccaagtttcccaccaacccaacaatatcattactcagccaataacaaaccttcttcttacccaccacccagntatccacaaaggcatcccttaatcaaccacaaagcctgtctaccgcacttccaatggcgaacaccacctttagcacaaaccataacaccaaccaagaaatgaattttgcagcgaanaagcctatagaattcaccccatgtgtcctatgctgacttgctcccatatctactngataattcaatggtagccataaccctagccaaggttcatcaacctccatttctccgagaatacgac

SEQ ID NO: 111847 - DNA, 338 bp, Glycine max
tggcaaaggcttgaatggaacatttaatcccatattctttcttatagtaaaaataatactatgtttatttgcgattttttattgaatacaatgttgggaattattatggctatacattaatatatattttatatattaatttctttacatttaattataaaaacatcatatctgggaggcaatgcggaagttgaagtccccatgaactaggactgtgctccaaagaaaaatctgtaataaatctttaagctgtgcattaaataaacatatgatataatctattattatttggaagtttcttcattgcacataggattttatgatataaattccctttc

SEQ ID NO: 111848 - DNA, 502 bp, Glycine max
  unsure (1)..(502): unsure at all n locations
gcttggcgcgacgaaggagctatattgacacctttctatgaacctgtcgtagntaccaccattaattatcacctttaatgtcgtcttcttccgcgagtgtcgttgaggctctcangtgcaaccatcgatggtgtctgattgcaaaaaactcatatccattagaacccatcatttgaaaaactcaagaatctctagttctagaaaggagaagcccaaaatttccaaatctagaattgcatctaagaaacccacattntcatttacaacatntgttattgtcgtgctcttcacggcggcttgaaggcttgacttaatggtggttgtgggcaaggagacggngtcttccatgatagagagagactatcatagagaagagnaaagaacaataatctagtgtgaatagtttngcggtatcctcatgtatatctcaagttccaacagtgtaatnggcacacgcaccatgtagccctctagagactagtgttcgatcgacatacccata

SEQ ID NO: 111849 - DNA, 314 bp, Glycine max
taagcttctcgcaggacgaagtaacttgtgtcgtaggggttgttgtcttgcgtgcacgaaggcagaagtatgctaagtgtgaggggcttcatgcctatattttctagctagtgctctttattgttgccttactttatctgtggcatccataccacacaagtcactaacgcatgctcaactacaaaactgttgatttcagttacacttagatgctccacattctcaatatactacccaatgtactcttctcaccaatgatgttggtctagttctgttatggctattctgtgacgtatattgcattctattgtttt

SEQ ID NO: 111850 - DNA, 292 bp, Glycine max
  unsure (1)..(292): unsure at all n locations
gaactanttccgctccggagtacgacagtcaccgctttaggagcgctgtacaccancagcgcttcgaagccatcaagggatggtcgtttctccgggagcgacgcgtccagctcatggacgacgagtatactgattntcatgaggaaataaggcgccggcggtgggcaccactggttactcctatggccaagtttgatccaaaatactccttgagttttatgccaatgcttggccaacagaggagggcgtgcgtgacatgaggtcctgtgctaggggacagcggatcccgttc

SEQ ID NO: 111851 - DNA, 422 bp, Glycine max
  unsure (1)..(422): unsure at all n locations
ccttccactacatctactgtaccaatcatcctctgttttcttatatcctgaatcanacacgaattatgcataatagttaacttgcaattcaatgcagaaaccaattntgatatagagattaaattgaaattaaaagatggcaagtatagcacatcctctaagtgtaaaaactcagtaaatttgactgttcccgagtgtgtggccatgacttgttgaccatttggcaggtgaaccactatgggatttatttctctgtatgtagagtaataggtcaatgaggatgcaacatgataagtagcaccatagtccataatccatgttgcagcttcaaacttgtgcatattgcaaataaaggatagcgtattacctacggctgatgtatgagcagatattgtatcaatctttgtaacctgtgatccatg

SEQ ID NO: 111852 - DNA, 54 bp, Glycine max
  unsure (1)..(54): unsure at all n locations
ttactccgcngctgcctcntgtcactcttatgataccggtacttttctcttttc

SEQ ID NO: 111853 - DNA, 437 bp, Glycine max
  unsure (1)..(437): unsure at all n locations
gatccttaagtcacctgcaggctgcagcttagcatactgattaagtgcatgtactcttagcatacatctaaggtgttaagataggtcaagcttcaaagctgttgtcataatgtcagccacttgcttatttgtattaagtgtgacaatgtgatcattaactaaatctctaggaaagtgaaaccttactgtaatatgcttactcctgccatgaaaaacaagagtcttggacaggtttatggtagaactattgtcacagaaaactcgagaggatcttttccttctactccaatatgctctaggattcattngagccacatacattgacatgcacaatatgatgcaacaatatactcagcctcagaggtagataggcttaccatatgcttgttttttgaacctaggaataactgtcggtccatcatgacaatgatcaatag

SEQ ID NO: 111854 - DNA, 207 bp, Glycine max
ccaaagctccccaacatcaaagttatacaacattcaaacagcacaaactatcacagccaagaaaacagagcataggcagaaaactctgccaaaacaccaaccaaaatcacagctgttctcacttaaagaccccagtaacaattccttcgttccaattcgttaaccgttggatcgaactccaaattttactggaagtctctagtacat

SEQ ID NO: 111855 - DNA, 260 bp, Glycine max
  unsure (1)..(260): unsure at all n locations
tgatggactgccttaggtccttccaccaatgggagtgtaagctgctatttcttccctcatcntaaattctccaccccccatatatatntttatctattgcccttctgtatatatattttgtgactgccacttcctagccctctaatggtgtagggaaaaatattcatctatgagtnttcctctctcccaactccatagcttcatttctgtctctggcctacatatctgcaaagcttttgagtaaacacaagtgacatgtg

SEQ ID NO: 111856 - DNA, 213 bp, Glycine max
ttgtatacattgtgtagacaccatgagctgttccaggtatctatatcttttaggatagctgaaccacaagaaagattaatttgatcgtcacaatcgaaactgctggattgtttgtgacctgaagtgaaaacattctgagtatctcgaataaatttctaggttctataagtagtgaatacttagtctaagaatgggatgacattgcgcctgctg

SEQ ID NO: 111857 - DNA, 155 bp, Glycine max
tgagacattcctatgggtgctctgtaagcagaccgatgtgcccagagagcatcatcaagcctggtactccaatctttcctgcttggctgcacaatcttctctaaaattctcttgatatcccggatagaaaattctgcctgcccattggtctgggg

SEQ ID NO: 111858 - DNA, 358 bp, Glycine max
  unsure (1)..(358): unsure at all n locations
ttcctcgaatgaacgttggtggcgactacgtgcattttccttcccttggaagacgcacccatgaatggtacgttgcgacagtgggcgactccactatggactgcttttagagagtatgccaatcaatgagtgtgcattccttaccatgacttctnctttgttgcactctctattccttatgttcttgcatatataactctctgatgcgtttagtgtgttctaaaatgtatgcatgatgtaaatatgtattcatttgatgcacacatacaccaacactatttgcacacatagtgagttgaaaaatggccctatacctgtgttcgtgggaacataatgagtggatgtgaatctgtgatca

SEQ ID NO: 111859 - DNA, 484 bp, Glycine max
  unsure (1)..(484): unsure at all n locations
gctctatagaggttcttgtggactgcttgtctcatcataccagtaataccttcacccacgatattgaaaagcaagggggctagggggtccccttgcctcanacccctataagggttaaattccttagaagggcttgccattgatcaaaatgatatagatgctgagtggaggcaagctgatatccaagatcttcattttggacagaaacccaatctgaacagcatgtaatccaaanaagaccagaaactgaatcataggccttttcaaagtctaccttanaaatcatcacaggtttcttctttctccttgcttcctcaaccacttcattaaggatcataataccatgaaggatgtgtcttcctttaataaaggctgactgcctttcatcaattaacccatccatgacagatctcagtctgttagatagcaacttagctataaccttatacatacagcctatcaaggaaataggcctataatcatt

SEQ ID NO: 111860 - DNA, 286 bp, Glycine max
ataacatttaatctatactcgctcaaactggtgttacgacgaatactctaccgaatcataatttgacgtctcaacacccaatttaccctataaatggctcttgccctactttggcattcattttctacttgcacacccaagctctccacagtcctaatgacatttaaacatgataactcacctaatctcaattccactaaatcagattagctttcaaatgctatagcatacacttttcactcatatcacttcttctactgtttacaccatgtaactctcccttatc

SEQ ID NO: 111861 - DNA, 446 bp, Glycine max
  unsure (1)..(446): unsure at all n locations
atcttagtagagcagtttcacggagcatgggcagaacacaatcattgaaacattgaactagaacaattgaccattgatactgactaacaaacaagatgatcaaattcataaagaagcaataattgcaaaatcttatcagggttaacaggagaaataactatgctaaatagaagccaactaaccttgcattggcagcaacatcctgcacagcaagcatagcagcatattgaggtgattaatctgtgtcagctntaaccttcattctgcctgaagttagaagcataagtaagtcacaacagttttgctctatctactataaaggagaacactcaaccaaaatttatttanaggcgaataatggaaaaaaagtcacaatntaactttnttatcagcatgcaaaaaagttattatanatatctnttgtaaatgaaaatgaaactatctta

SEQ ID NO: 111862 - DNA, 350 bp, Glycine max
aaatatcatgatcatcatctatataacgtagttatgactactacagaataataagtcttcgatcctagttgtggaagacttcatgcattggtttagaacagacgacgtatcatatcgttgttgaaagttgacaactttcaatgatggtctatatatcgatcatcaatgcaccttgttacgttgcttgtgactacgccatactgcataactgacgtacctttgtaacattgatgatgtagacagtgaaacccacctacttatgcaaaatgtacccgggctcctactacagttataagtatttcacgcaggcatacatatattgttatatctgtgagttaagtgttatatga

SEQ ID NO: 111863 - DNA, 409 bp, Glycine max
  unsure (1)..(409): unsure at all n locations
agcttcaatggaactcggtaaggcctcttaatgttattatatttccatctcaaccaaagaaacgaggcgaactccaacaacattcccaaactgtacaagaaattcgccgaggaaatgatgtcggtgaagtccatgtacgacacaccaatcgttattatggtagaaaccaaaatccccaaccacggcgtgtggaaccacttataccgaacaccgaaaagcttcggtaatatcccgatctccgcctgccgaggatctgatacgcgctgctgctcaattgggcctcgaaaagcccaattgcagataaaaccgcgccaaaatcaatccatattttcaaccattntcccgcgatgatctccgcagcctgcgcgtgaaacctcgtttcccattgatgttgatcaaccanaacagc

SEQ ID NO: 111864 - DNA, 267 bp, Glycine max
cactgatagagcaaaggtgcacaacaagatatggttccactgccagcctgcgtaccgtcatggatagaatggtatgtatcggcgactagagtgggtacggcgttctttgtaagaaatgatttaatggcatggatatcgatgaagttgtcaatatttgggaagagtaaaaggccatatataatgatggctacgatagaatggaaggcaagtatactagctgcttagcaaatatggaggcatgttggtagatgaagtgtgtgggaagac

SEQ ID NO: 111865 - DNA, 541 bp, Glycine max
  unsure (1)..(541): unsure at all n locations
gtcacctgcggcatgcaagcttcctagttatggagagctaaatcctctgtttgatcttccttgtangcacttgatgtgaatatctttttatctacctaatgatgntttgtgtgttctctgtgctattagtatttcattctagtatgctcttaccttgatctcgtagatgcatgctntgttagggtcattcaacagtggaaactggtctgattcttaaaacttgataggacaagactagtttgtcgtactatcacgaggatcggngtacgataacctagttgttttatgtttgtcttaatgcggtcctggccgagtttagtccaacaagaggaatctgcgaatgatggttgatcaggattaggctagactatcatgaggaatcggngtttatcatttcaggagacaccatagaacgcatacgtattgttaagtagataatatcctcttaacatcatacacctattatgaagaccaacgtgtcttctatttgtcttacacattattactcacatgantatccttttatacgtatgctacaccc

SEQ ID NO: 111866 - DNA, 354 bp, Glycine max
tggagaggttctgtaaagcaagctcatgggaatcaaatgattcaaagatgtttgatgatacatgatgatacaaagagatgacaagttgtgacaaaagctcaaagttatcaagatgagttcaagatattcagaagaatcaagacacttagattcaagaggaagttgattcagatcagatcagatcaagaatcagattcaagactcatatcaagataagaaggcttatcaacagttgaaagttttaaaatgtacaaggtttctaacatgtacaaagttactttggatcatacatcaaaggttgaaattcaacgataccatcatattaaagtgatgatcagttgatgttcatgctga

SEQ ID NO: 111867 - DNA, 417 bp, Glycine max
  unsure (1)..(417): unsure at all n locations
agcttgaattctagtaaagaaaactcctcanacttattataatactcatgcatcntttacattcanaaccagaaacttggattcctaggcatgagtcantcctttggcactntagtctagcttctacaaactacccacacactcacaatgcgcacaatttatttcgcaagctaagttccacaaaatcatgcgcaaatgccattgatgcatttcaccgaacacttggtgggcgcatgtttagcatgaaaatcaagggaatggnggcaatgtggcatgccccattatctcagaacgcaccctaggcctaaggccatccnctacaacccctcaattcaacaaaaacaagcaataattcaaggataaatccctcacgttttgagcaaatacatgcaacttagagcaccanaatatatcaat

SEQ ID NO: 111868 - DNA, 377 bp, Glycine max
  unsure (1)..(377): unsure at all n locations
atgtctcattcgnntttatcatagcttatatcttattatgcaagttgcttatgctggtcccctagatgatgaatgatcacaaaggatngaccactatgaaatttgattctttgagatctagtggtgccgaatgctttgacattaactctactatgtctatggnggtaatagagctactaacagaagtatgggagtatttgttgccagcagaaaggttgtgttctcaagatatangaaagtcggaattcaaacggggaaagattaataggagggttaatgaatcgataagtacgtttaaagtttttatatagaagaagaattgaatgtctcggagctaatgttattgacttatgccccaatatatgtaaagatgaaat

SEQ ID NO: 111869 - DNA, 429 bp, Glycine max
  unsure (1)..(429): unsure at all n locations
gcttgatggtgtcgagaagagatcatatgtttgttatcatcaaaagggggtgatgtgccatcatnttcttctattntctaaaccctccttgcaccataccaattattgagtggtcttcattgtcaagcatcaggcagttttattatttgggctcaattagctaatttgatgtttttaatctaatctcaggaattaatgaaacattgtgcttaatcctgagtttggttgtggacttaagagggcaaataaagcagcgcttaccttagttaatttctaattaggaaatttcgcaattttattttatgttgttcagtgtctatttcgttttgggccacagtattgtaatatggcccagtgactntgagtgactctntntatatagctgccttgggattcgtgcacggcattccattctgttatgctattcat

SEQ ID NO: 111870 - DNA, 339 bp, Glycine max
tctctctcctcactcatcacataccagatatgcagaagccgtttctctccctctctctcacgtagctgtcttcttcctcattcaccattgtagctccacacaaagcttcataccttggtgctcatttctgccccaaatcgtgaaatgagagcattttcagggtcgtgaagtgcgtggctacgagtgggacttcgaaaatccaggtttgggtggacttctttccctcttgaatttcgtgggtatggggtcttgggagatatgacgggtagtcttgacagctttctgtcgtgtgatgatcatttgtgaagacatttgttgaaagcgtgtatgaattgccat

SEQ ID NO: 111871 - DNA, 453 bp, Glycine max
  unsure (1)..(453): unsure at all n locations
agcttccatcaagagccatcaacaacatctctgtttatatagacatcccattcctaagctagacgatatgttggatgaattgcatggagcctgtgttttctctaanaatgatttgaaaggtgggtaccatcaaattatgattagagagggggatgaatgaaaaacaactttcaaaactaagtatgggctgtatgaatcgcttgttattgccctttgtgctaaccaatgctcctaacacttcataagattaatgaaccatgtgttaagggaatttctaggaaaatntgttgtggttattttgatgatatcttgatttacagcaaattccatgatgaacatcttgtgcatctgagaacagtttagaggcctttangcgtgagagcttgtatgctaacatggataaatgtgtgttctgtttggaccatgtaagtttccttggtttttgtgtagctt

SEQ ID NO: 111872 - DNA, 274 bp, Glycine max
  unsure (1)..(274): unsure at all n locations
gtggtgacaatggagaaccccactttctcggttgtggagattaatggtgctgatgctgcattcatgccagtggataagacccgcggcaagaatgctaagcaagtcacatggttcttgtttctcaaggcttaccatgctattggttgtgtaacttggtttgccacagttntgtggtctttgatgggagctataatgaagaagttgattgatatggagggtgtgaccatggagagtgagaaaatggaaaaagggaaggtgctgtttacggtcatca

SEQ ID NO: 111873 - DNA, 392 bp, Glycine max
  unsure (1)..(392): unsure at all n locations
tgaccgctgacccggccaagctctcttggaaganatgcattaagagcttctcctctctggagtatgcccacatcttccgacagtacattttcaagtggttcttggagaaagtagtccccttgtacttatcaaaatctggcaccttgaacttcggtgggatgacaatgttaggcactaaacacaactntggcatgtcggngaatgggtaatcaccaatcccttcgatggctcttaacctctcttcgatgagatccaatttctcccttccttccactaccaaatgcagtctccccatggagaagtgtatatgttacagtgggcgttgttgactggcccncacggcatcatgttgatgcattccactacatgctggaccctctgtgtcgaacata

SEQ ID NO: 111874 - DNA, 342 bp, Glycine max
  unsure (1)..(342): unsure at all n locations
tgggcgtattctttgaaagaattgtgcccctttntttgcacactttctgtaagtgcatcctatctggagccatatcagaattgcactgatgcaggtaacagctaccccagtaagactttttggaagaaatgtatcaatagttcctcatcttttgcgtatgcccccatcttccgacaatacacctttagatggttcttggggcaagtagtcccctcgtacttgtcaaagtccggcaccttgaacttgggaatgaccacgttcgggtactaggaacaactcttctatggtagcaaaggcataatcttcgccttctgcaatgtccttgagccttntctctatatg

SEQ ID NO: 111875 - DNA, 253 bp, Glycine max
  unsure (1)..(253): unsure at all n locations
catattattaaatatttcccttattttgaatttgagttatataaatgcaaatagttgaatttcctggtcataccttcttcattggtgctcagtttcatcctgagttcaagtccagaccagggaaaccttctccattattcttanggtatttttccttagttaattcatgcctatnttcatttaaacttaaagatgttgttcttacaatgatgaaattattgattctcttctttggggaatgaagtgtaattct

SEQ ID NO: 111876 - DNA, 158 bp, Glycine max
  unsure (1)..(158): unsure at all n locations
gtatataatattattaatatgaaacattagtaccagaagtgctaaataaaaatacaacagcagctgtgctgccatacagactatataagtcctgaataacataacattcataaaagggaaagttagaaanagaaacagaattctgaacatgcagagac

SEQ ID NO: 111877 - DNA, 155 bp, Glycine max
tcctataattatagacgctcgtagaaaaatataaactcatatatctatatcatggtatggacgggttttatatagccacctcacattgctttcaatatatatatatatatatatatatatatatgtatgtgtgtgtaagatcacaatacatgatc

SEQ ID NO: 111878 - DNA, 267 bp, Glycine max
  unsure (1)..(267): unsure at all n locations
taagttacgggtggtggacatctggttctatggtgactgaatgangagctcggatggatgatgaaaaagatgtcntcagttctaacccctctttcttgatgccatctgcaaataaaggaaccaacagcttaacaggacataagtngatcaaattcaataactgaaaaatataactgataaaggcactgacggcttancgagacatggtccgctttgttggccttcaaaaaaaaaaatatactaccgcttatcgacacatgaagccga

SEQ ID NO: 111879 - DNA, 320 bp, Glycine max
agttcatctgcttagcgagaaaggcgcacttatccagaaatcactaacagtttttgcatgcctatggtttctagagagagaaaggtccaagttttgagagatttgctatgtgaagatctgtagagaccagagctcgaagcaagagtcggttcgagagcttaagatgagtgtgtgagtgattatgagatccttgaggtgaagcagtcatcctcaccacttgtatttttgcgatctttcatcttgttcttctctttgttgtaagaaagcttctatatggaaagcaaatctctgtgggacatcctgaggtcccgatgaagata

SEQ ID NO: 111880 - DNA, 243 bp, Glycine max
  unsure (1)..(243): unsure at all n locations
tatttttctttggacctcctctttggacctttttatgtggtggaacanggtgtgtatactgtgtctgggcccaatatcgtggtccttggactggttcaataaaatgctggtatgtcttattataagcttctattgacagccactcatgacacatgtcctcaggcttccctcctttgtgagttatgttgcaatggcatgtctgcatgacnatcctacatcaaaggngcaaaatcagcacacatg

SEQ ID NO: 111881 - DNA, 448 bp, Glycine max
  unsure (1)..(448): unsure at all n locations
gctagagccaattaaacgacaataactntttatttgatgtctgattgagtcccgtcatatatcgagacgctcgaaattgaatgttgaatctcttaaccaatccaaacgacaataactntttactcggatgtctgattgagtcccgtaatataacgagacgctcaaaattgaatgttgaagctctgagccaattcaaacgacaantaacttttactcggatgtctgattgagtcccgtcaatatcgagacgctcgaaattgaatgttgaagctctgagccaattcaaacgacaataactttttactcgaatgtctgattgagtcccgtaatatatcgagacgctcgacattgaatgttgaagctctgagccaattcaaacgacaataactttttactcggatgtctgatngagtcccgtcatatatcgagacgctcgaaattgaatgtg

SEQ ID NO: 111882 - DNA, 444 bp, Glycine max
  unsure (1)..(444): unsure at all n locations
gctatntaatgtctactttgtatgatttactttctaaatagaataaaatatgtacgttagactntataagaatntaatttaatttgtttatattacatgcacataattntaagatctaatttcacattcatgataactaatttaaaacatatacattttgcaataagatttctaaacaaaacataaatgtatgtttgaaaaaacttataagcactctntatatacatcaacatgctaatatttaaaaaagaaataaatatttaatatattgtaacaaattgaatataataataataataatactaacaataaaattttattttttcttttaaaataggtaaacggctaaaagggattttgaatgaagcttgacctttttaataaaagtcttcgcctaatttatctttntanaaagtntggcttggtctgaacatgatgtaagct

SEQ ID NO: 111883 - DNA, 369 bp, Glycine max
  unsure (1)..(369): unsure at all n locations
atatcctgctttgatgaatangaagcctgnggcaaatgaaaagaataagaaagaaggaggaacccatgctgtgactgcagttcctacatggcataatttcccaccagctcaacaatatcaaaactcatccaatattagtccttctcattatccaccaccctattatccaagaacacccaatcatccacaaatgccacccctaaatcatccacataacccgcctgttgcacatccaataccaaacaccacccctaataccaatcataacaccaaccatgaaaggaatgttccaaataagaagcttgtagaattcaccccaattctggtgtcgtatactaacttactcccatatctactcaataatgcaat

SEQ ID NO: 111884 - DNA, 425 bp, Glycine max
  unsure (1)..(425): unsure at all n locations
agcttgcaagtgaaatcgaatactcgacttaagatcgctcacatagaatagtttacactagaataaaaaggtatggtcaaaagagtattctatataaaatatatctcgatacgagtcctcgaactatagagtatcaacattgctaagaacaagaaatcacgaacaaccatactatctatgcaattaaggcaaaacaccatactactaacatacccagaattataggttcttataataagatacaacgtacatataagaagtaagaatntaatagttaataaggatgtattaaagaatcacaaacttcaactactacattcacgactacacacaaaataaagtgagttaagtagtcatgcgtntacacatcaagaaaggcatactcatccaagacatatatatggttcanaagggtttcacaacac

SEQ ID NO: 111885 - DNA, 386 bp, Glycine max
  unsure (1)..(386): unsure at all n locations
ttcggaaacatctggaagcccaatggcctggttttatttcaccccttgttactaaatacccccacactttttgtgattcttttcgtacgttcggtctttacaatttctaacgatattgtttctttccgtatgcatgtaccttaggatacataatcatcctttttggcttcggatgttcagaacttacagattgtgatancacttattttgacttcctgctgtacggaacttaggttgtcacaatgttttttgactctggatgtacagactcagaatgccaacgtggggcatgtccacaagggtatggaggttatacatattgatgtctcgacacattggttacgtatactataaattcattgataattttcttaaccgcatataat

SEQ ID NO: 111886 - DNA, 422 bp, Glycine max
  unsure (1)..(422): unsure at all n locations
ataatcgattaaaacaaagagttatgcaccgaagacatttcttgccttagaaacaatcttcctacttctacatgatgatgcatgatgtacacacatagatagattaagactaaaaaaacaatcaatacaaatgccactcaataaggagttgggcatgtaaaaagacaaaactcttcaaagcttgatcttcatgttactccctatctctaacaactaacccattttgaacccaactctttgctaacaaaaataaaaagagcatgtgagtgtgtctaanagaaagacacatgacaagagagagggaaagggagagattgatttaggatatgcttaaaatgcatgatctgaggatgttcttccttctcaagacttatgtaagtgtagaaatcacaatcatgtttttcagaaaataatttggatac

SEQ ID NO: 111887 - DNA, 335 bp, Glycine max
tacctccaatctttaatggagagggttaccactactggataacccgaatgcaaatgtttatcgaggcaatagatctaaatatctgggaagccattgaaatatggccttatatacccaccacagtagaaagagtttcaatagatggtagttcatcaagtgaaagcataaccatagaataacctagagatagatggtctgaagaggatagaaaacgagtacaatacaacctataagccaaaaacataataacatctgccctatgaatggatgaatatgttagagtttcaaaatgcaagagtgctaatgaaatgtgggacactcttcgataacacatg

SEQ ID NO: 111888 - DNA, 441 bp, Glycine max
  unsure (1)..(441): unsure at all n locations
agcttctagccaaatggacttaccttgaattattccttnngatatccctttgagccttgtttccctttccttgctttgaagctcactacaagccttaagtgaanaaccatgatatcaccatgtccttcanngaattttggagcttggaattgttttaagaataagtgtggggggtttttgtttcattggataatattgtttgttggctatgcttcatgatgtattttgggccatacttatgtacattgtatattggttaaatgttggacatgctgaatgagatgttgnttctcatatgctacacaaaataataataataataataataataataataatagtaataataaatttgaacaagacaaagaaaagctataaagttgagtgaataagatcttaaatggaaaaagaatgatgagactctcggttctactctntatg

SEQ ID NO: 111889 - DNA, 318 bp, Glycine max
attatgttctcctattctttgtaattctttctcgaaagattcttctttgataaattttttagactagaatgaaactcattaaatactctgctgaaagaaagatagataattaacaattactattatttgttacatatttattcatatatgtttattataacatgtgaaatagataatccaagcttgattctctcttaataataggaaagaatgataaaccattcctgcacttttagctcttgtgctaaagatgcttgaaacaagcaaaatgtgggacaaaacaaatgagcaacattctgattcatattatatttactt

SEQ ID NO: 111890 - DNA, 398 bp, Glycine max
  unsure (1)..(398): unsure at all n locations
agctntataatgagctntctgttcattgcttctatcattattaatagagcaggcttctcttccaatatagcaaggtcaagatccaaaacaccgagatgaaattggacttgctcattccaatcagagaagttaagcccattaanaattggtacagatgatacatgagaattcaatgagttgggaacaggtactgcataataaaacttcacataagcattttgttacatgaaacacaagcatacatataatttactcagataacaatcaatgtatattgatgttctcctttgggtgacacaccaacacacaacatacaaacatgatgatgctgataaaatttaacattattttgacaattaatatgcccaattagtagatctattgctttggggtataat

SEQ ID NO: 111891 - DNA, 530 bp, Glycine max
  unsure (1)..(530): unsure at all n locations
cgctgtcatgcaatttgaacctagataataacgagatgcatcattttctgtccagttacaggtgataaatcttcatatgcaagcatttctttctcctaactcaccctatttttgagcttgtcctctacaacaatggcacccatgaggattagattcctatcaatcttatcagatagttcctcaattagtgtttcctgttcttcgctaatcaaattcttttcttgacaaattgtattgtcaaactccttgtattggttgtcatcaagttcacaatatgctaggataagggattagctcattgcttaacttgatgtcctggtggataatgtgtaatcagccttctcatgatattattcaagtcctcttacagtccctacaacatattttactctntgtgcccatgtcataactgggccaggctgtgctcctttaacaccttttttgcatgcatgtacaacaacaattatgataacatgtatacataatataatatagacttgactaatatatctctcaagcaatgacataat

SEQ ID NO: 111892 - DNA, 407 bp, Glycine max
  unsure (1)..(407): unsure at all n locations
agcttaacgcatgaatgatgtataacttgtttttatctgtactttngctgaannatgaatttagaaagataaataataaaatgaacaaataaactactaattatttaactgtaaaaattttaatattatccggaactaactctttttcagaanagaataaataaagttgtgaaaaagttcatgaatgactttatttctattatctttggtttattcccctttacaattcgtgttaactggtaggctggataaccaagtgtaccagatgcaattatatcaaatgtacacttngcttttaagaaattgaacactatgaagtatgaatgaatcttaccgacctaaagagggtagcaatccaaatcgcttgccatttttagtacacctgagaggttaagtgtagaaacgtc

SEQ ID NO: 111893 - DNA, 394 bp, Glycine max
  unsure (1)..(394): unsure at all n locations
atgccattacattataattcatagtaatatgtgtttatatgcaaccactntattagacttggcatttgatataatacgaatgttcctatcattgtacaaaactgatgatggttagaagattttcaaatttatagagatgattcaatttagcaatcagtaatcacaacttcattgagtgaatttcctgtaggatgagctgaaaatatatcttgctcccgttctatatggtaaccgctatacatcatatggtcgccattttacacttgtggaaaagctggaaggtgtacctatntatatttctattcaactntatctcctattcttttagaaacttaattggatgtctataccattgatactcttgtattatatctntgtaccttttattttttac

SEQ ID NO: 111894 - DNA, 381 bp, Glycine max
ctgcactctgaccgctaaaatattttttttacaaaaatgcatatacttgactagcattgataaaaagtcgatatctgttatttctaccgagtgctatatttttagatgtgccaagacatagtcatcttttgtgcttagtaaaaaaagtacctgtgatgaaaatgagagatatggtgcagatcggtaaattttcaaaccatgcagacatccctgagccacaactttgttaatcatagcaaataacacctcatcacacctgataaacaggtaaggagataaagggtctcctctaatctaagaagtatagtcaactcatcaactctggatctacgcacattacgactacaagagaagtcggattatccatgtatatttctaccc

SEQ ID NO: 111895 - DNA, 401 bp, Glycine max
  unsure (1)..(401): unsure at all n locations
ctcatgaagctagcacatggctttcatttatgattctcgtgaagctagcaatggaaaagtcgaaaactgcagtgttttaatgtttgcacatggtagctctagaagaagatgctaaaaacactaatattaaagctgtgtacgcttcaataaattgtacccgtgaagcttgcacatgcatgaatagtataaagcatagttntgtaagatacatgcacatgctactcacagttcgtatatcgtcaagcatacttatagggtacatganatgatgtatgataccgtggaatcttgccactcacaattcctatctcgtgaaacatacttatagggtctgttacatgaaaagatgtatgataccatggaatcttgccagaaataaagctagtcaataatcacttatg

SEQ ID NO: 111896 - DNA, 396 bp, Glycine max
  unsure (1)..(396): unsure at all n locations
taaaaaaattggacaaataaataatatttcttctctcttcaagtccaatccgggttcagctcaattccggatccaagctcaattttacataattatatcanaatcataggtcaaaacacgaaacatgacactcaatttatcaaccaatttgcatcacaacatcaattggtccgtcaacacaacaatctcgtaattataatcgtaagaggaagaattatattacagtaaacatcccaaaataaataacaatttgatcttctaaggatctctaaacatgttcattctaatcacaattgcaataaacccaccctttacctctaagcaagctcgcgtgtgtagtccggaagtgatacaacgtctctagcggntccctaatattcctcaagcttttcctct

SEQ ID NO: 111897 - DNA, 162 bp, Glycine max
  unsure (1)..(162): unsure at all n locations
tcagttggggattcttgctgagtaatngatgtaaactctntccctatctaattaaggtttttttatgtgttcattgtttctatcagcactatattattgcatgcttgtggcttgatcacccatatgtgtgtactgttangggctntagcattgaaagatgta

SEQ ID NO: 111898 - DNA, 397 bp, Glycine max
  unsure (1)..(397): unsure at all n locations
ttaaatatgtcgggacaaatactcacgctcaatttctatacatgggtgaatatacattgtcgaattagcatatataggaatagaaaacagatatcgagagaattctcacaaaactntaggagtgttaatataatttagtagaatgttagcaatatggttttgtaatacttcttaaaaattgattcaaatttattacaaacgatctactttagtagatcttactgtctatttacttaagtacaactaatagaataacacttacaacaaaaataataacctctcgataaattctaactcactcaaaaactaaacaagagagctttagatagcgctgctatgataactattctcatgatcgtctgtgtatttgacgagtccactacagacagaacgacga

SEQ ID NO: 111899 - DNA, 179 bp, Glycine max
  unsure (1)..(179): unsure at all n locations
cacacaactttctatatgatgatggcaacaaacataatctgcaatacggcgaagaggcaatgcaattcaattcaattcaattcatgtggaagatcaactntcacagagtggctacactgtcattcacttaccccgccattagtcacattccatcatcaaccatgtggcaatgacgttag

SEQ ID NO: 111900 - DNA, 472 bp, Glycine max
gcttgttgctgtgtgctatatgtgtgagcaagttgtttatattggttcgtcggaacctatatttatattagttgagcgagggtgctagtccttgtttgtaggggctgttgtatccttgtagataattcacgacttatatataatagccgggagcataatgataatgttagagatgaacatttcaattatagataaagtaggagataatcataccatgtgtgtaatgtgacgttcttgataattaacacctgccaaatagataagatattcatatagcattgagtattagttaggttagagataacctatttgttggagagcccgactgctaaggaccgggcgtctgcactactgttgaaggctggcgtggagataggcatgtgtatataaagctatattggatgtccataggtttgtggtcttggtatacacgcctataatgacaacttaggagtgtagcatttcttacctg

SEQ ID NO: 111901 - DNA, 370 bp, Glycine max
ctatccgatctatctactagcgctgactccagaaattgtttgaaaactgcacaaacttggcaccaccctactacaatcttaatgagatatgcgaatcgcttgattagaggggcagattctcatatttccatgctgttaactccatctatttgtacttttcatataaattcaaaaacttgacacaaccatttggatgacctctttcaaaacatgtcttgggagctctataaaatgtcaacttcaattatttgagctttgatgtatcgactaaacaattggaaacacttggggtggccttacatgaatgagctgcgtttaatgaatatcttgctttttattgaacatcggtatcagcctggtatgtcatcta

SEQ ID NO: 111902 - DNA, 437 bp, Glycine max
  unsure (1)..(437): unsure at all n locations
agcttgaatgaaactagatgccttggttatctttttacttagctngccatgaatcagaaatctactctttgtgcaagagtctgtggtctatgttcttctgcaaatcaccatacagatctttatccttctttgcagcaatctggagacaatgagcaacctgaagcttatgctgcaatacattataataagacctctcaacggaaaaaccaacaacagcagtaataatattgaccttttaacaataaataccatccaggttgaaggaatcatccaaatttgagatggacaagtcctncacaacaacaacaacagcctgtccctccttatcagaatgctgctggtccaagcaagccatatattcctccttcaatacagaagcagtcaagacacatacaacaagtgactgatgctcctcctcaacctctcttagaagagtt

SEQ ID NO: 111903 - DNA, 431 bp, Glycine max
  unsure (1)..(431): unsure at all n locations
ccgtactcacatgttctgtcatactcacatttgagtcacgctgaccggcggatatacccgagtggttatccgtataaacattcttcttgctatctgtaagacgaaaagcctgatatcatgcgaagactgacatcgtcttctgcgcccttcgtcaatcgcgggcgacaagcccattgacacgcggagatttacgtcatcttcggcgctcacaagatctgtcatactgacattngagtcacgctgacgggcggagatacccgagtggttatccgtataaacattcatttttgctgtctgtaagacgaaaagcctgatagcatgcgaagactgacatcgtcttctgcgcacttcgtcaatcgcgtgcgacaagcccgttgacacgcggagatttatgtcattttccgcgctcacaagatctgtcatactgacat

SEQ ID NO: 111904 - DNA, 387 bp, Glycine max
  unsure (1)..(387): unsure at all n locations
tgcttctattaagcccatctttagtaataaaacaagtcttgctcaaatgtaatgaanattatttgctccatttaccagagaaagcttccaggcggagaacaaatagctgttaagatgctctcaagacggtctggccaagtttagaggagttcaagaatgaaatgatgctgatagcctaattacaacacagaaatntattagattaatgggttgctctattcaaggggaggagaagttgctggcatatgaatacatgccaaacaaaagcttggattgcnnttttattggtatgtttcttcacataagccatgtttgtttctttctgcaattttaagtaccatgaaattttctaacaatnttgcactttgtggttaacatcatgacaga

SEQ ID NO: 111905 - DNA, 392 bp, Glycine max
ctctgcattgacattaagtaaccagtgactcaacgaacttagtggatggtgaactaactacctgccaaataccaccaataaaaacgcgaaacgcaatgctatctaatactaatatgctaatataaaatatgtgatttatcttttactttttctctgtatatgatgttagaccaaacaaaattgtaaaaattattctaaaagtaaaagtaactgtgtaataaataatgtttgtatataactctaaaagagagacagaaactaaaaaagaaaaagttaaacattgcagaagttcctactccagaagcagagtggaatactgaaaatatgtatataattcaagaccaaacatattatcaactttgctctgaacatataagaggctaacatgacat

SEQ ID NO: 111906 - DNA, 317 bp, Glycine max
  unsure (1)..(317): unsure at all n locations
ttaccaaggcatataacacaactaatggtctntttgaaggtntgaaagcttgttacatgacacaatctatggaagttgatcgcgagggtatttcctgcgctcctaagatgtatcttactatagcgggcttcccttctatgtgaaccttcattgtatatgcatattcaaataattngctaggtgtttacaggaatgtactgacattcctactatacatgaataatttcgcatcgcattgtctctcgntcagatttaggagacccaagataaagttgctgaaaaacagtatcttaatcccttatatattcttcctcttg

SEQ ID NO: 111907 - DNA, 312 bp, Glycine max
  unsure (1)..(312): unsure at all n locations
ttgctactattaaacttctgaagcgatccatcacttncattcctataatttatattatggattgaaggaaggcgccacagacattttgaaactacttatctttcacgtattatctattggtatgggatctgaatgcattggtcttcaaatcaactttttaaaaaatgacgtggtactaaatgatcatgttttacacactggatcactgaaaagtctattctttacaaccacatgataatgcatgccacttctgtgatacataatacatatgttttctactccaaaaacagaacttattttttattgttgatt

SEQ ID NO: 111908 - DNA, 449 bp, Glycine max
  unsure (1)..(449): unsure at all n locations
gtcacctgcggcatgcaagcttggcgcgacgaaggagctatttgacacttactcatgaacctgtcgnagttaccaccattgaatttcacctttaatgtcgtcttcttccgcgagtgtcgctgaggctctcaagtgcaaccatcgatgttgtctgattgcaaaanactcatatccattagaacccatcattgaaaaaactcaagaatctctagttctagaaaggagaagcccaanaatttccaaatctagaatggactttaagaaacccacattttcatttacaacatttgttattgtcgtgctcttcacggcggcttgaaggctttgattaatggtggttgcgggcaaggagacggggtattccatgaaagagagagacaaatatagagaagaaataagaaaaaaaatctagtgtgaatagttttgccgtatcctcatgtgtatctcaa

SEQ ID NO: 111909 - DNA, 340 bp, Glycine max
  unsure (1)..(340): unsure at all n locations
aagcttctcgcgaggacgtanggtcaacttgcgttctttgtgggttgttgtacttgtgtgcacgatggtagaagtatgctaagtttgagtgggtgttcatgtcttatagttnttntatgctaagttgctacttttattgatttgtctctacctttttttctgtgtgcattccatacccatcacaatgccacataaacccaatgctcaagctagcaaaactgttgatttcagttacacttagatgctccacattctcaatatactacccaatgtactcttctcaccaatgatgttggtctagttctgttatggctattctgtgacgtatattgcattctat

SEQ ID NO: 111910 - DNA, 463 bp, Glycine max
  unsure (1)..(463): unsure at all n locations
actacttcgctatccatctcgagaatgactccattagagtgatgcttcnagaaccaagttagagctttgagccactccgaacatgaatattaaactctcgatgtaactcattaactcttataagttgaagagtctacttgtcctttgcgagtggactcttgagataactactttttagtagagtttggacaaactctataatcctaagtaaactcgatagactctcgagtttaccaccgagtcaacaagttagcaagttaacaaaattagatcaaaatataagtcattttttctaggttttcgtctgtatagcattcatcatatcttcgttgagagtattagtctcagaaacagaatcttcacctttaataatatcatactctgggtcgataacattaaactctcgtcaaaatgtctactactctactatgacctgtgcaagtactatactcgtgtaagaaac

SEQ ID NO: 111911 - DNA, 450 bp, Glycine max
  unsure (1)..(450): unsure at all n locations
gttctctttatgttggtgtcactgtgtttatgttatgttctttctatatatggatctgctgtcataagaagaatanaacttcaactccttactcaacaattcgtgattgtagaatttatatctcggtaatatatccctgatgtgggttttgtgtggattctcttctgctaatactcgatagttgttcactcttagagagatagaaattggttgtgaaaaacagaagcactgtgtttctaagttaaaagaatcttcagctgccatgtatcatcgctggagcaattctcatcaacaggatcatggaatcngcgagctttatgctgaatccaaggagtgttgtcattagtttgtgtgttgggtgatatgatgtatcgctcggaaaaatctacgcattcatgtctctgaacacgttacatgtcgaaagcgctaaacttgtatgcatgcaattgt

SEQ ID NO: 111912 - DNA, 389 bp, Glycine max
  unsure (1)..(389): unsure at all n locations
agctngngtgatgtagcgagtactgatggtactttgangtgtctgcggngnnttgacccacgcaggtgttgaagagacggcatgggcatctccttcctttctttttgcccacgttgtcccgattcttttggcattcgcactcgtggaggaaacgtaatcgaactttcctcttttcaaccctacctcgattctttccncggcaaacactaggttcgcgaaactggacgggatgtaactactagctcctcatagtagaacactagcagagtgtctaccatcatggtgatcatctctctttctaccatgggaggagccacttgtgccgctaggtctctccaccactgtgcgtattctttaaaggttcaccctctttcttgaacatattctgc

SEQ ID NO: 111913 - DNA, 519 bp, Glycine max
  unsure (1)..(519): unsure at all n locations
ctctgcactatgcctcgcttagtgtgccatatctcgctcagtgcaattccctctcgggttggaattgcacttagcgcgcccctgctcgcttatcgcaattccctcttatgttggaattgcgcttatcgcacccttctcacttattgagacaccaaaatttgttagtttcaaaatctcaacagtcagactatgtatatgtgtcttatgaagctccatgatatatttgaagacgatctaacggttaacaaatccgggaatttgattttactggaataggtttaggtaaaatttaaaatctcataattgtaacttagctcaacaaaactccacataactcatcatccacatcaagaaattcgcacatgattaattcaagtcatacctccactcattcaagtcaaccatatagtcatataacacaataaatacaattaaacatcgatttataactagtaatatgtcagggtgttacattattcaaccatanaagaattatctaatagaaaatcaaatatctta

SEQ ID NO: 111914 - DNA, 181 bp, Glycine max
  unsure (1)..(181): unsure at all n locations
gatccttaagtcaccgcagctgcaagctgngagtcaagaccgacttttctgcttcaattgggaaggacgccggattccttctccattcatatacgcaagctccaacgagtctgtgcttggcctgccttctttagctgcgaacggttcattcccttcccagacatctttcatggcctcattt

SEQ ID NO: 111915 - DNA, 269 bp, Glycine max
  unsure (1)..(269): unsure at all n locations
tcacacataatatatgtctttgatgacaataagatgctacaatatcctcgatggatacgcactaaacactctntattgtaattattcctagtgtctatttagtgttattttgctgtatcgacataggcctctttactatattattagctcacttatggtctaatcactcatgcatgtgctatagtgtgattgtcattgaagaatgctatactactaactaacaactgaatgaaagcttctaatggactcatatctagatggaatgatgc

SEQ ID NO: 111916 - DNA, 217 bp, Glycine max
  unsure (1)..(217): unsure at all n locations
tcccaatttgtatggttatagtatactgagtgttgatangtcaagaattagacagagtcgaaatcatttgagaataaattataattctacattctaataaaggtggagaatacacatctttagacatgagtacctttttgtgagatgcatgatattattcatgaaatgacacctccatatgctcctcaatctaatggtattgcggaaagaatgaatc

SEQ ID NO: 111917 - DNA, 279 bp, Glycine max
  unsure (1)..(279): unsure at all n locations
ttttctccctttgngtatgattttctgtggctgacaagatgtgtatggtggtattctgtngattctatttctcacagccaacactactatgttgagactngagacaactcagtgatgttcaaccgcaaacatgagtccttatatngtacgaataatgtaacatgtgctatagcacggtgaaatgcatttttttttacttctcaagtttgcatctattctaaaattattgctcgggagaaaacggcaacatgcgtttaagttntcaacatacacctgata

SEQ ID NO: 111918 - DNA, 270 bp, Glycine max
  unsure (1)..(270): unsure at all n locations
caaagcatttggtgtaccanaaactgcacatgcgcctcatctttggtatttntaattacccatcatatacaaactttacgatgaatcttgactacctacacaataaggtgctacatntcatgctctttttcaagtttttgctacctatagccacatgcaaattcaagcatattttccttcgctgactataaatgtattcaaattagaaggtatactattttttgtaatatgttctcttcacataacatgcaacatatttatgtatatatt

SEQ ID NO: 111919 - DNA, 52 bp, Glycine max
tcaaattacttatacaaaccggtatacgcagatgcacgctcgaagaactcag

SEQ ID NO: 111920 - DNA, 261 bp, Glycine max
ttctccttgaaacattatttgaatcctccagacacttgaccatgatgagctttgagagatataagaggaatagataacaatcagcagttatgaagagttggactgaaagaaataataactgatcatgactaaaataattacaatttgcatgtgaacaatatactataccaatttacattgaatagttatatttgatcactataatgctgatgtcaaataactcacagactgagatacattttgtggagaagatgttataat

SEQ ID NO: 111921 - DNA, 213 bp, Glycine max
  unsure (1)..(213): unsure at all n locations
accatgcattacatgcaatatgcaacaaccatattccaaatcatcaatatctaaagctgatcacgtgaatacgcagttaattggacggcgagctcaagctcttcaaatacatcatacagtgtggttaaccactaaacacgaaatataattgatgtgatatattaacttatcngtttctaacgactagcagctgataagcttaaaatcacttat

SEQ ID NO: 111922 - DNA, 473 bp, Glycine max
  unsure (1)..(473): unsure at all n locations
gcttcccgcatccacacctggaaggatccgattatctgtcttccttangcagnatcaatacaactctgatatggctcccaaccgaactcaactataaaacatgagtgaacgggaacacgagtcttttaaagaatacgctcagcgttggagggacctataagcgcaagtagcccctcccatggtcgagagagaaatggttactatgatagtggataacttgcctgtattctactatgagaaattatgggctacatgcgctctagcttcacggacttggttttcaccggagaaaggatcgaggtgggtttgaagacgggaaagtttgattacgtctccctagtaggtgccagcggtaggagtatcggaacagctggggcgaagaagaaagagggagatgcccataccgtcacttcaacacctgcatggcccaagccacagcataacccccacggtacccaccaatatgcacaaca

SEQ ID NO: 111923 - DNA, 391 bp, Glycine max
  unsure (1)..(391): unsure at all n locations
ctccttcttccattgcttattccttaatggatggtgcctcctctcacctcttttcctttgtctttcgctgcatctccatggtggaaaatcaccaataaatgaccccatttgtagctcanagatccatgcctcatataagccccacatgcaagcttccatcactagtggagtcgccaactgtcgcaacctacccttttgctgtcgatcgaagtgaggctcacgggtgcgtcttccatatgaggaatatgcgcggagtcgccaccaacatttatttgtggaaaacattggataaactgaaggaaaccggtcatgaagaatattccagattcgggagttgtatttacgtttgaggaatgtattaacacctctcacgtttgtcccaaatgacaac

SEQ ID NO: 111924 - DNA, 383 bp, Glycine max
  unsure (1)..(383): unsure at all n locations
cttttantttaanaaggcttgctcttttttttataaaggtatgccatatgtctcccttttagtggagcaaaaagggcctcacttttctcttgatgtgactcatactcagccacaagaagagaaaaatctgaccttttgaaatgctaaaatcctgcctcggtttgcatgtcgtntctcttgttccaatcctcgcgtttctgcacccgccggggccagttntcgaagataagcattatttatatatatcaaaacgctcataatgaaaccccgagcgcggttcagagggtggntnnttgtaaactttatagtcgcacgcacaacgataattttctagactatataatngagaattaacctataactactccagtatggatgtctct

SEQ ID NO: 111925 - DNA, 416 bp, Glycine max
  unsure (1)..(416): unsure at all n locations
atgccccacattatgtccatgacacanatgcaaaaatgatgatctggaaactntatgcaaaactggtcatgcatgcacctatgtggacactcaagtgtcaaaattttatggtcatgtgatgctatggctcaggattcattccctctattttagtcaacccaatgtttccaaaatatgtgtttttatccatttgtgctttcatccgagtcacatttgggcgtccggtgaaatatcatatcgttcacccttcgggtgtacacacacattntttccatatactagctatgatcagcagaattttctttaaagaaaaagtggaagtcatctcttttcacaagcatgttggtttgtcagctagacaacttatttttctttttgttcttacatctttttttatcattatcattagttaattc

SEQ ID NO: 111926 - DNA, 409 bp, Glycine max
  unsure (1)..(409): unsure at all n locations
agctngtgcgtaatanaacttatgtgacatctttttattttataagataacaacttctgtgagataacaaattcgtgtctcttaatctgtattagaacttgcagttggtgatacttagaaggctcatatggtgggaacctgatttctttgttaatttggttgtatagcttgtttcttgggaagaaggagggtatctgacatcatataaaccaacgccaaggggagagattgtagttggagatctagtgtgacagctggttactttaagaatcaagaaaaaactaacgaagtgttcaaggtaatttcccaagttacagttgtatgcatgacatttttcctttttaatttcctttaactgctcttaaatctgttgttgcatattactaagccactcgttacattgtttttt

SEQ ID NO: 111927 - DNA, 364 bp, Glycine max
  unsure (1)..(364): unsure at all n locations
caacttctcttcctttgtcttacttcaatttcgtgctcccccctctctctttctctacctctttcttttcctccattgaagcatccttacaagcttcttatccaaggctcatcttggtggtgaagctctntnttccatggcttattccttaatggatggcgcctcctctcacctcttctactttgtcttccgctgcatctccatggtgaaaaatcaccattgaaggacctcattgaagctcatagatccagcctccatataagctccacaagcaagcttccatcactaatggactaacgttngtttcgttntgatggacnntttgtttgtgcatacatgtcgtttgaactggtacgttagtatt

SEQ ID NO: 111928 - DNA, 437 bp, Glycine max
  unsure (1)..(437): unsure at all n locations
atcttccgnaatacctcatcaccgtgtatcatatctagataatttcacatttatgtctaattgtctatttacgtcattgtagtaaatttctaaggcatccattgcctaagaaatctggggcacgaagtagacataatcgtaacgtgaataatcatcaataatggggataaagtatcatttctttccanaagaactaacatcacaggtccacatatatcagtatgcacaatttcaagaagctgagtgcttcttggagctcctttcattgtatggtttgcttgttttccctatataccacccacacaaatatttagatccgtacaatctagataaggaagaatttcattctctattaatatatgcattcctttctctagaaatgtgacctaaacgtgtatgccacaagaaagtatattggtcttcacttaactatggtt

SEQ ID NO: 111929 - DNA, 347 bp, Glycine max
aatatgcataagtatatgccttgactttcatgtgctcgtgacccccaaacatcaaccttttcccaagagctcctttcaattaacttagtatttgcatcacaacaaccatatggtctttactcgaaacatgcataaattgactaaccatactcacatcataagcaattctaggactagtgagagacaaataaataaatcttcccacttaccttctccctggtgttctccgacttgaacattggcgcccattgtgggatcttcgggaaaactcctttgtacgaccaccacatactaactaagaactcataaccactagactaaagagtctacttgcttcttcttcttat

SEQ ID NO: 111930 - DNA, 429 bp, Glycine max
  unsure (1)..(429): unsure at all n locations
agctacggaatagtacatgtgcactattattattganttctaaatgttaaaatactttcttaacaccttnntgaacattnttctaacaaccaactttattttctagtaaatattattattcctattctatcatgtagaattattgatatgatgctgaanagttccacttacttcaagtatctcttgcatcttgcaaagcatgaaaggtctattgtttaaaaaaagaatcaagaaaacatctaaagcttaatgatacaagtttacaaactcgaaagtgtgtcatntctataacttgaagataaattattcaacacacttaanaaanataatttgaagaacagaatgagcccaagagtttatactcaagatataactttgggactcaagaacaaattaacgcccatgtttctttatgaattcgcgttttat

SEQ ID NO: 111931 - DNA, 265 bp, Glycine max
tattacttaaaatataatggcatagacttgtaatacaataagtcacaagcactgaaaattaatatatttcacaaaacatgttagtactcattcaacatttttttaatttaatgataaaatttgcttagataatgaaatactactaaactaattatttacaatacaacataaaggaattgataaattgaaatatttatatctgttacatatatataaacctgcaatgaatgaaagtaatagcaagttgtgatcataattaataatt

SEQ ID NO: 111932 - DNA, 388 bp, Glycine max
  unsure (1)..(388): unsure at all n locations
gcttgctaagngagacaaaatctggtgcaaatcacaactcctatatctcatgggtggaatggatgaatgcatgaaggaatgcatattacacacatgtcatctatgaatgctgggggttcggggaattcatccccttcttatacacaacgcctaagggtagcaaagatcaccaacttacgtttttaagacgcgacaccgaccctccgttggttgttacagaagggatcagacatacccatatctatgcctatgcaaagaccaatgcgggaatgtcacagtatgaaatattcactgaacataacaaaatggttatgatcttatcatggcttgtgaaaatggcacgcacggttgtccggcccttttaggactattgggaaaactacttgcc

SEQ ID NO: 111933 - DNA, 447 bp, Glycine max
  unsure (1)..(447): unsure at all n locations
cctagagagggaatccatggttgatangttttccacctnganagactggagagcggtttctaacgactcctctacggcctccacataaggcatagaggatgggcaacttaccaagatgtcttcctcgcctgatacgatgaccagatgcccttccactacagaatttaacttttggtggagtgtagagggaacatactccactcgattggatccacagagtgcacccaacaggcacttggaagtgagggttaatgtccattattcggaaggtaacttgacaggtgtgagggcctatctgtacagggaggtcgatctctctcctaacctctcggctggtgccgtcatatgaacgaaccaccttggaacttggctgtatgtgggagcaatcgatggtaattcctccaaagtgctcttgggcttcacgtttaactggaaccaatatcgatg

SEQ ID NO: 111934 - DNA, 238 bp, Glycine max
tcgaggtacttacccgttgaagatcgaagaacgatgtttatctaatgatgaacgtggaagaacgggtgaaacctgtgcgaaattcctcacggaagacgttacggaaacagttcggaagcgcctcggcttatattttcttcatggaaacaatttttccaagcaaattcgaaagagagagaagtgccaaaggggctgaacccttttcttcttcacttcctcccctatttatagcataata

SEQ ID NO: 111935 - DNA, 293 bp, Glycine max
  unsure (1)..(293): unsure at all n locations
tactcataaatnttagtncaactttagaataagattattttcatttttaagtctttaattattagaataatattgggcactgngcctaatttagggttattaataggagttataaatagactccttcaacactttgtgagatagaattttaagattaataaaatttgagagtttctctactatgagaagttttcccttgttcttggataagggactgatagtgtggttctattggcatgntcgcggtagggtcacactctttttgattgacttgttctactgtangtcacggt

SEQ ID NO: 111936 - DNA, 316 bp, Glycine max
  unsure (1)..(316): unsure at all n locations
tattctcttttctaatcaacatataggatatcattttgtaatgggctcaattatttatttggaattgtgcanggttcactggtataatgatccatatgaaccaccgagtagttgtgaggtgtgaatttgttgtgttgtgtgtgttggcattattttcttgccatttttagatgtgttaaatgatgtctcaattattggtttatataatntggttaaagaacagaaaacctgttactgatatgtagtaactctgaatcaataattgagtcattatcaacattaaacatacaatttgttaatgaataactgagtcacc

SEQ ID NO: 111937 - DNA, 223 bp, Glycine max
  unsure (1)..(223): unsure at all n locations
caacacatggaatggcaaactcttatgcaggataacatgttccctcccttgcctctccgtaataaaactggctcgataatgggatataagaccatccatattgtgcttgatctgngaagcaatgatcttagtaatcactntgtagatgacattacacaaacttatcagtttatactgtctgatagagaaaggggtgtccattntcaatactaacaaaatatga

SEQ ID NO: 111938 - DNA, 378 bp, Glycine max
  unsure (1)..(378): unsure at all n locations
ccgagtagtcgaagagaagttcaagtccatagccatcacagtctaaagagagtatgatgaactataggacgtcaatatggccaccgatgaagcctttgaatgagataccaagaatgcccgaaaggataaacacgaccaaaacaaggtttgaggggctttatagggcatcaatagtgagctcaaactcggagaggtgaaaggaatcatcacgggtcaaaggcatgatctggaaggatgagctaaaggcttgccttangtcgaaaagaaatttgtcccaacagttaaagtgagactgaatggaatatgtgggccatcatcgatgagtgcaaagagaagctaattctagcatcgactcacgagcaaatgctagaggatgag

SEQ ID NO: 111939 - DNA, 367 bp, Glycine max
  unsure (1)..(367): unsure at all n locations
aatatctaagaagggggggtgaataagaattcaaacttttcttctattaaaaatctatcttactgtttacttaagttatgaattcccttaaagacaatcgtcttaaatattaattcaaatgaagcaacttgaatatgaatataaagcaataataaataaaggagattaagggaagagaaaatgcaaactcagttttatactggttcggccacacccttgtgcctacgtgcagtccccaagcaacccgctggagagttccactaacttgtaaattccttttacaagttctaaacacacaaggacaacccttcctttgtgtttagagattctntacaacaagagactcacagtctcttaatgccttaga

SEQ ID NO: 111940 - DNA, 420 bp, Glycine max
  unsure (1)..(420): unsure at all n locations
ttaaatgaatggttgtgtttgaaatgaatgagagttgtatgaatcgagtggactggaatgtataaacttttgttagatcaagcttgcatccactagaagagaaagaacatgtgattggaagtatgactganaatgttagtcagtttgtcagattgattgtgatggaatgcattgactatatcctggtggagtgtgatccttaaattttgagagaaacgactattcattagtacggatttttgcatgaatctctgaagtatggattgaatgcctgaaattgaggatgatgaaggccatgtttgattgtgatagccacttagccaaaaagctgaccacgtgcttgaatgaattatcccttgcacccagtttgagctgaatgaattatngattgagtgaaccttgaccccatacagtgttatc

SEQ ID NO: 111941 - DNA, 472 bp, Glycine max
  unsure (1)..(472): unsure at all n locations
agcttcatannaagttatatggctagaaacatgtctctttgcagtggtacaagaaagttaatgagtttatgagcaactcaggattcaacagatgtgacatggaccattgttgctacgtttgtgcaacctacccttcggcgggagggcgacacgtgactcgcgggatgcgtattccacganagggatacgcgcggagtcgccaccaacgtttatttgatgaaaacgtcataataaccagaaagacgcgatctacgaacttttaagtgaaaggctcgggagttgtatctatgcacggngaaggtattagcaccccacacgaccgtcacaagggacggcagcctttaatcgaatgtgcaaacatgactttgatttttacgttccccttnatgtccttatattctttataccctttctacattttttctctatttgtggtcgacaatggtatcttcctttgctcctcntatctctc

SEQ ID NO: 111942 - DNA, 490 bp, Glycine max
  unsure (1)..(490): unsure at all n locations
tgacacgtggagattacgtcatcttccgcgctcacaagatctgtcatatnngactttgagtcacgctgacgggcggaaatacccgagtggttatccgtataaacttgttgctgtctgtaagacgtaaagccttataacacgcagagactaacgtcgtcttctacgaccttcgtcaatcgcggccgacaagcccatttaaaagcggtgatttacgtcatctttcgtgctcacaagatctgtcatactgactttngagtcacgctgacgggcggaaatacccgagtggttatccgtataaactntttgcattctgtaagacgaanagcgtgatagcacgcatagactaacgtcgtcttctgcgcacttcgtcaatcgcgatcgacaagccctgtgacacgcggagatttacgtcatcgtccgcgctcacaagatctgtcatacttgactttgagtcacgctgactggcggatatacccgagtggtatccgat

SEQ ID NO: 111943 - DNA, 409 bp, Glycine max
  unsure (1)..(409): unsure at all n locations
acttatcatctattccagagtgcagctatgttaaaacttctccaataaaattcaaattntaacacattacttctcatttgcataagcagagtgcagctatgtaacttatcatctgaaccagccataaaaatggaggtaggtcgtatttttatcaagggcacagtgatgttgatcaccaatgtatttccacaaaaaaaatcaagtgaaccaaccaaatcaaatctatgtcaacatacaatccataagatgctcatattcttaactcaattcagcaagtattaatgtttctcatgattggcttcatacgcaagcatttcagatatataacatgaacctttatntatgtcaactttccacaggagcacggtaggcattaattattgtagatatattccattaacaaattgat

SEQ ID NO: 111944 - DNA, 360 bp, Glycine max
aaaccatcgatgaaagtggctgtatacacatgcgatgaatgtggatttgaaatttaccacgtgattgatgaaatgactgcgtgaactgcacaattgtgacactggattgtatgccaataaaagaactactgcatgatatttgcttggtgtgatttaaaaaaaaaggtccattacagtttttgaattttctctctgccaacacgatttgattgccaggatgttaaactacaatatgtaaagggatatgactatctatcaaaccttgttagttcttgttgtggattaatttatttctgctgggatatggctagaccattgtggatattgcatgccattaggtccttgacattgttattttct

SEQ ID NO: 111945 - DNA, 512 bp, Glycine max
  unsure (1)..(512): unsure at all n locations
ggatccttaagcacctgcggctgcgctgaagctgatacttaaggtttctttatctngtaccttattnttgaatatatggaccatgatcttgcaggccttgcagcaatacccaacatcaagtttactgaagcacaggtacctcacccaacattctaataatcacacagtcttagatgacaacctttctgtcatttacaactgtaaaatttgtcttcgaaacatttacttttcactttatgttatttttgtgtataaaactggcatagtgagtcagattcttttcgtaaagaaccttgtgagatctagaaaatgtctagtatttgtatagttaatagaagcatcaatcaaattttgaagccagacatggagtagattgcaacaaaagcatcactttctctttgatggaatttgatgagtcanaagcaccgtatctgctggagtcctagtggcaactntntagcattnntaaaatgaagggtttcaccaggattaccatgaccatgacactttta

SEQ ID NO: 111946 - DNA, 386 bp, Glycine max
  unsure (1)..(386): unsure at all n locations
cttctgcacaatggtcaatggtacttatacacatgatgctctattcacatgactggtcacaaagactggttcgtgtgtctagatgaaagaatgaanagcaaagtgagatttgtaaatgacagcactatgcttgctgaaggaattggaaatgtcctgattcagaggaaagatggtagagaaactggcatagaggatgtactttatgttccaagcataagcagcaatcttctaagccttggtcagttacttcagaaaggctgtaagataactatgaaggacatgatgatgctggtatatgacaaaaccagatatctaatgataaaaacaccattgaccgaatatagaactttcaatgttggaacgcaagcacttgagcatgaatgtct

SEQ ID NO: 111947 - DNA, 77 bp, Glycine max
  unsure (1)..(77): unsure at all n locations
atatngtacgggctcttgaaccatttcgaagcctattaataagacacgatcatctccctcttgttatcgtcactgac

SEQ ID NO: 111948 - DNA, 71 bp, Glycine max
  unsure (1)..(71): unsure at all n locations
atacngntgacggatatcatatgaacttgccttggtcctcttggaatctaccatatacaacaaaaacatat

SEQ ID NO: 111949 - DNA, 388 bp, Glycine max
  unsure (1)..(388): unsure at all n locations
atttcagaaagtcgtatctagtcaaggtctgagagaccatacaagttttctagcgatttctaattatgtgggccattaagtctatcatatgctgacaatagccgagaagcccatgaatttcttctggggcggagtaggtgtccgccattggcttggccttggctaacaatcggagaagttcttgacttccgttcaaggaagagcaaaccgatccatccacatggntgcctcttggtgtaaagagtcgatcacccttcctctagcctctttntctgcgtatacttgggcatactcgtccgcgaccctatgctcgtgggccgtggctagacctaactcttcttggtacttggcgatgatagctagcatgttggtctccgtctcgcataaa

SEQ ID NO: 111950 - DNA, 310 bp, Glycine max
  unsure (1)..(310): unsure at all n locations
atatatatgtaatcgantacacagggcaagatttgaattcaaattttaatagctggtgtaaatcagttgtgggcactggtaatcgaatacatcctctggtaatcgattaccacagagtaaatctcttgaaatagaacttttgttaacttaaatttcttggtcaaaccttttgctacttcaattggaattcccttcctatttaatgtaatcttcctaagactctagagactgtcttaatcatgcatcttgaatatactttatttctttgtcttgatataaaacttgagaaacatgtaatcctttggcatca

SEQ ID NO: 111951 - DNA, 231 bp, Glycine max
  unsure (1)..(231): unsure at all n locations
atctcttccatggcctttggctagctagaacactgagggtctaatgtcctctgatgttcttctcaatgtaataacgaataaatagagtcttctttccacgctctccaaganaagttntttttctttttaatgtaccctggcggtatgttataattataagacaatattatcataagagctattcacatgaaagggtgaaaacattctaatatttataatattataaaaata

SEQ ID NO: 111952 - DNA, 361 bp, Glycine max
  unsure (1)..(361): unsure at all n locations
tgcaataatatgtgaacatggatagtgaagcgcataataccttccgcattgacaataatgaccatttaagttaactgcccacctgtgtcccgcacgttgcgtaataggatngaaggtctactcaacttcaaaccttgtggagtggatgtcatacacacgaatgatgtgcgaacaagctngntactgattttntcgaagttctntaacaagacttgaacaatatacttgcccttcatttaactgtctctgggcttggcggccacgcacaacatagtactttcgacacctactatacgttgatgtgaccaatgctgttatgggaatgttgcgacaatccttcaaaaccctattgatacattct

SEQ ID NO: 111953 - DNA, 157 bp, Glycine max
gttttgacttcatttgtaccaacattgaatattacattgatttatagaccatgactattgagcaactcatgagttccttacaagcatacgattgataacaaatgagataaattaaacaaaatgaggctacggagcaactactacaactcatcgtata

SEQ ID NO: 111954 - DNA, 438 bp, Glycine max
  unsure (1)..(438): unsure at all n locations
tgcttgcagtctacaactactctgcgagtagtatatttctcaatgtacanaaaatttgggaagaaatagagttacaatttcacannatttagtttctctctctttttctctttctctctggtgctattatggtatanggagcttgaagatcctacaatggctgaatctaatcctcatccttctgctcctcttacttttcttcatcttctgcttttgcgcattcaatcactgagaagctcactgattcatacttcttgttgtagaggcatcaagtagaaccagtgatcatagtgcatcaattacacagatatctagtgtgtctgaacattactaagctatgcgaatgaagctgttcatgattcatgcaccgtgaatcctgcatacactacganggagatacatgatcaaatgctgctcacatggcttcaaatcatctct

SEQ ID NO: 111955 - DNA, 253 bp, Glycine max
ttcatcggggcctacgtgtctacccattctcatccatatgcatgtttacttctttatttttattacggcagatccgatgacgagtccctcgaaagtactaatacctgggacccgcctatctacttcgagcatgaaacaaatcatacggtagatgaatggaacgatgatgtgggacttcccccggaattagaaaggatagtcgcccatgatgaccaagatatggtgcctcatcatgaagaaacagaactagtag

SEQ ID NO: 111956 - DNA, 262 bp, Glycine max
tgagacgccgagactgttctgtgatcgccggaaagcgcgtgccttatacctccaaccaaaagatggcgtgctacactgtgattatgcccatgcgaaataaaaaggctgcgagcgaaatgttaacatgccgaccattgccgcagctgattcatatgccctatgctgggataggctacgttctgggaatgtatcgtccttcaacaatacaccgacctagtgaacctggtgcatgaggtactcatattggtggctatgccctcag

SEQ ID NO: 111957 - DNA, 227 bp, Glycine max
  unsure (1)..(227): unsure at all n locations
tcgctgtgcgatggtccggcgcaatgttaataccatatttgtctcctaccggcagcactttttctaattctgcggcatcgcgggcaattaactcatacaggtgctgagtcagcggcacaatcatcttttgcgattcggcaaagttaatgaatgcatccggnggaatttctcccgcgacatgatgccgccagcgtagcagtacttccatgcccgttactcgcatagct

SEQ ID NO: 111958 - DNA, 447 bp, Glycine max
  unsure (1)..(447): unsure at all n locations
gcttggcgaccatgatcaacaaagtacttttgacatctactatatgttgatttcaccaacgctgttatcggtatgttgtgacaatccttcaacaccttattcacacattctgagatgttgggtgtcatgtgactatatctttgtccttctgtatcataagtcatgctccatttttcctttgatatgcgatcaatccttaacttcaaaaactggaaaggtcacacgtaaaaatttctattgcagaataaccatcaacaaaggcttataaataattactcggtataataataacttcataataataaatcttattacacaaattactacactagacgtcagcttagaatttgatctgacagnaaaaatatacttcaactaatattgtgacgataaaatatcagaactaactgaagagatgacgatgctataatattgatgacacatact

SEQ ID NO: 111959 - DNA, 278 bp, Glycine max
tgcttctctctctgaacactccttgtgagctgcatgacgacaattatgttctcaatgcaatgaaatttggtgagagaccacaagatgataatatgacacacaatcctactgacggatgtgaagtttctatcatgtcaggcatgtgtcaaccacagactcctacatatcttaatgtgtaatatagacctcaacatatctgctgtcctggatactaaggcaagagtaaacaagagcatattgtaggtatatattatgttgcttatgtaaacatgttgata

SEQ ID NO: 111960 - DNA, 363 bp, Glycine max
tcacataagccattggggttgcagcttcttccccaaagggtctttgccagtcagcacttagcggcatgcacctcactctttccaaaatggtcatattcattctttctactaatccattctgctatggtgtgtgagggactattttgtgccttttgatacctgattttctgcaaaactcattgaattgctctgaaacaaactccatgccattttcagtccttaaaacttttagttttgtaccaagttgatttccaataagagtatgtcactctctgaattttttaaaagcttctaatttgtttttcaaaacatacagccatactcttcatgagaatcatctatgatgatgagaaagcatgagct

SEQ ID NO: 111961 - DNA, 382 bp, Glycine max
ttgagaagctaagggtaatttcaatatttggtttgacaatcacaccacgcaactggttttggataatgattatacagaattacttatcattttatcatgattaattgatcatacacacacatatgatatgattatgactaagcgttagcttggattatctttcaactctatcaaaatcaattctataatcaagtggaaagcctgaagcaacaaataattgcttcaactttttcaaaatttcaccatgattttaattggggtccaaattgatcttagagatatttatcgcactatatgatgatatatagtcgcggaatccatttcatggttgcagctgacaattggtgattttaaattatggcacaaattggtaataataatt

SEQ ID NO: 111962 - DNA, 380 bp, Glycine max
gactctgagtggtaattaaagtctaagtggattggtccttttgttggtactaatgtttttgcttatggtacaattgagatcaaaagcgactccacaaacaagagcttcaaggtcaatggacaccgacttaagccattccttacaaacccttccttatcggacgtagtggtggaagagacttccttactccaccctactcttcctccaccatgacttagggagtttttcttttcctatctccttctttactattattacatttggccgattctatttgatggtttaattgtgctatattgaggataatgtgttgtttaagtatgggggggggggagatatatttacaattactattcacactatcaattcccttcaccttt

SEQ ID NO: 111963 - DNA, 419 bp, Glycine max
ctcaagctgctacccatggaagctcctaatatctcccacactgtttattgtgggccattcttggatggcctcgattttctcacagtccacttgaaccccatttgtaccaactataaaccctaagaaaactatattatctacacaaaaggtacattgctctatatttgcatagagggtatttttcctaaggactgaaagaacttgcctgagatgtcctacacgatcatctatgctcctactatacactaaaatgtcattaaaataaaaaactacaaatctacctatgaaaacccttaagacatgatgcataagcctcacaaaggtgctcggtgcattaatgagccccaaaagcatcactacaaattcatacataccaaacttggtcttgaaagcaattatacattcatcaccctttttca

SEQ ID NO: 111964 - DNA, 396 bp, Glycine max
cggcttgagattgaacaacggaagctctcgagaaattttttggttataacttatgacaccgagagggcgattcaggcgcataatatatcaagacgctcgaaattgcacaacggaagctctccagaaattcaaattgtcataacttttcaaacggaagtcagattaaggggcataataaatcgagaagcttgaaattgaacaacgtaagctctcaagaaattcaaatggtcgtaacttgtcacacggaagtccgattctgacgcataatataccgagacgctcgaaattgaacaacggaagctgtcgagaaattcaaatggtcataactaatcacacggaagtccaattcatgcgcataatatatcgagacgctcgaaattgaacaacgaatgctct

SEQ ID NO: 111965 - DNA, 390 bp, Glycine max
ctgatgccagaaactacagctgttattatatagaaccttgtgattaatattaagggagagacccttctaaactctagagttacctaacactggcaccagggcattttgcaaaggacactgtctcactatacggccccccattaaagaagaattaaagatcctttatgatgccctgatgcatctctacgactctacctatcaacggcctgaaacaaacagtgaattggatatatgggtcccttcaactaggagccttctcattgttgccttatccagacgggcccgactaaccgcgtctggaatttcgcggtcatggactttcaacacctgattcgtgtcgcttgatgtttaaggacctgagtaaagaattttatgacccttcgatccata

SEQ ID NO: 111966 - DNA, 59 bp, Glycine max
  unsure (1)..(59): unsure at all n locations
ctgcgattcatgctatgcgcgcgtggcggacctctttgtgttttatgcattnttatgcc

SEQ ID NO: 111967 - DNA, 406 bp, Glycine max
  unsure (1)..(406): unsure at all n locations
tagtaaagctaggcactaacaatctccccctttggtttattttgtctaaaacatacttagacacttcctgagcaggtacgagcagttatgcaagtgggatcaacaactttcattatcagagtaatcaagcacagcggaaattctgcaagttgcaagtcgtttccaggatgtcaagacatctcacatgacatcagctttctgcttctgctccccctgtctccatgctcttactccagcatcttctatcagctactaatcttttccaggatgtcaagacatctcatgtgacatcagctttcccttgtctccatgctcttactgcagcatcttctatcagctactagtagcttacatcagncatcatcagcagcagcagtcttcccctcaaaatcatgtacataccact

SEQ ID NO: 111968 - DNA, 397 bp, Glycine max
taacaaaaggcatgcgaagtgggtggaattcctatatcaattcccttatgttatcaaacataaaaagggaaaaggtaatattgtagctgatgctctttctcggcgtcatgcattactttctatgcttgaaacaaaattgattggtcttgaatgtttgaaaagcatgtatgaaaatgatgaaacttttggagaaatttttaaaaattgtgaaaaattttcagaaaatggtttctttagacatgaaggctttcttttcaaagaaaacaaattgtgtgtgcctaaatgttctactagaaatttgcttgtttgtgaagcacatgaaggaggtttaatggggcattttggggtccaaaagactctagaaacattacaagaacatttttattggcctcatatg

SEQ ID NO: 111969 - DNA, 401 bp, Glycine max
  unsure (1)..(401): unsure at all n locations
tgtggaaactaaataaacatatttaacaaagaggacttaatttaccctgtttgaagcatgaataaattgaagtcaggcggattgggcaggacactcatgcatttactgtcaaagataatatttatgttaggcattaaccaaggtgattctctttcacttttttctattgaaagattttcagattgcatgttggctaaggggaatacaggtaattggattccgatatctatgggcagaaatggaccaaagatctctttttatttttttgctgatgctaaaatattggtgccagaggctttgaccatcatgtgaatgtgattaaggatacgctntcaacatctggacaaaaagttaataatattaaatccaaactttatttctttttcttgaaaatgtggatc

SEQ ID NO: 111970 - DNA, 308 bp, Glycine max
cctttcaccaacaaaggtttgaagaccatcgaacctatccaaaatctctgaaggagagatgaatcttctccatcatgtgcttcttcaccaacatgtcgagcactctttttcacccaagagccatcatgctctttttgataaccaaaggatgcaatgactgaagcgcctattagaaaggatctcttgattggaacatagggttcagaatcaagaacgatgttaaagtgttgaacgaacagggtgactacgtgtggatatggcaatggagcattcaatcgcaatgccttatgcatgcgatatctaacaag

SEQ ID NO: 111971 - DNA, 360 bp, Glycine max
tgtcaatccttaccctcggaagcaaaatacaaaaggagaaggaaaatttccaatcaaagatgaagcttaaaaaaaaggagagaaggaaaattttcaatctaaggaaaaaaaagaggacaggaaattcccaatcaaagagtgggagaaagaaaaaagagaaggagaagaaggaaagaaagctcctgatcaaggatcgatagaaaacagaagaaatatgcagagaggtctctggaccagacaatatctgaacaaattcggaattgtcaccaaatgaacaaaagaaagaaaaggaaaccataacctataagtggtcttctccctttgattaccaaccaaaatcctgtgcgtcggtgacttgtt

SEQ ID NO: 111972 - DNA, 348 bp, Glycine max
gtgccatgttctcaaaatgtgcaaaatcagaatgctcagaatcaaaatgctcaaaattataatgctcaagatcaggatgttcaaaatcacccataacagaatgcacagattcaccagttatggaatgctcacaatgatcaaaaggtataaaatgatgcctaactaatctatgaaatgtcctatctatctcaggatcaaagggttgtaagtcagatggattgcctctagtcatacactacattcagcatgcacacagctagttgccttgtcatgtaaataaaggtgtaggtttgaactacaactaccctcaaatgatatccaaatgacttgataatttgtgagcaacct

SEQ ID NO: 111973 - DNA, 363 bp, Glycine max
  unsure (1)..(363): unsure at all n locations
tgtaaattgcttatagttgttgcacattttttcttaggtctgtgnggcggnccgcggaggagcataaaccacataatctggcgataggtgcaaatttttgattcatggccagctgggttaccaagttaacccaggcatctagattaccttcaagcttcttagtggaacccgatgaaatactggctactttatgcacccctctaatgacaatagcatcacctctggcactaaaatgccgggaggttgaaaccatcttcttaattaaatttctggcttcagcaagggtcatgtctctcaaggcgtccccactggcagcatttatcatacttctctccatggtgcggaagcctttataaaaaaatt

SEQ ID NO: 111974 - DNA, 413 bp, Glycine max
  unsure (1)..(413): unsure at all n locations
gcttcaagaaaaagatggcctcagcaaataccttatttttatattggaattctatcaatagacctccaatctttaatggagagggttaccactactggaaaacccgaatgcaaatttttatcgaggcaattgatctaaatatctgggaagccattgaaatagggccttatatacccaccacagtagaaagagtttcaatagatggtagttcatcaagtgaaagcataaccatagaaaaacctanagatagatggtctgaagaggatagaaaacgagtacaatacaacctaaaagccaaaaacataataacatctgccctacgaatggatgaatatttcagagtttcaaattgcaagagtgctaaggaaatgtgggacactcttcgattaacacatgaaggaactacagatgtt

SEQ ID NO: 111975 - DNA, 387 bp, Glycine max
tagaggccacaaaatattggtaatttcagcaactctttcttgccaaaccaaatggccttgccttttaattttgtttgagttcggtaggaatattgcaagcaatttttttttttttttttgaatatttaacgcattggaacttgaattcaagactactttaatttaggcattggattatacaggatcccccagagaggccaaagggaaaccacaccaatggtgaagctgaaagggtaattgagagctttcagctgtggagtgattctggtgaagcatgcccagaaggaactgttccaatcagaagaactacagaggaggatattctcagagcaagctctatccaaagatttggaagataaccaagacctgtacggaaagactttactg

SEQ ID NO: 111976 - DNA, 412 bp, Glycine max
  unsure (1)..(412): unsure at all n locations
ttattccattaagntcaagagtgacttccctttctctttaatggatatttccgcccgcggcggggttcacgttttcaccttccttctcactctctaatcgctgcaaccctaacaattggtccgacctgctggcgccgccattgccatggccgatcacagaactaggaagacgaccacctatcatctcgaagatgccatcgcacgtcttacgaatagccaggcctccatcaatgaacgttacgccgacctatctagcaaggtcgattccatcctggagcacctccgcctgcatgacttcggccaagccgccaccactgctacagctaaccagcaccatcagcgtaacgcccgttaacttgatatacctcgctttgatggtggtgaaccgctcgggtggatctttaagatcact

SEQ ID NO: 111977 - DNA, 405 bp, Glycine max
  unsure (1)..(405): unsure at all n locations
taacaaaaggcatgcgaagtgggtggaatttctattcaattcccttatgttatcaaacataaaaagggaaaaggtaatattgtagctgatgctctttctcggcgtcatgcattactttctatgcttgaaacaaaattgattggtcttgaatgtttgaaaagcatgtatgaaaatgatgaaacttttggagaaatttttaaaaattgtgaaaaattttcagaaaatggtttctttagacatgaaggctttcttttcaaagaaaacaaattgtgtgtgcctaaatgttctactagaaatatgcttgtttgtgaagcacatgaaggaggtttaatggggcatnttggggtccaaaagactctagaaacattacaagaacatttttattggcctcatatgaaaaaggat

SEQ ID NO: 111978 - DNA, 359 bp, Glycine max
  unsure (1)..(359): unsure at all n locations
aataatcatcaatcatctttgaatcatctatctttcaatcttttttcaacatcatctctcacacatctttcaatcaatctgtcaatgtctntctacagaattttctgattcatttctcttcatcattctaaaagttttttatcaacactttctcttccaagaaaagttctttgctcaaaaacttgtgctattcatctttttcattctcttctccctttgccaaaagaacaaaggactaaccgcctgaattcttttgtgtctctcttctcccttacaaaagattcaaaggactaaccgtctgagaattctcttgattcttccattccccttaaacaaaagatttcaaaggactaactgcc

SEQ ID NO: 111979 - DNA, 290 bp, Glycine max
ctattgcaccttttactctctcaatacatcctccccaaatttttaggttttcatattcctaaaatattcccttttcactcacattccctctccgaaatgccttgcatcctctccactttcctctaaacatttccctcacttgttgcataactcctcatcctttctctctatataatgttacccatttccctttgccgacaactgtttttcccattttactaggaagcttcacatatatgtttgcatctcacaaatttgtgttacaaataatggctcatgtgacagacatg

SEQ ID NO: 111980 - DNA, 177 bp, Glycine max
tcaggacctaaaaactcagcttggttaacgtgatgtggagaaggtactttctctcgcggcgcaaatgcgagaccggtggggtgcttcaccgtagcggaatagagacagccgggagcggagcattctgcacaggacccgcacctatcgcgagaaagagactgaaggaacacctcatca

SEQ ID NO: 111981 - DNA, 313 bp, Glycine max
tctgtccagttagctgattatagtcatattaattacatatataactgataaatcaccgggtgcagagtggatagcattttgcaaagacaataatatccagctggtgtggtaatttaagcacacgttgtcaatattatatgttcctgcgccttgaaataaaatgatgataaagatgcggcaagtgaatttgccgcaattgctacctttttagcaaatccgaggcacctaatggaacaatatgatcaaattggcgcaagactggaccgcttgcctttggcccggtttcattatcgcatatttggtattataagct

SEQ ID NO: 111982 - DNA, 179 bp, Glycine max
ctctatcaagctatatggggtgaacttttttcttggctatcggaggcgcctctttactcatctctatgcccccgctgcaaatcaggaggaaaaccccattaatggacctcattgaagctaaacatacagctcataaatactcagagcaaacttcatcatcctccccttacttttgcata

SEQ ID NO: 111983 - DNA, 392 bp, Glycine max
tatacttgggataatttcatttcaacatgtttcatttattgtaaactttaaactttctgtttttttttttaattccaatcatcatctctgatccatgtaattcccaagaaattgaagctaagagttccttcctctgccatttttaggatgagaaaagattgagggaggctcttgattttgcaaatgcttgtgctgctttcacagtgacaggtagaggagccataccttctctccccacaaaggatgctgttctcagaattatgttctcatactaaagttcaaagaggagtagcacatttggcaatgtgcttcctaaattggttaactgtgaggtgttgaattcaattcatgttagttgaggcctgtggcatgtcctaattttgaaataggat

SEQ ID NO: 111984 - DNA, 403 bp, Glycine max
tgtatagttccccaatttatggttattttgtagtgatttttgtaaataaatcttgttttatggttaatgttgtctctacaacattttcattggatttaatgatgaaatctgttcatttccaggtgaaaaaagaggctaagttttgaattgcaaaatgtagcagttgggctaagcgcatatccaccgctaagcgcagcttcaacgcgcttagcggtaaggagaatctggcagagcatcagcatcaaagttgcacgctaagcgtgagatcagtgtgttaagcacagcaggtgccttctgccaggctaagctcgagactggcgctaaacccaatttcacttacttgccctaagtgcgagggtggtgctaagcgcactgtcgtgatttcagagcctatttaaagcct

SEQ ID NO: 111985 - DNA, 382 bp, Glycine max
gacccctatatcgcggtctttcttttcagttacttggtgccagcgttaagtggaattaaacaaggaatatactgaaagtgcataaaaaagttaaataatgcttaaaataggcaatcctagcttaaatcttaccctttccttgatgtcacccaaattcggcaagtacaacttatagaattcctctatgaatgcaaccacaaacgtaaataaagtttagaaaccggcaagaataagacaattagaatatgtgtcatttgtataaatttaagggacaacaagatacatatactatattatagtattttcacttttaaaggactaaagacgaattattgatcataattgatatattagcatttgtatatcactaactcgctcttac

SEQ ID NO: 111986 - DNA, 408 bp, Glycine max
  unsure (1)..(408): unsure at all n locations
cttaaatactcagcctcgagccaaaacctgacctcaccataaacccttgactctttgtgagaatgtcaatccttaccctcggaagcaaaaaacaaaaggagaaagaaaatntccaatcaaagaggaagcaaaaaaaaaaggagagaacgaaaatttccaatcaaaggataaaagagaggaaaggaaattcccaatcaaagagtgggagaaagaaaaaagagaatgagaacaacgaaagaaagctcctgatcaaggatcgatagaaaacagaagaaatatgcagagaggtctctggaccagacaatatctgaacaaattccgaattgtcaccaaatgaacaaaagaaagaaaaggaaaccataacctaaaagtggtcttctccctttgattaccaaccaaaatcctgtg

SEQ ID NO: 111987 - DNA, 376 bp, Glycine max
cctgagatcaaactctgctattggtaatcgactacttgtatttggtgatcgattaccacacagtaaaaactctagtgacttagaaaatcttgagacaaactcttttgaaaaataaaactgcgctatgtatgcttttttgaaaatcttttcaatacttcccttgtgaagtcttcttgatttcttttcttgaatcttgaattcatcttctcttgaatcttgaaatcaaacttctcttgattcttgaatcttgtagactcaatcttgaaatcattctcttgggctttttgtcattatgtctgttatcatcaaaactacttgtatcaccttgattcatcactatgaagcttgcttctacagttaaaattggttcctgtat

SEQ ID NO: 111988 - DNA, 385 bp, Glycine max
tatccggtgttttgatatgaagaaagcatgtcttgctgcgaactgtggagaatcatatggcatatacaattcaaatggtgattatagttataaccaacatctattagtaacattttgttttgcctttgaaaaattgaattatagctacaactacttatacttatgttcatgtgtttccaatttaatttaaagtgcgtttggataaagaattttaactaaggaaagtaatttattagaaaatttaaatttctttaatctaaaattcattgtttggatgtttctttatgaagaatataaaatttcgaaattttaaacaacctaaattgtgaaattttaattgccctctaaaaggtaagaaattggaattctttttttgtataaaaaa

SEQ ID NO: 111989 - DNA, 305 bp, Glycine max
tttaataagaaacaagtcagtatgttcggcgcttttctgtgaacggagctctccattcgagcggccttgacatgtggcatacctccaacaaatggatcatgacgataacgaactgacactgtttgagagtgcaactggggagagttccagggactttctcaacaaaaccactgaatctgacacaccgggtatgtttcaagatgccatggctgcagattctaaggtgttgatacttgcactcgtggaatgcaaacatgtgttccatggattgggttgcctaatttattcgggtggtggaataggtg

SEQ ID NO: 111990 - DNA, 358 bp, Glycine max
  unsure (1)..(358): unsure at all n locations
ctgatntgttgcaggggtaccatcaaataagaattgttcttgatgagatacataagaccgcattcaggacttaccacggccattacgagtataaagtaatgtcgtttggactatgcaatgcgccctcttcgttccaagccaccatgaacatgctcttcagaccatatctctggcagttcattatcatcttcttcgatgatattttgatctatagcccctcctttgaggctcacttacaccatttacaaacagctttttaggtgttgttggacaataaatttgctttaaaattaaccaaatgtttctttgcgcagccacaggtggaataccttggccacatgtgtttctgacagggggt

SEQ ID NO: 111991 - DNA, 405 bp, Glycine max
tgaaggtgtgtaactgatgagtcattattctctcctatttcttaaccctttgtgtcaccattttaattactgattagccttaattgtcaaattaattatgcagttttatcatttgggcctacttgactaattttgtgtttttaatttaatgtcacgagaattataagcaattgggcttgaatccggaattgggcttggacttgaagagagcatacaattgtattttaccaaatcttttcttatccagattttatttcatctagattttatttcgtccagattttatttcatccaatcttatcttatcttgtccagattttattttatttcgtttatgggcttggacttaaaacaaatttgtaagctttagggttgagaacctatataacaagcaccagggttttt

SEQ ID NO: 111992 - DNA, 415 bp, Glycine max
  unsure (1)..(415): unsure at all n locations
gcttctggaaacgaaacgttacgtaccgcagaacgtattcttattcgggtggagaaaaccaaactgaaagccgcaaacggcgaagatattgccctctcactttccatcggtgccgccatgtttaatggtcatcctgactatgagcgcctcattcaaatagccgatgaagctctgtatatcgccaaaagacgaggtagaaaccgcgttgaactctggaaagccagtctttagatgcgccaggatgcagaggtaatcatgaatctaaccgatgcggataatgccgccgatggcatttttttccccgcccttgagcaaaatatgatgggtgcggtgtgtatttacgaaaatgatgaagcgatgtttttctaccccgccgcanagaagctctggggatactaacgtgaagaagtcattg

SEQ ID NO: 111993 - DNA, 404 bp, Glycine max
tattgatccaggatcttacagatgactcgttggcttgcttttgtacttaactatatctagactagatatatgttactgtgtgcataaattaagtcaatttgtctccaacccctatacaaaccacatgcatgctgcaaacatgttactttggtaccttaagcacactgttggtcaaggtactctttttagagccaactcagacacaaaattacatgcatatgtggatgcagattggggatcatgtcctgaaattagaatatcaaccactagcttctatatttttttatgaaattccttggtttcctggaaagacaaaagatagtaaacaggtcctcaacaaaagcagaatacagggccttggcttgtctctagtgaaattacatggattcaaaatttgcttactg

SEQ ID NO: 111994 - DNA, 400 bp, Glycine max
tcgccttactttgataaatgggtagtccgaatatttatatgtgaaaccttgatatcttgcatcattgtatcctataagtagtgtgtcacattttgaattaaaatgggtagaatgcaagtatatcaatcagaggaacaatattataggtccaattccaactgtgatctaatcaaaagactaaaactctaaaagaggcagaatagactaaaagaacgaggaagaggttcctgaagtaaagaaatcaaataagcacgtcgatatcttggataaattgctctttactacctagcctcttgtagttgcactcttttttaaacaactccactcagcattttttttgtaactcaatcaaccaatccctcaactttggtttaagacaaaaagataacttttcaatcaa

SEQ ID NO: 111995 - DNA, 407 bp, Glycine max
  unsure (1)..(407): unsure at all n locations
ccgcctctattctcaagaatcctggtaatcgaggtcctggatcttattaaccattntcatcgaatctctcggttatgattccaacaaagttggatgaaatatttttaatatctgtttgaatcttaaaagtatggaaacttatttgaaaattctcaaaaattcataaaccagctcacttagtttaataaatggttagatccttaatctattttagattttaaaaatagttttatgtatttttaatattcgtaataactttcaataataatttggatttttcatttttttaaaaaagaataatctgtaatttaaaggaaaccctattcctgaaactcaattaaaaacgatttataagcttaacaactcaatcataagtgttttcttttttttattcggatcttaaatat

SEQ ID NO: 111996 - DNA, 367 bp, Glycine max
ggaaacctcccgcttttattggtgaccaacaacgggacctggagatatgtcgcgcgggtcacgagaccttggggacgtcaggtggggtgctattgcccaaaaccaagcttgaccaatcccgacccaacccgggcatagtcggccagtgagaacctgtgatgtacctaaacaggcgagctcctggcagtcaacagataaaaggaaaacaagaccacaaagcaaggaggcttgtggcggctggccagctgcgaattttgtgtaatatgtggattgtggcctctggtaatcgattaccaaacgtgagtaatcgattacaaggcttaaaattgacgacaggaggcttagatggtctctggtaaccgaacac

SEQ ID NO: 111997 - DNA, 428 bp, Glycine max
acactataaatactccacctcctcgggccattcctgcgaaagcaaacatttggattgttatgtttaccagtgggacgttactcttaaagcaaaaatggcatataacctcctcccataaatacaaacatcaatgtgaatttagagcaagcttatgcgcatatttccttacaaatgtactcttgcacaagacattctattaaccgaaaaaacgcacccatatacaatcaaggcagctccgttacctaaataatttacacgtatttccaaggtgtatttgttacttacatcacacacatctccttggctaaattcacatacatgcatacccaaagcattttggggcaccaaaaattgcacatgtacacctcttggtatttctaatacctatacatacacaaactttatgatgaatcttgactatctacaca

SEQ ID NO: 111998 - DNA, 387 bp, Glycine max
tctatagaaggttcgttcctaatttctctacaattgcattttctctcaatgagctggtgaagaagaatgtggcatttacctggggtgaaaaacaagagcaagcctttgctttgctcaaagaaaagcttactaaggcacctgttctagctcttcctgacttttctaaaacttttgagctagaatgtgatgcctctggagtgggagttggagctgtattgttacaatgtgggcaccctattgcttattttagggaaaaacttcatagtgccaccctcaactaccccacctatgataaagagctttatgccttaataaaagccctccaaacttgggaacattaccttggttccaaggaaattggcattcatagtgatcattaatcactta

SEQ ID NO: 111999 - DNA, 293 bp, Glycine max
  unsure (1)..(293): unsure at all n locations
acactatanaatccccatgcttgtctcagagatgatggtaataggtgagacgttctttttgctcatatccctacactaggccgcggtcttctttgccccgaatcaggatcatccgaagaggagcttgacttgtgggtactgccaattatcacctatggtagatgcttgtgacatgattctaggatgtgctcgatgggggaagaaaacgtacctttctacatggtcccatcacaccctacctactgtttccactatacttcaaatcttggctccctaattggaccctatgaagg

SEQ ID NO: 112000 - DNA, 408 bp, Glycine max
ccttggctcgaggtacttacccgttgaagatcgaagattgatgaataacgactgaagaacgtccaataacggttgacacctttgcgaaattcctcacggaaaacgttacggaaacgtttcggaaaggcctctgcttacgttttcttcactgaaacaatattttcaagcaaattcgaaagagagagaactgcctaacgggctggaccccttccttcttcatttcctcccctatttatagcaaaatacgggaggtggttgccgcccagctcgcccaggcgagctcagctcgcccaggcgagcagggttgcttcctccagaagcaaccgccttctggaggaatcttctggagggcccaagtgggcctgggtgctatttgcacccacatgtttactaagtacacccccctct

SEQ ID NO: 112001 - DNA, 408 bp, Glycine max
  unsure (1)..(408): unsure at all n locations
ntgagcaaattcaaacgaaagtaacttttgacactgttgtccgatcgagtcatttaataatttgagacactcaattgaaaacagaagctctgagcaaattcaaacgacaataacttttgactcggatgtccaattgagtccattaataattcaagatgctcgaaattgaacacagaagctctgaaaaaattcaaatgataataaatttttacttgaaagtccgactgaatcctgtagtatatcgagactcacaaaattgaaaatagaaactctgaggaaattcaaacgacaataagtttttcctaagatgttcgattaagtctcgttatatatcgagatgctcgaaattgaatatagaagctttgagcaaattcaaatgacaataagtattgactcggattttcgatt

SEQ ID NO: 112002 - DNA, 407 bp, Glycine max
  unsure (1)..(407): unsure at all n locations
ntttggcacanagaagaagaagaagttaaagagattctttgcttgtaaaggattgtataaaattgattggaaaagtgtattgaaaagcaaatcaaagccttgcttttatagactcttcatgtctggccaagaggacaattttgaagagttataacttttagaaaaacttaacaatttgaaaaagtcaaaaaccttttgaagagttacatcttttgatttattcaaaaacaatcactggtaatcgattaccaaatcagtgtaatcgattacacaaggcttttatgtgaaaggatgtgactcttcacatttgaatttgaatttcaacgttcaaaggcactggtaatcgattaccaaaacattgtaatcaattacaactttttgaaattaattggaacgttgtcaattca

SEQ ID NO: 112003 - DNA, 404 bp, Glycine max
  unsure (1)..(404): unsure at all n locations
tttggctgagctgggatcaaagtatgttcttctggatcatacaatggcatgggcgccccattctataatctacgacagatgcagcgatctccataaaaaaaccttctaatactaggngacattcaacattccaactatcacaaccatatagtataattggttcatgtcaaacttataaaaagaattacctgaacaaatgaagcaatatacccatcaaagtagtgcaactgcatacaattttcatgattgctttcactatcacaactaaagtaaccattaactaattccatggcattagagatcttgattctataaatgtgaggaacatagatacatttgatctttataagtgcacattctaactagaaacaatggatttttctttttcggagcatggaaataaa

SEQ ID NO: 112004 - DNA, 403 bp, Glycine max
  unsure (1)..(403): unsure at all n locations
ttgagccaaaatcctgactcaccatataccttgttcttgtgtgagaangtcgatccttaccctcggtagcgaatataaagagaacgaatatttccaatcaaatgataaaaggaaagattgaagattttcaatcaaatagaaaggaaaaaaaggaaagactgaatatttccaatctaacagaaagcaaaaaaagaaaagaaggaaaattcccaatcaaagagtgggagaaagcttaaacaaaagaaagaaaattcccattcaaagaatgggagaaagtaaaaaaggaagaataataaggaaagaaagctcctgatcacggatcgaatgaaaacagaagaaatgtgctgaaaggtctttggaccggacaatatctgaacaatacagaattgtcacccaaagaaca

SEQ ID NO: 112005 - DNA, 412 bp, Glycine max
  unsure (1)..(412): unsure at all n locations
gaaactcaagcttagtttaagttaatctaaacctaggagggctgtcttattttatccttgtccaacaagagggatctgangatgaancttggattgattcaatctaactagggatcgaggtttagtaatttaggctacaacatagaacacaaaagcatgattgattagagaaacatctttatatacatcaactggtttgctagaaagacccaacacttttagccactgctgtaaattatactcacttgcattattactatttttagcctatacttattttaattctgttccaaatcatgaattatcaatgtttctttcaacaatgccttatttctgaatttaaccctgtctaagactacttccttgagtagatactcatatctttccttttaattttaaaacttgacgatct

SEQ ID NO: 112006 - DNA, 310 bp, Glycine max
cgacacggcgttttttttagcctgatcaagcggttgaacacgctcgtacctactgtctgagctgagcaggctcatactatatgatactggaggttaccatgagctcaagatggacgccattagatcttttaacgccgatagatcagtctttatctgtctctgcacaccctcttgattattcattcttctggatcgagtgatatgagcgcgccttggtcgaatgttaactctcaccggaattcattaagaaatgaactacggcgtagatgccaccaaacatgtatacgcatatggatgatccgaacacttg

SEQ ID NO: 112007 - DNA, 368 bp, Glycine max
atccccttctattttggggggggggaggtactctgggggctcatttccttgaagagcatggacaacccaaatcagctggtattccttcactattattaatattacaacgaatgttaactacgatcttcttaataaagaagtcagtgctttatgtgaaattatattccccctttggattaaatgataccaaataaccttgaagtcatggttctgattgcttcttaacatataggactgccttaaacgatgcatggatcttatcaagaaaggagcctctgtttttttctttccagagggaacacacagcaaagatggaagactaggcacattcaaggtgagtctgtgtcaaaaaatttgaatcattatca

SEQ ID NO: 112008 - DNA, 326 bp, Glycine max
ttacagagtaatctggctttgtgtgagtggaatttgcgcaacggtcactctgagtacacatatcccaaggaagattagcacacttaatctagcaatttatcacactaatctagaaaattaagataagatttaccaattttagcaaaagtagaattttcatttttggcaaaactctattttatcctttttaaggaaaatttcaaaagcgaagcataccacattcggcagtgatgtacacatttttccatggctaagtaagggtaactcatgagtcaaaattgaatgattaaaaataacccacacaataaaccaatggaccatgccct

SEQ ID NO: 112009 - DNA, 344 bp, Glycine max
  unsure (1)..(344): unsure at all n locations
cctntcaactcggaggtacccatgatgctacccctgtttttccttccangccagggtcagacgcaaccattactacaatatattgtggcattgctcataacacaaaagactattgcctcctatgagaccagatagaagaacttattcaggctgggtacttaccctagttcgttaagtggctggacaaccaccacagtggagaaagacccatagaacaccaagaggagcaacataagaaccacgaagcatacataagaagagcggaagaccgatggtgataaaaacaaccacaacaacgacatgaacgacaacctccacaagaacacgaacttgccgagaacatc

SEQ ID NO: 112010 - DNA, 404 bp, Glycine max
tgttcaacgaccggcaagtgcaccgatcatgcatttttataaaacgataagcaaataccgagtatcgaactctcggggaacttgttttacttggtaaagctgtggtttagtaaatgagtgtcttgggatgaaagtttggtgtgtggtatggacaaatatgtaaactaaactattcaaaagcaaatcatgtgagtagtggtgtgtgatgacagatagacaacatgttgatctttctactgggtgactaatgttattaaggatgttctctacctaacaatgtttacatgttctatgttgtctcctggactactaaaccccgatgtctcatgcatgtttagcctaatcctaatcaagcgtcatcctcagatgtctcttgttagactaaacttaaccagaaccgcatt

SEQ ID NO: 112011 - DNA, 273 bp, Glycine max
ggacacaaaaactcagctgtaagccgcactagctgacaagacgttcttggttatgagctcggaaactcccaaggcaacactgggtagggaactttggacaataaccaaagagcgggcattctaataatgaacacgcgtgccatgctttgctacatgtcacttatggagcgacatgcattggagtcgtcatgtcttgctcaagcataacatgtcacttgtcaagaggcacgcactagaaacatggaggcgtgaatctgcatacgagccactcat

SEQ ID NO: 112012 - DNA, 408 bp, Glycine max
cttgtcgcccatggacgtcatgatgtgctgaccttttctattgagcgaccaaagcaccttggttgtgtccatgctactagagtcagtgtcatgatcaaaaactactttaagctatcttcatgggctctcacacctcttcgtccatggctactgaagacctaaagcagctgacacaaaagatcagagaccagctagaggagtcaatcacacaaaaaagtgactcaacaattaacgatgtccttcatccagatgcagtatgagatgcaatcacagtgactcgcactgcctccttaagctgaggttggtccttctgctgctcgtgtcagcataaaggaaagtggtgtcaatccctcagggttggtcccgaatatgggagacttgtacaaatgtgggttgtatgttgatgac

SEQ ID NO: 112013 - DNA, 327 bp, Glycine max
agtccttcaagtggatacttgcgcttgctcttggacatgtcctcatcatttttagtaacgtctagtattttatatttattcccttttagaccttaaatatttattatatttcctttttaatttctttccatttaagggaaaattttattattgtcatcctttatgtaataaaacatttttcaactacttcagcatatgattatatcaaatattatacgtcaatatgataaggttttaacgtttagtgtacaactatcctttctttagccttcagattatttatgcgaacatgacctttattggttctatattccattttagggtcat

SEQ ID NO: 112014 - DNA, 394 bp, Glycine max
ctcaatatattatgggcctgaatcagacatccgaatcataagttatggctgattgactttgccatgtgcttcaatgtttaattatgatcatctcgatatattatgcgcctgaatcgggcatctgagtgaaaagtgatgtcatatgagatagccgagagctctcttgttctatttccagcgtctcgacatattattggcctgaatcggacatccgagtcaaaagctatggcagcttaaagtttccatgcgctctcatgatgaattttgagcagctggatatattatgcacctgaatcggacatctgagtgagaagttatgccgtatgagatagccgacagatttcgcgtgtcattacctagccactcgatgttttaatggcctgaatcggaaatg

SEQ ID NO: 112015 - DNA, 407 bp, Glycine max
  unsure (1)..(407): unsure at all n locations
ntccttggcctnttaagtattttaaggactcttttttatcttggatgacaaactctttgggtaataagtaatgctgccaagtttgtaaagctctaaccaaagcatacaattccttatcataagttgaatagttaagggcagcggctcctaacttttcactaaaataagctatcggatgtccctcttgcaacaaaatagccccaatacccacatttgacgcatcacactcaatttcaaatgatttttcaaaattaggcatagcaagaatgggtgcattacttaacctatgtttgaaggcagcaaaggcctcttcttgtttcttaccccatttgaaacccacattcttcttaacaacttcagttagaggtgcagcccatgtactaaaatccttaacaaatcttctatac

SEQ ID NO: 112016 - DNA, 334 bp, Glycine max
agtggaattatgcaggaatatactgaaagtgcataaaaaagttaaataatgcttataatatgcaatcctatcttaaatcttaccctttccttgatgtcacccaaattcggcaagtacaacttatagaattcctctatgaatgcaaccacaaacgtaaataaagtttagaaaccggcaagaataagacaattagaatatgtgtcatttgtataaatttaagggacaacaagatacatatactatattatagtattttcacttttaaaggactaaagacgaattattgatcataatcgatatattagcatttgcatatcactaactcgctctacct

SEQ ID NO: 112017 - DNA, 357 bp, Glycine max
atataaacaaaccggaggctaaggagattggcgaccagtttcttcttgagcggaagcatactatacaagataaactatgacatggccttgctccgatgcgtgaacgctaaagaagctgagaacatgctgggggaagtccatgacggctctttcggtacgcatgctaacaggcacgccatggctaggaagatcttaaaggcgggctacttttggctcaccatggagagcaattgttgtctccatgtgaggaagtgtcacaaatgccaaaccgttgcggacaatgtcaacgcttcacccttgcctcttaatgttttggccgcaccatggccattttacatgtggggaatagatgtgatc

SEQ ID NO: 112018 - DNA, 412 bp, Glycine max
  unsure (1)..(412): unsure at all n locations
actcagctcttattcaagcatctgactagtttacattgttgtcttgagcctacacagcggagacatttgtttntttgaatgacctgacatgcgacacatgaaatattgattcggtctactcacatctcggatatccatttcaatgggtatacaacaagagacatgatgacacttagaatatcttttcttctcttactcaatgcaaattcttgacttatgacgccggaaccaatatactctgttgtgtaattctctaaacgatcattagaatacgttggagacactttccaatgtatacataggatgtatgtatgccatatactcatggtgagcatgcttgcttgcagtaacgctcatagaacaatacatgcgcacttttacgaatcgttcacactcacaccacttttgatcc

SEQ ID NO: 112019 - DNA, 354 bp, Glycine max
ttcaattatgatattaattgttttaaattatatataaaaacctaaaaagcaagaaaaagagaaaatacaaaatcaatatctctctctaaatttttccttactttatttcatcaatttatattaattagaaaaatgctcgatttatagggttcacgctcaacacaatagcatatcaatttcccaacaattggtctgtcaaacatatataattcactgtaataattataaggataaaatgaaaattgcaaaaacacctcaactcattccaattgatatctctaaagatccctatacatgttctcactaatccccaattgtgaataactcatcccttatctctgagcggcccacatg

SEQ ID NO: 112020 - DNA, 408 bp, Glycine max
cgggtgaagtaataataacatccctattgtccatgcgtttcttgaaattgtttgagctatatttcctctccaactggtccgagttaacagtcagttgatccggacccaaaatcctgtgttgtttcagatcatctaacataacttccaaaacaccaacttctcgtagaactttcttgtactgttggtcaaaggacaaaagttttacaaagaaagaaagaatcgtctgcttcaatgctgatgttattggttgctgcaacaaacagcaaagtgaaagtagttcttgctcaggaacacaatttacaacagtcacagcatactcaagaattttcaagattatctcttgcaaatgagaaggaaaaccagccatatttaggattaaaagtggaacagttcgtaattgctgacaca

SEQ ID NO: 112021 - DNA, 350 bp, Glycine max
tataacataggccaaactgtgagaacggctggtattgttattcgaatgccacatgtttgacccctgaataataaagcggtacactcatgcgctgaaagtatatatgaagcatcccttgagacatgatgagatcactggaggaactcgtcgatcaatacccaggtatgaagacctatattataactactgcctgatataagccgggagtgtattaattaataaggtgcatatcaagccgtgaaccccctttctaacatgatgacccaaccgcaatgacgtcaatctacaacacccttacgagtatgactgaatagcgaaccatgatccaacctgtagacacctcccacact

SEQ ID NO: 112022 - DNA, 388 bp, Glycine max
tctcccccaattttctataaatagggggagaattgtatttacaaaagggctcagccctttatgcacttctctctctttcgaatttgcttaagaaaattgttttcgtgaagaaaatccaagccgaggcgcttccgtaacgtttccgtgagtgatttctcgaaggttttcgaccgttcttcgacgttcttcattcgttcttcaccgttcttcagtcttcaccgggtaagtacctcataccaagcttttcgattcattctatgtacccgtggtggtccacatttggtttcatgtatttttattctcggtatatttactatttatacccgctattgacgcgcttaagccattttatataagtcatatctcgctttacctagaataatataaa

SEQ ID NO: 112023 - DNA, 398 bp, Glycine max
  unsure (1)..(398): unsure at all n locations
tctcccctantttcgtataaataaggggagaggttttgggaaaaaatgttcagcccttctggtatttcgaggtcacttgaaattagtgaaaaaaattgttttcgtgaagaaaatccaagttgaggcgcttccgtaatgtttccgtgggtgatttcgcaatgattttcaaccgttcttcgacgttctttgtcgttcttcggtcttcaaccggtaagttcccgaaatcgaacttttcaatttattttcgtatcatttactttccgtacccgcttttgacgtgctttattcattttctcgcctaatcaacaaataaaataaatttccactgatcacttggattgtaacatccgtttatttctgttaaatgaaatccgaaccgtcggtcatgccataacccc

SEQ ID NO: 112024 - DNA, 386 bp, Glycine max
tgccgcccagcttgcccaggcgagcaaggttgctttctccagaagcaacagccttctggaggaatcttttggagggcccaagtgggcctggttgctatttgcacccccttttttttactaaatgcacccccttctatttttttggtaattctttttccgtaacgttatgaaactttacgaattttgtaatgatacttattttccttccgcaaggttacgaatccttacggattatgtatttactcttttttagctttcgaaaaagttatggaaacttacggattgcgcaaaaacacctcttttcgacttccgccacattaaggaatttcacggatcgcgcaagcctgcttccttttgatttctgagacgtctcgggacttcattta

SEQ ID NO: 112025 - DNA, 379 bp, Glycine max
  unsure (1)..(379): unsure at all n locations
aatgttgattccaatttattggtactnttttgtacaagcatatttatatgaacagaagatttattggatatagctagtgcagagcataagacatgaaagtacactaccttgcaaggactataagctttaatatatccttgttatcgaatgcctaatatatgtcaatgttgtaataacagaatgggtccgaagtgaagaagtctacaataaatatatagtgcagtatgcaccagttggtgaaacaaatctctggtctatttttcccttaataaatgagccaagaccaatcctaacattaatgaatactattaatcaaaagggcgttcattgaaaattatttctgactcaatgaaaataagtcagagaggaaatatgctga

SEQ ID NO: 112026 - DNA, 406 bp, Glycine max
ttgcgagaatccttcacggaaaccgtaccggaaccttttcttaagcgcctctgcttagatagtcttcacggaaacaaattttccaagcaaattccaaagagggagaagtgcctaaagggctgagatccttttcttcttcattttctcccctatttatagcaaaataggggagatgcttgccgcccagctcgcccaggcgagcagggttgcttcctccagaagcaaccgccttctggaggaatcttctggagggcccaagtgggcctgggtgctatttgcacccccatttttactaaatacaccccctctgctgtttttttttggtgattcttttttcgtaaagttacggaaacttacgaatttcgtaacgatacttgttttctttccgtaatgttacggaaccttg

SEQ ID NO: 112027 - DNA, 312 bp, Glycine max
ctatatacccaatataccaatatggaacccggccctttggtttgcggccagtcttgcgccaatgtgatcatattgttccattacgtgcctcggatttgctaaaaaagaagcaattgcggcaaattcacttgccgcatctttatcatcattttatttcaaggcgcacgaacaaataatattgacaacgtgtgcttaaattaccacaccacctggatattattgtctttgcaaaatgctatccactctgcacccggtgatttatcagttattatgtaattaatatgactaaaatcagctaactggacaaaagct

SEQ ID NO: 112028 - DNA, 322 bp, Glycine max
gttgatgcaacatatggagaggatgatgatttttctatatgatgcgctccatgagaggttggatcaaatggaaaataaagctcataatcaacaagaaaggaggagaagaaggaatgatggtgttcctagacaaaaccgaattgatggtattaaactcaacatttctccattttaaggaaagaatgatccacacgcctactcggagtgggagacgaaaatagagcatgttttctcatgcaacatctatgaggaggaccacaacgtgaagcttgccgccaccgggttttcccactatgctcttgtgtggtggaacaagctacta

SEQ ID NO: 112029 - DNA, 325 bp, Glycine max
caaccctcgaatggggacataccttcgggaacccaccacaagctcttaaaatcaaaacctaaacatgcacatcatatcataaatcaatctagccattgcgaatccattaccagagaggaaatatcatatctttgaaaaaataatagttcttaaaaaaaacttgcaaaatatttcctttagcccaacctgtgcattattaactaacgaactcctcctaatatcctaactaaatacatcgcaccatcttgccattttgaatacttatctgaatagggcacattttcggatcattaaaacttccaacacatatgcttcacaatcttcc

SEQ ID NO: 112030 - DNA, 398 bp, Glycine max
  unsure (1)..(398): unsure at all n locations
gtggaaagtgtagtaattcacctactcgttnaacctatctgctggcttaccgagcttccgcttagcataacactcatgggctaagcgcgacgaagactctggaagaacatgatgctgtcacgatcgctcaacacacctgtttatctcacctagcgcatcactttagttcatccgttaagcgagaaaagcacgtgctaagccaaaactcactaatgtgcgctaagcagtccataattgcgctatgcgcacgagcacaaacaaagccacctatataagctctaaatcagaatttagagagggagtttacgctgggattcaaagctatgcatgtttagagtctctagagagagataggtccaagttgcacagagttgtgacagatttgctgggtgatgatc

SEQ ID NO: 112031 - DNA, 407 bp, Glycine max
taggctaaattaggctaaactttcgtaagctacttgtgctgagtctagtcttacatgagggatcagtagatgaaactcaatttaagttagtctaaatctaagaaggctgtctaaatcgggtctagtcttacatgagggatctgtggacgaagcttggattaattcggcctgacaagggattgaaggtttagtaatttaagctacaacatagaacacaagagcacgattgattagagaaatatatttctatgcatcagcttgtttgttagaaagacccaacttttctacctactattgtcacttttacttactttgcattttataatttttagcataaaagttagtttaaattctgtttgacattatcaatcatacatgttctctcaataatgctccatttctgaact

SEQ ID NO: 112032 - DNA, 404 bp, Glycine max
ccagcacgggctggatgcgtgaaaggcgaatctctttgatcgacgatgaagatcctcaagagcaatcatactgggtacggtcatgccctcctgagttcgagttgggaaactagcaaattatcgaacaacccaaaatttatgcggcaaacataatgtaatttgttagtcccaaccctatagatgggcctatgctttaaggtttctccctgtttgggcttgtcttttgctatcaaatatatacaaatacaacttttcttcatttgttcttgcactttcacccatttctattcacctgcatgattatttgttgtgcaattaaacgatatacattcgataaagaatcctatgaaggtactaatatcgacgacccagacatcgattttgagcggctagtgaaaaacact

SEQ ID NO: 112033 - DNA, 391 bp, Glycine max
tcaagaaaaagatggcctcagaagattccttattttctgaaaggaattctatcaatagacctccaatctttaatggagagggttaccactactggaaaattcgaatgcaaatttttatcgaggcaatagatctaaatatctgggaagtcatagaaataaggccttatatacccaccacagtagaaagagtttcaatagatagtagttcatcaagtgaaagcataaccatagaaaaacctacagatagatggtctgaagaggatataaaatgagtacaatacaacttaaaagtccaaaacattataacatcttccctatgaatggatgaatatttcacggtttcaaattgtaagagtgcctacgaaatgtgggacactcttcatttacacat

SEQ ID NO: 112034 - DNA, 398 bp, Glycine max
tgatagaagctgggcggttaatgccatcgaggtgattaggtcacacgggcccaaacttttgaaggacgtaacgacctgcagaaggtttatcaacaaagccttgcaacttaatgcatccgagtgtactgcatgaaatggaaacatgttcgatggtaagagatctattacaacagatgatagaccaaggccggcctgaggtcatcagtgagggggaagaggaaaaacatgtatatatgcagtcgacagatgaagaaggtcctaaaaagcctaaacctttggtaatacacttcaccagagacacggctccccaaaacctcaacacccctcggcagtgtcgggcggtagacctattccgtttcttacgagaacagtcacgcaattccgtggaggtatgcccc

SEQ ID NO: 112035 - DNA, 407 bp, Glycine max
tagccccagtcccagaagccgacgcttgtgcaacttttgtcatgattcgtatattacccattttgctagctattaatattgaattatagtcttggtccctcatctgccatttctttcatcttctaaatgaatttgatgtgctggacattaaaaaaaacctatctcttacttgatttcaaagtagatcttcaatttaacttataactcactcaactctatcattacccattttctacaaaggtcaggaccaacaagaaacgtatcatgcagcagaagcaccatcctcagactcagacaccttcatagccaagtatccactacacttcacaatatacagaatatgatagtaagacatctgatacaacacctttcacaacaaatgaatttaattacattacttaatccca

SEQ ID NO: 112036 - DNA, 443 bp, Glycine max
  unsure (1)..(443): unsure at all n locations
tctaatcatcccgctntgatgaatgagaaaactggggcaatgaagaagatgtgaatgagggagaaacccttgctatgattgtcattcctacatggtcaaatttcccatcagcccaacaatgtcattactcagccaataacagtccctctcacccaatcatccataagagccatccccaaattaaggcacaatgctttgcctgtttaccacacccccaatgcccaaacaccacctatagcgcatacaaaaaaggaattttgcagcaaaaagcctgtaggattcaccccacattccggtgtcatatgctaactcgcttccatatctacttgataatgcaatggtagccataacccctgccagggttcctcaacctccattnttccgaggatacgactccgacgcagcatgtgcatatcatagaggacgtcctggacattccattg

SEQ ID NO: 112037 - DNA, 203 bp, Glycine max
ttatccatacaaccaatgaacacccacaaaatggaattccaaaggacttttttaggttaaaaggggttaagcttccaaaatttttttaatgggacaatcccttctttgagaaaccatccgcttctccaaaaacttttttcaactccctgtttgaaacttctgcctgcccattgttctaaggtgataagtgatgttactttgtg

SEQ ID NO: 112038 - DNA, 331 bp, Glycine max
  unsure (1)..(331): unsure at all n locations
tgttgtgctattngtgaggtgctcatgaatcatgctgttgtattcccactgacgatcatgcacatgaagttaactacatgggaaaccaacctagaacaaaatttaatgcaagtggattctcaggatttcagcagggccaaaattttaactgtagtttggacagtcgagaactcatcctggtaatcaattcaacaaagaccagggagggccatctaataggctgcaccaacaagggcataatctctactagaggacaacaaagctggaagagactctcgctctatttatgtaggtttcaatatcaaatcacaaaagccctgagtgcggcact

SEQ ID NO: 112039 - DNA, 173 bp, Glycine max
cttttcccttttctttttttttaatctaccactgccctggggaaaaccctaatacctattcttagaatttgaactttgaatgttctggaatatgagtgggggttttgtttcattggataacagtttttgttggctatgctttattaagtattttgggccatacttgaagtaca

SEQ ID NO: 112040 - DNA, 379 bp, Glycine max
  unsure (1)..(379): unsure at all n locations
caagaatcaagccaaggctattgtgcaagcaatcaatgggcaaaacacaccaaatgattatgatgatggatggctcaaattctcacaaaggtaaaatcatcactttcaaattgagctttcaaaactatcatgacatgtagagaagaatcaaggatttcaagtcancaaatgtcaagaacttttattttcaaacaataacccatttcttgacatatcctataattcaaagaaaaacatgcaaattcgtacgtgcacacaaaattgnacccaaatattaaactaaaaattcgacgaaactaacaacatttacaaattaacacaacttacaaattaacaaaaccaaccaaactagcaaacccaagaacactccccccccccc

SEQ ID NO: 112041 - DNA, 165 bp, Glycine max
aaaacctttcgcgaaatcactccccggaaacgttacggaaacccctcggcttggattttcttctctgaaagcgacttttctaagcaaaatggaaagaaaaagaagggccttaggggctgaacccttttatagttaacttctccccctatttatagaaacatgggg

SEQ ID NO: 112042 - DNA, 425 bp, Glycine max
  unsure (1)..(425): unsure at all n locations
ttattgtaatagttcgaggacattgatttttcaccgcattgatctnactcatgacctacaacaacttataatgtcatattgcaatatgtcaggacccctatctagatgcctccctttcaagaatatgaatctatcattcattgtccttgatacaacaatttattatccccgcaatgccaaaaacaattacacggtgcgagaaatctcgaccatcctaagacttagaatctatcactcattgtccttaaacatattatttatatatctgggtaagttaactctctaaatatagctattggaatctaacccctctcctatgcagtacagctattcatttattaagctcaaatatttatatcttctcatatgaaccaaacgttagccttggttgtagatactctaatattaaaagctgcttggaatta

SEQ ID NO: 112043 - DNA, 276 bp, Glycine max
  unsure (1)..(276): unsure at all n locations
cttctcatactcttttcngtnnnnnatgaacatttttttcaatgcacggcgctactggaggaggcactttaatttggttaccaaatctcaagttgatggcactcacattttttcgattctgtaccgtttgtgaaagcaatttgtcacaattttaagactgagcttggttcaactgaatagccatctgccccatctgatttgtcagactctgaatggaggctcttgtctcttgctaaaaatgcatattcttgatggtcatttgcctcactaactctt

SEQ ID NO: 112044 - DNA, 345 bp, Glycine max
taaacgaaagacacttatacccttttctctgggcatctcgcttataagttttaccgtcctttgtataacagacaacgcattatttaacctcacatcgtccagtatactttggaaacttaccccctcgcttgctagacggcgatgtaatgtataaacagaaatgtagagatatcgagcaaccttgtttgctgtccattttgtgccgggttcggatagcaacacgttataacaacgacttatcaatgattgttactatatgataaaagtaaatgattaacatgattcactcctaacgaaagtagaacgcccattgctaagtgctcctgaatttagttgagagcctcg

SEQ ID NO: 112045 - DNA, 169 bp, Glycine max
ctcttatcatgatgaacaagtttacgttatgaaacacaaataactgttaatttttatgagagactaaatagaaaaatcttaccataatgcgagaaaaaaattggaaaataagagatgtacaattacaaaggtcaagaaaaccggatgtgagacccttatataacaaaaa

SEQ ID NO: 112046 - DNA, 470 bp, Glycine max
  unsure (1)..(470): unsure at all n locations
actctcttccctctttntctctcatttgttcttccttttncncgcacaaattncattgcaccttcactattatgatcatggaaggcgaaacacttaattaatccaaggatccattccaagcaagactaaatttgagttctggtttagtatttcaattctgtgtgaatgttcatcttcttcttcaatcctatattagaatttcatgattatgaatatccttacgattgaaatgaattacgttatgtattcatttcctaattttgaatttaatcacagattngttggatgatatttgaatataatctgcgatctcaatgaatttcgggattaattcgattgaactaactctaatgacattgattgattnttcagaacatgatcattctctgtagaactgtgataattcgaattgactcggttagtgaattggattggtggtcttgaatctattttacaacctatttcataaa

SEQ ID NO: 112047 - DNA, 342 bp, Glycine max
tatatcgccgtatattgtttctatttacattaagaatgtttccttatttaccttattgatttaatttcctatttactatttttatgtaaatgatttagcttgattattatccctataatgaagggattaaattattattttaattaaacattgattactataaataaacagccaagggtacattctctttaagcatctagaatatacaattcagattcagtgttatgtgtgtgtgtgtgtggaataaactgtggtaaaatataaaagagaaaggaaaagaagaggaggcttatgaaagaaccaaaaataatattgtgctacatgtaaaaacaagcctgactg

SEQ ID NO: 112048 - DNA, 189 bp, Glycine max
catttgaaatttctcgagggcttccgtttttcaatttcaagcttttcgatatattatgcgcctgaatcagacttccgttacaaaagttatgaccatatgaatttctccagaagccttcgtgttcaatttccagcggctggatatatatgcgcctgaatcggacttcccgtgaaaattttgacctttgaa

SEQ ID NO: 112049 - DNA, 322 bp, Glycine max
ttttacgtaagaagatgatgaataacttattgcataactccatgtcctaaattgattttctgcacatgtaaataagaaagaaggccgatccttattggtgaagcttaagtatcgccgaaagggaattcttatggtctgtgagggcgaacttgcaactttcccaagtgaacatcataatatataatatataatatatacggtaaaataatactttttgttgattaaaattgtaaaacattgaataatttattctcgaaaaataaaaatttaattttcatccctgaaagaaagaaagtgcaaaaatcataattcataaattttg

SEQ ID NO: 112050 - DNA, 355 bp, Glycine max
gctgaagaaaataggtccgtgagaaaatccagccgaggcgctttcgtaacgtttccgtattcgttccgtgagtaattacgcgaagattctcgaccgttcttcaaagattcatcgctcgttcttcgttttcttcagtcttcaacgggtaaggacctccaaccacgcctttcaattcactctatgtacccatggtggtcgcacatttttttcatgtattcttattcttggtttccgctactttttataccccattttgacgtgctgtagccatttatttaagtcatttctcgcttaatataaaaataaaataaatttccaccgatcgtttgaatttatcatcgggtaatttggtaaa

SEQ ID NO: 112051 - DNA, 327 bp, Glycine max
  unsure (1)..(327): unsure at all n locations
ttttggctttggggtttggtttaatcaattacaaaagtcttaaggggagtttttttgccatatttaattgaatacccctacattttaatcgattacttatattaacttttggttttgggggaaaacaagtgtcaacttaattgattactatgtaactttaatcaaatacttatgggtntttttgggggtaaacaattacatctcttcgtcttcaacttaataaccaccgttataactgcattaacttccaccacccatcttcaccaaacaaattgcctcagctctctttataagccaccttacctatccacaaatacaccacacatc

SEQ ID NO: 112052 - DNA, 241 bp, Glycine max
ccagataataaatgagactatagaaaaaccaaaccgacaaacaaacaaggtcaaacaaccaccacaaaactatgtttgagacacaccaacaaaaatgaattctttataggcatacatatatacaagggacaagtacaaaaaacagtatgaccaaaaaaaagatcacaggaaaaataaaacacccaagaacaaaccagagatacatccactgacaaaaacaaacatctatcaaaacaacgaa

SEQ ID NO: 112053 - DNA, 258 bp, Glycine max
ccgggggggggcgaattggttccacgggaaaatgcccctgtcatttgtgcccgtttttccacttacaaaaaaaaaggatggctttggatgccctttattttaggccaagtttacgcgcccccaggaattgcattatttaattgaagtattggagaaagaatatttttatgaacgtagatattgatccagcgaataactgtccccgacgcatggtttggtttaaaagactgactggaaaacaaaatatgtcccgatttt

SEQ ID NO: 112054 - DNA, 175 bp, Glycine max
  unsure (1)..(175): unsure at all n locations
ctcccaaattgttccggcatactttcttgcaccctctggtttttgttaaggctttgcgaatgcttttttccgtaccgcgcctctttcaaggtgtacaccaactgactctcttgggatntgcttctaactgtttggactgacttctttcttccgggctaaaattttcctacactta

SEQ ID NO: 112055 - DNA, 187 bp, Glycine max
aacttatggaaccattcgacccctcgcttaaatttttactgaaaaaaatttccaagcaaatttcggagagaaaaaaaatgacttaggggtgaacccctttcttcttcactttcttccctatttatagcaaaataggggaggtggtttgccgcccactcgcacaggcgagctatctcgctcatgcgag

SEQ ID NO: 112056 - DNA, 448 bp, Glycine max
  unsure (1)..(448): unsure at all n locations
ctcaatcggacatccgagtaaaatgttattggtcgttgaatttcttagagcttctgctctcaatattgagtgtacggaactcaattggacatccgagtaaaaagttattgtccgttgaatttgcttagagcttttgttctcaatctcgagtgtctcaantaattttaggactcaatcggacatccgagttaaaagttatttcggttacatttgcaacgagcatccattttcaattatgagcgtctcgatatattacgggactcaatctgacatccaagtaaaaattaattatcgttagaattggctcacagcttctgttntcatatttgagcatctcgatatattacgggactcaatcagacatccaagtaaaaagttattattgtcagaatttgcacagagcttctgttagcaattttcggcgttctgtatattaccggactcaatc

SEQ ID NO: 112057 - DNA, 154 bp, Glycine max
accattatagttggtgtttggatacctcacccactcaagtggtttacacaattattgcttttctcttatgaaacactcttgccttttaccactctaattccccttgagttcttaggccattcaagaaattatggccacaacaaagaacaattca

SEQ ID NO: 112058 - DNA, 415 bp, Glycine max
  unsure (1)..(415): unsure at all n locations
gatccttaagtcacctgccgcatcaagctntgtaaaagcttgtcgctggatctgacacatcaattgttctaactcnttcagactggcgactcctacgctcttgatcttgcttgatagaacttctctttaagccaaggcacctgactcgatcccatgtgttactaangtggaataaaaactagtgtgaatcaagactccgacatctatcacacgtgaaatggatgaatgcatgaagaaatgcgtatggcatagatgcattttacgggtacgaagaccccggagattatcttttcttaaatacaactacgggcagcatagcgctcgatgcatgcatttaagaaagtgacacggacctttctcttcttgtgacaaagtgaggggatcaagacgcaacccgtgcatgatgacatgatgc

SEQ ID NO: 112059 - DNA, 323 bp, Glycine max
gaaacaccttgtataccttgagaaaaaaaaaataaaagtgatgagatatatttgtctgtaatatgaacacatatttagttagtgggcaatcatccaacaaaacttattgatttgtttaaagctaacaataacgggtgggaataagtcacgccacgccaggctttaaaaggcttgagcctagcctacgaataatttctgaggcttgagactgacctatagcctatcaaagactattaccttgggctcgggctcggcctatttaaaaaccaaaccaggcctggtaacctattaaaaaagcttcatcacattaaatctttaatatt

SEQ ID NO: 112060 - DNA, 406 bp, Glycine max
  unsure (1)..(406): unsure at all n locations
tggaacatggacgccagagtggcgagtgcatcgatatctgattcttctctcaaggaatgtggtgaaaggatatttcatcnaagaactctatcantttcctgacgtaagcctggtagggtatgaacttatgatccctggtctcccattctcctctcaactggtggattaccaaagttgaagtcccatataacctgagcaacttgaccttgaagtcaattgcctctggatcccaagggcgcacgcctcatactcagccatgttgtttatgcagtcaaaacccaaccctaccgtgaagagtatatattgatcgtcaggggtaaccaaaacctncccaactncattgcctagtgcattatatgcacccgtcaaccacataattcatttgtgcctatcttcatcctctaca

SEQ ID NO: 112061 - DNA, 194 bp, Glycine max
ttaacttcccagggcttcgcttctttttcgatcttcatattttttccaacgggtccatacattaccgacacagtgagccttgtggtctctccttcacggaatttttttccaaccgagtgttgtggggtatagataacatccttcaaacctcacggaatatgtgctcatggcatgtagacttctcacaccacaga

SEQ ID NO: 112062 - DNA, 386 bp, Glycine max
tgtatcaatcaataagatttttccttgagatatattataattagacgattgcttcgccctaaacactgatgatgtatgattgcaaaacatatatccaatgctctaagatccgtcaatcaagataataaccaatacatatgtcactcaaaggaattaggcatgtaaaaaccaaaatttcattaaaacttcacttcaagctttaaccttatggatattaccatgttgcttcccctatctctaacagggttatggcatataatagattcatgttagaaaaagctattagtgctatcaggatattgagtaaagacctgctgatggctattacttaagacttccataggtacatggcctggcacacattgaccctcaatgcagagtgacat

SEQ ID NO: 112063 - DNA, 388 bp, Glycine max
  unsure (1)..(388): unsure at all n locations
ctctggttatgtgtctactattattgtgacatctctttcctcatcattggaggagccactngagctgctaggactctccatctttgggtgtattctctgaaagatttgtgccacttgagctgccaggtctctccatctttgggcatattctttgaaagattcgtgcccctttttgcacatgttctgtgagtgcatcctatccagaaccatatcaaagattgtgccgatactgcctaacgaaaggcaccattatgtccttccaagaatggactcgggaaggctccaatgtagtgtaccaggtaacagctaccccagtaagactctcttggaagagatgtatcagtagttcctcatcttttgtgtatgcccncatcttccgacaatacat

SEQ ID NO: 112064 - DNA, 317 bp, Glycine max
accacaaacccttggtacaggtacaaatttctgattcaaggccagctgggttaccaaattaaccaatgcatccaagttgccttcaagcttcttagtctcaaatgatgcagctgagtttgtagctacctcatgcacttctctaatgactatggcatcatttctggcactaaactgctgagagttggaagccatcttctcaaataaaattctggcttcagcacgagtcatgtcttccacggctccaccactggccgcatctataatacttctctccatattactgagtccttcataagaatatcggagaagctgctccg

SEQ ID NO: 112065 - DNA, 300 bp, Glycine max
  unsure (1)..(300): unsure at all n locations
actacgaaatgggcacttacagccgacaggaacgtgcgaactacattgtctgtgaaaaatattgcctttatcaggagaaatggacccaattttgttatacccgcataaaaccctcatgtggaggtaatggtacttatgtcatttttaattngtgttctcacaaacaaacatcactttcttataaatttattgtaaataatcattttcattatgttaaaatttttcagatgtgccgataaagccaagcctcccataaacaaaacactgtcccccacgtattgtctcgtgggggtatgaata

SEQ ID NO: 112066 - DNA, 173 bp, Glycine max
  unsure (1)..(173): unsure at all n locations
gatgaatgaanggagaggaagagaagagcacganatttgtgctctnatgagctttgaatctgaatttatattcaatgatcaagttgaaaaaatgacacactgaccntattatagcctagtgtcacacaaatggaggaaatncaattcacttgattgaaatgaattgggagcca

SEQ ID NO: 112067 - DNA, 117 bp, Glycine max
aacttttggtggaatgtaaaggaaacaactccactgggtggatcccacggacgccccaacaaaacaactgtaagggggggttaatgtcccatattttgaaagtaacttggcatgtgt

SEQ ID NO: 112068 - DNA, 276 bp, Glycine max
tttttttctcaggcttttttctataaaaagccacgacaccctgacttattcgttcataaaactaatttctgactcgcagggtctactcccttgaataacatccttatgaaattatattccactctcttctttgccttggagaccattaagtgcaaaaacttcgagatgcagagcatatctggcttcatctcacctcaaaataaaaaaaaaccttttctatgaattttggcctccaacactaaaactcaccttcttatacttattttattgcttaat

SEQ ID NO: 112069 - DNA, 278 bp, Glycine max
tttgaaagccaagcaaaaggagatcaaaattatgtttataagcattgacccaccaaacatttttaaaaaaaacatctttcctaatactcgcatgcggtggaaatttgaaagaaacaataaccattaaacccttaccttttctgggatactaatgaatttaaatacccccacatcattttccacaacttaatgatattcccattgaacatatttattggagattcaaaacaacacaggtcgccccacatttaactcgcgaaaatgctgaaaacacacat

SEQ ID NO: 112070 - DNA, 452 bp, Glycine max
  unsure (1)..(452): unsure at all n locations
atctctcagncacctgangcatgcaagctagagagtgatgctgaatgattgttctcatgcctgttgatgcacgctagggtcacatgcacttgaaaattatcttatgcaagcagggaagagaatatcgcactgtttgtatatggaaattagaaatcacatgcatgcatcatattacagagctacgcctctatgaggtgaccatacagaantactttaataatggcgtttaaatttgcttcgtacgctttttgctgaaaaatttcttttaatagagcacacttcagctcttctgtgccttacatcaatctgatactgacgagagtattctgaaagaggaagaaagagttttgaagcttgattctatagtaaggatgttttatatttatataattaaagtttctttatattggtatttatgatggacaaattattattttgagcaacaatatttg

SEQ ID NO: 112071 - DNA, 190 bp, Glycine max
caaacctttccaaaatcttctaaagaagagatgaatcttcttcctcctgtccttcttcaccaatatttctagcacccttctttacccatgatccatcatgctccttaatataacccaaagatgctatgactgaaacgcctattatgaatgatctcttgattgcaacataaggtcaaaatcaaaaggatgt

SEQ ID NO: 112072 - DNA, 460 bp, Glycine max
  unsure (1)..(460): unsure at all n locations
gatcttatagcacctgggctgcagcttctccgataatggggcctcttgtgatgaacttttntttctccttctatgacgcatgaacacttatctctgacncactacaattcgtgcgagaagtcggccataatcaatcatgataaggaatgatattgattgtgtcgaaccatcttagcaccgataaaaatgcagtatatgtggagccgaagggcataacagacgtcactgtccaatgcaatctgagcgtggaagtggtcacaatcattgatttatgtttgttagtcaagtgacttgtatttgtttaaaatctctttcctgtattcaatttctgggcgtgaataaatttgttagttaaaaacattacttattttggttcgtgtacaatagttatttgtggggcttaatgaaatcgttagataaaacataaccataaaccctacccctaaanataatctctaac

SEQ ID NO: 112073 - DNA, 253 bp, Glycine max
ttatttggattgaaaaacattatgcaatttatgtttttttcccaatttatagttctttttataggtttgtacatatttttaagtttagtttgatttttaatgtaagaaattccctttaatgtgaattaatgtggtttcaacttaaaatttccgtgaaaagatgaagaataagaaagttgttgtggctggtgtctccctaaatgaagcttatgcacctaatgagaatcattcgcttagtgagacctcaaccccc

SEQ ID NO: 112074 - DNA, 292 bp, Glycine max
tgggatggcactaaacacatgatctacagtgagaatgaaatatgcttggaatgaatattgcactcgtagtattctttactatatcgctatttgttattccaagcagattggatttgactgtctcttttttcccatcgcatacattgggttactatttttattttaggtgcttcactactaggatgatataatggacttgggtgctaaagatagagtcactggtcatggagctggaactgctctggatgctgatgaagcgatgagtatagatacacatgaagtgcgattcatg

SEQ ID NO: 112075 - DNA, 297 bp, Glycine max
gaaaaaagtctacaattaatatatagtgcagtatgcacccattggtgaaacaaaactctggtctatttttcccttaataaatgaaccaaggacccatcctaacattaatgaatactattaatcaaaagggcgttcattgaaaatatttctgactcatgaaaataagccaagggaaaatgctgactttaaaaggaaaaaatcaagacatatctgcctaactttattgttaaatataaagaagcaatactttcatatcttaataacacaataatgttgaaatccttcacttgaacacct

SEQ ID NO: 112076 - DNA, 235 bp, Glycine max
ttttctttatcattggggtcataaaaatggaagagtttttacttttgtgtacataagaatgtccctttatgtatattttacggtcatttttgcagactattaaatcatcaattatcgaaaaaatgttttttatttccattattcatatattgagatcattgttatatgaacctttggaataatccctaactaaagttataacttgtaataaaaaaaaatttaaagatgaaaaata

SEQ ID NO: 112077 - DNA, 309 bp, Glycine max
gcctcacccaaaaagtacataatatattccgtggaaaggaaatgccacttacttataaaattcagcccctattattaaaagaaaaaatctggattcaaaaatgggattagtcattatgatgatgattaatcaaaaagggagcatcgttaaccttatctcataaagggtgcttcatgacgaattatccttaaaataatttaatttcctcataggtaactgagaacgtatcttcttcaaagacacaacgtatttcataatttgtttatttttctcaacggaaaattacagtaaacttttcaaggagaaaaa

SEQ ID NO: 112078 - DNA, 350 bp, Glycine max
tggcttttcaattgtttgcaccctacaaaatcataatctgaagagccaataaaaattaagggaggtacctttgggataccacaaaccaacattggttgtgcctttaaagtacttaatgatccttttaacagttggtaaatgagttttcttacgaatagcctgataccttgcacacaagcaaaccctagcataatatctggtcgccttgcagttaagtaaagaagtgaacgaattacaccctctatcccttgaatcatcaactgatttatctttttatcttacttaaaaaagttgatgttgccattggagttatgcctctttcatttttccatgttggatttcttaattag

SEQ ID NO: 112079 - DNA, 303 bp, Glycine max
taaaagatatcagcctacctttttataataatttcactagaatgttcaatcaagtgtataataagtgttctctgttgacgaagagttaataaataaattttaattttcaaatcaattaaatctaaatcaggatagatgaaagactaatcacgtttttgagtctaaaaaataaagtatttattgcgaatgaaactattttaactttaaaatacaactaattataaaataaatatacttgaaattacacttgaattttatcttattaagttaaagaatgcatgctctcttaagtcttaagacaaa

SEQ ID NO: 112080 - DNA, 261 bp, Glycine max
gggctaaacttttttttatttggatcttacaattcacctagcggttggtaatagttcaggggctgaaataggattattatattatgcacaatattgagaatattgtgtatgtatgggcaaatcctaattgtattgagaatattgctacctgattgggctgatcttaattgattctatttggattaaatctgattgtgggtattaaatcttattggattttaattttattttgaatctttgatctcttgaatttgggatcac

SEQ ID NO: 112081 - DNA, 314 bp, Glycine max
atttgctttcgttgcatgttagaaattatagtcaggtgctttgagttgtagatgacgactctagatacaatgaggttggtgaatgtattaactttttttctctggcagaataagttattattctagaatgagggaacttaaatgttgattcttgttggaaacctctcttgacccgttgtagctcaccgtattttccattcttgcagttagaaatggctgaggaatgtttgaatatgcaatggatttgagtggttgttactgccttattcttcttatgagatgctgatagagtatcaaacttgcatccttgccaa

SEQ ID NO: 112082 - DNA, 339 bp, Glycine max
gacttacctatttgtttggcgtttggtttatcttctggtaagggtaagatgttagcatggagcatattaacaagggcaccttactttaaaacagaatcagcttagaaagaatttgctagagtgagaaaaacagttgagcctcattggaggccttgctcaataacttctataccttcccaagtattcgagactaaaagtgatacatcaagaccttaaggcgagcaatatatagcttgatcaccagaagaatgtaaaaatctgactttcgcatggctctgaatatttggagtaagagttttagaagaaaaccccagagttgtggtacttgtaagttataaa

SEQ ID NO: 112083 - DNA, 327 bp, Glycine max
tcacaggctttagatttgggagccaatccaattcttgttccggactctcagccacttatgatatctaccgatgatcccaattactgcttccctaagctctctatactttcttcatgccgcatcccatgccttgcgaactccttggagtacctttgcattggggtcactgaaaccccatgtaatgaagagtgtgatgctttcatctaatggcgctcctctcatggtgtagccaagcttgcttatggcgaggacgggattataattaatacaaccccatgttcccatccagggaacatttggacatccttcgcatgaagatacaatcct

SEQ ID NO: 112084 - DNA, 189 bp, Glycine max
aaaatcggacctttacagacgctgggggttatggcttcttaacgaccaccacataaacctttggccttctgtgcaggaatttgaagcaattgaataacctggagcttatgcttgcaacatctacaacagacctcctcaaccttagcagcaaaatcagccacaatagaacaattatgacctctcaacaat

SEQ ID NO: 112085 - DNA, 413 bp, Glycine max
  unsure (1)..(413): unsure at all n locations
tactatgttttctatacatttatatacccttttgttgaatcgctgtgcaaacatgttacttgtgttggtagcccttccatttacttggataaaaactttgattttaattgttaattttattaaagatgtcctcctctacaagtgcttatattttgagactatttctatgtgatggttgtgctgaaatggttttggtacttatgcttaatattatttagaacgaataagttagtaaattataactataaattntcattaaataacatttggtgggacttactaaaatttttcttttaaaaagtaaatgatgcttatagtgtgttaatacctataacctacactcatttttaaagaaagaagtaacaagtataattataaatttcttaaggtcggttaggcaacttactaactat

SEQ ID NO: 112086 - DNA, 349 bp, Glycine max
  unsure (1)..(349): unsure at all n locations
aatcatattttgccaagaatttggggtttatgctcttctgctgaccaccatacaaaactttgcccttccatgcaacaacctggagcaattgaacaacctgaaacttatgctacaaacatttacaatagacctcctcaacctcagcagcaaaatcaacccacgcagaacaattatgacaaaaatttacctaacaatttctatgctagtgaatcttccactggtaattctgatttgcaaaagcagcacatncctcttccatttccctcaagagcagttcccaacaaanaaattggatgaggcagagaaagagatctggaaacattataaaagagaggaaacatacctctgt

SEQ ID NO: 112087 - DNA, 389 bp, Glycine max
gctccctaacttgtcaagaatgaagctctgataccacttgttagacaagtggcctcagatatcttatgtaagggggggttgaattaaaatatccaaacttcttcccctaattaaaaatctatcttactttttacttaagttatgaattccctctataacaatcttcttaaatattaattccaatgaagcaacttgaatatgaatataaagcgataatatttataggggtgaaaggaaaagggaggaaatttaattggggggcgctcatttaaggataaaacggagacaattaactttgattggtggccaagactctattcataaagttccataatggacactgcttcatttatgactagggagctactgagaagcttttgaaaaatttc

SEQ ID NO: 112088 - DNA, 469 bp, Glycine max
  unsure (1)..(469): unsure at all n locations
atcctcttagtcacctgccgccatgcaagcttctaatggaagatgagatacatttgatgcatgatattatagagtgtgaaagtaatgtcattcatgttagataagaaccaaatcctcaagagtggcccatagcttcttgaatgaacataggtgagtaaacctagagatgtccatgtcaaaattaggtcctcctcgatgactttcacgcaatcaacgcccatgtcaaaattgatcataaaatacccattgccaatgtccatgatgttgaagcctacaaaaagtttccaattctagttagtctttctttcatgatccgaaacccaatactcttaccaagcaacttcaccaccagtgcgtcctttcatggtgcacataggccttccaataccaattattcgatatggacctttggcttcaaagggttgccgtcttcgtactcatcngtgtaagtttttatgcaatcctacct

SEQ ID NO: 112089 - DNA, 248 bp, Glycine max
  unsure (1)..(248): unsure at all n locations
aaaagaaagatttaaagacangagccaaaacaacaaagaaagaaagccaaagaaaagcgaggaaaaaagagagaaagaaagaatcaatcaatcccagaatgaagaacaaaggaaaattgaaaagaaaaattagttctttggaccagacaatgtctgaacaatgtgcaaaattgtcggaaaggaaaaaataaaataaagagccatagttacttggttaaaaacacggggatgtgtaagtgatcacctgc

SEQ ID NO: 112090 - DNA, 321 bp, Glycine max
  unsure (1)..(321): unsure at all n locations
atctctgctncatccactcctatatggcgagagatggcgaccagataatcctaaacagtatatcattttagttatccactgccctttgatcatttctctgccagataactatctatttcttaagcatcatgaatgattaatcttcagctttgcctaaatgcttatcggaaatggaatatgtggtggtggtccacacaagtgcatctgtctgtataagattcaagcttagcagagctacaacctcaaatgcttattcattccgtcatagtataatatgcaggaatattcagcctgcaagttaagcaatgaatacaatgaact

SEQ ID NO: 112091 - DNA, 217 bp, Glycine max
ttattaataaaagattaatttggggggagggctattaaaattcatctcttcaaaaacatatgcttaaatattaaaaagaaatgtgtgctcttaataacaaatttttatattacaggttctgataaaatgttttaaatgacatataacaaatatctggaatgctttcatgtgaaacttgatgaatggctgaaaaagatgtttgaaaaagaaaaaaaaa

SEQ ID NO: 112092 - DNA, 522 bp, Glycine max
  unsure (1)..(522): unsure at all n locations
gatctcttagtcacctgccgcatgcagcttatagatacaaatgcctcatcatttccaaatttcatgtgaattangaagcatcaacaagaatcaagccaaggctattggcaagcaatcaatggggcaaaacacaccanatgattatgatgatggatggctcaaattctcacaaaggtaaactcatcactttcaaattgagctttcaaaactatcatgacatgttgaggagaatcaaggatttcaagtcacanaatgtcaagaacttttattttcaaaaccaatacccatntcttgaacatatcctattaattaaagaaaaacatgcaaagccgtacatgcacacagaattgacccaaaatattaaactagaaatccgacgagactaacaacattaacaaattaacacaactaacaaattaacaaaaccaacaaaactagcaaaaccaaagaacactcctcccatacttatacacacattgttctcaatgtagcacaattnatagattaaaaacaattaaacca

SEQ ID NO: 112093 - DNA, 354 bp, Glycine max
tttcttccgctgtttattctttattttcctttcggggtcctataactttccaaatagtgttgcaagaaacatgttagataaaataccggaatcaataatggctgttaccctaagttgccattctctgcttaaacatctcaatactttatttattaaatcttcattttgaaaaattttccctaaaggtgcaggatgaattactatgtgtgtgaacctctttgcctgtcttgtatactttcatttgcattcatcccaaatagttcataattatgagttaatgtgtttatcctaaacctttaacatctgttgtggctcatgtgtacttgtagggatcccaatatcctttgactttac

SEQ ID NO: 112094 - DNA, 380 bp, Glycine max
  unsure (1)..(380): unsure at all n locations
caagcttgtagcttannagaagtttgtctttttacatgctctggcattngtatngattattgcatnttaactctaatctttcatatgtacatcatgcatcatcatgtagaggtaggaagaattgtctanagtataaaacttcttcggtgcataaaactctttgttttaatcaattacaaggctgatcggaatcgattacaccagtgnttgtagcttgcagagagattctagctcccatttaatcgattacattatttagttaagaccatgcttcggttttcatgagtcttgattatttcgttcttaaaggtgttcctagaagtgatcaagaacactctaattgattacatcaagaatctaatcaattacattggtcttga

SEQ ID NO: 112095 - DNA, 336 bp, Glycine max
ttttttttttttttttcattggaagcaacaaatggtttatctttaaattaaccatttaagaataatgatatcgttccatcctttatattaaaaagtctaaccggtgtatttttcatcgggtttcaatgaagtgggtttaaatgaaaagtgccggggggaatccccctgttcccacaaaacacacacacccacaaagtactcttaaaattaagttgaagaattatgttgtttttaaagatcttaattaacccgcactttgaaaaaagaaaaaagtttcaaaaaaatattacttttgggaataaaaataaaaagaaaaaatgttgacatacaatgatt

SEQ ID NO: 112096 - DNA, 472 bp, Glycine max
  unsure (1)..(472): unsure at all n locations
agcttgtctctagagcttttcattggccccttcaactcatgaagtgtttctaggtccctatgctctttggtagcctcttatcatcgccttcttctagaaaagaatccatcctcagatgtgcatccaaaacacctacatcacaagaagaaagatcagcgacattgaaagtagaactcaccccatactcacttggcaagtcaatcttgtaggcattgtcattaatcctctcaggaccttgaagggccatcacccttaggttggagtttanatttcctttgtgaaggaaacctatccttccttagatgtaccaaaacccaatctccgggttcaaattctatggaatttctccctttgtntgcttgatgtgcatatggctccatcttcttctcaatttgatntctcacccattcatgaagatccttanncaaagtggctctagaaatcccatccttactcaaaatagaagaatcat

SEQ ID NO: 112097 - DNA, 347 bp, Glycine max
actatttttaatatttactttgaatttcagccctgtattttggctatattattatactatttgaacaatttactatttcctatttgcatggtatgtttgaacaattattaagtatgttatttgactatgtggagtttataatttatctatgcatggttgtttgcttcatggtttcatggttcttgcttcttgcttcatgatttggttgatattttatatgaacattgtatggatgtttaaattaaatttgatatgcactttggctttttgttgatgccacagggggagagaaatgggattaattcaagaattcacatgagtaatcaacttatttttaagataagcat

SEQ ID NO: 112098 - DNA, 284 bp, Glycine max
atgaatcattcatctcattctaagcttgaaagtctcacttgctgccttttgacatgatgaatagagttcatcaccaacataaatccattgtgaaaagagaatagatgaaatcacaaaagaacttttgtctcaatggaataaatctgcatggttattttaacacttttgtcattgataaaattcttactatgctcacgagacaaaaaatgttatatatatatatatatctataaaaaaatatgaagttttcctttattacctagatgaaaattactccaatattt

SEQ ID NO: 112099 - DNA, 323 bp, Glycine max
  unsure (1)..(323): unsure at all n locations
acatggattcaatgatgaaatgatcaccaatctataaaaagagatatgaaacacacatcctctttctctttctgtgggtttacgaagtcgagggaaaattggaaatttgcggagtantgtgtgcccagtgagggatgacccgtgagagagaaactataaagtatggagggtgttacgtattaagatgaagacaaaattattccaaccgttactaattacggtccatcgcagacctcatgagagcccttttcacgcttgaagttgtcacacattatacttaacacctatactttatttgaagagatgataagagataatgaaat

SEQ ID NO: 112100 - DNA, 96 bp, Glycine max
agcttttaaatttgaccaagtttcccctttatttttcatggcccaaattaccaaatcttggccatcacaccacttaatggtctagaatctattacc

SEQ ID NO: 112101 - DNA, 293 bp, Glycine max
ttcctatccatagtcaattaaaactctttacccctgggaaagtattgggaattgtgtaggtgtggggcctcgctcacttatctatactctggccattatgaaatttgtcctaaaagtgagatcggaaccctgtcaaaatgctgtggttcacaaccaaaaaattatgtttgatggccaccgagattgagtgatgcgacctgaggcttaagatcattgccacttactgtttggaaaattgtgtttcacacttttcccttgatatggttacttatgctgtgaaaagttggcttctt

SEQ ID NO: 112102 - DNA, 238 bp, Glycine max
cctaacttacattgtacattaattgcttgccatgttcttttagttgcattacaatacaaaggctaaatgcagtacagtttacaagcaataagaaagaaaagttgaaatcaattttcccataggaaaattaatactttgaaaaacaaaatcatggatcattaacctagaaaagtgggaatatagtcccctccccgattattacgaatctgctttgccgagaaacacctaatggcctcat

SEQ ID NO: 112103 - DNA, 184 bp, Glycine max
  unsure (1)..(184): unsure at all n locations
gattgaaaccggtcgnatgttacganaacttatttggacgatgctgacggaagcgcttttttggcgacctaaaagttcatgtctggttgacagcgtcattcggagcattggcttaaacttccgcgttcgacttacgaacagcanggaaatgggtgtaatcttgtttcccgcagtaatttgcgta

SEQ ID NO: 112104 - DNA, 148 bp, Glycine max
caaccaccgtttcacttattcccgccaataaaaatgccttccacacattggttcctggtcaatcatcttgataaaacccaaccggcagaagaatgcccccaattttaattttaccggctggcatgtcgggtaaatcgttaacgttcat

SEQ ID NO: 112105 - DNA, 113 bp, Glycine max
tccgctcctcttctcctttttcttccgatgcatctccatggggtaaaaacaccattgaagggacccattgaagcttcacgatccagccttcataaaagccccacaagcaagct

SEQ ID NO: 112106 - DNA, 203 bp, Glycine max
tacttccccattggtgggaactattgtggcccaaaagaatgaattactatttattccaatgagtctgttgggtggattgtggggacagtaacaatctggtggtataaagtgttgtcataaaagagattgtacggaaagggtgcgttgagcttatgggaatttggagatggatttttttggtgaaggtattttgaggggaaatt

SEQ ID NO: 112107 - DNA, 431 bp, Glycine max
  unsure (1)..(431): unsure at all n locations
tgctgctgattgatgacatggatgtctanntattttatacacaggtnncacattatgtaagtttgaaaataagctgaataattggataagtaggccattatgtcacaactaagcctcctaatctgtctttctgaacaaggtgctatttgtataaatgttctgctatgtttgtcacgtttagcttatgcatgtacttatacaccactttctagagattctgccaaaccatgaataataactatgactgcgtagctatgcctgttaatttacaatgtagttgttggatgtcctctttacagctattagtttaatttatgcattatttttgcttattggaagtagagtatgtatgtcaaatcgggttattatatcatataattgatgtgtggaatacatttgtaacttcataaatctctgttgatttcatttga

SEQ ID NO: 112108 - DNA, 344 bp, Glycine max
attttaattgccctggtcgcaggactctatgggttatgctcctctggccaccactatttttacctttgcccttctgtgcagcaatcttgagcaattgaacagccttaaacttatgttggcaacatctaccatagaactcctcaaccttagcagcaaaatcaaccacagcagaacaattatgaccttttcagcaacagaatccatcccggatggggggaatcaccctaatctcaaatggtgtagcccttaacaacaacaacaggagcctgttccttccttccaaatgctggtggtccaagaaaacatacatttttctcagtgcaacaacacaacacattacagag

SEQ ID NO: 112109 - DNA, 116 bp, Glycine max
aaactactttaaaaaattttaagaaaattcaagaattttttaagaaacttttaataaagctttttaaggaactacctaagctataaatagaaacatgtgtcacacttgttgtaact

SEQ ID NO: 112110 - DNA, 428 bp, Glycine max
  unsure (1)..(428): unsure at all n locations
gcttctaagagagnttctaaggaagcttctcatagatttttctatggangctacctangctataaatagaagcatgtgtaaccttgttgtaactcttatgaatgagtcttgtgagacacaactcaaagttcaacttctctcccccttttcctccttcaatttcgtgctcccccctgtctctgtctctctctctgttctttcctccattgaaacatcctcttcaagcttcttattcaaagcacattctttgtggcgaagctccttcttccatggcttattccctagtggatggcgcctcctctcacctcttcttctttatcttccgctgcatctccatggtggaaaatcaccattgaaggacctcattgaagctcatagatccagcctccatagaagcttcacaagcaagcttcctttaagtgggaatc

SEQ ID NO: 112111 - DNA, 61 bp, Glycine max
tgacttgcctagtgagtataatgtaagtgccactttcaatgtgcctgaactatcttttttt

SEQ ID NO: 112112 - DNA, 322 bp, Glycine max
  unsure (1)..(322): unsure at all n locations
gatgagagagttttttacttcatttttaagcaaagggtcggtctttcctggttgaggagtgtctccactccagtcaagtagctgagtttatcttttccgtcaagggcttgatctcattcaatgtagtttcttccattaagaatttttaaatataagcttgtaattanaaaccaatgacagagcattgaccacagatgatgatatgttgcttcaacgcctctataatttgccgaagatatggtgggctaacatangaatacatgagatatttcttattataaaaatatgatatttcttagtattgattgatcataattacatg

SEQ ID NO: 112113 - DNA, 341 bp, Glycine max
actttggctctgataccaccaattgtgcaatccctaaataatgactggtttaatagtaataaattaaatagcagaaaccatggaaaaaaaatttatttttctctctctcatttttttttcgcactgttattcatttcacgataattaaattcagaaagaaaattatcactatagagtcctgaatggtcagttcacaactctattcggattcatttctttctgataactcataacctccaaactatttttttctctttaaaaatatatcagccatcattttaggtcgtcacgtgagaaataataagatacggtcggtaaactcttttcaaataaaatttgtt

SEQ ID NO: 112114 - DNA, 417 bp, Glycine max
  unsure (1)..(417): unsure at all n locations
ttggactccctgctcttatctcttcttttctgctcattttgaacaagcatgtgatatctaccataactcggtgaataatcgaagccttaacttgctcatactnggaaggccattcctttctctcgaagatgagacagcccatatggtgaggtgatcatatatctatgtaaaatacaggttanttcaaagtgaagggctgaaagcagaaggtaaaatgagtttcactgtcncttgctaaggcgacacaactattgtatcaaagtaaccacggaccttttatgccgtattcacctgaacatgcaattcaattgatgtaaacaacgtttatttgaatgataacacactatattgcgcgactcaatagaaaataaagaatcgacccaattttcagagctttgcttgcaagtgagtgatgct

SEQ ID NO: 112115 - DNA, 290 bp, Glycine max
gtaaatcttttatagaatatggattggtaaataaattactagtattaatttttttggatgtttaattattaatttaaggcctatgcttacgaagtttataagcctattagttaaaaatttgataaatagtttgttattaaagaatacgattaaattggttttggaaagttattatgaatgatctttttgaaaaaaatcactttagttatttattcgaaaggataaatataacattctcctaattctaataaaaattcgactttttgggcaaacttaataataggcagttc

SEQ ID NO: 112116 - DNA, 267 bp, Glycine max
cttaaacccttttttcaatattggaaatttatatatttttaaaatacttttaaattaatagaatataaaatttaatatattatttggtattaaattgtttctaaaataattagtaaaatttattctctctcaattaaaatagaataactatattgaatgagaatattttaagaatattgtgtttgaatagaacaagtaaaaaattcttaaaaaaaaaattttggatttttttggtaatatttttcttacatattttcataatgacaa

SEQ ID NO: 112117 - DNA, 378 bp, Glycine max
tggagcgcttaacctatactgagtttataagaatggctacaaattttgtaatacatatgcacttataacatgaacgaaagctggagtcgctgcacatgatgtccaacattacgtcaggaatcagattggctgcttcatgcacaaggcaagattaaatgtctaatgaagaattgagcttgcggatccacgatgtcggatacgatgtccaagacatatcggcccgaaaatacttgacacataaatctgtatatctttacagattaatgagagttagcacatattggcgattatctttagaacgaattaaaaatattgaagttcaatacaaacttgatagttcgttcacggttatagattaagattaaacctaaaatcaac

SEQ ID NO: 112118 - DNA, 154 bp, Glycine max
ttttgaatcatgggccgttgggttccagttaaccaaggctttatttaactttagcttttatttccctgaaaaataattggggctctttattccccctcttatggacatacctatttctgccctgatgctgggagtggaacctttctcataattt

SEQ ID NO: 112119 - DNA, 310 bp, Glycine max
ttcaccttctcgctaagccaattagcttgcttatgtagcatccgctaagcgcaacattcctgtgctaagtgcgaggaagatccagaagaaaataagttgtacatgttcactaagcacaccgcttcatctctctaagcgcaccgcttcagttgatccgcttagcaagaaaggcacgctaagccaaaaatcactaacgtgcgctaagcggtccatacgtgcgcttagcgcacgagcacgaacaaggccacctatttaaacataaaatcacaatttgtgaatgaaggttggactgggattcatagctttcatg

SEQ ID NO: 112120 - DNA, 338 bp, Glycine max
  unsure (1)..(338): unsure at all n locations
caatgaatgaatgaattaatgaaaagcaaatcaaagccctgcttttataaactcttcatgtctggcccaaaagaccattntaaaaagttacaacttttagaaaaacttaaaaccaatttgaaaaaagtcaaacctttttgaagagttacatcttttgatttattcagaaacagtcactgataatcgattaccaaatcagtataatcgattacacaacgcttttatgtgaaaggatgtgactcttcacatttgaatttgaatttcacgttcaaagggactggtaatcaattaccaaaacatttgtatcgattacaactttttgaaattaattggaacgt

SEQ ID NO: 112121 - DNA, 215 bp, Glycine max
gcctctctcaccttcttttctttgtctttcgctgcatctccatgggggaaaatcaccattaaaggacccccttgaagctcaaagattcagcctccataaaagccccacaagcaagcttccatcacacggacctagtacttttgcttacctttggctttggactgcgtcgcttaattggtcgaccatgtgtcgtaagcagtgctctaacctttttg

SEQ ID NO: 112122 - DNA, 172 bp, Glycine max
aactttgaagtatgtctcacaagactctcattcatcatagttacaacaagtgttacacatgcttctattaaagactaagtagctccttgagaagctgtcttagaatacttcccttagaagctctttgagaaacttcctgagagctaaacttatctacaccacccctctatac

SEQ ID NO: 112123 - DNA, 419 bp, Glycine max
  unsure (1)..(419): unsure at all n locations
agctngtccctttccgctgcantgccttccacttgccatcttagtccttttcatcttcttgcaaactcttgtagcgtacgaacacttatcaccatccaacctagtgccaagcaactttggaagacagttggtggttcgaccttatggtcttaacaaaggcgatggtggcgttagcaaccttagggcactccactttccagacagtgcgagcagtagcccttcatttggcgacctatacccttcaggacgtcaccttgtgcaaagccttttggtgccactgtccattctcctctagaattgccaaacttttctggaaataccttggcaaatttgtagcgttctataccccaaccaaccaaatcatatttnttttgaggctaacacanagccagtcggggtcttttactttggcctgtaag

SEQ ID NO: 112124 - DNA, 322 bp, Glycine max
tgcggtctctccttcctaatccaggtccaacccacaaattatcctaacacacagactctacctatgaattatgccatacacacaacgactcaattatttttaaaatctcaattattttcaaaatcgttttaactcatcgcgcttctagtgattaaacttgtcaagttcccacagtggagactgatgcaatccaatcccgcaagggcattcaatagaagactccaagtataatgggtcagagatgcaagagaaaggcctaaggttttatgagcctagggtagatttgagccctgggctaatatgagccccttattttgacata

SEQ ID NO: 112125 - DNA, 343 bp, Glycine max
  unsure (1)..(343): unsure at all n locations
atgcagctttaagtgagaggatgtgactcttatcattgatttttatattcaacgtcaagggcactggtaatcgattaccanaacttgagatcgattacagctctttgaaaataactggaaccatgtaaattcaatttgaaaactctttcaaactcatctttctactggtaatcgataacaacaatatgggtatcaattaccagagaaataaaacctttttggaaaatgtttggtcaaaactcattgcctctccaagtttaaaaaaacttttttaatcttattttggatgagtctttcttcatttttgacctgaggcttgaatcttgacttgattctcagatct

SEQ ID NO: 112126 - DNA, 190 bp, Glycine max
  unsure (1)..(190): unsure at all n locations
tttttcaccccacatcggnngaggggattcccccgaattttatttttttccggcgccttaatcctttatatattcccattaaaccttattaaaccttttggaacaataccttccttaatgtaacaactattttttttaaaatttctttaccttccttataaaaacttattcttgccatttgtattgaggg

SEQ ID NO: 112127 - DNA, 346 bp, Glycine max
ctcactttattatatcctgatgacttctatcctcttatgacataccttttgactaattgtggattggagccatctctccattaatttctggttcagcaggagtcatgtctcaaaggctccaccactggcagcatgtatcatacttcactccatattgctgagtccttcataaaatttttggagaagcaactgctcttaaatctgatggtgacggcaactggcacatacttttttaatctcttccctattcataaaggctctctccactgagttgtctaatacctgagatatccttcttgatggttgtggtcctggaagcacggaaaaatttttctaataatactct

SEQ ID NO: 112128 - DNA, 322 bp, Glycine max
ctttaacttgttccctttctttgttttgaagctcattacaaggccttaagcgaaaaaccatgacatcaccttaccctctaagaattttggagctttggaatttttttgtgaataaatgtttggggcggggaagtattgtttcatttggaagaaatgatttttaaccctgcttaatgctttattttgctcatgcttgatgtatatatatattgcctagttcttgcttttaatcttcaatttcatactgttcaatataaaaatgaacaaaaattagttgctgcaaattcttctatttcaaagaaaaaaagaagtaagttgataa

SEQ ID NO: 112129 - DNA, 250 bp, Glycine max
  unsure (1)..(250): unsure at all n locations
cgtaacccggcacacttccttctcgaacagttgtgtagcggccaaacttgaacttctccttggcaagtgttgcctttcctaacttccttttgagagcttggacgtcttcttcctcttccggtgcttcaaaactctcttcgctgacgaactttaacttggcgagccaatctaaacctcgtatatgaactntcagccattcgtggtacccaccaattatgccaatacgaatgcctctaagctcttgatcttt

SEQ ID NO: 112130 - DNA, 352 bp, Glycine max
tcgtattttataactacgcctaaaaagaaactaaacctttaataaagcctatttacatcaaactcaagtccattacacaaataaacaaaaattagaaattttcataaatttatgttgaaggtgtgcgctaaacctgacagctcgcgccaagcctaatttattctcaagttggaattgggctaagcctaacacgtcatgctaaacccaatttcttcttatgttggaattgggctaagccccgataggtcgccctaagccccgacgctaagctagaccattcacgctaagcccaatttctcctcgattggaattgggctaagccagacagctcgcgctaagcccagacgtgcta

SEQ ID NO: 112131 - DNA, 145 bp, Glycine max
atgtttggggagacttgtgtaaatgatgatgatgataagcttagctttaaaataattgtaccattctaccaatatttttacaatttgaaaaatgtggattaatactatgaatgaacaaatgctgctacaaataaattaaggctga

SEQ ID NO: 112132 - DNA, 316 bp, Glycine max
  unsure (1)..(316): unsure at all n locations
acagagtggaggtagaatctntgcacaagaattatcaaattccacagaggttttcctaccctcatacctcagcaaaatcctcttcgttccgattctgttaccattggatcaccttgaaaattttactggatgttccttatacaaaaatcttaaatttgaccgtcgggatctgctataaaatgcctagaccatgagatgtactaccttgttcgtgactagcactggacaaacatttntctgcataattggcaaaattgctgcacaatttgacagctctttctgcataatttggcagatttcgaattctagcttgctt

SEQ ID NO: 112133 - DNA, 233 bp, Glycine max
gaatgatgcatcttattccatatcattatcttttttgcatcatgcctcatcatgagtgagtgagaagaaagattctaaagttagaaaaattctttcaaaggaaaaactctctattttaatcgattacaaccttatcataatcaattacatagttggcttaagtttgcagagttatgtctcatatcgggttaattgactacgcaattttttttagacataactaattattcata

SEQ ID NO: 112134 - DNA, 144 bp, Glycine max
ttgcttttttcccaaagcagagactcaaaaactcatagattctattctaggacaaagtactcgagaattccactttacccagaaatctacagggggaagctttgaattaaaacttaactttgaacctatggaaggaatgtcttt

SEQ ID NO: 112135 - DNA, 318 bp, Glycine max
gactgtcaaccatcaactctttcatgtgtgctccccgatacttcttcttccaattaccatacaaatgtttgacacacagtcgatgttccttggcttcgccaaactccttgatgatctcaaccaacccctgaaaaaacaatgcataaattaaatgagagccccaatttgaaaccacttcccataaaataaatattaacctttgttggtcagaaatgaaagccaaaatcctcctgaatccatctagtcagcatcaagagatcataaccactccaaagaataatttagatccacttagctaagcagagaaacattgatgtt

SEQ ID NO: 112136 - DNA, 328 bp, Glycine max
  unsure (1)..(328): unsure at all n locations
ttgtatagctggctgcgaanccgaagagcaatgagggacagattatttgttgttttccgtgttttntttccagatgctgaacgtatttggggttgtcatgtcaaattcttttgtgtctgtgaagattcaactaaaggggtaccatcatgtataaaaatnntgttctttcatatacaaatggtgttgtttcaacgccgcgatatttggatggactatttaaagaactattttgagaaaaaaaaacttcgtttaaaaaatgggatatgctgctatgttgtgctgtgaggagttttaaaagattcagggaataatatcttgatattgggtt

SEQ ID NO: 112137 - DNA, 339 bp, Glycine max
gtggccaatgctaagctatcaatttgaagttaagtacaagcctggcttaaaaaataaagccgctgatgctctgtccaaatgtcatggtgaggtaaaaatgaattctattatttcttttcccttggtgggctgatagacagaaacttttggatgaaataactaatgacccgtacattcaaaagttactgaaagaagtgcaggagtctcatgatgttagacctgggtttcaagagaaacatggagttttactttatcatggcacgatggtgatttccccccgatcaccctctttccttggtattgaagaattcatatactctgctggaggcctcggtttct

SEQ ID NO: 112138 - DNA, 352 bp, Glycine max
gcctggttgctattttcacccactcttttactatatgcatccccttctatttttttgtaattctttttctccgacgttatgaaactttacgaatttcgtaacgatacttattttccttccgcattgttaccaatccttaccgattatgtttttctctttttttagctttcgaatgagttacggaaactcacggattgcgcaaaaacacctctctttgatttccgccacattacggaatttcacggatcgcgcaagcctgctttcgtttgatttccgagacgtctcaagacttcaatttattgcatgtcatccagtaataactccccgacgaaattaggggatgacaatcgtt

SEQ ID NO: 112139 - DNA, 280 bp, Glycine max
aaagccaataatgttaatacatgaaataaacacagtttttgctggattaataaacttgaacaattttgaaggtaactagcgcagggataataaaagggccttgataaactgctgaatcttcattttacaccttcttaaaaatcatggtttatacaatatatcatctctaaccctcagagaagcaccaaaaaatgtaaaattagcctataattccgtttaatccttttttcggaaataaactaccctgaacctccgataatttccaatccaccatagattt

SEQ ID NO: 112140 - DNA, 197 bp, Glycine max
  unsure (1)..(197): unsure at all n locations
tcatcaagagatataaatatgtgttctggcantgagttcaagaacaatcaatggcatcatcaatcatcttgggatcatctatctgtcaatacttttcaacatcatctctcaagcaattttcaatcaatctttcaatatctgtctacagaattttctgaatcacttctcttcatctttctaagaagtttttatcaaca

SEQ ID NO: 112141 - DNA, 357 bp, Glycine max
caaatcttccagttacctgctgaaagccttggttctggcaaatgtcggttttactgcaactgataatggctgcactgaacccttttcaacctgcaacatgttgaatactttggtccttaaaaaatgttctttgcacaaggacgcagaaatactcttcatatctaattctaacctttccactttggaattggacacctttcaacacaaaattgtggtctctattccaaatcttagttctcttcacatcaccaatttttaggtttcagacattaaccactctctctcacacgtaatttttatgtctcgaagaagacttatttgttagaataatgtctcatctaagagcatgtgacttat

SEQ ID NO: 112142 - DNA, 331 bp, Glycine max
ttaatatttaaaataacaaaaataaacccaggcgggttaatatttaccaaacattggagaaaatgagaacatgacaaaaaaaatttcccaaattttttaaataaacatttatttggacatacataaataaatttaatgtatacatttttgtcaaaggtaaataaatgaagggataaattctataatacattttttaaagcaactgcaggaatattcttaatgtaaattttataaataaattcataaatgtaaagctgaaaaaaatggtataaaaaaagatattgatgacttgaaaaaaacatcaaactttatacagtataaaaattttata

SEQ ID NO: 112143 - DNA, 329 bp, Glycine max
taagacaaatattttgcacattacatgccaaccatcaaagaataaaatagataactagtagaagcagatatttcttttctcttttcctatgtccttttgagacagagcaatgggaatataaaatgttaaaagtgaaaattctgtctaaaacaacaaaattatatacatctccatcaattgcaaccaaataaggcaaaaatatgtataaaagaagtctggaagatgaagagaacaaacgaaaagtaatcaacctaactattaagacctggacagtgagaaataccaaagcaatatattcactactagtaaccctggtggtaaattgatga

SEQ ID NO: 112144 - DNA, 105 bp, Glycine max
tttaccttttttattccccgccgaaggttttttcacagcgaactgatgaaaagaacaaggcatttaatataacgacatgtggatgtaaaaccctattctttctca

SEQ ID NO: 112145 - DNA, 228 bp, Glycine max
gaaaaccttaattaattaccaccccaaaaataaccaaattaatgcgaaccaattttgttttttattaaatattcactggggcaatattaatcacaattaatggggttaaagtttttcccagtctaatcaaattagaaaatttagtttatgcaaacattggaattatcctccaaaatattaaatgaagacttttgtgcgttttcgtgtaaaaatacatttcttcctgac

SEQ ID NO: 112146 - DNA, 211 bp, Glycine max
  unsure (1)..(211): unsure at all n locations
ttattcttgaccacagagtggtacctgtatatatgtcgcaggggtcaagagacctggggacgtcaggtggngtgctatgccccaaccaagcttaccaatcccgacccaacccgggcatattcagtcagtgagaacctgtgaagtacctaaacaggccagctcctggcagtctacagataaaatgaactaataccacaaagcaaggaggctt

SEQ ID NO: 112147 - DNA, 278 bp, Glycine max
aaatttgcttccctttcttcgaatgttgtttctttcttttttctcccatggttctcctcacatgtcttgtgataaatgtttttaaacatgattatattagaagtttcccactggattaaaacttggctattatgaaaccaagaatttgaattttcttatgggttcacaatatcttggtcttgttcttgaaccatgaattgtgttgagtttaggctcctttgagatatgtcttgttattttttggggctgaaacctaacccataaaatcctacaaaata

SEQ ID NO: 112148 - DNA, 265 bp, Glycine max
tgcactgccctggtcataagactaattatctgtgtacaaaccaactcatttgcgaacttgtacatgctcacgcctctatctaggggatgactcaatctccaattcacaacctaagtgatctgatctgaccaactatttaaaaagtaaagcatctctgttaaatgacactagagatatttatggatgaagataagccactgtacttatcacaagaccattttttggccaatttagaccaacacattataggatttaatgttttata

SEQ ID NO: 112149 - DNA, 246 bp, Glycine max
  unsure (1)..(246): unsure at all n locations
tttttttttagcactctcctatgtgctttcctcaacacttgtttgacactatcatatatgaatgcctgacttattcactgttngagaaacagaaagctaaagaactagnttttcagaacaattaactttggaaagaatggaatgaatatataccataggagtctgcaatcacaatgagcagacagttaaagactatacttgtggaaggatagtggatataatggtcctgcagtctactctcatgtc

SEQ ID NO: 112150 - DNA, 367 bp, Glycine max
  unsure (1)..(367): unsure at all n locations
tcaagatgggatccttattcattttagtgtcagagaaaagcttatatggtcgcgtgttccttcagtgacacttattcttaattgaaaatcatgatcaaccaccattatcctcctaagcctaagcagttttgaagaaagtgagacaacaataatggtaggctgaanatgcttgtagttcctaggctgggtagctaaagtctcgttcttatgagagcttcccggaccaacggagagatttcaaaagaaatcaactaaataacaacactctacgcattataagtttctcaaagtaacaactctggtcttttattgtcatcttattcaactccttctctcttcaaattcgcatatatatgccgtattactc

SEQ ID NO: 112151 - DNA, 328 bp, Glycine max
agcctatattacataacttcttgcaggatattatggtggaggtttcaaccaataaataaatagtcaatgagtcagtgtaatgggcatattaacccactggacagatttttttttcccactaaccaaaaattcaagctctaatggacttggggaataacttctatcaattgtgatatactttttctccatatacatgtgaattaagtaaataattatgttagtaatactgaaattggggcaatgtacaaatgcatacttgtgagtaatatgcatatgcagctttcttgattttagtttctcgatttatgtcagatctatctatttcctc

SEQ ID NO: 112152 - DNA, 435 bp, Glycine max
  unsure (1)..(435): unsure at all n locations
cacatgtggtactttgtggcggtcgggcgatggtgcacaacaagtgttccacattcacaagcgcgcataaacccaccattccctgttggccacctccaactgagctcacgtactcccacgtagcccatattctcgttctctcaacaccgggtccccatcaatcctcccaagcttccacaacattcaaacaaaacaacattcaaacagcacaagctatcacagcccaagcaaacagagcaaaggcagaaaactctgctcaacacatcaaccaaaatcacagctnttctcacttaaagaccacagtaacaattccttcgatccaattcgttaaccgtgggatcgacttcaaaattntactagaagtctatagtgcataagcctacattgtgaccgttgggatctactatcaaacatccagaactcattctgtactac

SEQ ID NO: 112153 - DNA, 346 bp, Glycine max
ctttgctccaacttacaagaactttagctcgtcagggagaatgtttcaacatttttggattcttccatggaacacacaacataattggactttggtgccatgaaatgcaagaacttcttgactataacaacatcttccatttttttcccatggaatcacattttatttgcaattgtcatggttcttgcaaaatagttggttaccgattcatcattcttcatgcgtaacatttcaaattcctttctcaaggcttgagttgtgcatgctttgttctattaaaaccttgatattttttcttcattgaatcccaactatctttgaaagttctttgtaagaattttttcaa

SEQ ID NO: 112154 - DNA, 467 bp, Glycine max
  unsure (1)..(467): unsure at all n locations
gctttaaactgttacaagaatgtagctctgatctctcttgttagacaagtggcctcaaatatcttaagaaaggtgggttgaataagatattccaaactactcccctaattaaaaatctatttctctttntattcaagttatgaattcccttaatgacaatcttcttatatattgattcaaataaaacaattcgaatatgaatatcaagcaataataaataaaggagattaacggaagagatagtgccaactcanatttatactggttcggccacaccgttgtgcctacgtncagtccccaagcaacacgcttgagagttccactatcttgtaaattcctttacaagttctaacacacaaggacaatccttcccttatgttagagtgccttacaacaagagactacggtctcttatcccttaaaaataggagaagaaagaataatctcttagaaagagaggatttaca

SEQ ID NO: 112155 - DNA, 354 bp, Glycine max
  unsure (1)..(354): unsure at all n locations
ttgggtagggttcaaaattaagaaggggggtgtgaattaattattaatttgccttgactaattaaaaaacttatccttcttaaagttactagatttaattaggcttttactattgagttaagaaagtnagaaacaagaacaaaaacttaaccaaaagtgaaagtggaaattataagtacacagtggaaattaaagagtgtaggggagaagaagaaagcacaacatttatactggtgtgggcacaaaccgtgcctacatccagttcccaagcaacctgtggtcttgagatttctttcaaccttgtaaaatcctttacaagccaaagatccacaagggatgtacccttccttgttc

SEQ ID NO: 112156 - DNA, 466 bp, Glycine max
  unsure (1)..(466): unsure at all n locations
taccgcgatcctctgagtcacctgccgcatgcaagcttnctctnttcttcggttgccgtgggcggtccttctgtggacaaaactatnggttgtgtcgcgatgttgggttgaggcaactgctgcgtgccggcccttctgggatcgggggatagaactcgacatcccttcgagcatagtcttgagggtctttgtgggcctcgtcgggctgttgaggaggttctctttcaaggacgggagaagcaatatggaccgcatctgcttgcaagacgggtggtgagtagttgggcggcaatccattaaggtaagccgctctgttgtatcccaggtgagggctgccatcgtgccccagagtgtcccttccccgtcctactatgtttgagggaggatggtgcgcacttgccaaaagagttgggtctgcttcggcagccgaactgacagcggcagcgggggccacattcttttccat

SEQ ID NO: 112157 - DNA, 338 bp, Glycine max
tttcataatttcatcatctttgaatcatcaatctttcaatcttttttcaacatcatctctcaaacatctttcaatcaatctttcaatatctttctacaaaatattctgattcatttctcttcatctttctaaaagttttttatcaacacattctcttccaagaaaagttctttgttcaaaaacttgtgttattcatctttttcattctcttctccctttgccaaaagagcgaaggactaaccccctgaattctttgtgtctctcgtctcccttcaaaagattaaaggactaaccgcctagaaatctttgttttccctttacaagattcaaagactaac

SEQ ID NO: 112158 - DNA, 313 bp, Glycine max
ttttttgatgagaaatataatttggcaaaaatatattagtatatttggataaaagttaaaattattaatgaatttttggtgcagattataaattggaggtgtaacatgcaaaacggagaaaaatgaaaaaagaaaaattgaaaaggccaccataccgccgtacggctaaagacacgcctaacgcgggtgcgccttaccgctacaagcccaacctacttacacttaataaagtagtcagggaagtggacaccaaaccctctctaggttattactccttttttttcccccttcttgaacctatatatagagtaac

SEQ ID NO: 112159 - DNA, 395 bp, Glycine max
  unsure (1)..(395): unsure at all n locations
ctcaacttcatgttccccttcttnaagaacgatctctgggctcttgtttcctctaatatggtacaaagattggcttatatggagaaggtctttcataattttttttatagacctcaacctaaaatcatggtagttgacttactaaatatgaaacaacaaatggatgaaaccactactaatttcatagaaaaatttatgaagttgagtaataaatgaatggtacaatgacttccaagagtagaatatgttactatggtcatgagtaacatgcaccctcaactaaaaagatgttgctcacacaagattgtcctgacttgaatcttctgacaaccagatgtctatgattgaacaaatcattactgaaaaacaagaagggggatctaattgggatggag

SEQ ID NO: 112160 - DNA, 223 bp, Glycine max
aattatggtctaatggggtacttttatgttccaaaatatatttttttcttcctattaataactttctcttctttatttcatgcttacttttaatcacctaatgagaaagacttatagagcaccatatctttcataagaaacattgaagccaccaatggcattgaatgcgtaaagatattaacaacttcatccttacgagtgagaaataacccttcttcttaaa

SEQ ID NO: 112161 - DNA, 286 bp, Glycine max
  unsure (1)..(286): unsure at all n locations
cgcagcttatcatatgaatagagatgcgcttaacacgaggcttgcgcttagcgaaatgactgcttttcaaaaaatatttttctaagttattttttagtcctttttccaagaaattgaaacccttatgttaaacatccaaagaatggctgatatactcctatctacagactatatagcangttccaaatgattataatgcatgaaaaccaagatacataatttaaaactggttgcctcccagaaacgcttctttaactcattagcttgagcataacttataccttta

SEQ ID NO: 112162 - DNA, 420 bp, Glycine max
  unsure (1)..(420): unsure at all n locations
gtggcttctttataactntagtatctcagactagatatgattgttttggatgttgcatgaatttttctgagttttgatcaagctctatgtcttttatagtcgtgtgattgtgtctattattgcatctacactttctaaaattgaactttatacataattcattgtgtgcaccaatgaagagatcgatgtgagtcatccagacttgttcaatgtagcaaaactcaatggttatattcctccaaataaagaggtcttaacacttttctcttgaagttccctttaaaatagaatcattccttttaatttcaatagtagatttatctccttaaagcttaagctattaggtggagaccatgaatgattttaggagagaatatatatgtgaaattaggttggagaaaaagttttatttgattagcc

SEQ ID NO: 112163 - DNA, 339 bp, Glycine max
  unsure (1)..(339): unsure at all n locations
aagaggggggagcacgaaattgaaggaatacaagaaggagagacgtggaactttgaaatatgtctcacaagactcttattcatcaaagnttcaacaagtgttacacatgcttatatttatagactaggtagctttcttgagaagctttcttgagaaaacttccttgagaagcttctttgagaaaacttccttgagaagctagagcttagctacacacacccctctaataactaagctcacctccttgagaagtttccttgagaagattcctaaagaagctagagcttagctacacacacctcctataatagctaagttgaccccatgccaaaatacatg

SEQ ID NO: 112164 - DNA, 440 bp, Glycine max
  unsure (1)..(440): unsure at all n locations
ccttagatactcagcttctgatgatgaatcagttgattcaagtagttttgattatgacaaagatgatgacaaaaagcccaaagaatgatttcaagaagaagtccacctgttcaagatcaagtttgatttccagtttcatcagaagaaatcaagaagatttcagaatcaagagaagattgatttccagattcaagaaaagatggattcaagattcaagagaagaaatcaagaagacttcacaagggaagtattgaaaagatttttcaaaaaacaacatagcacagttttgttttttaaaagagtttttctcanaattttctaagttaccagagtttttactctctggtaatcgattaccagtttcctgtaatcgattaccagtggcaaagtttgattcaaaagttttaactgaatttgaatgttcgattgattccaatagt

SEQ ID NO: 112165 - DNA, 347 bp, Glycine max
agttatgtggggaacggggaccaaacccggaatgggtttatgcataaacaacagcggcattaactagccctgataaatgcccaactgaaatccggggaagtatgggttaggctataagcccactcaggcatatataaagagaagcatcgcgggaaggaagagcggtagtcaaagctcgcggttgagacaagaatgtgaaggaagcccaccctgccacataagtaggagctttataagcgcgggtctgggggacgaaggtcaagtggtcgcgatataccaagatgatgctccgagtacattggatatggtacgaccatgccctcctgatttccagctgggaaattggc

SEQ ID NO: 112166 - DNA, 335 bp, Glycine max
  unsure (1)..(335): unsure at all n locations
tgtatgcgcganagagagagggggcacaagcttgttttctttgctgagtgtgtgaacaagtcgtgttgaggggttcgatggaacctgatttatattaatgagtgtgttggtgtcctttttgtagggctattgaaccttgtgaataattccaacttgtagataatagccgggaattattactgaatttgtagtttgattctgatgatatattgaagtttgctacattaatcatctaatgggtatttaaatgttgtcattactcttcgtgaaaaaatactacattttatagtacaatagggttttaaaatgattactaaaatcgttgattttttttt

SEQ ID NO: 112167 - DNA, 370 bp, Glycine max
agtatttttatgatgacaaaaagcccaaaagagtgaggtcaagattgagtcaacaagttcaagatcaagattaatttcaagattcaagaaaagacatctagatgatccaagattcaagagaagaatttcaagaagcaccacgtcaagacttcacaagggaagtattgagaaggatttttcaaaaaccagacatagcacaggtttgttctacaaaaagagttttctcaaatttttctaagctaccagaggatttactctctggtaatcgattaccagtttcctataatcgattaccagtgataaaatttgatttcaaaaagtgtttaactgaatttgcaacattccaaatgatttttaaaaggtgtaatcc

SEQ ID NO: 112168 - DNA, 429 bp, Glycine max
  unsure (1)..(429): unsure at all n locations
gtcaccccataattccnccaaatttgggcaaatttgctttgaaccaaaatttccttttaagaatgatgctctcctacaacctaagacaaggtagaaggagataaattgtacaagctcaaggttcaatcaaacaatcatactttcagctcaaaatgggtgcaagggataaatcaatcatgcacaaggtaagctttttatctaagtggctatctttaatcaaaacatggccttcatcatcttcaatttcatgcattcattccatactcaaagattcatgcaaaaatcattactcaatgttagtcgttctctcaacctgacaaaccgactaacattttcagtcatgatcctaattccatgttctttctctctaatgactgcatgctcattcaaggcatatgatctacgcatttcaattcactcacatcatac

SEQ ID NO: 112169 - DNA, 317 bp, Glycine max
  unsure (1)..(317): unsure at all n locations
tgcttgtagatggtgagctaaactttttttattactatcnnctatcaccgggagttatactacatcttaacccttccatgcccgctaatcatttagctccttattttccacgagacatctcctacccaaacatacgtatattttagagaggtatcatgctatatacatgcgcgtccaaggaatcctgctacctaaacatacatatatacgtccagtgagatattttagcaatatacatgcatatacaaggcatctcgcaacctacacatacatatatatactatgggaagcatttttcctacatacatgcatataca

SEQ ID NO: 112170 - DNA, 312 bp, Glycine max
gaagaactgcatagaatgtgcacgtgaataggtcacagaagcgattcaaaaactcctatgccatgatgtatcccttctttcttcgtcacctcactatttttaagcgaaatatgaataccaagggtgctaaacccctgtccctcatcctcccatgcccttttatatccaaaatatgggaggagcttgcctcccaggtcatccaggcgagctagtgtcttcaatcatgagggacatgctcgcccaagcaagctcagctcgcccaagaagggctcatcgctaaataacacctgaaaatgggaccttcacaccctc

SEQ ID NO: 112171 - DNA, 377 bp, Glycine max
agcttcatgtaagcaagtaaattatgtatggctatgcctccgctgcgtatatgatggtcatttgtcctgatatcaatacatttccaaagcaatcatattaagattatctaaatttaatttcccaatattaactgcattatatattgtaacaacttcatgacatctacattttgcacaattttatagaagacaaaatttgtcacagcttcatcatcctaagcttgcaacatgagttctttaaatatggtttatttatttggtttcaatttaagactacatgtggttattaattactgtgtgcaatattgtattgatagtgtaagattttggtgttgctcattgaattaaaacatcactgtttgactaattaaaatcaa

SEQ ID NO: 112172 - DNA, 418 bp, Glycine max
tgccgccacggagtttttcaactatgctcttgtgtggtggaacaagctacaaaaggagagagcaagatatgaagagccaatggttgatacatggatagagatgaaaaagatcatgaggaagcggtatgtgccggctagttactcaagggacttgaaattcaagctccaaaaactaacccaaggcaacaagggggttgaggagtatttcaaggaaatggatgtgctcatgattcaagcaaagattgaagaagatgaggaggtaactatggctcgatttcttaatggtttgactaatgatatccgtgatattgttgagctgcaagagtttgttgaaatggatgaatttcttcacaaagcaatccaagcagagcaacaattaaaaaggaaaggagtggctaagaggagttttaccaacttt

SEQ ID NO: 112173 - DNA, 381 bp, Glycine max
  unsure (1)..(381): unsure at all n locations
aagctgcttatggttttaaatttttttaatttcanaattatagctttgatgtactatttccatgaatttcaaaaagggttgtttcataatgagttttggtatgaactaacttttnnaaccttcccatgaagcggcctaattagaatgatccggggttattctaagtgattatgaattagtttgtagtctatagttgatcatgtgttctaacatgatataactgcttcaatccaaataaactttgaaatttctaccttatatggattaaataactatccgttatacaagaagcttaagtgcaagaggaggaagtcagggattatatttcactatgcaattaaattttcaccataaatcttgtttttggtcgatgccagtcat

SEQ ID NO: 112174 - DNA, 235 bp, Glycine max
ttacaaagagacatacttcagagagcgcgcatggaagactgcaacaggagttccacgtctttacctgcacatcctaagtggtccaaactgggctaccctttgcaaccccgctcgacgaaacatagtaagagccccgagaacgccccaataccagacctgaacttggatactcaggccgcaaggcgtgtcaatttctcgctcagcccccggactcctataggagtgcagccacagg

SEQ ID NO: 112175 - DNA, 382 bp, Glycine max
  unsure (1)..(382): unsure at all n locations
agcttgagtgaagttaancattctatacaataacaaaaaatagtgctaaattggtttgtacatatacattatctttaacattgccatgtagcttgcacaagatatatgaatccactttantattttatagacttaaagtttaatgtctaagctattgaacttaattaaccttgttccattactttcttctacaatttataagaataattaaattaagacatgttaaaaacggcattggataatgatgtcttgcaagggcaacctagactgagaagacagggagggccaatcacaaaaaataaaacacatccaataaatttttttgctgaataaatacatccaacaaaaatataccattaatttttatacaaaatatttataa

SEQ ID NO: 112176 - DNA, 374 bp, Glycine max
agcttctatataagctaaacctattcactcggatgtttgattcggggacacaatatatcaaggcgctcgaaattgaacagcggaagctcccgagaaattcgaatggtcataacatttactcggatgtctgattcgtggacataatatatcgagacgctcaaaattgaacagcggaagctttcgagaaatttgaatggtcatacctttacacacggatgtccgattcggggatataatatatcgagactctcgaaattgaacaatggaagcgcttgagaaattcgaatggtcataacatttcacacggatgtctgattcgtggacataatatatcgagacgctcgaaattgaacagcggatgctttcgagaaatt

SEQ ID NO: 112177 - DNA, 352 bp, Glycine max
tcgccggatgatgccgatcgaacattttcttatttatatcatccaactgagcttcaaggatggaatttaataaacattggccagtgtctgtcactatatagccccgactgatgtccttgagctcgacatcgctcaatcatttttacaaacgctagtcgaaaatgattttttaccgcaaagcgaacctgtgtggttaagggtactccaaagaattggctgtgctagtgctttaggctgttatcgcgcaagctcaagagatgtctttcgttcggcgactctatcgtgagaatatttatttcgtcaatattgcggaatttcacgcgtgcatagaaaaagattatcttctaaaata

SEQ ID NO: 112178 - DNA, 205 bp, Glycine max
  unsure (1)..(205): unsure at all n locations
cacttctctcttttttcgaatatgccttggaaaaattgttttccgtgaaagaaaaattaanccccggccccttccgaaacgtttccgtaaggaatttcgtgaagggtacgaacgttctttcacgttcttaattcggtcttcttcgtatttccatctctaactggctgggtctctcaacttagctttgcaatgacttttctgtacc

SEQ ID NO: 112179 - DNA, 452 bp, Glycine max
acacttaaatactaagcttaatggctcaatgagcaaggagaaatgatagtcaatcttcaagtaaagataccattttctatatgagaatattgtgataaagttttatatgatataatccctatggaatcagggcacattttgttaggtagaccatggaaatttgacaagaaagcaatccacaatggtctcaccaatgaaataaccctcacccatggaagcaaaaagttcaaacttgttcctttgacaccttcacaagtggttggggatcaaatacaaataaaactcaaatagatgaggaaaagaattgaaaaggaaaagaaagacaacttttaatggttaatgaagagtgtaaggaggtaagtgtctcctcctagaggttagctaataaggaaagtcattctgcaatatagacaaacattaaagaaacgtcccttcttagacaacctccacat

SEQ ID NO: 112180 - DNA, 409 bp, Glycine max
  unsure (1)..(409): unsure at all n locations
tcacagctcttctcaagggtctncacttgttccatgttaagcctccttgtctctctccaacctgtgatccatcatcagacaaatcttcctcagcattagcttcttcttcaagctcaatccctgaaaatgacatagatctctcgcctagaaaggatgctcctcctgcctcaacatttgaaacattggtattaggccacataacataatattgcactattggttggtgtttttgtagctaaaagagagtaccatggtactcttgaggtgcacatgaagttataattgagttgagtgaaggtggaggttgatggtcatcttggtgaggtgtttgtagcatgaatactgcttcgaagatagccatagcaaaggagtctatgcttgcctctgatctccaatagctgaatgatct

SEQ ID NO: 112181 - DNA, 394 bp, Glycine max
  unsure (1)..(394): unsure at all n locations
accggagggctggcaagcttctttgagaaaacttcctggtttctagagcttagctacacacanccccttcataactaagctcacctccttgagaagcttccttgaaaagattcctaaagaagctagagcttagctcacacccctttctaatagctaagctcacctccttgagatgagaagttagagcttagctacacaccccctataatagctaagctcacccccatgacaaaatacatgaaaatacaaaaaagtccctactagaaagactactcaaaatgcctcgaaatacaaggctaaaaccctatactactagaatggtcaaaatacaaggcccaaacaaaggaaaaacctattttaatatttataaagataagcgggctcatacttagcc

SEQ ID NO: 112182 - DNA, 415 bp, Glycine max
gctggccatgactttcggtttccacacctgagttgactttcgtaccaccggctcactctccttagatattggccccccgggcatcttcttcgcttgatctctttgatatcgaggaagatttgcaaaaagcttatcccttccaatgaaaatattgtctagcttcatggcgaatcgttccggctcttgaatccggcaaaaacgagcaaaaccgaatcttttacccatcctatttctccttgtcggaatcaccacctcttgcaagtcaccatagctcctgagactgttgaacaagtgcttcgcattcatctcctccgcaaaattggtaatgtaaatcgttgttgattgtagttgctccttactcctttggtccctggattgataaatatctggtttggtataaccagagcctctccca

SEQ ID NO: 112183 - DNA, 302 bp, Glycine max
taatatttgcggtcagcaaatagatgtacttggaggatatccagtactcctgtgtaacactattataggaaaacatatacatatagcaattccaaccggcacctgtcatcttctaaacaagtaagtgagatctgctagtgctaatgacactcactttgcattgaatctcattaatgatggatcgaccagaagttctcaccttgaaactgccaatgtaacttgcttcactggtcatttatatgttcttttgtgccactgccagcctgttatacttgattaccttgccagcaagactattcgta

SEQ ID NO: 112184 - DNA, 379 bp, Glycine max
gctagtgcatacgatgcatatatgtttgtggctgcaatggaaaatatggtggctgtctgactccctgattctcatatggagacagtggccattttattccaaatttggagaggatccaagaaacctaatgcttggtcttgcttcagatggaatgaatcctttcggtaacttgaccaccaataatagttcatggccggttttgttaatgatttacaacattcctccttggttgtgtatgaagcgaaaatacattatgtggtctatgatgatagcgtgtccaaaacagccaggaaatgatattgatgtttatctgagtcccttgattgaagacttgaggaaactgtgggtaacacggctgatgtgtatgatgcgaatgttc

SEQ ID NO: 112185 - DNA, 321 bp, Glycine max
caactgcgcagcactttacatcccgagccctgccaaaagaatcgccaagaccaccgcccgaaggcttttgtcccacgcaccccctcctcaaaagaacaaaggactaacccgctgaattcgttggagtctgccttcacccttgtcaaagaactcaaaaacgacgacagcccgagaatactcaagagtcttccctttcccataaacaaaagaatgcaaaggactaaccgcccgagaactgtgacctaacacaaaggagggtacaagccctgtggcacaaggagagggctcaccacctgggctgccgtgactgaaaacaagaaa

SEQ ID NO: 112186 - DNA, 437 bp, Glycine max
tactcacgcttgccatttgatccagaagaggaggagcatacaacctatttaactcaaaccacacccacagaactctgcacaagagacttgatcattgtgcggggtgaaagaatgctaaacatgaaaaaaaggaaatatgcaaaagaaaatgtgaagaagtttcaaatggacgaatgcaaatctgctagcacactaatgaatcaaaaggagaagttcagaaaagaagaaggtgttgataacattgatgaaggatattatgggagcttgattggatgtctaatgtatctcactacaacaaggccaaacattctatttgctcaaaagaccaaaactggagtttctgttgacaatcaagttgtcattgctattgcaagtaatcccgtgtgtcatgggaaaactaaacatttcaacatcaagttctattatttgatacagat

SEQ ID NO: 112187 - DNA, 384 bp, Glycine max
agcttcacacccaatcttattacttttgattataatttgtaagatgtcaaatgttacaaatgaaatgacacaaacgttccttcacaaataaatatatatagatcaagaaatgaatccaaaatacaaacaaggagggaatagtaagggtaaaagattaataagggcagtcatgtaatatacataatataaaataagtcatgtaaatatatatatcgatttttgtctgtgtctctcaatagtgttttgaaatgacttaacgatactcaacaaagtaaatccaagtctattgctaggtggattgttgttaaagtaagtaatttaaacaatatgcttatacttatattttagtactgtgtagactaatttgtacttaacgttgaatat

SEQ ID NO: 112188 - DNA, 424 bp, Glycine max
  unsure (1)..(424): unsure at all n locations
ngatgggttcttctatattttctttaaggcattttttcctttgtcgagtgactgcaattgccgtgatatcaacaatgttttgaatagtcgggttctgatggagtgttagctcttttcaacatggtcaagatgtctacgaccaaggtttgatccatgatatgagatttattggcggtaaggggagtgtagtgagcataatgcagttctcgggatgctcgatacctctttttgtcgtcgcgagctttgttgaagttgggcttatcattattttttttggccgatgcggcatccatccacacctgattcctatacttggccaactcttgcatctgcatgtacttagccatcctcattcgaagttcgttgaggtcaaatgctggctttttgcatatgatgatcgcaaaagcttcttgacctaacactg

SEQ ID NO: 112189 - DNA, 247 bp, Glycine max
aaaatgggactgctataaagtcgccaaatgactgcccaagatggaaaaccttcagattctacaccgggggactaacaaccgatgtagaaaccctgccaatattacccattctacatcggggtactgataaccgatgcagaaacacaaccacacaacatccgtggcaaccttagaaccgatgcacaaatctcatatgctacatcgggcgagctacacaacgcgaggagaaagcgcacattctacatcg

SEQ ID NO: 112190 - DNA, 355 bp, Glycine max
tgggggagaagcaatatggagagcaacctgatatcagaatcaactggtatgcaacctacacagaacctaaattcgtgaagaaattgctcgagccacatgagctcacatgcgaccatagccatagatcgatactcaactattgcactagaccgagcgaacacagtgtgactctcgcttatccaagagagtatatttcctccaatgaagacacaataacctgatgaagatcggctatgcatgggacgatccaaaccaatcaacatcacaatgatcatgataggagcatactaaccttgtcattatacaacaacactagcccaggagcttacttaacatacctcgaaatacgcatgac

SEQ ID NO: 112191 - DNA, 387 bp, Glycine max
  unsure (1)..(387): unsure at all n locations
agctntacttaagagctgtctctttttttttactccaattaaacccaaatcttcatgtttataaaaggaataactgatgaatatagaagaatgataaacgcttcagcaggaggatactatgccatggaaccacgaccaaagtaaagaaacctatagaagatgtagcaatgaaagaatgaggtcatgattgcaaccacacccctccaaaggaggttcccatagaagacatcaaagatgaatccctcaaacaataaacacaaatgaaagctatgatggaggctatgattgagaacgtaaccaaaagcatagtaaaacaacttcaaccgttgataccgctaaaacaaccaattttctcatgtgaagaatgtggaggtaaccaccataact

SEQ ID NO: 112192 - DNA, 388 bp, Glycine max
  unsure (1)..(388): unsure at all n locations
tattccttcatagctaagcattagctcgcttgttcgatctttaacagcccccaaatggcttcttccctataaataaccatgttgggggggggggttaagcggttcccggatacagacacgattgcacctgaagactntaatgacttctcaatgtaggaatcaaaaacatgttcccacctcgggaataataagtgaagacttcgaaaaaatcaacgctctactacattgataatggatttcatggaacacactctgtaggcttaaaactctctaacacaacaaaggcgagcaattgttcttgatcatagaccacaactgcggatataccttataatgaagcacgctctgctatacacagtacctctctgtcccggggaaaattatcact

SEQ ID NO: 112193 - DNA, 370 bp, Glycine max
  unsure (1)..(370): unsure at all n locations
agcttctcgcanagcttacggtattatctgggacctagccatggcataggtctccacagaggccattgcctccctcgcccaatattatgaccagntgttgaggtgcttcacctttgggacttccaactatcacccacggtggaagagtttgaagaaatcctgggatgccctctgggaggaaggaaaccatacctcttctcgggattctatccctctttagctagaatttctaagatagtccaaatctcgacgcaggaattagaccacagaaagcaagtcgaaaatggggtggttggagtaccaaggaaatgtttggaagcaaaagcaagagtcttggcaggtaaaggcgaatgggccccaatcatggaca

SEQ ID NO: 112194 - DNA, 416 bp, Glycine max
tctctcgaatgaaatgacaatcaatctctatatgcttggtcctctcatggaagactgggtttgaggcaatatggagagcaacctgattatcacaatacaacttcatttgcaactcttcacaaaacctcaattcttgaagaaattgtttgatccacatgagctcacatgtgaccatagccatagatcgatactcagcttttgcactagaccgagcgacaacagtttgtttcttgcttttccaagagattatatttcctccaatgaagacacaataacctgatgtagatctcctatccatgggacatccagcccaatcaacatcacaatatcctgatagttgcatactacccttgtcttcatacaacaacccttgtccaagagctttcttaacatacctcaaaatacgcatgacagca

SEQ ID NO: 112195 - DNA, 329 bp, Glycine max
cgaccagaatggcgatgctatggccatcttacctgttatccgggcgcttgaattgataaaataagcatctttactcgcacgacgacaattaatttaaaagtctttaatgcgcttaaacttgaacagactaaaattaacattatgtcccaatgactatgcaggatcacgcaacattaaaagacataaaagatttagcacagaacataacacagcaatacggcacgccggatctttgcattgaggggatgcgtaaaaagaacctgataacgatgttatttatcagtcagttgaaagcacaaacgaattttcggtcgtcggtataaccatga

SEQ ID NO: 112196 - DNA, 379 bp, Glycine max
  unsure (1)..(379): unsure at all n locations
gcaagcttcttatccaaggctcatnctggtggttaagctccttcttccatggcttattccttaatggatggcgcctcctctcacctaatttcctttgtcttctgctgcatctccatgggggaaaatcccattaaaggaccccattgaagctcaaagatccagcctccatagaaaccccacaagcaagcttccatcaagtggtaatcagagcacaagagcttcaagtaggtgctccttaaacctccattattttttttctttaccttctcttccattgttgtttcttcatttttctccatgtatctcctcacatgtcttgttctaaatgttgttaacatgattctttagagnttccaccgattaaacttgctatataagt

SEQ ID NO: 112197 - DNA, 419 bp, Glycine max
  unsure (1)..(419): unsure at all n locations
ngtcacaagataaaataaaaggggaacaagttagacatatacggagagattatttgtcttttcctaaagccctagtcctattcttttgttttttgtcgaaatataaatattctaaaaatattttaaccccttcccaaaaaatctcatatcttagtttctttttttttttttaacttaaaatacttctcccctataatattttattgcatataatacttagtgaacaaataaaaagagagatggagaattttattaaacaaattgaatttcttccaattgtaaaaaaaaaagaatgaaatgaaattttttaaaacatcataattgtttatatgaataaaaaaggattagagtcacgaaacttccctcattttcttcaggtgcagaacaaaagggctttttgtcctatgtgggcactcttg

SEQ ID NO: 112198 - DNA, 340 bp, Glycine max
gaccatccgaccacccggtttatcatatgaaactggagactaacagcgactctgccgtaacccataaagaacaagaccacaaacaaggaggctgtgtgcaatgccactataatctgagggtatctggaaatggcctctggtaatcgattgccaacggtgtgtaatcaattacaaggcctaaaaatggagacaggatgataaggtggcctctggtaatcgattaccaatgatgtctaatcgattacacagagtaacagggcactggtaatcgattaccagttatgtgtaatcgattacacaatgtaaattgtaggtttccatgtgcagaagttgtgtaact

SEQ ID NO: 112199 - DNA, 332 bp, Glycine max
tcgcttagcgcgaagaaagcccacagtgaagccctaggctctcttatcgagaaagcccatgttaagtgcaaagtcaacgtgaaaagtaagctacctggaccctatataaggaggatgaagcagaatggaaaaacacaccgagtcttagagctatccaaagcttgagcatatcccttaagggaaaccctctttgtttaggtattccagcctttcttactattattcatgcaaccacttgtttcatcgatattagcccctaaagtgttaagtctcttatgattatgagaggctaaacccacattgttgtgatcctagcaggccaacacccggca

SEQ ID NO: 112200 - DNA, 342 bp, Glycine max
caagtaggtgctccttaaaccttcattaattttttgctttaccttctcttccattggtggttcttcattttttctccctggatcttccacatgtcttgtgataaatgtatttaacatggttctttaaaagttccaccgattaaacatccgagtaaaaagttattgtcgtttgaatttgctcagagcttctattttcaattttgagcttttcgatatattacgggactgaatcagacatccgtgtaaaatgttattgtcgtttcaatttcataggagcttctattttaaatttcgagcgtctcgatatattacagtacttaatcggacaaccaagtataaagt

SEQ ID NO: 112201 - DNA, 423 bp, Glycine max
tttgtgtaatcgattacactaatttggtgatcgattactagtgttcgtttctgaataaatcaaaagatgttactcttcaaaagggttttgactttttcgaattggttttaagttttttctaaaagtcttctacattgtcctcttggcctgacatgaagagtctataaaagcaagggcttgatttgcttttcaatacacttttacacttattcaatcaatcctttacaagccttgaatctctttgaacttgttcttcttctttgcaccaaaagctatctgaagttttctggttttctaaaccttgaaaacttgcgctattcatcctcttcattctcttcaccctttgccgaaaagaatttgtcaaggactaaccgcctgaattcttttgtgtctctcttctaccttttccaaaagaacaaagga

SEQ ID NO: 112202 - DNA, 388 bp, Glycine max
cttcatgaggatgaatcaagtagttttgttgatgacaaaaagcccaaaagaatgatttcaagattgagtcaacaagttcaagatcaagattaatttcaagattcaagaaaagacatcaagatgattcaagattcaagagaagaaatcaagaagcaacaagtcaagacttcacaagggaagtattgaaaaggatttttcaaaaaccaaacatagcacagttttgttttacaaaaagagttttctcaaatttttctaagttaccagagtatttactctttggtaatcgattaccagtttcctataatcgattaccagtgataaaatttgatttcagaaaggttttaactgaatttgcaacattccaaatgatttttaaaaggtgtaatcg

SEQ ID NO: 112203 - DNA, 374 bp, Glycine max
aatgatgctctcctacaacctaagacaaggtataatgagataaattgtacaaactcaaggttcaatcacacaatcatactttcagctcaaaatgggtgcaagggataaatcaatcatgcacaaggtaagctttttatctaagtggctatctttaatcaaaacatggccttcatcatcttcaatttcatgcattcattccatactcaaagattcatgcaaaaatcattactcaatgttagtcgttctctcaacctgacaaaccgactaacattttcagtcatgatcctaattccatgttctttctctctaatgactgcatgctcattcaaggcatatgatctacgcatttcaattcactcacatcatacaactgg

SEQ ID NO: 112204 - DNA, 380 bp, Glycine max
agctttaagcatgattgaattagtagtggtagtaatgaaggcagaaggaaacgtttcgggctcggggtcggggtcactaccatcacctgaatctgatgataaggcacttttagctgatttaccgtactgtgatgcgatctggatgcctgatttttacatgacatcagacgcgcgagaaagttagtagcattttgcattctttgtttaagatgtaaaattttcagtttggcgcatgcgacagacttgcgaagagctgagtatgttcctttgagatactcgacaacctcttccatggacgcaggatcgttaaaggattgagttgttttacttgaattaatacaccagcgagctctgatagctgccagagtgggttctatgga

SEQ ID NO: 112205 - DNA, 379 bp, Glycine max
  unsure (1)..(379): unsure at all n locations
agcttcaacattcaatttcgagcgtcttatatattacgggactcaataagacatccgagaaaaaagttattgtcgtttgaattggcttatagtttaaacattcaatttcgagcgtnttaattattacgggactcaatcagacatccgagaaaaaagttattggtttttgaattggctcagagcttcaacattcaatttcgagcttctcgatatgttacgggactctatcagacaaccgagaaaaaagttattgtcgcttgaattggctcagagcttcaacattcaatttcgagcgtctcgatatgttacgggactcaatcagacatccgtgcaaaatgttattgtccgttgaattagctaagaggttcaacattcaatt

SEQ ID NO: 112206 - DNA, 392 bp, Glycine max
ttgagctcattcacacgacaatgactgtgtatctctgatgtctgattgagtgcccttatatatagtgacgctcgaaattgaatggtgaaactctgaaccaattcaaacatatatagctctttactccgatgtgtgattgactcccgtaatataacgagacgctcgacattgaatgttgaaactctgagccaattgaaacgaccataactttttactcggatgtctgattgagtcccatcatatattgagacgctcgaaattgaatgttgaagctctgagctaattccaacgacaatgatatttttcacagatgtctgattgagtcccgtaacatatcgagacgctcgatattgaatgttgaacactttgactagtttaacacaatagctttt

SEQ ID NO: 112207 - DNA, 375 bp, Glycine max
agctttgtgtaatcgattaccattgattgtttctgaataaatcaaaagatgtaactcttcaaagaggttttgactttttcaaattggttttaagttttttctaaaagttataactcttctaatggtcttcttgaccagacatgaagagtctataaaagcaagactttgttttgcattttcaattaaattcattaattcaatcttatatacttttcacattcatttgatcaatcctttacaagccttgaatctctttgaacttcttcttattcttctttgtaccaaaagctttatgaagttttctggttttccaaaccttgaaaacttgtgctattcatcttttcattctcttctctctttgccaaaaataattcg

SEQ ID NO: 112208 - DNA, 415 bp, Glycine max
tcttcttctccatcgcgctcgagaccgagacatctcactaccttacctaggtacgtttcgtgactctttcttctctttaacatgttctatcgaatacataggtctgtttggggagctcgtgctcactgcatgggctctttgtttgtttctactgcaaggaccttacctaagtacgtttcactttgcagtccatttaaggtgctcagtcgtgctcatagggtctgattttgattgaggtaagtcatgctcactttgccaagtgataatgcatttgaggctttgacgccgcaagctgctttatataaaaatgtgcaaataagggttctatcccgaaagcaataattgaatttgtttgaagaagagcagtaattgtataaaacccttgctcaggtatattgcctaatcttttcttgca

SEQ ID NO: 112209 - DNA, 376 bp, Glycine max
agcttttgcgggaatttaatgttgtttctcggagaggatctcttccgggcatatttgcgcataatcttttgaactacgaagatggtgtccatcatctttatgttcttaatgaaagctccttgagctttcccaataatagtcttaagcactggggctatgcggttggccaaaattttagacacaatcttgtataacaaattacagtaagatatgggtctaaaatggttaacctgggaggcctgatcatgcttaggaataagcgcaataatagcatggttgagctgctttagaatttttccagttgtaaagaattcattaaccgctgcacagatatcatcactaatgatcttccaagccttcttgaagaataaaacat

SEQ ID NO: 112210 - DNA, 399 bp, Glycine max
  unsure (1)..(399): unsure at all n locations
tggacgaataggtgatgcatctaggaaactcttcttcttacaagtntgaaaattggaaatatgtattggttctagggtttacacactaatggataaaaataatggtttgtgtctacgaatgcagggttaagttcgctcattgggccttaaagagactactaccgaatagccttggagaccttatgagtgtctgagaagccttgaacaatatgatcactctacaacatatctgtaattaaagcatcgatttgatacaactacacatgtggatgggcatgttcttaaagtttcctgacacaagaaactatatggcttgggatcaatgatgtgttaaaccttatcgagatgattttgaacagtcaaatcatctaacgtgtttgtgtatgttacctccttttt

SEQ ID NO: 112211 - DNA, 353 bp, Glycine max
agcttatacttatgtggcagggtctttttccttcactttcttgtctccaacgcgagctttgaccactgttcttcctccccgcgatgcttcttttcatgtccgcctgagtgggcttatagcctaaccatacttcccacgatttccttgggtatttatcaggctagttatgccgccgttgtttttgcctaaacccatcccgggttcataaccgttccccaacataactcgggccatcattaccgctgcatcggacagacaaggctgcccaaagagggagtccccggaggaaatgctgaccacctcaaaagactggaaagcagtttctaacgattcttttgcggcttccacataag

SEQ ID NO: 112212 - DNA, 453 bp, Glycine max
cgaagtatgaatgctcagcggcttcgacccattagtatgactattgggctttattagaaagcccacgtgcgcgggtatcaagacgagatactatgatgaagtggacagaatcactcatatgtcatataccaaacgtgaagcgggacataaagtactcatggcctatataatgtaaacatgtctgaagtgaaaaagatacctgaagcagacataattggcaggcgcatagaatacaatcataaaagactaaagtgcagatacccgaagataacttaagtgcctagaatgatagcctaaagatcatattcgtattcacggcttataagaaaagagaattataaactaaacactaacaatgtggtggtggtggtggaagatcgaagctctgacgaatataaaccacatcttgtttcagctatgtgagacggatattcattcctgcaaagcgattat

SEQ ID NO: 112213 - DNA, 376 bp, Glycine max
agctatgtaatggacatatgttgatcgtccagacaatgaattttcttcataaaaaaaataaaaataaaaataaaataaaatatatatatatatatatatatatatatatatatatatggaaaaagctaaaatatttacaaaatgcacgggtaaagttaacagtaacaatgttccctaggtcttctgattcataagctgcctcagtttattaggcttaaccatttccagtatacttgcttcatctaatcacattatttgttttatttcactgtcaaaatatagacctttctggaagttgcagagccaccaaagcaaattaatcatcatgaaatttctatgactagaaaacgtgaattatagggatcattaaaatagt

SEQ ID NO: 112214 - DNA, 418 bp, Glycine max
ggaactataaatctcagcttaggaaaccattaaactaggttttttattttaaatcaattgagaagcttcgccagatccccatgaaaaaccttattcacacctttcaaagtgagtgaaaaggctaaacaaaaaattagggaacttagaaaaactaaatccttaattgaaggcgtaggtgacaatcatagtgaattactaaacaagattggtagtttacttaaggtcattccagatactccccaagcctcagaaaatacattcaaaatggtaacaagaagtacctccaaattaattaatgttattaatgaagatagtgaccaaaactcagataacacaactgagatagaatcagcgtcagagaaaaatataaattcaattaattccaaacactggaaaacaccctgcaaattatattatc

SEQ ID NO: 112215 - DNA, 406 bp, Glycine max
aatagaccaatttatgttatggaaaagaggagaatactaactatatatacttcgaaaatacttttcataatagtcaagaaattatataaagcttagctggtataaaatgtcattttctactaatcatcactaaacaacaaaccgttttagctcaaccatctcaattgattcatacaacataatcataacacaatcctgaattaccatcaacattatactgtcatcaccatttatcatcaagagccatcaaatatcataagtcacatataatcttcaactatcataatcttcaactatgatgtatatcctcaacatactcaatcaccaataaccatcatcataactgaagtacaacatagactaaaacaacttcaaaacatcaaacattgactgtactccacggagt

SEQ ID NO: 112216 - DNA, 134 bp, Glycine max
aaaaatgagagagacatcaaatcccgctcatctaatcggccatgcaacggacattcgcacacatagaagaatcccctaccctgctgacaacacgccaagatccacagaagacgccaatttggcaggaacaaacc

SEQ ID NO: 112217 - DNA, 382 bp, Glycine max
agcctatgcgcatatttccttacgaacgttctcttgcacaagacattctattaactaagaaaatgcacccatatacaatcaaggcagcttcgttacctagattatttacacgtacttccaaagttatttgttacttacatcacacacatctccttggctaaatctacatacatgcatactcaaagcattttgggatatcaaaaattgcacatgtgcacatcttggtatttctaatacctatacatacacaagcttcatgatgaatcttgactatctacacaataaggtgctacattccatgctcttttcaagtttttgctacctaaagccgcatgccaattcaagtatattttcctttgctgactaaaattggattcaaatt

SEQ ID NO: 112218 - DNA, 431 bp, Glycine max
ctcagctaaagtatgcccgagtcattcatccctatgagatgttgttaattattggcgatcagaattgcaattccttggattatagggttgaaccaagctcacgcttttacaaaaaggttcatcaagtcaaaattgaaatatggaagtaaccgtcttgcaaaattggggcaaaagatgaatcacatcacagctttcgtctactgccaaacatatttaggattattgatgtccttgttacttccagtttcaccttgacaaagatgtcatggaccatgtcgaaaatctaaattgattcaaccccatatcctgcgtaaaaattcgcaatacttcgactgtacatcattcgcatgcatccatgcttttcattggttgcattgctcattgcattctttccttgaaaaataaaataaaataatataaaatgaacttat

SEQ ID NO: 112219 - DNA, 377 bp, Glycine max
agcttgtatgatgcaagctccattgtttcttgtaggcctaggatcttcttcatcaatggattcctttgcttcttggaagataaatggcagcggaatggagaagaaagagagagaggagacatccttcaaggagaaaatgagtctagaagaagctcaccaccataggaggccatggataagagcttggaggaagaaggagatgaatgaagggagaaggagagaagagcacgaaattttgtaatcaaaaagatgaaatctgaagttaatattcaaatgatcaaagttaaaaaaaatgcacacacatgacctctatttatagcctaagtgtcacacaaaattggagggaaattcaaatttcacttgaatttgaaattgaa

SEQ ID NO: 112220 - DNA, 359 bp, Glycine max
tcaacctttggccaccatttctgccccaaatcgctaattgagagcattttcggagccgtgaagtgcgtggctacgagtgggacttcgaaaatccaggtttgggtggacttctttctctcttaaatttcgtgggtatggcgttatgggagatatgatgggtggttttgctcattttctcgctcgtgaatattatttgtgaaagcatttgctgaaaacttgttgaaatcgccatgtttggatgagttagacctaccctttctggtttagggcttttgtgactgatgttgcgagtgattctgcctgaattgctcgcggatactgctatactataccgctgaactatcccctgtttgatcgct

SEQ ID NO: 112221 - DNA, 381 bp, Glycine max
  unsure (1)..(381): unsure at all n locations
agctataggaataattaatcaacctttccttcttaattattctgaggccacttgatcctacaagtggtatcagagaaggtttcttgtataaagtctaaccactttaagattcatggccttcttcaatcctttgtttcctgaaggaaattccattcgtaaacccgccattttcaatggtgaaggttaccattattggaaaacccgtatgcagattttcattgaagccatagatttatacatttgggaagcaatagaaattggaccataccttcccactggtatagatgttagcccaagcactgtaaaagcaaggcttcatgaagaatgtgattcaaaggtgttngatgataacaatgatgaccaccaaaggtgatgaacaaa

SEQ ID NO: 112222 - DNA, 426 bp, Glycine max
  unsure (1)..(426): unsure at all n locations
ttgaatgaggctgaagaagctgctgctcatgttcaacaagatccggtggagattaatttatctcaacctcatttgtcacaagatagtgacatggagttgatggtaaatatttgtcacaacaaagtagttttatctcaacctaatttgttgcagcactccatttttatatattacaattattcatgtttggcatttgcatgtaagtccctgcaactattgttccaccaatagcaaggaataagctaaccataacaagagccaaacaaaggaaggttgctgataaagatgatgcagaaaactgaagaagcattttttgttgtattttgaaagttgctgaaagttgctgaagacccatcttttgtgcattntgaaggtgctgagtttgaaggtgctgatgaagaaaactaaaagcatttttgtgcattt

SEQ ID NO: 112223 - DNA, 379 bp, Glycine max
agcttaattgtaatcattgtgatttttatgaaagaacacgctttatggcgcccttaccgaacgcgtgccaaagctagagtgatgagtgaaatagaggaggtgccagagtagacgaaggccacatggaggccatgaaagagcaaatgatcacaatgatggaagccatgatgagtatgagaaaaatgatggaggtcaacatggctacagtcattgccgcaagtaccgccactgaggtggacccgactcacccatctggtctcaaccaagtaaatcgcctaacctcgaatatggtatgtcagagaggcgaagcgctgggaagtgcgggtggcccccattttgtgcaggtctagagcaagcattccttcccaccatatggctt

SEQ ID NO: 112224 - DNA, 411 bp, Glycine max
catgtgtcagagtcgctcacctatcgcctatgtatgcagcatgcggcgtctcaaatcactatggcgatgagaagacctccacatcgacccattaacaaacccaatcaaactcttagtcaactcttgtgtgcacaagataacctctgtgatgacaacatgcgctgttattgcaggtctcactaacaaggtcataccctgctttggatcacacgatgcttgtgggaagatcaactctgaatgtggacgatgtgagtgccactgttcacacacatgattgatcgatgagacaccgctacgccgatgatgaacacaatgcaatagccgtggtggagtctgaccgagggatgacatctccactgagacccgatgatccatcatgaagatcagaatctccactgctttcactacgag

SEQ ID NO: 112225 - DNA, 377 bp, Glycine max
agctagttcagaaacgtgcatttttttttatacacaattcccgatacaccacaacaaaatggtgtatcagaaagacatagttgaactttaatggatatggctaggagtatgttaatcaattacactttacccgtatgtttggggatgtatgccttgaaaactgccatgtatttgttgaatagggttcctagtaaggcagttccaaagacatcttttgaactgtggacaaataggacgcctagtataaggcacctgcatgtttggggttgctttacagaaataagaatttacaattcgcaagaaagaaaattggatgccagaacaatcagtgaatattttattgggtatccagaaaagtcaaatgggtataataatat

SEQ ID NO: 112226 - DNA, 427 bp, Glycine max
  unsure (1)..(427): unsure at all n locations
cgtggcttatgttgaaaagcatggccatagaaactgtcgttcagtgcctgccaaagcaggtaatattacaacatatgtatagcttctttttttttatcaatctgagtcttaatattcttgatccatcaatgacttcaagtttaatttgatggatcaaattttaattcctaattntgtatgttccgtacatgcacgcgttcagtgccagccaaagcgggtaatacaacttttttatacttttttctcaatctatgaatcaatgttttaaattgcagtagcagacacgataaggttgcaattgcagttgcgatattcagatactccaaaaacttttaaaacctagctagcaatgagtgtaaatgttcttaatccgttgaaaaatcataagtcaaatcctaattttatgtgctacatccatttatatcta

SEQ ID NO: 112227 - DNA, 373 bp, Glycine max
agcttttcgattcattctatgcatttatgggggtccacattgtgtttcgtgcatttttattctcgttttgtttactttatataccccctgttgacgtgcttaagccattttacttaagtctttctcgcttaacttaaaaataaaatcaatttccaccgaacgtttgaattgtattatccgttaacttcggttaaaatgaattccgaccgttcggtcgtgccgtaaccacgttggaaatcaaaaggaggtaaaaaatgatattataatcaaaaaaacatcttttagtaaaataaagcggaaaatcaatcggacgttttttctctttgggatttctcattcttaatcgaattgattaataactaaagtgaaacta

SEQ ID NO: 112228 - DNA, 432 bp, Glycine max
  unsure (1)..(432): unsure at all n locations
ctatgaaactcagctggtttgggcatagcaccccgcctgacgttcttcttgtctcctgacccccgcgacatatctccaggtaccactctgtggtcaacgaataaaagcaggaagttcacccttctacacttcctcatctcaagcttgtaggattatggggtacccatcacatgtggtactaggtggcggtcgggcgatggtgcacaacaagttttccacatccacaaagcacacataaacccaccatcccctgttgcccacctccaactgaggtcacgtactcccacgtagcccatatcctcttttctctcaacaccgggtccccatcaatcctcccaagcttccncaacatcaaagtaatacaacattcgcacagcacaagctatcacagccaagcaaaacagggcaaaggcagaaaactctgctcaaaca

SEQ ID NO: 112229 - DNA, 378 bp, Glycine max
  unsure (1)..(378): unsure at all n locations
agcttattacctagtgatgattattattcnttttctgatgtgaatcgtcaaaataaattacgaattaataattcaaataataccttctaatattattaaggattcaatgactaatacttttatatatttttagtttaattatttattaactcttttaatcgaaaataatcatgttcgatttaatatatacatgtgttgtgtcatgtaaatattaatattggctgatgtgtatatgattcatggggcgtgataacgtgatatattgggattatgaaagtgtgatgaactgtgtgtaagagacaagctgagtatatgttaaattatgagatcacgcttgtattgacatattgtgcggattaagtcttgagttatgaattg

SEQ ID NO: 112230 - DNA, 419 bp, Glycine max
tgaatatttttttctatgtaaatttaacgaattttgattttagtctttataaaaaaattcttttgacttttatctctcaaaaagttaagtttttattttttttatccctattattacatgacactcgttaacggtctatggatttagaaggaccaatgatcatcctaattaacacatgttagtagtgtttgtggattatggtataatatctacatctaataccttaaatttaaagataaattaagatgaagattcatcactttaaattaaaaaattcaaagataagaaccaaaaaagaattttctatagtaaaactttaaagtatcatttcaaaatgtgtcataaattaatgaataagttaacatttttcttattatagacctaaagactaccaaggtcaattattaaaagcccaaaca

SEQ ID NO: 112231 - DNA, 386 bp, Glycine max
agcttcctcggtgccattcctgctattgtttaattaggaaagctagttttagtgggacattactcttaaagcaaaaatggcatataaccttttcccataaatacaaacatcaatgtaaatttaagcaagcatatgcgcgtgtttccttacgaacgttcatttgcggaagacatcctattaaccgaaaaaaatgcacccatatacaatcaaggcagctttgttacctagattatttacacgtacttccaaggtgtatttgttacttacatcacacacatctccttggctaaattcacatacatgcatactcaaagcattgtggggtaccaaaaattgcacatgtgcacatcttggcatttctaatacctattcatacgcaaacttta

SEQ ID NO: 112232 - DNA, 419 bp, Glycine max
  unsure (1)..(419): unsure at all n locations
tgacatattctgattaggtttgatgggtttgttgttgattgattcataagtgaagatagtttgaattaattttttttacactcgtattggtgtgtgttaaatcccatcttgagctaccttcaatctacattttcaatgtgtgttgatgctctaatttggccgattaggaacgagcattattattgttgatagctactgctagttggtgccccacgaacaaagccacatgacccataagttcatgtccatcctttcctctactaataatattgttttcactactaacattngcaaccctactaatattgctattatcattgctactaataatatgtgtctattcttcatgtgtacatattncaacttcacagctgaatatcaagagcgaacaacatttctagaagtagagatataaattg

SEQ ID NO: 112233 - DNA, 375 bp, Glycine max
  unsure (1)..(375): unsure at all n locations
agcttatgatttatgaagttgttttatttcttgtaatcatttnatacacatgaattttgagtagcttgagattntttccgcgaatcttctgaatttttaatcttctaaaggatttcagaagcttctgattaccctaatctttctttttaaacttcctctagtctttactctttagacattgtctcacatacttaaaaggtgattgatgatatgtagcggacataataacaatattggtctcaaatgattccttcatcaaattataagtcttttttctcaagcattaaaagcccatcatccgaattacaggttaaaatacttaaaaattattatatctaaaagtttgtgagtatcaagaggatctttttactctat

SEQ ID NO: 112234 - DNA, 425 bp, Glycine max
ggggcacattaaactaaaataactaatatctaactatatatctaataatgattatgttataagtgtaatgtgaaatctaaaaatgaaaaaaaaagtctcaagctttgaaacattacaatgaagaaacaatatcataggaatgaagagcaaaccaaaagtagcctgttatgtgttaggttcttttgcataatacaatattttcataaataaaaatgcatattatattttgagaaagaattgctacgtatacacacatgcatgttaagtactacccgttatgagtccttatacatgctactaaaataaatattactacattatagttatattggcatattatattgtaatatcaatatagttacataatatatatttattaattttgaaagggagttgggtgcggggctgaaacccatggttgctcc

SEQ ID NO: 112235 - DNA, 373 bp, Glycine max
  unsure (1)..(373): unsure at all n locations
agcttgaaggagaacttcatgctcttttcaacctancaactcagcttgccatgaatcagaaatctgcacctgttgcaagagtctgtggtctatgttcttctgcagatcaccatacagacgtttggccttctttgcaacaatctggagccaatgagcaacctgaagcttatgctgcaaacatttataatagaccctctcagcagcaaaaccaacaacaacagaataattatgatcattcaagcaacatatacaattcaagttggaggaatcatccaaatctaagatggacaagtcctccacaacaacatcagcttgtccctcctttccagaatgttgctggtccaagcaagccatatgttcaaggatgcactgg

SEQ ID NO: 112236 - DNA, 404 bp, Glycine max
tgtgattgttgcaatggcaaaggaagtctattgttatggagaagcaaacagagttggattattttgatgagaagaaactgatgattgctaaattgttgaggagaaagaggtacatgcttctctagaggaaactaaagtgatgtgcaactgcaaagtactgagacactgactaaagttagattggctgccaagaaggctgaactaccaaatcttgatggtacagaccaagtggggattgttggtgtatgctgaaaaatattttaaatctagggtagtagtccagaagcaaatattccaatggcttttataagtatttaagggggtgtttggtttggttggttcctgttctcattttcactgaatatagaaaatggtgatagaaatgtattcgggtggatttctgt

SEQ ID NO: 112237 - DNA, 236 bp, Glycine max
agactataacaacgcccgaacaaacctctctagttagcttatggaaaataaggttctgaataactagagagataacctcggttattctggtctatcataaggccattcatcacatgtcgatcacgatcttgcagaaatatgtgattcctcgcaacatggctcatagttttataggaaaatggcctacatataggatgcatatgtgagatggctttctgacacacatacaaaaaaga

SEQ ID NO: 112238 - DNA, 438 bp, Glycine max
  unsure (1)..(438): unsure at all n locations
cgaccttgatactcagctatagaattataataagagaacaatgacaattgatgaatcaattcatgcttcctttgatgagtctaatgctatttcttcaaaaaaggatantttagataatattgtagaatctttagaacaaatgcacattcatggacaagattctaaaggaaaaggagaaggaagcaatgaagatcctccagtagaagtcaaagcaaataatgatcttccaaaagaatggaaagcttcaagagatcatccccttgacaacattattagtgatatctcaaaaggggtaacaactagacactctctcaaagatttatgcaataacatggcttttgtatctatgattgaacctaaaaatttaaatgaagccataatagatgaaaattggataatagctatgcaggaagaactaaaccaatttgaaagaaataa

SEQ ID NO: 112239 - DNA, 409 bp, Glycine max
ttctcaagagagcttctcaaggtatttacctagtctataaatagaagcatgtgtaatacttgttgaactttgatgaatgaaagtcttatgagacacacttcaaggtctacttctccccctcttttattccttcaatttcgtgctcccccctctctctttctctccctctttcttttcctccattgaagcatccttccaagcttcttatccaaggctcatcttggtggtgaagctccttcttccatggcttattccctagtggatggcgcctcccttctcctcttctcctttgccttccgctgcatctccatggtgaaaaatcaccattgaaggacctcattgaagctcatagatccagcctccatagaagctccacaagcaagcttccatcaagtggtaatcagagcac

SEQ ID NO: 112240 - DNA, 426 bp, Glycine max
tcaagcttaaatttgaattaccatatatggtaatcgattctcttggcatatgttgaattcaaatgttaatagctgttagtaaatcagttttggctactggtaatcgattacatcctctggtaatcgattaccagagagtaaatttcttgtaaaagacttgttaacttaaaattcttggccaaaccttttgctacttcaattggaattcccttcctatttaatataccctttctaagactctatagactgtcttgatcatccatcttgaatatctttaattgctttgtcttgaataaagctttgagacgcatgtgatcttttggcatcatcaaaacatcggcttgatcctttgtctacacatccaccgtagataaacaggaccacaacatttgatttctctgaccagatgcacaatcaagtgaatca

SEQ ID NO: 112241 - DNA, 380 bp, Glycine max
agcttctcattgaagattgagacattttttagagatcaagccaaagtctccatcacttctctatccattcccaacctgtgataaatgtgaggttgtgcatgggtaaagagaatgccctattgacaccagtcaagtacaaccatggatgatatcatctttgttggggcagaaaataattcttacaatcaatatcccaacaatttcaatcaaggacataggcttcaggaaagtcaagggatgtataggcctcaaaccatgcaaaatcaaaggcctagacatgagaaaagaaaacctactcttcaagagaccatgctttattatatggcccaaaatgatcagaaaatgaagctggtggagtttcaacttaccaacatactatt

SEQ ID NO: 112242 - DNA, 389 bp, Glycine max
  unsure (1)..(389): unsure at all n locations
gcttgccacccagctcgcccaggcaagctcagctcgtttatgctatcanggttgcttcctacagaagcaacagccttctggaggaatcttctcgatggctcaagtgcggcctggttatctatttaacaccccttattttatactaagtacacctgcacgcccttgatgtgcgaaacaaatattttgataagcttctcgaagcttacgactgttcgtaacgatgcttattttatttccgtaatgttacagaaccttgtggattacataatcatacgcttcctgacttacggaatgtgactgcaaccttctaattgcgcaagcatgctttcagtttatttaccgagtttcacagtaccttacagatcgtgcatcataattttaattatttt

SEQ ID NO: 112243 - DNA, 121 bp, Glycine max
aggcggaccacaggggcaactgggatgcgaagaaaagcccgatggcaaatgccaccactacagaccgaaagtcgagactgaaaacccacacgaccgaaaccaaagactgcgcgagaagacg

SEQ ID NO: 112244 - DNA, 370 bp, Glycine max
agcttgttgttagtgcgcagatgtgtttttaattgtgtccacggttccaagaatcttttatttttcaaaagcggcacctatttaagatactgtaattgatctttgcacataattcccagcttatcgacactaagcacctcctttggaacaatcttaacgtctggcgtaacttatatattaaacgcttaagaatattgttctttgcatataaaacgggacattgtagataatttactacttggcatagataaagatatttaatgtattactatgaaagagttaaccctgcagttggggagcccaactgctaagggttgagtgtctgtgctcttgttgcatggttgaagtgtaaggtatacacctgatttaa

SEQ ID NO: 112245 - DNA, 415 bp, Glycine max
  unsure (1)..(415): unsure at all n locations
ntgcagaagggtttgtctgctaggcatttggtgtttctttaacttgaaacagcagcagagagggcgaattcatttggggttgcttcgcatgttacaaactatattctatgtttaacggcccggctggtactattatttctgcgcggaactgtaagtttatctatgttgatattggatgtttttgttgtgcttaagatggacatataactttgatcgtgtttgggtccaatctaatttgttttcaaccttcctgtggttataataactgatgtggaattatggaactataaacctagagtaaacttctagggcgaatactaatctaacttgggtctgagatgttatctggccaaacaaacagaaatatctattatatctaatcaatattttcactaataaggtgtagaatgtatat

SEQ ID NO: 112246 - DNA, 371 bp, Glycine max
ttaatccccgcggctgcagctgtaggtaaagccactatgtttttgctcatgcaacacatggtagctgtggctatacgatacatcttgcctaacaaagtcaggttagcgataactcgcctgtgctttttcttcatgctatatgcagcaaagtcattgatcctgccaagttcgatgaattggaaaatgatgccgcaattatactgtgccagtcggagatgtattttccccctgctttctttgacatcatgattaccttgattgtgcatctggtcagagaaatcaaatgtgggggtcctgtatatctatggaggatgttcctggttgaaccatacaagaacagtctataagggtataaaaagaatctctctcgt

SEQ ID NO: 112247 - DNA, 433 bp, Glycine max
  unsure (1)..(433): unsure at all n locations
tcgttctcagatccctcttgctggactangctttatttatatagccctcctaggtttagactaacttatactaagcttcatcctcatatccctcttgttggactaagcttaatttagatagccctcctatgtttaaactaacttaaactaagctttatcctcagatccctcttgttggactagacttagaccaaacaacattattgtaacaacatatttaaaaccaaaacttaatccgcaaatccctcttgtaagactaagtttcaattctgtttcattcaagttctaaggcaacaatacatttctcaatgctaaagtcacctaactatgcacacaaatgggtgatcagaccaagagtatacggaacttaagcattgaaagaagcattgaacacaagaaacacaatcaattagatattaaagaaattacatcg

SEQ ID NO: 112248 - DNA, 363 bp, Glycine max
  unsure (1)..(363): unsure at all n locations
agctaattagatatatncttcttttttcttctactataagtgcctatggagaacattattctaacatacctcatgagaataaaggtcctttttcctaacatttccacttctcatgaaactcgatacgcgacctctatcatatactagntatctataaacttgcaattcatgtgaacttatcaactctaccctctgaatcactgaacaccactttggttcctgaaaaccattatttgatccaccatgacttacccaatcacgagctgtctaaaaccccacttaataaccaaccacatttttgcctcttgaatatgaacatatttcaactcattactatttagctcataaccatttgatgaatct

SEQ ID NO: 112249 - DNA, 416 bp, Glycine max
tgattcgttgcaggggtaccatcaaattatattgtttcacgatgagatacataagaccgcattcaggacttaccacggtcattacgagtctaaagtaatgttcgtttggactatgcaatgcgccctcttcgttccaagccaccatgaacatgctcttcacaccatatctctggcagttcattatcatcttcttcgatgatattttgatctatagcccctcctttgaggctcacttacaccatttacaaacagctttttaggtgttgttggacaataaatttgctttaaaattaaccaaatgttcctttgcgcagccacaggaggaataccttgaccacatggttttcggacagggggtggaacaggtcgcttccaagattgccgtcattcaacaatggcctcctccatgctccacc

SEQ ID NO: 112250 - DNA, 349 bp, Glycine max
  unsure (1)..(349): unsure at all n locations
agctagggcactcttacgcttttttattccccgttcaatggcacacttattacttttaaatggtcacatacacaatctctttgcctccacaagattgtctgantcccagcccatcccgaatattcttactctttcaattatgccgaatacattctttctattccccaaaatcatcccctgtgaatgtgctaacccaatttatctacactagccagggaatgaactgttgactaagctcccttcctgccaatgaactatgtatttgatttcatctgatgttacctggaaaactaaatccaaaaaatgaattctgatcgggaattccctggagaatctggagattgattcg

SEQ ID NO: 112251 - DNA, 416 bp, Glycine max
  unsure (1)..(416): unsure at all n locations
tatccaaagtgactatgacgtagtgcctattttttataatggncttatcctctgttaacttatatatcttttgaatgttaatcctaggtttttttaacttcctaaactttatatattctaaatctatatatttttcaattatcatttaaaatactcttttttaatcacatattgatatgtatatgctgttaacatttttattccttttctctggaatttagaagactttcatgattatcaagcttaaagtttatccaaggtgatcatcattaacctttcacgactataataataattatttccaaagcgcatgtaattaaagtagtgactatttaacctttattgtattaaatatttgagacaacattcttttcaagtattccatttaactcgaagaagtgaatgtataaagcgtc

SEQ ID NO: 112252 - DNA, 359 bp, Glycine max
ggaaaagtttattatttttaaagaagtttgattttacatgcccaactcctttgagtgacattgtattgtttgtaacttgactgttgcatttttattacatttgaatctgttatgcattgtgcatcatcatagtgtgagtaaagataatttttaagttagataaatttcttcagaggcaaaaactctcagttttaatctattatagagttgtcgtaatcgattacaagctgtttgaagcttaaaaagttaagtctcatatcgggtcaatcaattacaatagtattttaatcgattacactgttgtttgagacaatgactgatttttcaagagtctctgctttaatcgattaccaggtgga

SEQ ID NO: 112253 - DNA, 414 bp, Glycine max
  unsure (1)..(414): unsure at all n locations
tgactaggcgagtngattttagccttagtttcactttagttattagtcaattcgattaagaatgagaaatcccaaagagaaaaacgtccgattgatttttcgctttattctactaaaaggtattttttgattattatattattattttacctcttttttgatttccaacatggttacggcacgaccaaacggtcggaattcattttaacagaaattaacggatattacaaatcaaatgatcggtggaaatttattttattttttgattacgcgataaatgacttaaataaatgactgaagcacgtcaaaaggggtacggaaagtaaatgaaaacgagaataaaaatacatgaaacaaaatggggaccaccacgggtacatagaatgaattgaaaagctccgtttgaggtactta

SEQ ID NO: 112254 - DNA, 405 bp, Glycine max
  unsure (1)..(405): unsure at all n locations
tcatgatgatgaatcaagttgattcgagtggttntgtttatgactaagatgatgagacaaagtccaaagagtgatctcaagattgagtcaacaagttccagatcaagtttaatttcaatttcatgagaaagaaatcgcgaagattccgaaataagagaagtttgatttccagattcaagagaagatgaattcaagattcaagagaagaaatctagaagacttcacaagggaagtattgaaaagattnttcaaaaatcaaacatagcacaattttgcttttcaaaagagtctttctcgaaattttctaagttaccagagattttactctctggtaatcgattaccagtatcctgtgatcgattaccagtggcgaagtttgatttcaaaatttctcaactgaatttg

SEQ ID NO: 112255 - DNA, 423 bp, Glycine max
  unsure (1)..(423): unsure at all n locations
ttagtgactgtgtgaccacaaagtttatatagagtgtctgcttggatatgtnctatgaatggtcttgcatcaatttctaattgtcataacaatatgattcatggaagtgatctacgcattctttctttctaagcccatttgccaaacagttgtcccaaatatatgttattattgccatttgcaagccttttgagccagacgcttgatttttatcaaaacactaacctaggatgaaagtttcctaccttaccttaggataggagagcaggggtgttttcaagggagatttctatcatttttgtggctagtcatggattgtgaaggaaattagatatttatcaagaaaggaaaaaacagaaaaaaataatccaaaatggaaaagagccaataacgaaaatagaaaagaataaaaaagttctttgg

SEQ ID NO: 112256 - DNA, 335 bp, Glycine max
ccaaagtctccatcaccacccatccattcccaacctgagaaaaatgagaggctgagcatgggtaaagagaatgcactattgatacccgttacggaccaccatggatgatattaactttgttggggcagaaaataattcttacgatcaatatcccaacaatctcaatcaaggacaaggcttcaggaaagctaagggatgtataggccttaaaccatgcaaaaccaaaggcctatacaagagaaaagaaaacctactcttcaagagaccatgcttcaatatatggcccaaaatgatcagaaaatgaagctggtggagtctcaactcaccaacataca

SEQ ID NO: 112257 - DNA, 392 bp, Glycine max
  unsure (1)..(392): unsure at all n locations
ctcgcccaggcaagctcagctcgcccattcttatcaggtttgcttcctccanaaagcaacaagcccttctgggaggaattcttctggaaggccccaactggcctggttgctatttacacccccatttttactaaatacacccgcctgcctttttttcgcgattctttctttcctaaaagttacggaaacttacgaactttcgtaacgatacttattttctttccgtaatgatacggaaccttgtggattacataatcatcccctttttgacttacggaatgttacggaacctcactaattgtgcaacgatgcttccatttgatttccggtgtgtcacgggaacctaccgattgtgcatcaatattttctttgttttcacgcacgtcccggaa

SEQ ID NO: 112258 - DNA, 388 bp, Glycine max
  unsure (1)..(388): unsure at all n locations
agcattangcgatcgactntgatatctgttttgtaaaacaagtcacatacgttaactaaaagatcccacaaatcactatgttctttaaagtagaaaatcctttctcaatatacgtggtaagctttctttatgttaggctgacattgaattggtgctcatagaatattaattagaatattttaaaaaaattatgatataaatcacatgacattgtagaaaaaattatgatcaacataatttttcatctttcaataaaaatatttagactttaattttttgaatcgatatccttaaaataataattgtgatttgtattttaataaaaagataggtgcagtagttggattttgtttgtcgccataaggatggaaatgttatacagtatatg

SEQ ID NO: 112259 - DNA, 429 bp, Glycine max
  unsure (1)..(429): unsure at all n locations
atatactaagctagcggaaggaatgttgctgggtatccttggtctactgctagaggacaagcatnaaccgaattgttatttgtaatattccctaacacaattgcaattctattagtaaggatttgcaatataaataatcatgtaataaccaacaatgaaatgaatgagaaatacttcactttccttctctaattttctataggaggttctggaccctcgaagttcagcttcagtgttgctaataaagaacaagccattgacaaagcagtacaaattgaataaatgaaaatagggcatttcaattaatgatcaagacaccatccagaccctatagtgttgcaccttctgtattaaccttttgtcttgccataccaagtcaaagtttaaattaacttagcataaaatataaaagaaaagctagataaaatg

SEQ ID NO: 112260 - DNA, 371 bp, Glycine max
agcttcctagtggctactttgaatatcttctcaagaggcttctttgagaagctagatccttatctatccacactcctctattaactaaattaacttccttaaaaataattacggatgaaatcacgtaacaaataatcaaacatcaaacataattactaataatatatagatatatatatcagggtattacatgttagaatctgcatggagtttccgtttttaatatcaaacgtctcgatatattacgggactcaatcggacatatgagtaaaaggttattgccatctgaattggcacggaattttcagttttaatttgggtgactcgatatatgaagggactcaatcggacatccgtgtaaataattattg

SEQ ID NO: 112261 - DNA, 342 bp, Glycine max
cctacatataagaaacagagccactctccccatataaacactcatattcctacatcattggggcatttcaccgagcacttggggagcgcatgtttggacataaattgcaagaggatggggacaaagtggcatgccccattgcttcagaatacagcatatgcctgaggccttctcaatcaaatcctcaattcaaagaaatcaagcataaagacaacccaaaactaccccacaaatataagcacattctcacaatttggagcaccaaaagatgaagaaaatatacgcaggggaaagctagaacatcaaggattgaatacttaccggtgggagtggattataaca

SEQ ID NO: 112262 - DNA, 406 bp, Glycine max
  unsure (1)..(406): unsure at all n locations
agcctngccagagactggctaaggatcttttggctcacagaatagacagttaagccttcgtgcgcatacacgatggatactttctcgaccaataactcaataaaaagaaacggcagactgcagtgcgaaagatggtgttccggcaaccacgcctagatgaatactccttcgaagaactgggtctaccaccataagtaatagttggggggtccatggaaactcaggaaactccaattatgaaatacgacggagagctcctttcatggccgaaatggtactgggagaggacagagcaagccaaccaccctcttatactcatattgggcatgctgacaatcaacacaagaggcaacaaatatctcaacatcatttcagattccagaccacatgaagctctcgtgaatac

SEQ ID NO: 112263 - DNA, 438 bp, Glycine max
  unsure (1)..(438): unsure at all n locations
ctatanaatctccgcttcccacaaacacagagagaggagagngttgattcttgttttctttctccaaactcaacgacacatcaacaaagtcattagagccctcagtaaccctgaccttatcctcaccttcaacaaccctcttcactccattatccaaaatgaggttccccacaaaaacattcactttatccaccaaactcatgcacctctttctcacaccttgcaaattcaacctacacaaaagtgggaagtggtgactntagttaagcactctaagcaaatcatacctttcactcactaactgctgaagctcacaccatcaccccctaaccctcgccaagcgcagtactcttcacgaacatgttcttcatcatgtaatcaatgacccaagatgcaacaacttccttacctacacaacatgttctttaccaccatgcc

SEQ ID NO: 112264 - DNA, 373 bp, Glycine max
  unsure (1)..(373): unsure at all n locations
tgctttaacattgaagattgantactttatgagagctcaagcctaagtccctatcattacaccttctttcttaaccagtgatagatgtgggattgtgcataagacaagagaatgaactgttacgacaagttagctacaactatggatgagataaactttgttgggggaggaaataattcttacaatcaatactccaacaatttcaattaaggacaagcccttaggcataaccaagggatgtataggcatcaacccatgcaaaattagaggcctatacgagaggagaaacaacccatttttcaagagattgtgcttcaatatatgtgccaaaatgaccaaagaatgaagttgtggagtctcaattaacaacata

SEQ ID NO: 112265 - DNA, 412 bp, Glycine max
  unsure (1)..(412): unsure at all n locations
tggaaccttattcatcacaatcgttccagtctttcttttttcaccgtagctttggactccgacattgcaacacttggtgttctcctattctctgtcgttgataatccattcaaaggttgacgtcatgtccctcaaaacttatgatcatccgctaaaacctcttcttgcattcttttttcctgttactgcatgattttatcgtcgttactagttgcgatcgatgatctttttctcttaattatacttttgagatcatctggaaattataattatgcgattttaatattctcataactnttttttttctcaaaaaagaagaagctgtttgcaggataaatgttagcatttttgctttaaaacactatgttttgcttatatatttattatacagacgataattaccatgcagtcc

SEQ ID NO: 112266 - DNA, 259 bp, Glycine max
  unsure (1)..(259): unsure at all n locations
agcttatgcatgttgaagatattttttatggataaaggtcctattaccaaagagttctaagagattctgcccggtgtataactgcatcaaccaaagctcaaaggggaaagcattctnccgactcagaagataccgcgagtgatagagaaatcctacaggcgaaagaaacatacccaccaatttaatgtatacaactcctaatcacggtcattttcactgtcgaaaaggaggctactggaatatagaaagcaaaatccca

SEQ ID NO: 112267 - DNA, 412 bp, Glycine max
  unsure (1)..(412): unsure at all n locations
nccacaacccatgcgactcgaactccatatgttttctttggatgatgatagccaaggtctaggtttatgagcgaaaagcctttcctcatttcattaccattttttgccaaaccgttttagaaaaatatcattctaagacagttctcacgagaccgtcttagaaacctaccattttaagacgattttacacaataccttatatttacaaaattgtcaccggcttatatattaagatggttttgtgagaatcgccatcgaagatgcgtcataaaaaactatctttttagtagtaaattaaggactaacctgatgacatgttgcaaaagattggaaatgggaattaacggccgaaagtagtcattcaactatataagaagaaattcatacatgatttctcaactctaatcttctt

SEQ ID NO: 112268 - DNA, 347 bp, Glycine max
atcttagaaatagaaatgatattgattattaacgtgggtatgtataaaacattgaatagggttatggttgttgagaggcgcacagtgcctgagtgggtaacacgaacatgacgaccatacggagcctcactgtaactgggtaaatgcgttcatatgataggagattattcagggaacaagttacgtgatctgtagcttctgaatctattatccaggagcttgtaaaaggttgagacatacctgggttggatggtttatcaatggtgcatgatgacaatgaggcaacttggttggtatgctccgatgtctcgttttcggtcgatggccgttggattaaagcaagtcag

SEQ ID NO: 112269 - DNA, 418 bp, Glycine max
ttccattctctaggaagttcatcattggatttgatttcttctggaggatcttcattgcttcctttatcatttcctttggaatcttgttcacgaatattcatatgttctaaagaatctgcaatatcatctagcatattctttcttgacaggatagcattagattcatcaaaggtaacatgaatggattcctcgatattcatagttcttttattatatatcctatatgctttgctttgtaatgaatatccaagaaaaataccttcatcagattttgcatcgaattttcctagattatctttaccactattaagcacaaagcacttgcaaccaaaaacatgtagatgagaaatattaggttttctaccattatataactcatatggggttttcttaaaatgggtcttatcaggccctatca

SEQ ID NO: 112270 - DNA, 375 bp, Glycine max
catccgagtaagaagccgtcgtcgcttgatttggcttaacacgttcaaccattcaatttcgcagcgtgctccacatatttacgacacctgaattcggacatccggataaacaagtcatacgacctttgaattggctcgataggcttatacattacagctctcgagccgtcttgcatatatctacggagacttcaatgcagacatctcgaataacaacgatattgcacgtttgaacaggctcagaggttcgacattcaatttcgagcatctcgacatattacgggactcaatcagacatccagcaaaaaggtattgtcgatcgaatcggctcagagggttaacattcaattgtcagcgtctcgatatatcacggga

SEQ ID NO: 112271 - DNA, 336 bp, Glycine max
catccagctggaggcctgataaacagataaaactgtgaatacttggcaggagttcaagtcaaattagatctcgacatgaaacgaaccaaaaatagttgcaccttttgctccaacaatgtataatttgacatataacatcaccagcagagtcacctgttttcaaaaaggtagttttgttcccctaaccaagtcgacagagcatcatatgcagagtttgctctcccataaatctgttgaccaaaaacagctacatacgattaccaaaatcacatagaatgtatgtataatgggagcatattagtgagagcgtgagaggtgaggggagcaaatgcatat

SEQ ID NO: 112272 - DNA, 435 bp, Glycine max
  unsure (1)..(435): unsure at all n locations
ccttgatactcagcttgaacaatagaagagcttccgccattcctcgaaactctaaatgcccaatattgcacttgtcttcaaactcttccagagcttcccaaattgcttaaaactntaaatgtcaaagaatgcaaatcgcttcagagtctaccagagctttccccgtcgctagaaattctaaatgcaagagactgcgaatcattgatgactgtattgtttccttcaacggcggttgaacaattaaaggaaaataggaaacaggttatgttctggaattgcttgaacttggatgaacattctctagtggctattgggttgaatgcacaaatcaacatgatgaaattcgcaaaccaccacctatctacaccaaatcgtgagcatgttgaaaattacaatgattcttttcaagttgtttacatgtatccaggaagcagt

SEQ ID NO: 112273 - DNA, 281 bp, Glycine max
  unsure (1)..(281): unsure at all n locations
agctgaattagaggttcttttttttcngncccgaaggggaaatgacgttatgctcccaccagcctcctctaattttttttattggtgaaattgggcagttcttataggttcttaataaaaatgggaaattatgggaattactcaacagaaactcattaatttctaattacccccaaatattaatcgtagtttatactcatattatgtaagcaaacatttaatgaatgtatcacaatagctatttgtatgctttaataaaaaatcacctgaagttcgctcgt

SEQ ID NO: 112274 - DNA, 296 bp, Glycine max
tacttattagcttgagcttgattatagagatgattcatgctcaaacttaataagatggacattaaaagcttgtgtgtaacgcggtgttacgtacggctcgttctctgttctcatcttgactgaagaaaaacatggtgatgaaaatgcgtgaggacacatcagctgttttcattgtcagagataatattatctcaaatgaaccaaaaactgaaaacaatagaatcttgttttcagttgaaaccaggaacctcattttaggtaaaaggaaaacgttaatctaaaaagacatttccttt

SEQ ID NO: 112275 - DNA, 345 bp, Glycine max
gctaggattttcttatatgagagtaaaaggaagagtgggactgtgggagtgaaaggcatcctagttaagcacaagtgggaaaggaaaaagcaacccctcagcctaaacactcagcatatccctgtctctttcttctttcttttattgatgcagacttgctgtcaagtgatttcacatactgaatgttgattgatatcatctataaatatcagtgattgcagaaaatgtggatatttctaatacaccaccctgccatttcatctggttcccataaatgtggaataagccgcagtgtgtggaaacattcttgggcatgcactgtctgacctcacagtttggatcaat

SEQ ID NO: 112276 - DNA, 401 bp, Glycine max
  unsure (1)..(401): unsure at all n locations
gcttgtacctcatcactntcttccgttactctaacctcatcgtctctcacagtctttatatttgggagccaatccaatccttgtgttcggactctcagccacttatgatagccgccgatgatcccattactgcttcccctaagctctctgtcctttcttcacgccgcatcccatgccttgcgaactcctttgagtaccctcgcgttgtggtcaccgaaaccccgtgcgatgaaaggcgtgatgctttcatctgatggcactcctctcatggggtagccaagctgtcttatggcgaggacgagattataattaatacaaccccttgttccatcaaaggaacatttggacatccttcgcatgaagatagaatcctgattcttccttccttctagcgagggaac

SEQ ID NO: 112277 - DNA, 296 bp, Glycine max
cccaacaccactctttacatgtagaatctatccttgccacttacatagtctattgatccccatctatctttgctgcttaatacctacgtgggaccaaaaactatggatgaactcatgcatgtatgtgaggcttccaatcctcaagaaagctaaccaaaggtctccatattagatgattttggatgctgctttccaccgccttcaagggtatatccttctcccaatctttatcaaagatcaaaccctcttctagacatccaatctcaacaccgatggttttaggtgagatgatcacc

SEQ ID NO: 112278 - DNA, 419 bp, Glycine max
ataccctgatgaggatgtcccatatgttcttaagactggactgattcatttgcttccaaagtttcatggccttgcaggtgaagacccgcacaaacatttgaaagaatttcacattgtctgctccaccatgaaacccccagatgtccaagagaatcacatatttctgaaggcttttcctcattcattagagggagtggcaaaggactggctgtattaccttgctccaaggtccatcacgagctgggatgaccttaagagagtattcttacaaacatttttccctgcttccaggaccacagtcatcaggaaagatatctcaggtattagacaactcagtggagagagcctgtatgagtactgggagagattaagatactatgtgccagttgccctcaccatcagatttcagaacagcttct

SEQ ID NO: 112279 - DNA, 395 bp, Glycine max
gcagcatgcaagccatgagagagcgaccggctttttttcaataaaaaccatattataaagggcattaacttcaaacaacaaccaacagacaacgcgcatgagttaaaaatgtaacaaattacggatctgtcctcccactacacgcaataagaatgaacattaaagcattcatcaactacctaaaaatacaaataaaactaaaacacaaacgcgaagaaattatgtgaaaaaaaaaaatattaaaaacaacaaaccactcccctagactacttaataattgaaagaaaaacataacttcggaggatacgataataaatcaaaagcacgtcatcagaagtccaaaattagaatatatctataaaatatgcaataaaaaacaatgaatatctcattaa

SEQ ID NO: 112280 - DNA, 341 bp, Glycine max
  unsure (1)..(341): unsure at all n locations
agctactagcttaagtgggctnatttttttttttaatncctntgataagccccttatgagcctatgttccacctttctttcgttcataacgcctatctacaagtcctttaatatgataaaactcttgattnntcaccttaccctctaagcgaatatttggagctattgtatattgtcatagggatataacgtgtggggtgagtatgttacaatcggaagatatgatttttggccatgcattgatatatatatctattgcctagtgcttgctctaatcttcagattccgtctgtttaaatcaaaatattgtaaatgaatagaacattctattgctgcaaatt

SEQ ID NO: 112281 - DNA, 416 bp, Glycine max
tcttatgttgctccacctatctctaataataactttgcatgtgaagcacaaaaaggagagtgtggcgtgagaagctatagagagagacagtgaatggtggtgatgaagaaaaggtttgggttaaaggtggatgtaagaggagacgaataaagtaaggggtttaaaggaaatgggagggggtgggagaataaaaaaatctggtggtgtgaaagaaaggaaataagtgtgaatagacctcccctaaattagaccaacctaatataattcataaatattttaatctataatgaattaacttgaatgtgctaaattgatcaaaattaacaactctaaattgtggcaaagattatttatggatttacctaaaatttcataattctaaaagtgcctaataaatttaaaacatgtgatgaaca
